(19) United States
(12) Patent Application Publication
(10) Pub. No.: US 2014/0199313 A1
(43) Pub. Date: Jul. 17, 2014

(54) Process for the Production of Fine Chemicals

(71) Applicants: Gunnar Plesch, Potsdam (DE); Piotr Puzio, Berlin (DE); Astrid Blau, Stahnsdorf (DE); Ralf Looser, Berlin (DE); Birgit Wendel, Berlin (DE); Beate Kamlage, Berlin (DE); Micheal Manfred Herold, Berlin (DE); Florian Schauwecker, Berlin (DE)

(72) Inventors: Gunnar Plesch, Potsdam (DE); Piotr Puzio, Berlin (DE); Astrid Blau, Stahnsdorf (DE); Ralf Looser, Berlin (DE); Birgit Wendel, Berlin (DE); Beate Kamlage, Berlin (DE); Micheal Manfred Herold, Berlin (DE); Florian Schauwecker, Berlin (DE)

(73) Assignee: Metanomics GmbH, Berlin (DE)

(21) Appl. No.: 11/885,489

(22) PCT Filed: Feb. 28, 2006
(86) PCT No.: PCT/EP2006/060588

§ 371 Date: Aug. 31, 2007

(30) Foreign Application Priority Data
Mar. 2, 2005 (EP) 05101600.4
May 17, 2005 (EP) 05104101.0
May 23, 2005 (EP) 05104335.4
May 23, 2005 (EP) 05104336.2
May 23, 2005 (EP) 05104351.1
Oct. 14, 2005 (EP) 05109592.5
Nov. 7, 2005 (EP) 05110433.9
Nov. 8, 2005 (EP) 05110441.2
Nov. 17, 2005 (EP) 05111170.6
Dec. 1, 2005 (EP) 05111910.5
Dec. 12, 2005 (EP) 05112039.2
Dec. 15, 2005 (EP) 05112431.1
Dec. 22, 2005 (EP) 05113027.6
Feb. 7, 2006 (EP) 06101589.7
Feb. 14, 2006 (EP) 06110211.7
Feb. 16, 2006 (EP) 06110005.3
Feb. 17, 2006 (EP) 06110968.2
Feb. 21, 2006 (EP) 06110215.8
Feb. 22, 2006 (EP) 06110289.3
Feb. 23, 2006 (EP) 06110327.1
Feb. 23, 2006 (EP) 206110325.5
Feb. 24, 2006 (EP) 06110367.7
Feb. 24, 2006 (EP) 06110378.4
Feb. 24, 2006 (EP) 06110383.4
Feb. 24, 2006 (EP) 06110418.8
Feb. 24, 2006 (EP) 06110423.8
Feb. 24, 2006 (EP) 06110425.3
Feb. 24, 2006 (EP) 06110426.1
Feb. 24, 2006 (EP) 06110959.1
Feb. 28, 2006 (EP) 06110579.7

(51) Int. Cl. A61K 39/395; C12N 15/63; C12N 5/10; C12N 1/00; C12N 15/74; C07K 16/16; A01H 5/00; A61K 31/7088; A61K 38/16; A01H 1/00; C07H 21/00; C07K 14/415

(52) U.S. Cl. 424/139.1; 536/23.1; 435/320.1; 435/419; 435/243; 530/370; 530/387.9; 800/298; 435/29; 514/44 R; 800/278; 435/471

(57) ABSTRACT

The present invention relates to a process for the production of the fine chemical in a microorganism, a plant cell, a plant, a plant tissue or in one or more parts thereof, preferably in plastids. The invention furthermore relates to nucleic acid molecules, polypeptides, nucleic acid constructs, vectors, antibodies, host cells, plant tissue, propagation material, harvested material, plants, microorganisms as well as agricultural compositions and to their use.

[0001] The present invention relates to a process for the production of the fine chemical in a microorganism, a plant cell, a plant, a plant tissue or in one or more parts thereof, preferably in plastids. The invention furthermore relates to nucleic acid molecules, polypeptides, nucleic acid constructs, vectors, antibodies, host cells, plant tissue, propagation material, harvested material, plants, microorganisms as well as agricultural compositions and to their use.

[0002] Amino acids are used in many branches of industry, including the food, animal feed, cosmetics, pharmaceutical and chemical industries. Amino acids such as D,L-methionine, L-lysine or L-threonine are used in the animal feed industry. The essential amino acids valine, leucine, isoleucine, lysine, threonine, methionine, tyrosine, phenylalanine and tryptophan are particularly important for the nutrition of humans and a number of livestock species. Glycine, L-methionine and tryptophan are all used in the pharmaceutical industry. Glutamine, valine, leucine, isoleucine, histidine, arginine, proline, serine and alanine are used in the pharmaceutical and cosmetics industries. Threonine, tryptophan and D,L-methionine are widely used feed additives (Leuchtenberger, W. (1996) Amino acids—technical production and use, pp. 466-502 in Rehm et al., (Ed.) Biotechnology vol. 6, chapter 14a, VCH Weinheim). Moreover, amino acids are suitable for the chemical industry as precursors for the synthesis of synthetic amino acids and proteins, such as N-acetylcysteine, S-carboxymethyl-L-cysteine, (S)-5-hydroxytryptophan and other substances described in Ullmann's Encyclopedia of Industrial Chemistry, vol. A2, pp. 57-97, VCH Weinheim, 1985.

[0003] Over one million tonnes of amino acids are currently produced annually; their market value amounts to over 2.5 billion US dollars. They are currently produced by four competing processes: Extraction from protein hydrolysates, for example L-cystine, L-leucine or L-tyrosine, chemical synthesis, for example of D,L-methionine, conversion of chemical precursors in an enzyme or cell reactor, for example L-phenylalanine, and fermentative production by growing, on an industrial scale, bacteria which have been developed to produce and secrete large amounts of the desired molecule in question. An organism, which is particularly suitable for this purpose is Corynebacterium glutamicum, which is used for example for the production of L-lysine or L-glutamic acid. Other amino acids which are produced by fermentation are, for example, L-threonine, L-tryptophan, L-aspartic acid and L-phenylalanine.

[0004] The biosynthesis of the natural amino acids in organisms capable of producing them, for example bacteria, has been characterized thoroughly; for a review of the bacterial amino acid biosynthesis and its regulation, see Umbarger, H. E. (1978) Ann. Rev. Biochem. 47: 533-606].

[0005] It is known that amino acids are produced by fermentation of strains of coryneform bacteria, in particular Corynebacterium glutamicum. Due to their great importance, the production processes are constantly being improved. Process improvements can relate to measures regarding technical aspects of the fermentation, such as, for example, stirring and oxygen supply, or the nutrient media composition, such as, for example, the sugar concentration during fermentation, or to the work-up to give the product, for example by ion exchange chromatography, or to the intrinsic performance properties of the microorganism itself. Bacteria from other genera such as Escherichia or Bacillus are also used for the production of amino acids. A number of mutant strains, which produce an assortment of desirable compounds from the group of the sulfur-containing fine chemicals, have been developed via strain selection. The performance properties of said microorganisms are improved with respect to the production of a particular molecule by applying methods of mutagenesis, selection and mutant selection. Methods for the production of methionine have also been developed. In this manner, strains are obtained which are, for example, resistant to antimetabolites, such as, for example, the methionine analogues α-methylmethionine, ethionine, norleucine, N-acetylnorleucine, S-trifluoromethylhomocysteine, 2-amino-5-heprenoitic acid, selenomethionine, methionine sulfoximine, methoxine, 1-aminocyclopentanecarboxylic acid or which are auxotrophic for metabolites with regulatory importance and which produce sulfur-containing fine chemicals such as, for example, L-methionine. However, such processes developed for the production of methionine have the disadvantage that their yields are too low for being economically exploitable and that they are therefore not yet competitive with regard to chemical synthesis.

[0006] Zeh (Plant Physiol., Vol. 127, 2001: 792-802) describes increasing the methionine content in potato plants by inhibiting threonine synthase by what is known as antisense technology. This leads to a reduced threonine synthase activity without the threonine content in the plant being reduced. This technology is highly complex; the enzymatic activity must be inhibited in a very differentiated manner since otherwise auxotrophism for the amino acid occurs and the plant will no longer grow.

[0007] U.S. Pat. No. 5,589,616 teaches the production of higher amounts of amino acids in plants by overexpressing a monocot storage protein in dicots. WO 96/38574, WO 97/07665, WO 97/28247, U.S. Pat. No. 4,886,878, U.S. Pat. No. 5,082,993 and U.S. Pat. No. 5,670,635 are following this approach. That means in all the aforementioned intellectual property rights different proteins or polypeptides are expressed in plants. Said proteins or polypeptides should function as amino acid sinks. Other methods for increasing amino acids such as lysine are disclosed in WO 95/15392, WO 96/38574, WO 89/11789 or WO 93/19190. In this cases speziell enzymes in the amino acid biosynthetic pathway such as the diphydrodipicolinic acid synthase are deregulated. This leads to an increase in the production of lysine in the different plants. Another approach to increase the level of amino acids in plants is disclosed in EP-A-0 271 408. EP-A-0 271 408 teaches the mutagenesis of plant and selection afterwards with inhibitors of certain enzymes of amino acid biosynthetic pathway.

[0008] Methods of recombinant DNA technology have also been used for some years to improve Corynebacterium strains producing L-amino acids by amplifying individual amino acid biosynthesis genes and investigating the effect on amino acid production.

[0009] As described above, the essential amino acids are necessary for humans and many mammals, for example for livestock. L-methionine is important as methyl group donor for the biosynthesis of, for example, choline, creatine, adrenaline, bases and RNA and DNA, histidine, and for the transmethylation following the formation of S-adenosylmethionine or as a sulfhydryl group donor for the formation of cysteine. Moreover, L-methionine appears to have a positive effect in depression.

[0010] Improving the quality of foodstuffs and animal feeds is an important task of the food-and-feed industry. This is necessary since, for example, certain amino acids, which occur in plants are limited with regard to the supply of mammals. Especially advantageous for the quality of foodstuffs and animal feeds is as balanced as possible an amino acid profile since a great excess of an amino acid above a specific concentration in the food has no further positive effect on the utilization of the food since other amino acids suddenly become limiting. A further increase in quality is only possible via addition of further amino acids, which are limiting under these conditions. The targeted addition of the limiting amino acid in the form of synthetic products must be carried out with extreme caution in order to avoid amino acid imbalance. For example, the addition of an essential amino acid stimulates protein digestion, which may cause deficiency situations for the second or third limiting amino acid, in particular. In feeding experiments, for example casein feeding experiments, the additional provision of methionine, which is limiting in casein, has revealed the fatty degeneration of liver, which could only be alleviated after the additional provision of tryptophan.

[0011] To ensure a high quality of foods and animal feeds, it is therefore necessary to add a plurality of amino acids in a balanced manner to suit the organism. Accordingly, there is still a great demand for new and more suitable genes, which encode enzymes or regulators, which participate in the biosynthesis of amino acids and make it possible to produce certain amino acids specifically on an industrial scale without unwanted byproducts forming. In the selection of genes for biosynthesis or regulation two characteristics above all are particularly important. On the one hand, there is as ever a need for improved processes for obtaining the highest possible contents of amino acids on the other hand as less as possible byproducts should be produced in the production process.

[0012] It is an object of the present invention to develop an inexpensive process for the synthesis of L-methionine. L-Methionine is with Lysin or threonine (depending on the organism) one of the two amino acids, which are most frequently limiting.

[0013] It was now found that this object is achieved by providing the process according to the invention described herein and the embodiments characterized in the claims.

[0014] Accordingly, in a first embodiment, the invention relates to a process for the production of a fine chemical, whereby the fine chemical is methionine. Accordingly, in the present invention, the term “the fine chemical” as used herein relates to “methione”. Further, the term “the fine chemicals” as used herein also relates to fine chemicals comprising methionine.

[0015] In one embodiment, the term “the fine chemical” means L-methionine. Throughout the specification the term “the fine chemical” means L-methionine, its salts, ester or amides in free form or bound to proteins. In a preferred embodiment, the term “the fine chemical” means L-methionine in free form or its salts or bound to proteins.

[0016] Accordingly, the present invention relates to a process for the production of methionine, which comprises
[0017] (a) increasing or generating the activity of a protein as shown in table II, application no. 1, column 3 encoded by the nucleic acid sequences as shown in table I, application no. 1, column 5, in an organelle of a microorganism or plant, or
[0018] (b) increasing or generating the activity of a protein as shown in table II, application no. 1, column 3 encoded by the nucleic acid sequences as shown in table I, application no. 1, column 5 in the plastid of a microorganism or plant, or in one or more parts thereof; and
[0019] (b) growing the organism under conditions which permit the production of the fine chemical, thus, methionine or fine chemicals comprising methionine, in said organism or in the culture medium surrounding the organism.

[0020] In another embodiment the present invention is related to a process for the production of methionine, which comprises
[0021] (a) increasing or generating the activity of a protein as shown in table II, application no. 1, column 3 encoded by the nucleic acid sequences as shown in table I, application no. 1, column 5, in an organelle of a non-human organism, or
[0022] (b) increasing or generating the activity of a protein as shown in table II, application no. 1, column 3 encoded by the nucleic acid sequences as shown in table I, application no. 1, column 5, which are joined to a nucleic acid sequence encoding a transit peptide in a non-human organism, or in one or more parts thereof; or
[0023] (c) increasing or generating the activity of a protein as shown in table II, application no. 1, column 3 encoded by the nucleic acid sequences as shown in table I, application no. 1, column 5, which are joined to a nucleic acid sequence encoding chloroplast localization sequence, in a non-human organism, or in one or more parts thereof, and
[0024] (d) growing the organism under conditions which permit the production of methionine in said organism.

[0025] In another embodiment, the present invention relates to a process for the production of methionine, which comprises
[0026] (a) increasing or generating the activity of a protein as shown in table II, application no. 1, column 3 encoded by the nucleic acid sequences as shown in table I, application no. 1, column 5, in an organelle of a microorganism or plant through the transformation of the organelle, or
[0027] (b) increasing or generating the activity of a protein as shown in table II, application no. 1, column 3 encoded by the nucleic acid sequences as shown in table I, application no. 1, column 5 in the plastid of a microorganism or plant, or in one or more parts thereof through the transformation of the plastids; and
[0028] (c) growing the organism under conditions which permit the production of the fine chemical, thus, methionine or fine chemicals comprising methionine, in said organism or in the culture medium surrounding the organism.

[0029] Advantageously the activity of the protein as shown in table II, application no. 1, column 3 encoded by the nucleic acid sequences as shown in table I, application no. 1, column 5 is increased or generated in the abovementioned process in the plastid of a microorganism or plant.

[0030] In principle the nucleic acid sequence encoding a transit peptide can be isolated from every organism such as microorganisms such as algae or plants containing plastids preferably chloroplasts. A “transit peptide” is an amino acid sequence, whose encoding nucleic acid sequence is translated together with the corresponding structural gene. That means the transit peptide is an integral part of the translated protein and forms an amino terminal extension of the protein. Both are translated as so called “preprotein”. In general the transit peptide is cleaved off from the preprotein during or just after import of the protein into the correct cell organelle such as a plastid to yield the mature protein. The transit peptide ensures correct localization of the mature protein by facilitating the transport of proteins through intracellular membranes. Preferred nucleic acid sequences encoding a transit peptide are derived from a nucleic acid sequence encoding a protein finally resided in the plastid and stemming from an organism selected from the group consisting of the genera

[0031] Acetabularia, Arabidopsis, Brassica, Capsicum, Chlamydomonas, Cururbita, Dunaliella, Euglena, Flaveria, Glycine, Helianthus, Hordeum, Lemna, Lolium, Lycopersion, Malus, Medicago, Mesembryanthemum, Nicotiana, Oenotherea, Oryza, Petunia, Phaseolus, Physcomitrella, Pinus, Pisum, Raphanus, Silene, Sinapis, Solanum, Spinacea, Stevia, Synechococcus, Triticum and Zea.

[0032] Advantageously such transit peptides, which are beneficially used in the inventive process, are derived from the nucleic acid sequence encoding a protein selected from the group consisting of

[0033] ribulose bisphosphate carboxylase/oxygenase, 5-enolpyruvyl-shikimate-3-phosphate synthase, acetolactate synthase, chloroplast ribosomal protein CS17, Cs protein, ferredoxin, plastocyanin, ribulose bisphosphate carboxylase activase, tryptophan synthase, acyl carrier protein, plastid chaperonin-60, cytochrome c₅₅₂, 22-kDA heat shock protein, 33-kDa Oxygen-evolving enhancer protein 1, ATP synthase γ subunit, ATP synthase δ subunit, chlorophyll-a/b-binding proteinII-1, Oxygen-evolving enhancer protein 2, Oxygen-evolving enhancer protein 3, photosystem I: P21, photosystem I: P28, photosystem I: P30, photosystem I: P35, photosystem I: P37, glycerol-3-phosphate acyltransferases, chlorophyll a/b binding protein, CAB2 protein, hydroxymethyl-bilane synthase, pyruvate-orthophosphate dikinase, CAB3 protein, plastid ferritin, ferritin, early light-inducible protein, glutamate-1-semialdehyde aminotransferase, protochlorophyllide reductase, starch-granule-bound amylase synthase, light-harvesting chlorophyll a/b-binding protein of photosystem II, major pollen allergen Lol p 5a, plastid CIpB ATP-dependent protease, superoxide dismutase, ferredoxin NADP oxidoreductase, 28-kDa ribonucleoprotein, 31-kDa ribonucleoprotein, 33-kDa ribonucleoprotein, acetolactate synthase, ATP synthase CF₀ subunit 1, ATP synthase CF₀ subunit 2, ATP synthase CF₀ subunit 3, ATP synthase CF₀ subunit 4, cytochrome f, ADP-glucose pyrophosphorylase, glutamine synthase, glutamine synthase 2, carbonic anhydrase, GapA protein, heat-shock-protein hsp21, phosphate translocator, plastid ClpA ATP-dependent protease, plastid ribosomal protein CL24, plastid ribosomal protein CL9, plastid ribosomal protein PsCL18, plastid ribosomal protein PsCL25, DAHP synthase, starch phosphorylase, root acyl carrier protein II, betaine-aldehyde dehydrogenase, GapB protein, glutamine synthetase 2, phosphoribulokinase, nitrite reductase, ribosomal protein L12, ribosomal protein L13, ribosomal protein L21, ribosomal protein L35, ribosomal protein L40, triose phosphate-3-phosphoglycerate-phosphate translocator, ferredoxin-dependent glutamate synthase, glyceraldehyde-3-phosphate dehydrogenase, NADP-dependent malic enzyme and NADP-malate dehydrogenase.

[0034] More preferred the nucleic acid sequence encoding a transit peptide is derived from a nucleic acid sequence encoding a protein finally resided in the plastid and stemming from an organism selected from the group consisting of the species:

[0035] Acetabularia mediterranea, Arabidopsis thaliana, Brassica campestris, Brassica napus, Capsicum annuum, Chlamydomonas reinhardtii, Cururbita moschata, Dunaliella salina, Dunaliella tertiolecta, Euglena gracilis, Flaveria trinervia, Glycine max, Helianthus annuus, Hordeum vulgare, Lemna gibba, Lolium perenne, Lycopersion esculentum, Malus domestica, Medicago falcata, Medicago sativa, Mesembryanthemum crystallinum, Nicotiana plumbaginifolia, Nicotiana sylvestris, Nicotiana tabacum, Oenotherea hookeri, Oryza sativa, Petunia hybrida, Phaseolus vulgaris, Physcomitrella patens, Pinus tunbergii, Pisum sativum, Raphanus sativus, Silene pratensis, Sinapis alba, Solanum tuberosum, Spinacea oleracea, Stevia rebaudiana, Synechococcus, Synechocystis, Triticum aestivum and Zea mays.

[0036] Even more preferred nucleic acid sequences are encoding transit peptides as disclosed by von Heijne et al. [Plant Molecular Biology Reporter, Vol. 9 (2), 1991: 104-126], which are hereby incorporated by reference. Table V shows some examples of the transit peptide sequences disclosed by von Heijne et al. According to the disclosure of the invention especially in the examples the skilled worker is able to link other nucleic acid sequences disclosed by von Heijne et al. to the nucleic acid sequences shown in table I, application no. 1, columns 5 and 7. Most preferred nucleic acid sequences encoding transit peptides are derived from the genus Spinacia such as chloroplast 30S ribosomal protein PSrp-1, root acyl carrier protein II, acyl carrier protein, ATP synthase: γ subunit, ATP synthase: δ subunit, cytochrom f, ferredoxin I, ferredoxin NADP oxidoreductase (=FNR), nitrite reductase, phosphoribulokinase, plastocyanin or carbonic anhydrase. The skilled worker will recognize that various other nucleic acid sequences encoding transit peptides can easily isolated from plastid-localized proteins, which are expressed from nuclear genes as precursors and are then targeted to plastids. Such transit peptides encoding sequences can be used for the construction of other expression constructs. The transit peptides advantageously used in the inventive process and which are part of the inventive nucleic acid sequences and proteins are typically 20 to 120 amino acids, preferably 25 to 110, 30 to 100 or 35 to 90 amino acids, more preferably 40 to 85 amino acids and most preferably 45 to 80 amino acids in length and functions post-translationally to direct the protein to the plastid preferably to the chloroplast. The nucleic acid sequences encoding such transit peptides are localized upstream of nucleic acid sequence encoding the mature protein. For the correct molecular joining of the transit peptide encoding nucleic acid and the nucleic acid encoding the protein to be targeted it is sometimes necessary to introduce additional base pairs at the joining position, which forms restriction enzyme recognition sequences useful for the molecular joining of the different nucleic acid molecules. This procedure might lead to very few additional amino acids at the N-terminal of the mature imported protein, which usually and preferably do not interfere with the protein function. In any case, the additional base pairs at the joining position which forms restriction enzyme recognition sequences have to be chosen with care, in order to avoid the formation of stop codons or codons which encode amino acids with a strong influence on protein folding, like e.g. proline. It is preferred that such additional codons encode small n.d. structural flexible amino acids such as glycine or alanine.

[0037] As mentioned above the nucleic acid sequences coding for the proteins as shown in table II, application no. 1, column 3 and its homologs as disclosed in table I, application no. 1, columns 5 and 7 are joined to a nucleic acid sequence encoding a transit peptide, This nucleic acid sequence encoding a transit peptide ensures transport of the protein to the plastid. The nucleic acid sequence of the gene to be expressed and the nucleic acid sequence encoding the transit peptide are operably linked. Therefore the transit peptide is fused in frame to the nucleic acid sequence coding for proteins as shown in table II, application no. 1, column 3 and its homologs as disclosed in table I, application no. 1, columns 5 and 7.

[0038] The term “organelle” according to the invention shall mean for example “mitochondria” or preferably “plastid” (throughout the specification the “plural” shall comprise the “singular” and vice versa). The term “plastid” according to the invention are intended to include various forms of plastids including proplastids, chloroplasts, chromoplasts, gerontoplasts, leucoplasts, amyloplasts, elaioplasts and etioplasts preferably chloroplasts. They all have as a common ancestor the aforementioned proplasts.

[0039] Other transit peptides are disclosed by Schmidt et al. [J. Biol. Chem., Vol. 268, No. 36, 1993: 27447-27457], Della-Cioppa et al. [Plant. Physiol. 84, 1987: 965-968], de Castro Silva Filho et al. [Plant Mol. Biol., 30, 1996: 769-780], Zhao et al. [J. Biol. Chem. Vol. 270, No. 11, 1995: 6081-6087], Römer et al. [Biochem. Biophys. Res. Commun., Vol. 196, No. 3, 1993: 1414-1421], Keegstra et al. [Annu. Rev. Plant Physiol. Plant Mol. Biol., 40, 1989: 471-501], Lubben et al. [Photosynthesis Res., 17, 1988: 173-194] and Lawrence et al. [J. Biol. Chem., Vol. 272, No. 33, 1997: 20357-20363]. A general review about targeting is disclosed by Kermode Allison. R. in Critical Reviews in Plant Science 15 (4): 285-423 (1996) under the title “Mechanisms of Intracellular Protein Transport and Targeting in Plant Cells.”

[0040] Favored transit peptide sequences, which are used in the inventive process and which forms part of the inventive nucleic acid sequences are generally enriched in hydroxylated amino acid residues (serine and threonine), with these two residues generally constituting 20-35% of the total. They often have an amino-terminal region empty of Gly, Pro, and charged residues. Furthermore they have a number of small hydrophobic amino acids such as valine and alanine and generally acidic amino acids are lacking. In addition they generally have a middle region rich in Ser, Thr, Lys and Arg. Overall they have very often a net positive charge.

[0041] Alternatively, nucleic acid sequences coding for the transit peptides may be chemically synthesized either in part or wholly according to structure of transit peptide sequences disclosed in the prior art. Said natural or chemically synthesized sequences can be directly linked to the sequences encoding the mature protein or via a linker nucleic acid sequence, which may be typically less than 500 base pairs, preferably less than 450, 400, 350, 300, 250 or 200 base pairs, more preferably less than 150, 100, 90, 80, 70, 60, 50, 40 or 30 base pairs and most preferably less than 25, 20, 15, 12, 9, 6 or 3 base pairs in length and are in frame to the coding sequence. Furthermore favorable nucleic acid sequences encoding transit peptides may comprise sequences derived from more than one biological and/or chemical source and may include a nucleic acid sequence derived from the amino-terminal region of the mature protein, which in its native state is linked to the transit peptide. In a preferred embodiment of the invention said amino-terminal region of the mature protein is typically less than 150 amino acids, preferably less than 140, 130, 120, 110, 100 or 90 amino acids, more preferably less than 80, 70, 60, 50, 40, 35, 30, 25 or 20 amino acids and most preferably less than 19, 18, 17, 16, 15, 14, 13, 12, 11 or 10 amino acids in length. But even shorter or longer stretches are also possible. In addition target sequences, which facilitate the transport of proteins to other cell compartments such as the vacuole, endoplasmic reticulum, golgi complex, glyoxysomes, peroxisomes or mitochondria may be also part of the inventive nucleic acid sequence. The proteins translated from said inventive nucleic acid sequences are a kind of fusion proteins that means the nucleic acid sequences encoding the transit peptide for example the ones shown in table V, preferably the last one of the table are joint to the nucleic acid sequences shown in table I, application no. 1, columns 5 and 7. The person skilled in the art is able to join said sequences in a functional manner. Advantageously the transit peptide part is cleaved off from the protein part shown in table II, application no. 1, columns 5 and 7 during the transport preferably into the plastids. All products of the cleavage of the preferred transit peptide shown in the last line of table V have preferably the N-terminal amino acid sequences QIA CSS or QIA EFQLTT in front of the start methionine of the protein mentioned in table II, application no. 1, columns 5 and 7. Other short amino acid sequences of an range of 1 to 20 amino acids preferable 2 to 15 amino acids, more preferable 3 to 10 amino acids most preferably 4 to 8 amino acids are also possible in front of the start methionine of the protein mentioned in table II, application no. 1, columns 5 and 7. In case of the amino acid sequence QIA CSS the three amino acids in front of the start methionine are stemming from the LIC (=ligatation independent cloning) cassette. Said short amino acid sequence is preferred in the case of the expression of E. coli genes. In case of the amino acid sequence QIA EFQLTT the six amino acids in front of the start methionine are stemming from the LIC cassette. Said short amino acid sequence is preferred in the case of the expression of S. cerevisiae genes. The skilled worker knows that other short sequences are also useful in the expression of the genes mentioned in table I, application no. 1, columns 5 and 7. Furthermore the skilled worker is aware of the fact that there is not a need for such short sequences in the expression of the genes.

TABLE V
Examples of transit peptides disclosed by von Heijne et al.

| | | | SEQ | |
|---|---|---|---|---|
| Trans | | | ID | |
| Pep | Organism | Transit Peptide | NO: | Reference |
| 1 | Acetabularia | MASIMMNKSVVLSKECAKPLATPK | 14590 | Mol. Gen. |
| | mediterranea | VTLNKRGFATTIATKNREMMVWQP | | Genet. |
| | | FNNKMFETFSFLPP | | 218: 445- |
| | | | | 452 (1989) |
| 2 | Arabidopsis | MAASLQSTATFLQSAKIATAPSRG | 14601 | EMBO J. |
| | thaliana | SSHLRSTQAVGKSFGLETSSARLT | | 8: 3187- |
| | | CSFQSDFKDFTGKCSDAVKIAGFA | | 3194 (1989) |
| | | LATSALVVSGASAEGAPK | | |
| 3 | Arabidopsis | MAQVSRICNGVQNPSLICNLSKSS | 14602 | Mol. Gen. |
| | thaliana | QRKSPLSVSLKTQQHPRAYPISSS | | Genet. 210: |
| | | WGLKKSGMTLIGSELRPLKVMSSV | | 437-442 |
| | | STAEKASEIVLQPIREISGLIKLP | | (1987) |
| 4 | Arabidopsis | MAAATTTTTTSSSISFSTKPSPSS | 14603 | Plant |
| | thaliana | SKSPLPISRFSLPFSLNPNKSSSS | | Physiol. |
| | | SRRRGIKSSSP SS ISAVLNTTTNV | | 85: 1110- |
| | | TTTPSPTKPTKPETF ISRFAPDQP | | 1117 |
| | | RKGA | | (1987) |
| 5 | Arabidopsis | MITSSLTCSLQALKLSSPFAHGST | 14604 | J. Biol. |
| | thaliana | PLSSLSKPNSFPNHRMPALVPV | | Chem. |
| | | | | 2652763- |
| | | | | 2767 |
| | | | | (1990) |
| 6 | Arabidopsis | MASLLGTSSSAIWASPSLSSPSSK | 14605 | EMBO J. |
| | thaliana | PSSSPICFRPGKLFGSKLNAGIQI | | 9: 1337- |
| | | RPKKNRSRYHVSVMNVATEINSTE | | 1346 |
| | | QVVGKFDSKKSARPVYPFAAI | | (1990) |
| 7 | Arabidopsis | MASTALSSAIVGTSFIRRSPAPISL | 14606 | Plant |
| | thaliana | RSLPSANTQSLFGLKSGTARGG | | Physiol. 93: |
| | | RVVAM | | 572-577 |
| | | | | (1990) |
| 8 | Arabidopsis | MAASTMALSSPAFAGKAVNLSPAA | 14607 | Nucl. Acids |
| | thaliana | SEVLGSGRVTNRKTV | | Res. 14: |
| | | | | 4051- |
| | | | | 4064 |
| | | | | (1986) |
| 9 | Arabidopsis | MAAITSATVTIPSFTGLKLAVSSK | 14608 | Gene 65: |
| | thaliana | PKTLSTISRSSSATRAPPKLALKS | | 59-69 |
| | | SLKDFGVIAVATAASIVLAGNAMA | | (1988) |
| | | MEVLLGSDDGSLAFVPSEFT | | |
| 10 | Arabidopsis | MAAAVSTVGAINRAPLSLNGSGSG | 14591 | Nucl. Acids |
| | thaliana | AVSAPASTFLGKKVVTVSRFAQSN | | Res. 17: |
| | | KKSNGSFKVLAVKEDKQTDGDRWR | | 2871 |
| | | GLAYDTSDDQIDI | | (1989) |
| 11 | Arabidopsis | MkSSMLSSTAWTSPAQATMVAPF | 14592 | Plant Mol. |
| | thaliana | TGLKSSASFPVTRKANNDITSITS | | Biol. 11: |
| | | NGGRVSC | | 745-759 |
| | | | | (1988) |
| 12 | Arabidopsis | MAASGTSATFRASVSSAPSSSSQL | 14593 | Proc. Natl. |
| | thaliana | THLKSPFKAVKY TPLPS SRSKSSS | | Acad. Sci. |
| | | FSVSCTIAKDPPVLMAAGSDPALW | | USA, 86: |
| | | QRPDSFGRFGKFGGKYVPE | | 4604- |
| | | | | 4608 |
| | | | | (1989) |
| 13 | Brassica | MSTTFCSSVCMQATSLAATTRISF | 14594 | Nucl. Acids |
| | campestris | QKPALVSTTNLSFNLRRSIPTRFS | | Res. 15: |
| | | ISCAAKPETVEKVSKIVKKQLSLK | | 7197 |
| | | DDQKVVAE | | (1987) |
| 14 | Brassica | MATTFSASVSMQATSLATTTRISF | 14595 | Eur. J. |
| | napus | QKPVLVSNHGRTNLSFNLSRTRLSISC | | Biochem. |
| | | | | 174: 287- |
| | | | | 295 (1988) |
| 15 | Chlamydomonas | MQALSSRVNIAAKPQRAQRLVVRA | 14596 | Plant Mol. |
| | reinhardtii | EEVKAAPKKEVGPKRGSLVK | | Biol. 12: |
| | | | | 463-474 |
| | | | | (1989) |
| 16 | Cucurbita | MAELIQDKESAQSAATAAAASSGY | 14597 | FEBS Lett. |
| | moschata | ERRNEPAHSRKFLEVRSEEELLSCIKK | | 238: 424- |
| | | | | 430 (1988) |
| 17 | Spinacea | MSTINGCLTSISPSRTQLKNTSTL | 14598 | J. Biol. |
| | oleracea | RPTFIANSRVNPSSSVPPSLIRNQ | | Chem. 265: |
| | | PVFAAPAPIITPTL | | 105414- |
| | | | | 5417 |
| | | | | (1990) |
| 18 | Spinacea | MTTAVTAAVSFPSTKTTSLSARCS | 14599 | Curr. |
| | oleracea | SVISPDKISYKKVPLYYRNVSATG | | Genet. 13: |
| | | KMGPIRAQIASDVEAPPPAPAKVEKMS | | 517-522 |
| | | | | (1988) |
| 19 | Spinacea | MTTAVTAAVSFPSTKTTSLSARSS | 14600 | |
| | oleracea | SVISPDKISYKKVPLYYRNVSATG | | |
| | | KMGPIRA | | |

[0042] Alternatively to the targeting of the sequences shown in table II, application no. 1, columns 5 and 7 preferably of sequences in general encoded in the nucleus with the aid of the targeting sequences mentioned for example in table V alone or in combination with other targeting sequences preferably into the plastids, the nucleic acids of the invention can directly introduced into the plastidal genome. Therefore in a preferred embodiment the nucleic acid sequences shown in table I, application no. 1, columns 5 and 7 are directly introduced and expressed in plastids.

The term “introduced” in the context of this specification shall mean the insertion of a nucleic acid sequence into the organism by means of a “transfection”, “transduction” or preferably by “transformation”.
A plastid, such as a chloroplast, has been “transformed” by an exogenous (preferably foreign) nucleic acid sequence if nucleic acid sequence has been introduced into the plastid that means that this sequence has crossed the membrane or the membranes of the plastid. The foreign DNA may be integrated (covalently linked) into plastid DNA making up the genome of the plastid, or it may remain unintegrated (e.g., by including a chloroplast origin of replication). “Stably” integrated DNA sequences are those, which are inherited through plastid replication, thereby transferring new plastids, with the features of the integrated DNA sequence to the progeny.

[0043] For expression a person skilled in the art is familiar with different methods to introduce the nucleic acid sequences into different organelles such as the preferred plastids. Such methods are for example disclosed by Pal Maiga (Annu. Rev. Plant Biol., 2004, 55: 289-313), Thomas Evans (WO 2004/040973), Kevin E. McBride et al. (U.S. Pat. No. 5,455,818), Henry Daniell et al. (U.S. Pat. No. 5,932,479 and U.S. Pat. No. 5,693,507) and Jeffrey M. Straub et al. (U.S. Pat. No. 6,781,033). A preferred method is the transformation of microspore-derived hypocotyl or cotyledonary tissue (which are green and thus contain numerous plastids) leaf tissue and afterwards the regeneration of shoots from said transformed plant material on selective medium. As methods for the transformation bombarding of the plant material or the use of independently replicating shuttle vectors are well known by the skilled worker. But also a PEG-mediated transformation of the plastids or Agrobacterium transformation with binary vectors are possible. Useful markers for the transformation of plastids are positive selection markers for example the chloramphenicol-, streptomycin-, kanamycin-, neomycin-, amikamycin-, spectinomycin, triazine- and/or lincomycin-resistance genes. As additional markers named in the literature often as secondary markers, genes coding for the resistance against herbicides such as phosphinothricin (=glufosinate, BASTA™, Liberty™, encoded by the bar gene), glyphosate (=N-(phosphonomethyl)glycine, Roundup Ready™, encoded by the 5-enolpyruvylshikimaete-3-phosphate synthase gene=epsps), sulfonylurea (=Staple™, encoded by the acetolactate synthase gene), imidazolinone [=IMI, imazethapyr, imazamox, Clearfield™, encoded by the acetohydroxyacid synthase (AHAS) gene, also known as acetolactate synthase (ALS) gene] or bromoxynil (=Buctril™, encoded by the oxy gene) or genes coding for antibiotics such as hygromycin or G418 are useful for further selection. Such secondary markers are useful in the case when most genome copies are transformed. In addition negative selection markers such as the bacterial cytosine deaminase (encoded by the codA gene) are also useful for the transformation of plastids.

[0044] To increase the possibility of identification of transformants it is also desirable to use reporter genes other then the aforementioned resistance genes or in addition to said genes. Reporter genes are for example β-galactosidase-, β-glucuronidase-(GUS), alkaline phosphatase- and/or green-fluorescent protein-genes (GFP).

[0045] For the inventive process it is of great advantage that by transforming the plastids the intraspecies specific transgene flow is blocked, because a lot of species such as corn, cotton and rice have a strict maternal inheritance of plastids. By placing the genes specified in table I, application no. 1, columns 5 and 7 or active fragments thereof in the plastids of plants, these genes will not be present in the pollen of said plants.

A further preferred embodiment of the invention relates to the use of so called “chloroplast localization sequences”, in which a first RNA sequence or molecule is capable of transporting or “chaperoning” a second RNA sequence, such as a RNA sequence transcribed from the sequences depicted in table I, application no. 1, columns 5 and 7 or a sequence encoding a protein, as depicted in table II, application no. 1, columns 5 and 7, from an external environment inside a cell or outside a plastid into a chloroplast. In one embodiment the chloroplast localization signal is substantially similar or complementary to a complete or intact viroid sequence. The chloroplast localization signal may be encoded by a DNA sequence, which is transcribed into the chloroplast localization RNA. The term “viroid” refers to a naturally occurring single stranded RNA molecule (Flores, C R Acad Sci III. 2001 October; 324(10):943-52). Viroids usually contain about 200-500 nucleotides and generally exist as circular molecules. Examples of viroids that contain chloroplast localization signals include but are not limited to ASBVd, PLMVd, CChMVd and ELVd. The viroid sequence or a functional part of it can be fused to the sequences depicted in table I, application no. 1, columns 5 and 7 or a sequence encoding a protein, as depicted in table II, application no. 1, columns 5 and 7 in such a manner that the viroid sequence transports a sequence transcribed from a sequence as depicted in table I, application no. 1 columns 5 and 7 or a sequence encoding a protein as depicted in table II, application no. 1 columns 5 and 7 into the chloroplasts. A preferred embodiment uses a modified ASBVd (Navarro et al., Virology. 2000 Mar. 1; 268(1):218-25).
In a further specific embodiment the protein to be expressed in the plastids such as the proteins depicted in table II, application no. 1, columns 5 and 7 are encoded by different nucleic acids. Such a method is disclosed in WO 2004/040973, which shall be incorporated by reference. WO 2004/040973 teaches a method, which relates to the translocation of an RNA corresponding to a gene or gene fragment into the chloroplast by means of a chloroplast localization sequence. The genes, which should be expressed in the plant or plants cells, are split into nucleic acid fragments, which are introduced into different compartments in the plant e.g. the nucleus, the plastids and/or mitochondria. Additionally plant cells are described in which the chloroplast contains a ribozyme fused at one end to an RNA encoding a fragment of a protein used in the inventive process such that the ribozyme can trans-splice the translocated fusion RNA to the RNA encoding the gene fragment to form and as the case may be reunite the nucleic acid fragments to an intact mRNA encoding a functional protein for example as disclosed in table II, application no. 1, columns 5 and 7.

[0046] In a preferred embodiment of the invention the nucleic acid sequences as shown in table I, application no. 1, columns 5 and 7 used in the inventive process are transformed into plastids, which are metabolical active. Those plastids should preferably maintain at a high copy number in the plant or plant tissue of interest, most preferably the chloroplasts found in green plant tissues, such as leaves or cotyledons or in seeds.

[0047] For a good expression in the plastids the nucleic acid sequences as shown in table I, application no. 1, columns 5 and 7 are introduced into an expression cassette using a preferably a promoter and terminator, which are active in plastids preferably a chloroplast promoter. Examples of such promoters include the psbA promoter from the gene from spinach or pea, the rbcL promoter, and the atpB promoter from corn.

[0048] Comprises/comprising and grammatical variations thereof when used in this specification are to be taken to specify the presence of stated features, integers, steps or components or groups thereof, but not to preclude the presence or addition of one or more other features, integers, steps, components or groups thereof.

The term “Table I” used in this specification is to be taken to specify the content of Table I A and Table I B. The term “Table II” used in this specification is to be taken to specify the content of Table II A and Table II B. The term “Table I A” used in this specification is to be taken to specify the content of Table I A. The term “Table I B” used in this specification is to be taken to specify the content of Table I B. The term “Table II A” used in this specification is to be taken to specify the content of Table II A. The term “Table II B” used in this specification is to be taken to specify the content of Table II B. In one preferred embodiment, the term “Table I” means Table I B. In one preferred embodiment, the term “Table II” means Table II B.

[0049] Preferably, this process further comprises the step of recovering the fine chemical, which is synthesized by the organism from the organism and/or from the culture medium used for the growth or maintenance of the organism. The term “recovering” means the isolation of the fine chemical in different purities, that means on the one hand harvesting of the biological material, which contains the fine chemical without further purification and on the other hand purities of the fine chemical between 5% and 100% purity, preferred purities are in the range of 10% and 99%. In one embodiment, the purities are 20%, 30%, 40%, 50%, 60%, 70%, 80%, 90%, 95% or 99%.

[0050] Advantageously the process for the production of the fine chemical leads to an enhanced production of the fine chemical. The terms “enhanced” or “increase” mean at least a 10%, 20%, 30%, 40% or 50%, preferably at least 60%, 70%, 80%, 90% or 100%, more preferably 150%, 200%, 300%, 400% or 500% higher production of the fine chemical in comparison to the reference as defined below, e.g. that means in comparison to an organism without the aforementioned modification of the activity of a protein as shown in table II, application no. 1, column 3. Preferably the modification of the activity of a protein as shown in table II, application no. 1, column 3 or their combination can be achieved by joining the protein to a transit peptide.

[0051] Surprisingly it was found, that the transgenic expression of the Saccharomyces cerevisiae protein as shown in table II, application no. 1, column 3 in plastids of a plant such as Arabidopsis thaliana for example through the linkage to at least one targeting sequence for example as mentioned in table V conferred an increase in the fine chemical content of the transformed plants.

[0052] In accordance with the invention, the term “organism” as understood herein relates always to a non-human organism, in particular to an animal or plant organism or to a microorganism. Further, the term “animal” as understood herein relates always to a non-human animal. Preferably the term “organism” shall mean a non-human organism such as a microorganism containing plastids such as algae or a plant.

[0053] The sequence of b2827 (Accession number PIR:SYECT) from Escherichia coli has been published in Blattner et al., Science 277 (5331), 1453-1474 (1997), and its activity is being defined as “thymidylate synthetase”. Accordingly, in one embodiment, the process of the present invention comprises the use of a “thymidylate synthetase” or its homolog, e.g. as shown herein, for the production of the fine chemical, meaning of methionine, in particular for increasing the amount of methionine in free or bound form in an organism or a part thereof, as mentioned. In one embodiment, in the process of the present invention the activity of a b2827 protein is increased or generated, e.g. from Escherichia coli or a homolog thereof, preferably linked at least to one transit peptide as mentioned for example in table V.

In another embodiment, in the process of the present invention the activity of a b2827 protein is increased or generated in a subcellular compartment of the organism or organism cell such as in an organelle like a plastid or mitochondria.
The sequence of YEL046C from Saccharomyces cerevisiae has been published in Dietrich et al., Nature 387 (6632 Suppl), 78-81 (1997) and Goffeau et al., Science 274 (5287), 546-547, 1996, and its activity is being defined as “L-threonine aldolase (Gly1p) that catalyzes cleavage of L-allo-threonine and L-threonine to glycine. Accordingly, in one embodiment, the process of the present invention comprises the use of a “L-threonine aldolase” or its homolog, e.g. as shown herein, for the production of the fine chemical, meaning of methionine, in particular for increasing the amount of methionine in free or bound form in an organism or a part thereof, as mentioned. In one embodiment, in the process of the present invention the activity of a YEL046C protein is increased or generated, e.g. from Saccharomyces cerevisiae or a homolog thereof, preferably linked at least to one transit peptide as mentioned for example in table V.
In another embodiment, in the process of the present invention the activity of a YEL046c protein is increased or generated in a subcellular compartment of the organism or organism cell such as in an organelle like a plastid or mitochondria.
The sequence of YGR255C from Saccharomyces cerevisiae has been published in Tettelin et al., Nature 387 (6632 Suppl), 81-84 (1997), and Goffeau et al., Science 274 (5287), 546-547, 1996, and its activity is being defined as a “putative flavin-dependent monooxygenase” (Coq6p), which is involved in ubiquinone (Coenzyme Q) biosynthesis; located on the matrix side of the mitochondrial inner membrane. Accordingly, in one embodiment, the process of the present invention comprises the use of a “putative flavin-dependent monooxygenase” or its homolog, e.g. as shown herein, for the production of the fine chemical, meaning of methionine, in particular for increasing the amount of methionine in free or bound form in an organism or a part thereof, as mentioned. In one embodiment, in the process of the present invention the activity of a putative flavin-dependent monooxygenase is increased or generated, e.g. from Saccharomyces cerevisiae or a homolog thereof, preferably linked at least to one transit peptide as mentioned for example in table V.
In another embodiment, in the process of the present invention the activity of a YGR255C protein is increased or generated in a subcellular compartment of the organism or organism cell such as in an organelle like a plastid or mitochondria.
The sequence of YGR289C from Saccharomyces cerevisiae has been published in Tettelin et al., Nature 387 (6632 Suppl), 81-84 (1997), and Goffeau et al., Science 274 (5287), 546-547, 1996, and its activity is being defined as a “maltose permease” (Mal111p). Accordingly, in one embodiment, the process of the present invention comprises the use of a “maltose permease” or its homolog, e.g. as shown herein, for the production of the fine chemical, meaning of methionine, in particular for increasing the amount of methionine in free or bound form in an organism or a part thereof, as mentioned. In one embodiment, in the process of the present invention the activity of a maltose permease is increased or generated, e.g. from Saccharomyces cerevisiae or a homolog thereof, preferably linked at least to one transit peptide as mentioned for example in table V.
In another embodiment, in the process of the present invention the activity of a YGR289C protein is increased or generated in a subcellular compartment of the organism or organism cell such as in an organelle like a plastid or mitochondria.
The sequence of YKR043C from Saccharomyces cerevisiae has been published in Goffeau et al., Science 274 (5287), 546-547 (1996) and Dujon et al., Nature 369 (6479), 371-378 (1994), and its activity has not being defined, It is a hypothetical ORF (Ykr043cp). Accordingly, in one embodiment, the process of the present invention comprises the use of a YKR043C protein or its homolog, e.g. as shown herein, for the production of the fine chemical, meaning of methionine, in particular for increasing the amount of methionine in free or bound form in an organism or a part thereof, as mentioned. In one embodiment, in the process of the present invention the activity of a YKR043C protein is increased or generated, e.g. from Saccharomyces cerevisiae or a homolog thereof, preferably linked at least to one transit peptide as mentioned for example in table V.
In another embodiment, in the process of the present invention the activity of a YKR043C protein is increased or generated in a subcellular compartment of the organism or organism cell such as in an organelle like a plastid or mitochondria.
The sequence of YLR153C from Saccharomyces cerevisiae has been published in Johnston et al., Nature 387 (6632 Suppl), 87-90 (1997) and Goffeau et al., Science 274 (5287), 546-547, 1996, and its activity is being defined as a “acetyl-CoA synthetase” (Acs2p), which is involved in fatty acid biosynthesis. Accordingly, in one embodiment, the process of the present invention comprises the use of a “acetyl-CoA synthetase” or its homolog, e.g. as shown herein, for the production of the fine chemical, meaning of methionine, in particular for increasing the amount of methionine in free or bound form in an organism or a part thereof, as mentioned. In one embodiment, in the process of the present invention the activity of a acetyl-CoA synthetase is increased or generated, e.g. from Saccharomyces cerevisiae or a homolog thereof, preferably linked at least to one transit peptide as mentioned for example in table V.
In another embodiment, in the process of the present invention the activity of a YLR153C protein is increased or generated in a subcellular compartment of the organism or organism cell such as in an organelle like a plastid or mitochondria.

[0054] In one embodiment, the homolog of the b2827 is a homolog having said activity and being derived from bacteria. In one embodiment, the homolog of the b2827 is a homolog having said activity and being derived from Proteobacteria. In one embodiment, the homolog of the b2827 is a homolog having said activity and being derived from Gammaproteobacteria. In one embodiment, the homolog of the b2827 is a homolog having said activity and being derived from Enterobacteriales. In one embodiment, the homolog of the b2827 is a homolog having said activity and being derived from Enterobacteriaceae. In one embodiment, the homolog of the b2827 is a homolog having said activity and being derived from Escherichia, preferably from Escherichia coli.

In one embodiment, the homolog of the YEL046C, YGR255C, YGR289C, YKR043C and/or YLR153C is a homolog having said activity and being derived from an eukaryotic. In one embodiment, the homolog of the YEL046C, YGR255C, YGR289C, YKR043C and/or YLR153C is a homolog having said activity and being derived from Fungi. In one embodiment, the homolog of the YEL046C, YGR255C, YGR289C, YKR043C and/or YLR153C is a homolog having said activity and being derived from Ascomyceta. In one embodiment, the homolog of the YEL046C, YGR255C, YGR289C, YKR043C and/or YLR153C is a homolog having said activity and being derived from Saccharomycotina. In one embodiment, the homolog of the YEL046C, YGR255C, YGR289C, YKR043C and/or YLR153C is a homolog having said activity and being derived from Saccharomycetes. In one embodiment, the homolog of the YEL046C, YGR255C, YGR289C, YKR043C and/or YLR153C is a homolog having said activity and being derived from Saccharomycetales. In one embodiment, the homolog of the YEL046C, YGR255C, YGR289C, YKR043C and/or YLR153C is a homolog having said activity and being derived from Saccharomycetaceae. In one embodiment, the homolog of the YEL046C, YGR255C, YGR289C, YKR043C and/or YLR153C is a homolog having said activity and being derived from Saccharomycetes.

[0055] Further homologs of the aforementioned proteins are described herein below.

[0056] In accordance with the invention, a protein or polypeptide has the “activity of an protein as shown in table II, application no. 1, column 3” if its de novo activity, or its increased expression directly or indirectly leads to an increased in the fine chemical level in the organism or a part thereof, preferably in a cell of said organism, more preferably in an organelle such as a plastid or mitochondria of said organism and the protein has the above mentioned activities of a protein as shown in table II, application no. 1, column 3, preferably in the event the nucleic acid sequences encoding said proteins is functionally joined to the nucleic acid sequence of a transit peptide. Throughout the specification the activity or preferably the biological activity of such a protein or polypeptide or an nucleic acid molecule or sequence encoding such protein or polypeptide is identical or similar if it still has the biological or enzymatic activity of a protein as shown in table II, application no. 1, column 3, or which has at least 10% of the original enzymatic activity, preferably 20%, particularly preferably 30%, most particularly preferably 40% in comparison to a protein as shown in table II, application no. 1, column 3 of Saccharomyces cerevisiae.

[0057] The terms “increased”, “rised”, “extended”, “enhanced”, “improved” or “amplified” relate to a corresponding change of a property in an organism, a part of an organism such as a tissue, seed, root, leave, flower etc. or in a cell and are interchangeable. Preferrably, the overall activity in the volume is increased or enhanced in cases if the increase or enhancement is related to the increase or enhancement of an activity of a gene product, independent whether the amount of gene product or the specific activity of the gene product or both is increased or enhanced or whether the amount, stability or translation efficacy of the nucleic acid sequence or gene encoding for the gene product is increased or enhanced.

[0058] The terms “increase” relate to a corresponding change of a property an organism or in a part of an organism, such as a tissue, seed, root, leave, flower etc. or in a cell. Preferably, the overall activity in the volume is increased in cases the increase relates to the increase of an activity of a gene product, independent whether the amount of gene product or the specific activity of the gene product or both is increased or generated or whether the amount, stability or translation efficacy of the nucleic acid sequence or gene encoding for the gene product is increased.

[0059] Under “change of a property” it is understood that the activity, expression level or amount of a gene product or the metabolite content is changed in a specific volume relative to a corresponding volume of a control, reference or wild type, including the de novo creation of the activity or expression.

[0060] The terms “increase” include the change of said property in only parts of the subject of the present invention, for example, the modification can be found in compartment of a cell, like a organelle, or in a part of a plant, like tissue, seed, root, leave, flower etc. but is not detectable if the overall subject, i.e. complete cell or plant, is tested. Preferably, the increase is found cellular, thus the term “increase of an activity” or “increase of a metabolite content” relates to the cellular increase compared to the wild type cell.

[0061] Accordingly, the term “increase” means that the specific activity of an enzyme as well as the amount of a compound or metabolite, e.g. of a polypeptide, a nucleic acid molecule or of the fine chemical of the invention or an encoding mRNA or DNA, can be increased in a volume.

[0062] The terms “wild type”, “control” or “reference” are exchangeable and can be a cell or a part of organisms such as an organelle like a chloroplast or a tissue, or an organism, in particular a microorganism or a plant, which was not modified or treated according to the herein described process according to the invention. Accordingly, the cell or a part of organisms such as an organelle like a chloroplast or a tissue, or an organism, in particular a microorganism or a plant used as wild type, control or reference corresponds to the cell, organism or part thereof as much as possible and is in any other property but in the result of the process of the invention as identical to the subject matter of the invention as possible. Thus, the wild type, control or reference is treated identically or as identical as possible, saying that only conditions or properties might be different which do not influence the quality of the tested property.

[0063] Preferably, any comparison is carried out under analogous conditions. The term “analogous conditions” means that all conditions such as, for example, culture or growing conditions, assay conditions (such as buffer composition, temperature, substrates, pathogen strain, concentrations and the like) are kept identical between the experiments to be compared.

[0064] The “reference”, “control”, or “wild type” is preferably a subject, e.g. an organelle, a cell, a tissue, an organism, in particular a plant or a microorganism, which was not modified or treated according to the herein described process of the invention and is in any other property as similar to the subject matter of the invention as possible. The reference, control or wild type is in its genome, transcriptome, proteome or metabolome as similar as possible to the subject of the present invention. Preferably, the term “reference-” “control-” or “wild type-”-organelle, -cell, -tissue or -organism, in particular plant or microorganism, relates to an organelle, cell, tissue or organism, in particular plant or micororganism, which is nearly genetically identical to the organelle, cell, tissue or organism, in particular microorganism or plant, of the present invention or a part thereof preferably 95%, more preferred are 98%, even more preferred are 99.00%, in particular 99.10%, 99.30%, 99.50%, 99; 70%, 99.90%, 99.99%, 99.999% or more. Most preferable the “reference”, “control”, or “wild type” is a subject, e.g. an organelle, a cell, a tissue, an organism, which is genetically identical to the organism, cell or organelle used according to the process of the invention except that the responsible or activity conferring nucleic acid molecules or the gene product encoded by them are amended, manipulated, exchanged or introduced according to the inventive process.

[0065] Preferably, the reference, control or wild type differs form the subject of the present invention only in the cellular activity, preferably of the plastidial activity of the polypeptide of the invention, e.g. as result of an increase in the level of the nucleic acid molecule of the present invention or an increase of the specific activity of the polypeptide of the invention, e.g. by or in the expression level or activity of an protein having the activity of a protein as shown in table II, application no. 1, column 3 its biochemical or genetical causes and the increased amount of the fine chemical.

[0066] In case, a control, reference or wild type differing from the subject of the present invention only by not being subject of the process of the invention can not be provided, a control, reference or wild type can be an organism in which the cause for the modulation of an activity conferring the increase of the fine chemical or expression of the nucleic acid molecule of the invention as described herein has been switched back or off, e.g. by knocking out the expression of responsible gene product, e.g. by antisense inhibition, by inactivation of an activator or agonist, by activation of an inhibitor or antagonist, by inhibition through adding inhibitory antibodies, by adding active compounds as e.g. hormones, by introducing negative dominant mutants, etc. A gene production can for example be knocked out by introducing inactivating point mutations, which lead to an enzymatic activity inhibition or a destabilization or an inhibition of the ability to bind to cofactors etc.

[0067] Accordingly, preferred reference subject is the starting subject of the present process of the invention. Preferably, the reference and the subject matter of the invention are compared after standardization and normalization, e.g. to the amount of total RNA, DNA, or Protein or activity or expression of reference genes, like housekeeping genes, such as ubiquitin, actin or ribosomal proteins.

[0068] A series of mechanisms exists via which a modification of the a protein, e.g. the polypeptide of the invention can directly or indirectly affect the yield, production and/or production efficiency of the fine chemical.

[0069] For example, the molecule number or the specific activity of the polypeptide or the nucleic acid molecule may be increased. Larger amounts of the fine chemical can be produced if the polypeptide or the nucleic acid of the invention is expressed de novo in an organism lacking the activity of said protein, preferably the nucleic acid molecules as mentioned in table I, application no. 1, columns 5 and 7 alone or preferably in combination with a transit peptide for example as mentioned in table V or in another embodiment by introducing said nucleic acid molecules into an organelle such as an plastid or mitochondria in the transgenic organism. However, it is also possible to modify the expression of the gene which is naturally present in the organisms, for example by integrating a nucleic acid sequence, encoding a plastidic targeting sequence in front (5 prime) of the coding sequence, leading to a functional preprotein, which is directed for example to the plastids.

[0070] This also applies analogously to the combined increased expression of the nucleic acid molecule of the present invention or its gene product with that of further enzymes or regulators of the amino acid biosynthesis pathways, e.g. which are useful for the synthesis of the fine chemicals.

[0071] The increase or modulation according to this invention can be constitutive, e.g. due to a stable permanent transgenic expression or to a stable mutation in the corresponding endogenous gene encoding the nucleic acid molecule of the invention or to a modulation of the expression or of the behaviour of a gene conferring the expression of the polypeptide of the invention, or transient, e.g. due to an transient transformation or temporary addition of a modulator such as a agonist or antagonist or inducible, e.g. after transformation with a inducible construct carrying the nucleic acid molecule of the invention under control of a inducible promoter and adding the inducer, e.g. tetracycline or as described herein below.

[0072] The increase in activity of the polypeptide amounts in a cell, a tissue, a organelle, an organ or an organism or a part thereof preferably to at least 5%, preferably to at least 20% or at to least 50%, especially preferably to at least 70%, 80%, 90% or more, very especially preferably are to at least 200%, 300% or 400%, most preferably are to at least 500% or more in comparison to the control, reference or wild type. Preferably the increase in activity of the polypeptide amounts in an organelle such as a plastid.

[0073] The specific activity of a polypeptide encoded by a nucleic acid molecule of the present invention or of the polypeptide of the present invention can be tested as described in the examples. In particular, the expression of a protein in question in a cell, e.g. a plant cell or a microorganism and the detection of an increase the fine chemical level in comparison to a control is an easy test and can be performed as described in the state of the art.

[0074] The term “increase” includes, that a compound or an activity is introduced into a cell or a subcellular compartment or organelle de novo or that the compound or the activity has not been detectable before, in other words it is “generated”.

[0075] Accordingly, in the following, the term “increasing” also comprises the term “generating” or “stimulating”. The increased activity manifests itself in an increase of the fine chemical.

[0076] In case the activity of the Escherichia coli protein b2827 or its homologs, e.g. a “thymidylate synthetase” is increased advantageously in an organelle such as a plastid or mitochondria, preferably, in one embodiment an increase of the fine chemical, preferably of methionine between 47% and 51% or more is conferred.

In case the activity of the Saccharomyces cerevisiae protein YEL046C or its homologs, e.g. a “L-threonine aldolase” is increased advantageously in an organelle such as a plastid or mitochondria, preferably, in one embodiment an increase of the fine chemical, preferably of methionine between 70% and 328% or more is conferred.
In case the activity of the Saccharomyces cerevisiae protein YGR255C or its homologs, e.g. a “putative flavin-dependent monooxygenase” is increased advantageously in an organelle such as a plastid or mitochondria, preferably, in one embodiment an increase of the fine chemical, preferably of methionine between 36% and 292% or more is conferred.
In case the activity of the Saccharomyces cerevisiae protein YGR289C or its homologs, e.g. a “maltose permease” is increased advantageously in an organelle such as a plastid or mitochondria, preferably, in one embodiment the increase of the fine chemical, preferably of methionine between 24% and 36% or more is conferred.
In case the activity of the Saccharomyces cerevisiae protein YKR043C or its homologs, e.g. a “YKR043C protein activity” is increased, preferably, in one embodiment the increase of the fine chemical, preferably of methionine between 37% and 58% or more is conferred.
In case the activity of the Saccharomyces cerevisiae protein YLR153C or its homologs, e.g. a “acetyl-CoA synthetase” is increased advantageously in an organelle such as a plastid or mitochondria, preferably, in one embodiment the increase of the fine chemical, preferably of methionine between 29% and 117% or more is conferred.

[0077] In case the activity of the Escherichia coli proteins b2827 or its homologs,” are increased advantageously in an organelle such as a plastid or mitochondria, preferably an increase of the fine chemical methionine is conferred.

In case the activity of the Saccharomyces cerevisiae protein YEL046C or its homologs e.g. a “L-threonine aldolase” is increased advantageously in an organelle such as a plastid or mitochondria, preferably an increase of the fine chemical and of proteins containing methionine is conferred.
In case the activity of the Saccharomyces cerevisiae protein YGR255C or its homologs, e.g. a putative flavin-dependent monooxygenase is increased advantageously in an organelle such as a plastid or mitochondria, preferably an increase of the fine chemical and of proteins containing methionine is conferred.
In case the activity of the Saccharomyces cerevisiae protein YGR289C or its homologs e.g. a “maltose permease” is increased advantageously in an organelle such as a plastid or mitochondria, preferably an increase of the fine chemical and of proteins containing methionine is conferred.
In case the activity of the Saccharomyces cerevisiae protein YKR043C or its homologs e.g. a “YKR043C protein” is increased advantageously in an organelle such as a plastid or mitochondria, preferably an increase of the fine chemical and of proteins containing methionine is conferred.
In case the activity of the Saccharomyces cerevisiae protein YLR153C or its homologs e.g. a “acetyl-CoA synthetase” is increased advantageously in an organelle such as a plastid or mitochondria, preferably an increase of the fine chemical and of proteins containing methionine is conferred.

[0078] In this context, the fine chemical amount in a cell, preferably in a tissue, more preferred in a organism as a plant or a microorganism or part thereof, is increased by 3% or more, especially preferably are 10% or more, very especially preferably are more than 30% and most preferably are 70% or more, such as 100%, 300% or 500%.

[0079] The fine chemical can be contained in the organism either in its free form and/or bound to proteins or polypeptides or mixtures thereof. Accordingly, in one embodiment, the amount of the free form in a cell, preferably in a tissue, more preferred in a organism as a plant or a microorganism or part thereof, is increased by 3% or more, especially preferably are 10% or more, very especially preferably are more than 30% and most preferably are 70% or more, such as 100%, 300% or 500%. Accordingly, in an other embodiment, the amount of the bound the fine chemical in a cell, preferably in a tissue, more preferred in a organism as a plant or a microorganism or part thereof, is increased by 3% or more, especially preferably are 10% or more, very especially preferably are more than 30% and most preferably are 70% or more, such as 100%, 300% or 500%.

[0080] A protein having an activity conferring an increase in the amount or level of the fine chemical, preferably upon targeting to the plastids preferably has the structure of the polypeptide described herein, in particular of the polypeptides comprising the consensus sequence shown in table IV, application no. 1, column 7 or of the polypeptide as shown in the amino acid sequences as disclosed in table II, application no. 1, columns 5 and 7 or the functional homologues thereof as described herein, or is encoded by the nucleic acid molecule characterized herein or the nucleic acid molecule according to the invention, for example by the nucleic acid molecule as shown in table I, application no. 1, columns 5 and 7 or its herein described functional homologues and has the herein mentioned activity.

[0081] For the purposes of the present invention, the terms “L-methionine”, “methionine”, “homocysteine”, “S-adenosylmethionine” and “threonine” also encompass the corresponding salts, such as, for example, methionine hydrochloride or methionine sulfate. Preferably the terms methionine is intended to encompass the term L-methionine.

[0082] Owing to the biological activity of the proteins which are used in the process according to the invention and which are encoded by nucleic acid molecules according to the invention, it is possible to produce compositions comprising the fine chemical, i.e. an increased amount of the free chemical free or bound, e.g amino acid compositions. Depending on the choice of the organism used for the process according to the present invention, for example a microorganism or a plant, compositions or mixtures of various amino acids can be produced.

[0083] The term “expression” refers to the transcription and/or translation of a codogenic gene segment or gene. As a rule, the resulting product is an mRNA or a protein. However, expression products can also include functional RNAs such as, for example, antisense, nucleic acids, tRNAs, snRNAs, rRNAs, RNAi, siRNA, ribozymes etc. Expression may be systemic, local or temporal, for example limited to certain cell types, tissues organs or organelles or time periods.

[0084] In one embodiment, the process of the present invention comprises one or more of the following steps
[0085] a) stabilizing a protein conferring the increased expression of a protein encoded by the nucleic acid molecule of the invention or of the polypeptide of the invention, e.g. of a polypeptide having the activity of a protein as indicated in table II, application no. 1, columns 5 and 7 or its homologs activity having herein-mentioned methionine increasing activity; and/or
[0086] b) stabilizing a mRNA conferring the increased expression of a protein encoded by the nucleic acid molecule of the invention, which is in the sense of the invention a fusion of a nucleic acid sequence encoding a transit peptide and of a nucleic acid sequence as shown in table I, application no. 1, columns 5 and 7, e.g. a nucleic acid sequence encoding a polypeptide having the activity of a protein as indicated in table II, application no. 1, columns 5 and 7 or its homologs or of a mRNA encoding the polypeptide of the present invention having herein-mentioned methionine increasing activity; and/or
[0087] c) increasing the specific activity of a protein conferring the increased expression of a protein encoded by the nucleic acid molecule of the invention or of the polypeptide of the present invention having herein-mentioned methionine increasing activity, e.g. of a polypeptide having the activity of a protein as indicated in table II, application no. 1, columns 5 and 7 or its homologs activity, or decreasing the inhibitory regulation of the polypeptide of the invention; and/or
[0088] d) generating or increasing the expression of an endogenous or artificial transcription factor mediating the expression of a protein conferring the increased expression of a protein encoded by the nucleic acid molecule of the invention or of the polypeptide of the invention having herein-mentioned methionine increasing activity, e.g. of a polypeptide having the activity of a protein as indicated in table II, application no. 1, columns 5 and 7 or its homologs; and/or
[0089] e) stimulating activity of a protein conferring the increased expression of a protein encoded by the nucleic acid molecule of the present invention or a polypeptide of the present invention having herein-mentioned methionine increasing activity, e.g. of a polypeptide having the activity of a protein as indicated in table II, application no. 1, columns 5 and 7 or its homologs activity, by adding one or more exogenous inducing factors to the organisms or parts thereof; and/or
[0090] f) expressing a transgenic gene encoding a protein conferring the increased expression of a polypeptide encoded by the nucleic acid molecule of the present invention or a polypeptide of the present invention, having herein-mentioned methionine increasing activity, e.g. of a polypeptide having the activity of a protein as indicated in table II, application no. 1, columns 5 and 7 or its homologs activity, and/or
[0091] g) increasing the copy number of a gene conferring the increased expression of a nucleic acid molecule encoding a polypeptide encoded by the nucleic acid molecule of the invention or the polypeptide of the invention having herein-mentioned methionine increasing activity, e.g. of a polypeptide having the activity of a protein as indicated in table II, application no. 1, columns 5 and 7 or its homologs activity; and/or
[0092] h) increasing the expression of the endogenous gene encoding the polypeptide of the invention, e.g. a polypeptide having the activity of a protein as indicated in table II, application no. 1, columns 5 and 7 or its homologs activity, by adding positive expression or removing negative expression elements, e.g. homologous recombination can be used to either introduce positive regulatory elements like for plants the 35S enhancer into the promoter or to remove repressor elements form regulatory regions. Further gene conversion methods can be used to disrupt repressor elements or to enhance to activity of positive elements. Positive elements can be randomly introduced in plants by T-DNA or transposon mutagenesis and lines can be identified in which the positive elements have be integrated near to a gene of the invention, the expression of which is thereby enhanced; and/or
[0093] i) modulating growth conditions of an organism in such a manner, that the expression or activity of the gene encoding the protein of the invention or the protein itself is enhanced for example microorganisms or plants can be grown for example under a higher temperature regime leading to an enhanced expression of heat shock proteins, which can lead an enhanced fine chemical production; and/or
[0094] j) selecting of organisms with especially high activity of the proteins of the invention from natural or from mutagenized resources and breeding them into the target organisms, eg the elite crops; and/or
[0095] k) directing a protein encoded by the nucleic acid molecule of the invention or of the polypeptide of the present invention having herein-mentioned methionine increasing activity, e.g. of a polypeptide having the activity of a protein as indicated in table II, application no. 1, columns 5 and 7 or its homologs activity, to the plastids by the addition of a plastidial targeting sequence; and/or
[0096] l) generating the expression of a protein encoded by the nucleic acid molecule of the invention or of the polypeptide of the present invention having herein-mentioned methionine increasing activity, e.g. of a polypeptide having the activity of a protein as indicated in table II, application no. 1, columns 5 and 7 or its homologs activity in plastids by the stable or transient transformation advantageously stable transformation of organelles preferably plastids with an inventive nucleic acid sequence preferably in form of an expression cassette containing said sequence leading to the plastidial expression of the nucleic acids or polypeptides of the invention; and/or
[0097] m) generating the expression of a protein encoded by the nucleic acid molecule of the invention or of the polypeptide of the present invention having herein-mentioned methionine increasing activity, e.g. of a polypeptide having the activity of a protein as indicated in table II, application no. 1, columns 5 and 7 or its homologs activity in plastids by integration of a nucleic acid of the invention into the plastidal genome under control of preferable a plastidial promoter.

[0098] Preferably, said mRNA is the nucleic acid molecule of the present invention and/or the protein conferring the increased expression of a protein encoded by the nucleic acid molecule of the present invention alone or link to a transit nucleic acid sequence or transit peptide encoding nucleic acid sequence or the polypeptide having the herein mentioned activity, e.g. conferring the increase of the fine chemical after increasing the expression or activity of the encoded polypeptide preferably in organelles such as plastids or having the activity of a polypeptide having an activity as the protein as shown in table II, application no. 1, column 3 or its homologs. Preferably the increase of the fine chemical takes place in plastids.

[0099] In general, the amount of mRNA or polypeptide in a cell or a compartment of an organism correlates with the amount of encoded protein and thus with the overall activity of the encoded protein in said volume. Said correlation is not always linear, the activity in the volume is dependent on the stability of the molecules or the presence of activating or inhibiting co-factors. Further, product and educt inhibitions of enzymes are well known and described in Textbooks, e.g. Stryer, Biochemistry.

[0100] In general, the amount of mRNA, polynucleotide or nucleic acid molecule in a cell or a compartment of an organism correlates with the amount of encoded protein and thus with the overall activity of the encoded protein in said volume. Said correlation is not always linear, the activity in the volume is dependent on the stability of the molecules, the degradation of the molecules or the presence of activating or inhibiting co-factors. Further, product and educt inhibitions of enzymes are well known, e.g. Zinser et al. “Enzyminhibitoren”/Enzyme inhibitors”.

[0101] The activity of the abovementioned proteins and/or polypeptide encoded by the nucleic acid molecule of the present invention can be increased in various ways. For example, the activity in an organism or in a part thereof, like a cell or in an organelle of the cell, is increased for example via targeting of the nucleic acid sequence or the encoded gene product to an organelle preferentially to plastids and/or increasing the gene product number, e.g. by increasing the expression rate, like introducing a stronger promoter, or by increasing the stability of the mRNA expressed, thus increasing the translation rate, and/or increasing the stability of the gene product, thus reducing the proteins decayed. Further, the activity or turnover of enzymes can be influenced in such a way that a reduction or increase of the reaction rate or a modification (reduction or increase) of the affinity to the substrate results, is reached. A mutation in the catalytic centre of an polypeptide of the invention, e.g. as enzyme, can modulate the turn over rate of the enzyme, e.g. an exchange of an amino acid in the catalytic center can lead to an increased activity of the enzyme, or the deletion of regulator binding sites can reduce a negative regulation like a feedback inhibition (or a substrate inhibition, if the substrate level is also increased). The specific activity of an enzyme of the present invention can be increased such that the turn over rate is increased or the binding of a co-factor is improved. Improving the stability of the encoding mRNA or the protein can also increase the activity of a gene product. The stimulation of the activity is also under the scope of the term “increased activity”.

[0102] Moreover, the regulation of the abovementioned nucleic acid sequences may be modified so that gene expression is increased. This can be achieved advantageously by means of heterologous regulatory sequences or by modifying, for example mutating, the natural regulatory sequences which are present. The advantageous methods may also be combined with each other.

[0103] In general, an activity of a gene product in an organism or part thereof, in particular in a plant cell or organelle of a plant cell, a plant, or a plant tissue or a part thereof or in a microorganism can be increased by increasing the amount of the specific encoding mRNA or the corresponding protein in said organism or part thereof. “Amount of protein or mRNA” is understood as meaning the molecule number of polypeptides or mRNA molecules in an organism, a tissue, a cell or a cell compartment. “Increase” in the amount of a protein means the quantitative increase of the molecule number of said protein in an organism, a tissue, a cell or a cell compartment such as an organelle like a plastid or mitochondria or part thereof—for example by one of the methods described herein below—in comparison to a wild type, control or reference.

[0104] The increase in molecule number amounts preferably to at least 1%, preferably to more than 10%, more preferably to 30% or more, especially preferably to 50%, 70% or more, very especially preferably to 100%, most preferably to 500% or more. However, a de novo expression is also regarded as subject of the present invention.

[0105] A modification, i.e. an increase, can be caused by endogenous or exogenous factors. For example, an increase in activity in an organism or a part thereof can be caused by adding a gene product or a precursor or an activator or an agonist to the media or nutrition or can be caused by introducing said subjects into a organism, transient or stable. Furthermore such an increase can be reached by the introduction of the inventive nucleic acid sequence or the encoded protein in the correct cell compartment for example into plastids either by transformation and/or targeting.

[0106] In one embodiment the increase in the amount of the fine chemical in the organism or a part thereof, e.g. in a cell, a tissue, an organ, an organelle etc., is achieved by increasing the endogenous level of the polypeptide of the invention. Accordingly, in an embodiment of the present invention, the present invention relates to a process wherein the gene copy number of a gene encoding the polynucleotide or nucleic acid molecule of the invention is increased. Further, the endogenous level of the polypeptide of the invention can for example be increased by modifying the transcriptional or translational regulation of the polypeptide.

[0107] In one embodiment the amount of the fine chemical in the organism or part thereof can be increase by targeted or random mutagenesis of the endogenous genes of the invention. For example homologous recombination can be used to either introduce positive regulatory elements like for plants the 35S enhancer into the promoter or to remove repressor elements form regulatory regions. In addition gene conversion like methods described by Kochevenko and Willmitzer (Plant Physiol. 2003 May; 132(1): 174-84) and citations therein can be used to disrupt repressor elements or to enhance to activity of positive regulatory elements.

Furthermore positive elements can be randomly introduced in (plant) genomes by T-DNA or transposon mutagenesis and lines can be screened for, in which the positive elements has be integrated near to a gene of the invention, the expression of which is thereby enhanced. The activation of plant genes by random integrations of enhancer elements has been described by Hayashi et al., 1992 (Science 258:1350-1353) or Weigel et al., 2000 (Plant Physiol. 122, 1003-1013) and others citated therein. Reverse genetic strategies to identify insertions (which eventually carrying the activation elements) near in genes of interest have been described for various cases eg. Krysan et al., 1999 (Plant Cell 1999, 11, 2283-2290); Sessions et al., 2002 (Plant Cell 2002, 14, 2985-2994); Young et al., 2001, (Plant Physiol. 2001, 125, 513-518); Koprek et al., 2000 (Plant J. 2000, 24, 253-263); Jeon et al., 2000 (Plant J. 2000, 22, 561-570); Tissier et al., 1999 (Plant Cell 1999, 11, 1841-1852); Speulmann et al., 1999 (Plant Cell 1999, 11, 1853-1866). Briefly material from all plants of a large T-DNA or transposon mutagenized plant population is harvested and genomic DNA prepared. Then the genomic DNA is pooled following specific architectures as described for example in Krysan et al., 1999 (Plant Cell 1999, 11, 2283-2290). Pools of genomics DNAs are then screened by specific multiplex PCR reactions detecting the combination of the insertional mutagen (eg T-DNA or Transposon) and the gene of interest. Therefore PCR reactions are run on the DNA pools with specific combinations of T-DNA or transposon border primers and gene specific primers. General rules for primer design can again be taken from Krysan et al., 1999 (Plant Cell 1999, 11, 2283-2290) Re-screening of lower levels DNA pools lead to the identification of individual plants in which the gene of interest is disrupted by the insertional mutagen.
The enhancement of positive regulatory elements or the disruption or weaking of negative regulatory elements can also be achieved through common mutagenesis techniques: The production of chemically or radiation mutated populations is a common technique and known to the skilled worker. Methods for plants are described by Koorneef et al. 1982 and the citations therein and by Lightner and Caspar in “Methods in Molecular Biology” Vol 82. These techniques usually induce pointmutations that can be identified in any known gene using methods such as TILLING (Colbert et al. 2001). One can also envisage to introduce nucleic acids sequences, encoding plastidal targeting signals, like for example present in table V, by homologous recombination or other methods of site specific integration, into the genome in that way, that an endogenous gene is functionally fused to the targeting sequence and the protein is redirected to the plastids. Eventually the integration can also occur randomly and the desired fusion event is selected for.

[0108] Accordingly, the expression level can be increased if the endogenous genes encoding a polypeptide conferring an increased expression of the polypeptide of the present invention, in particular genes comprising the nucleic acid molecule of the present invention, are modified via homologous recombination, Tilling approaches or gene conversion. It also possible to add as mentioned herein targeting sequences to the inventive nucleic acid sequences.

[0109] Regulatory sequences preferably in addition to a target sequence or part thereof can be operatively linked to the coding region of an endogenous protein and control its transcription and translation or the stability or decay of the encoding mRNA or the expressed protein. In order to modify and control the expression, promoter, UTRs, splicing sites, processing signals, polyadenylation sites, terminators, enhancers, repressors, post transcriptional or posttranslational modification sites can be changed, added or amended. For example, the activation of plant genes by random integrations of enhancer elements has been described by Hayashi et al., 1992 (Science 258:1350-1353) or Weigel et al., 2000 (Plant Physiol. 122, 1003-1013) and others citated therein. For example, the expression level of the endogenous protein can be modulated by replacing the endogenous promoter with a stronger transgenic promoter or by replacing the endogenous 3′UTR with a 3′UTR, which provides more stability without amending the coding region. Further, the transcriptional regulation can be modulated by introduction of an artificial transcription factor as described in the examples. Alternative promoters, terminators and UTR are described below.

[0110] The activation of an endogenous polypeptide having above-mentioned activity, e.g. having the activity of a protein as shown in table II, application no. 1, column 3 or of the polypeptide of the invention, e.g. conferring the increase of the fine chemical after increase of expression or activity in the cytsol and/or in an organelle like a plastid, preferentially in the plastid, can also be increased by introducing a synthetic transcription factor, which binds close to the coding region of the gene encoding the protein as shown in table II, application no. 1, column 3 and activates its transcription. A chimeric zinc finger protein can be constructed, which comprises a specific DNA-binding domain and an activation domain as e.g. the VP16 domain of Herpes Simplex virus. The specific binding domain can bind to the regulatory region of the gene encoding the protein as shown in table II, application no. 1, column 3. The expression of the chimeric transcription factor in a organism, in particular in a plant, leads to a specific expression of the protein as shown in table II, application no. 1, column 3, see e.g. in WO01/52620, Oriz, Proc. Natl. Acad. Sci. USA, 2002, Vol. 99, 13290 or Guan, Proc. Natl. Acad. Sci. USA, 2002, Vol. 99, 13296.

[0111] In one further embodiment of the process according to the invention, organisms are used in which one of the abovementioned genes, or one of the above-mentioned nucleic acids, is mutated in a way that the activity of the encoded gene products is less influenced by cellular factors, or not at all, in comparison with the unmutated proteins. For example, well known regulation mechanism of enzymic activity are substrate inhibition or feed back regulation mechanisms. Ways and techniques for the introduction of substitution, deletions and additions of one or more bases, nucleotides or amino acids of a corresponding sequence are described herein below in the corresponding paragraphs and the references listed there, e.g. in Sambrook et al., Molecular Cloning, Cold Spring Harbor, N.Y., 1989. The person skilled in the art will be able to identify regulation domains and binding sites of regulators by comparing the sequence of the nucleic acid molecule of the present invention or the expression product thereof with the state of the art by computer software means which comprise algorithms for the identifying of binding sites and regulation domains or by introducing into a nucleic acid molecule or in a protein systematically mutations and assaying for those mutations which will lead to an increased specify activity or an increased activity per volume, in particular per cell.

[0112] It is therefore advantageously to express in an organism a nucleic acid molecule of the invention or a polypeptide of the invention derived from a evolutionary distantly related organism, as e.g. using a prokaryotic gene in a eukaryotic host, as in these cases the regulation mechanism of the host cell may not weaken the activity (cellular or specific) of the gene or its expression product

[0113] The mutation is introduced in such a way that the production of the fine chemical is not adversely affected.

[0114] Less influence on the regulation of a gene or its gene product is understood as meaning a reduced regulation of the enzymatic activity leading to an increased specific or cellular activity of the gene or its product. An increase of the enzymatic activity is understood as meaning an enzymatic activity, which is increased by at least 10%, advantageously at least 20, 30 or 40%, especially advantageously by at least 50, 60 or 70% in comparison with the starting organism. This leads to an increased productivity of the desired fine chemical(s).

[0115] Owing to the introduction of a gene or a plurality of genes conferring the expression of the nucleic acid molecule of the invention or the polypeptide of the invention, for example the nucleic acid construct mentioned below, or encoding the protein as shown in table II, application no. 1, column 3 into an organism alone or in combination with other genes, it is possible not only to increase the biosynthetic flux towards the end product, but also to increase, modify or create de novo an advantageous, preferably novel metabolites composition in the organism, e.g. an advantageous amino acid composition comprising a higher content of (from a viewpoint of nutritional physiology limited) amino acids, like methionine, lysine or threonine alone or in combination in free or bound form.

[0116] Preferably the composition comprises further higher amounts of metabolites positively affecting or lower amounts of metabolites negatively affecting the nutrition or health of animals or humans provided with said compositions or organisms of the invention or parts thereof. Likewise, the number or activity of further genes which are required for the import or export of nutrients or metabolites, including amino acids, fatty acids, vitamins etc. or its precursors, required for the cell's biosynthesis of the fine chemical may be increased so that the concentration of necessary or relevant precursors, cofactors or intermediates within the cell(s) or within the corresponding storage compartments is increased. Owing to the increased or novel generated activity of the polypeptide of the invention or owing to the increased number of nucleic acid sequences of the invention and/or to the modulation of further genes which are involved in the biosynthesis of the fine chemical, e.g. by increasing the activity of enzymes synthesizing precursors or by destroying the activity of one or more genes which are involved in the breakdown of the fine chemical, it is possible to increase the yield, production and/or production efficiency of the fine chemical in the host organism, such as plants or the microorganisms.

[0117] By influencing the metabolism thus, it is possible to produce, in the process according to the invention, further advantageous sulfur-containing compounds, which contain at least one sulfur atom bound covalently. Examples of such compounds are, in addition to methionine, homocysteine, S-adenosylmethionine, cysteine, advantageously methionine and S-adenosylmethionine.

[0118] Accordingly, in one embodiment, the process according to the invention relates to a process, which comprises:
[0119] a) providing a non-human organism, preferably a microorganism, a non-human animal, a plant or animal cell, a plant or animal tissue or a plant, more preferably a microorganism, a plant or a plant tissue;
[0120] b) increasing the activity of a protein as shown in table II, application no. 1, column 3 or of a polypeptide being encoded by the nucleic acid molecule of the present invention and described below, e.g. conferring an increase of the fine chemical in the organism, preferably in the microorganism, the non-human animal, the plant or animal cell, the plant or animal tissue or the plant, more preferably a microorganism, a plant or a plant tissue, in the cytsol or in the plastids, preferentially in the plastids,
[0121] c) growing the organism, preferably the microorganism, the non-human animal, the plant or animal cell, the plant or animal tissue or the plant under conditions which permit the production of the fine chemical in the organism, preferably the microorganism, the plant cell, the plant tissue or the plant; and
[0122] d) if desired, recovering, optionally isolating, the free and/or bound the fine chemical and, optionally further free and/or bound amino acids synthesized by the organism, the microorganism, the non-human animal, the plant or animal cell, the plant or animal tissue or the plant.

[0123] The organism, in particular the microorganism, non-human animal, the plant or animal cell, the plant or animal tissue or the plant is advantageously grown in such a way that it is not only possible to recover, if desired isolate the free or bound the fine chemical or the free and bound the fine chemical but as option it is also possible to produce, recover and, if desired isolate, other free or/and bound amino acids, in particular methionine.

[0124] After the above-described increasing (which as defined above also encompasses the generating of an activity in an organism, i.e. a de novo activity), for example after the introduction and the expression of the nucleic acid molecules of the invention or described in the methods or processes according to the invention, the organism according to the invention, advantageously, a microorganism, a non-human animal, a plant, plant or animal tissue or plant or animal cell, is grown and subsequently harvested.

[0125] Suitable organisms or host organisms (transgenic organism) for the nucleic acid molecule used according to the invention and for the inventive process, the nucleic acid construct or the vector (both as described below) are, in principle, all organisms which are capable of synthesizing the fine chemical, and which are suitable for the activation, introduction or stimulation of recombinant genes. Examples which may be mentioned are transgenic plants, transgenic microorganisms such as fungi, bacteria, yeasts, alga or diatom preferably alga. Preferred organisms are those which are naturally capable of synthesizing the fine chemical in substantial amounts, like fungi, yeasts, bacteria or plants preferably alga and plants.

[0126] In the event that the transgenic organism is a microorganism, such as a eukaryotic organism, for example a fungus, an alga, diatom or a yeast in particular a fungus, alga, diatom or yeast selected from the families Tuberculariaceae, Adelotheciaceae, Dinophyceae, Ditrichaceae or Prasinophyceae. Preferred organisms are microorganisms such as green algae or plants. After the growing phase, the organisms can be harvested.

[0127] The organism, in particular the microorganism, plant or plant tissue is advantageously grown in such a way that it is not only possible to recover, if desired isolate the free or bound the fine chemical or the free and bound the fine chemical but as option it is also possible to produce, recover and, if desired isolate, other free or/and bound amino acids, in particular threonine and/or lysine. Galili et al., Transgenic Res., 200, 9, 2, 137-144 describes that the heterologous expression of a bacterial gene for the amino acid biosynthesis confers the increase of free as well as of protein-bound amino acids.

[0128] Preferred microorganisms are selected from the group consisting of Charophyceae such as the genera Chara, Nitella e.g. the species Chara globularis, Chara vulgaris, Nitella flexilis, Chlorophyceae such as the genera Acrosiphonia, Spongomorpha, Urospora, Bryopsis, Pseudobryopsis, Trichosolen, Dichotomosiphon, Caulerpa, Rhipilia, Blastophysa, Avrainvillea, Chlorodesmis, Codium, Espera, Halicystis, Halimeda, Penicillus, Pseudocodium, Rhipiliopsis, Rhipocephalus, Tydemania, Udotea, Derbesia, Acrochaete, Aphanochaete, Bolbocoleon, Chaetobolus, Chaetonema, Chaetophora, Chlorotylium, Desmococcus, Draparnaldia, Draparnaldiopsis, Ectochaete, Endophyton, Entocladia, Epicladia, Internoretia, Microthaminon, Ochlochaete, Phaeophila, Pilinella, Pringsheimiella, Protoderma, Pseudendoclonium, Pseudodictyon, Pseudopringsheimia, Pseudulvella, Schizomeris, Stigeoclonium, Thaminochaete, Ulvella, Pilinia, Tellamia, Helicodictyon, Actidesmium, Ankyra, Characium, Codiolum, Sykidion, Keratococcus, Prototheca, Bracteacoccus Chlorococcum, Excentrosphaera, Hormidium, Oophila, Schroederia, Tetraedron, Trebouxia Chlorosarcinopsis, Gomphonitzschia, Coccomyxa, Dactylothece, Diógenes, Disporá, Gloeocystis, Mycanthococcus, Ourococcus, Coelastrum, Dicranochaete, Botryococcus, Dictyosphaerium, Dimorphococcus, Chlorochytrium, Kentrosphaera, Phyllobium, Gomontia, Hormotila, Euastropsis, Hydrodictyon, Pectodictyon, Pediastrum, Sorastrum, Tetrapedia, Acanthosphaera, Echinosphaerella, Echinosphaeridium, Errerella, Gloeoactinium, Golenkeniopsis Golenkinia, Micractinium, Ankistrodesmus, Chlorella, Chodatella, Closteriopsis, Cryocystis, Dactylococcus, Dematractum, Eremosphaera, Eutetramorus, Franceia, Glaucocystis, Gloeotaenium, Kirchneriella, Lagerheimiella, Monoraphidium, Nannochloris, Nephrochlamys, Nephrocytium, Oocystis, Oonephris, Pachycladon, Palmellococcus, Planktosphaeria, Polyedriopsis, Pseudoraciborskia, Quadrigula, Radiococcus, Rochiscia, Scotiella, Selanastrum, Thorakochloris, Treubaria, Trochiscia, Westella, Zoochlorella, Ostreobium, Phyllosiphon, Protosiphon, Rhodochytrium, Actinastrum, Coronastrum, Crucigenia, Dictymocystis, Enallax, Scenedesmus, Selenastrum, Tetradesmus, Tetrallantos, Tetrastrum, Chlorosarcina, Anadyomene, Valoniopsis, Ventricaria, Basicladia, Chaetomorpha, Cladophora, LolaPithophoraRhizoclonium Chaetosphaeridium, Conochaete, Coleochaete, Oligochaetophora, Polychaetophora, Cylindrocapsa, Gongrosira, Protococcus, Acetabularia, Batophora, Bornetella, Dasycladus, Halicoryne, Neomeris, Elakatothrix, Raphidonema, Microspora, Bulbochaete, Oedocladium, Oedogonium, Prasiola, Rosenvingiella, Schizogonium, Apjohnia, Chamaedoris, Cladophoropsis, Siphonocladus, Spongocladia, Boergesenia, Boodlea, Cystodictyon, Dictyosphaeria, Ernodesmis, Microdictyon, Struvea, Valonia, Sphaeroplea, Malleochloris, Stylosphaeridium, Gloeococcus, Palmella, Palmodictyon, Palmophyllum, Pseudospherocystis, Sphaerocystis, Urococcus, Apiocystis, Chaetopeltis, Gemellicystis, Paulschulzia, Phacomyxa, Pseudotetraspora, Schizochlamys, Tetraspora, Cephaleuros, Ctenocladus, Epibolium, Leptosira, Trentepohlia, Diplochaete, Monostroma, Binuclearia, Geminella, Klebsormidium, Planetonema, Radiofilum, Stichococcus, Ulothrix, Uronema, Blidingia, Capsosiphon, Chloropelta, Enteromorpha, Percursaria, Ulva, Ulvaria, Brachiomonas, Carteria, Chlainomonas, Chlamydomonas, Chlamydonephris, Chlorangium, Chlorogonium, Cyanidium, Fortiella, Glenomonas, Gloeomonas, Hyalogonium, Lobomonas Polytoma, Pyramichlamys, Scourfieldia, Smithsonimonas, Sphaerellopsis, Sphenochloris, Spirogonium, Collodictyon, Dunaliella, Haematococcus, Stephanosphaera, Coccomonas, Dysmorphococcus, Phacotus, Pteromonas, Thoracomonas, Wislouchiella, Mascherina, Pyrobotrys, Spondylomorum, Eudorina, Gonium, Oltmannsiella, Pandorina, Platydorina, Pleodorina, Stephanoon, Volvox, Volvulina, Actinotaenium, Arthrodesmus, Bambusina Closterium, Cosmarium, Desmidium, Euastrum, Groenbladia, Hyalotheca, Micrasterias, Penium, Phymatodocis, Pleurotaenium, Sphaerozosma, Spinoclosterium, Spinocosmarium, Spondylosium, Staurastrum, Tetmemorus, Triploceras, Xanthidium, Cylindrocystis, Genicularia, Gonatozygon, Mesotaenium, Netrium, Roya, Spirotaenia, Cosmocladium, Debarya, Docidium, Euastridium, Hallasia, Mougeotia, Mougeotiopsis, Sirogonium, Spirogyra, Staurodesmus, Teilingia, Zygnema, Zygogonium, e.g. the species Caulerpa taxifolia, Prototheca wickerhamii, Ankistrodesmus falcatus, Chlorella ellipsoidea, Chlorella pyrenoidosa, Clorella sorokiniana, Chlorella vulgaris, Scenedesmus obliquus, Scenedesmus quadricauda, Selenastrum capricornutum, Selenastrum undecimnotata, Cladophora glomerata, Chlamydomonas eugametos, Chlamydomonas reinhardtii, Cyanidium caldarium, Dunaliella salina, Dunaliella tertiolecta, Euglena gracilis, Haematococcus pluvialis, Coniugatophyceae, Prasinophyceae Trebouxiophyceae, Ulvophyceae, Chlorodendraceae, Pedinomonadales, Halosphaeraceae, Pterospermataceae, Monomastigaceae, Pyramimonadaceae, Chlorodendraceae such as the genera Prasinocladus e.g. the species Prasinocladus ascus, Halosphaeraceae, Pedinomonadales, Pedinomonadaceae such as the genera Pedinomonas, Pterospermataceae such as the genera Pachysphaera, Pterosperma, Halosphaera, Pyramimonas, Bacillariophyceae, Chrysophyceae, Craspedophyceae, Euglenophyceae, Prymnesiophyceae, Phaeophyceae, Dinophyceae, Rhodophyceae, Xanthophyceae, Prasinophyceae such as the genera Nephroselmis, Prasinococcus, Scherffelia, Tetraselmis, Mantoniella, Ostreococcus e.g. the species Nephroselmis olivacea, Prasinococcus capsulatus, Scherffefia dubia, Tetraselmis chui, Tetraselmis suecica, Mantoniella squamata or Ostreococcus tauri.

[0129] Anacardiaceae such as the genera Pistacia, Mangifera, Anacardium e.g. the species Pistacia vera [pistachios, Pistazie], Mangifer indica [Mango] or Anacardium occidentale [Cashew]; Asteraceae such as the genera Calendula, Carthamus, Centaurea, Cichorium, Cynara, Helianthus, Lactuca, Locusta, Tagetes, Valeriana e.g. the species Calendula officinalis [Marigold], Carthamus tinctorius [safflower], Centaurea cyanus [cornflower], Cichorium intybus [blue daisy], Cynara scolymus [Artichoke], Helianthus annus [sunflower], Lactuca sativa, Lactuca crispa, Lactuca esculenta, Lactuca scariola L. ssp. sativa, Lactuca scariola L. var. integrate; Lactuca scariola L. var. integrifolia, Lactuca sativa subsp. romana, Locusta communis, Valeriana locusta [lettuce], Tagetes lucida, Tagetes erecta or Tagetes tenuifolia [Marigold]; Apiaceae such as the genera Daucus e.g. the species Daucus carota [carrot]; Betulaceae such as the genera Corylus e.g. the species Corylus avellana or Corylus colurna [hazelnut]; Boraginaceae such as the genera Borago e.g. the species Borago officinalis [borage]; Brassicaceae such as the genera Brassica, Melanosinapis, Sinapis, Arabadopsis e.g. the species Brassica napus, Brassica rapa ssp. [canola, oilseed rape, turnip rape], Sinapis arvensis Brassica juncea, Brassica juncea var. juncea, Brassica juncea var. crispifolia, Brassica juncea var. foliosa, Brassica nigra, Brassica sinapioides, Melanosinapis communis [mustard], Brassica oleracea [fodder beet] or Arabidopsis thaliana; Bromeliaceae such as the genera Anana, Bromelia e.g. the species Anana comosus, Ananas ananas or Bromelia comosa [pineapple]; Caricaceae such as the genera Carica e.g. the species Carica papaya [papaya]; Cannabaceae such as the genera Cannabis e.g. the species Cannabis sative [hemp], Convolvulaceae such as the genera Ipomea, Convolvulus e.g. the species Ipomoea batatus, Ipomoea pandurata, Convolvulus batatas, Convolvulus tiliaceus, Ipomoea fastigiata, Ipomoea tiliacea, Ipomoea triloba or Convolvulus panduratus [sweet potato, Man of the Earth, wild potato], Chenopodiaceae such as the genera Beta, i.e. the species Beta vulgaris, Beta vulgaris var. altissima, Beta vulgaris var. Vulgaris, Beta maritima, Beta vulgaris var. perennis, Beta vulgaris var. conditiva or Beta vulgaris var. esculenta [sugar beet]; Cucurbitaceae such as the genera Cucubita e.g. the species Cucurbita maxima, Cucurbita mixta, Cucurbita pepo or Cucurbita moschata [pumpkin, squash]; Elaeagnaceae such as the genera Elaeagnus e.g. the species Olea europaea [olive]; Ericaceae such as the genera Kalmia e.g. the species Kalmia latifolia, Kalmia angustifolia, Kalmia microphylla, Kalmia polifolia, Kalmia occidentalis, Cistus chamaerhodendros or Kalmia lucida [American laurel, broad-leafed laurel, calico bush, spoon wood, sheep laurel, alpine laurel, bog laurel, western bog-laurel, swamp-laurel]; Euphorbiaceae such as the genera Manihot, Janipha, Jatropha, Ricinus e.g. the species Manihot utilissima, Janipha manihot, Jatropha manihot, Manihot aipil, Manihot dulcis, Manihot manihot, Manihot melanobasis, Manihot esculenta [manihot, arrowroot, tapioca, cassava] or Ricinus communis [castor bean, Castor Oil Bush, Castor Oil Plant, Palma Christi, Wonder Tree]; Fabaceae such as the genera Pisum, Albizia, Cathormion, Feuillea, Inga, Pithecolobium, Acacia, Mimosa, Medicajo, Glycine, Dolichos, Phaseolus, Soja e.g. the species Pisum sativum, Pisum arvense, Pisum humile [pea], Albizia berteriana, Albizia julibrissin, Albizia lebbeck, Acacia berteriana, Acacia littoralis, Albizia berteriana, Albizzia berteriana, Cathormion berteriana, Feuillea berteriana, Inga fragrans, Pithecellobium berterianum, Pithecellobium fragrans, Pithecolobium berterianum, Pseudalbizzia berteriana, Acacia julibrissin, Acacia nemu, Albizia nemu, Feuilleea julibrissin, Mimosa julibrissin, Mimosa speciosa, Sericanrda julibrissin, Acacia lebbeck, Acacia macrophylla, Albizia lebbek, Feuilleea lebbeck, Mimosa lebbeck, Mimosa speciosa [bastard logwood, silk tree, East Indian Walnut], Medicago sativa, Medicago falcata, Medicago varia [alfalfa] Glycine max Dolichos soja, Glycine gracilis, Glycine hispida, Phaseolus max, Soja hispida or Soja max [soybean]; Geraniaceae such as the genera Pelargonium, Cocos, Oleum e.g. the species Cocos nucifera, Pelargonium grossularioides or Oleum cocois [coconut]; Gramineae such as the genera Saccharum e.g. the species Saccharum officinarum; Juglandaceae such as the genera Juglans, Wallia e.g. the species Juglans regia, Juglans ailanthifolia, Juglans sieboldiana, Juglans cinerea, Wallia cinerea, Juglans bixbyi, Juglans californica, Juglans hindsii, Juglans intermedia, Juglans jamaicensis, Juglans major, Juglans microcarpa, Juglans nigra or Wallia nigra [walnut, black walnut, common walnut, persian walnut, white walnut, butternut, black walnut]; Lauraceae such as the genera Persea, Laurus e.g. the species laurel Laurus nobilis [bay, laurel, bay laurel, sweet bay], Persea americana Persea americana, Persea gratissima or Persea persea [avocado]; Leguminosae such as the genera Arachis e.g. the species Arachis hypogaea [peanut]; Linaceae such as the genera Linum, Adenolinum e.g. the species Linum usitatissimum, Linum humile, Linum austriacum, Linum bienne, Linum angustifolium, Linum catharticum, Linum flavum, Linum grandiflorum, Adenolinum grandiflorum, Linum lewisii, Linum narbonense, Linum perenne, Linum perenne var. lewisii, Linum pratense or Linum trigynum [flax, linseed]; Lythrarieae such as the genera Punica e.g. the species Punica granatum [pomegranate]; Malvaceae such as the genera Gossypium e.g. the species Gossypium hirsutum, Gossypium arboreum, Gossypium barbadense, Gossypium herbaceum or Gossypium thurberi [cotton]; Musaceae such as the genera Musa e.g. the species Musa nana, Musa acuminata, Musa paradisiaca, Musa spp. [banana]; Onagraceae such as the genera Camissonia, Oenothera e.g. the species Oenothera biennis or Camissonia brevipes [primrose, evening primrose]; Palmae such as the genera Elacis e.g. the species Elaeis guineensis [oil palm]; Papaveraceae such as the genera Papaver e.g. the species Papaver orientale, Papaver rhoeas, Papaver dubium [poppy, oriental poppy, corn poppy, field poppy, shirley poppies, field poppy, long-headed poppy, long-pod poppy]; Pedaliaceae such as the genera Sesamum e.g. the species Sesamum indicum [sesame]; Piperaceae such as the genera Piper, Artanthe, Peperomia, Steffensia e.g. the species Piper aduncum, Piper amalago, Piper angustifolium, Piper auritum, Piper betel, Piper cubeba, Piper longum, Piper nigrum, Piper retrofractum, Artanthe adunca, Artanthe elongata, Peperomia elongata, Piper elongatum, Steffensia elongata. [Cayenne pepper, wild pepper]; Poaceae such as the genera Hordeum, Secale, Avena, Sorghum, Andropogon, Holcus, Panicum, Oryza, Zea, Triticum e.g. the species Hordeum vulgare, Hordeum jubatum, Hordeum murinum, Hordeum secalinum, Hordeum distichon Hordeum aegiceras, Hordeum hexastichon., Hordeum hexastichum, Hordeum irregulare, Hordeum sativum, Hordeum secalinum [barley, pearl barley, foxtail barley, wall barley, meadow barley], Secale cereale [rye], Avena sativa, Avena fatua, Avena byzantina, Avena fatua var. sativa, Avena hybrida [oat], Sorghum bicolor, Sorghum halepense, Sorghum saccharatum, Sorghum vulgare, Andropogon drummondii, Holcus bicolor, Holcus sorghum, Sorghum aethiopicum, Sorghum arundinaceum, Sorghum caffrorum, Sorghum cernuum, Sorghum dochna, Sorghum drummondii, Sorghum durra, Sorghum guineense, Sorghum lanceolatum, Sorghum nervosum, Sorghum saccharatum, Sorghum subglabrescens, Sorghum verticilliflorum, Sorghum vulgare, Holcus halepensis, Sorghum miliaceum millet, Panicum militaceum [Sorghum, millet], Oryza sativa, Oryza latifolia [rice], Zea mays [corn, maize] Triticum aestivum, Triticum durum, Triticum turgidum, Triticum hybernum, Triticum macha, Triticum sativum or Triticum vulgare [wheat, bread wheat, common wheat], Proteaceae such as the genera Macadamia e.g. the species Macadamia intergrifolia [macadamia]; Rubiaceae such as the genera Coffea e.g. the species Cofea spp., Coffea arabica, Coffea canephora or Coffea liberica [coffee]; Scrophulariaceae such as the genera Verbascum e.g. the species Verbascum blattaria, Verbascum chaixii, Verbascum densiflorum, Verbascum lagurus, Verbascum longifolium, Verbascum lychnitis, Verbascum nigrum, Verbascum olympicum, Verbascum phlomoides, Verbascum phoenicum, Verbascum pulverulentum or Verbascum thapsus [mullein, white moth mullein, nettle-leaved mullein, dense-flowered mullein, silver mullein, long-leaved mullein, white mullein, dark mullein, greek mullein, orange mullein, purple mullein, hoary mullein, great mullein]; Solanaceae such as the genera Capsicum, Nicotiana, Solanum, Lycopersicon e.g. the species Capsicum annuum, Capsicum annuum var. glabriusculum, Capsicum frutescens [pepper], Capsicum annuum [paprika], Nicotiana tabacum, Nicotiana alata, Nicotiana attenuata, Nicotiana glauca, Nicotiana langsdorffii, Nicotiana obtusifolia, Nicotiana quadrivalvis, Nicotiana repanda, Nicotiana rustica, Nicotiana sylvestris [tobacco], Solanum tuberosum [potato], Solanum melongena [egg-plant] (Lycopersicon esculentum, Lycopersicon lycopersicum, Lycopersicon pyriforme, Solanum integrifolium or Solanum lycopersicum [tomato]; Sterculiaceae such as the genera Theobroma e.g. the species Theobroma cacao [cacao]; Theaceae such as the genera Camellia e.g. the species Camellia sinensis) [tea].

All abovementioned organisms can be used as donor organism for the inventive nucleic acid sequences and/or can in principle also function as host organisms.

[0130] Particular preferred plants are plants selected from the group consisting of Asteraceae such as the genera Helianthus, Tagetes e.g. the species Helianthus annus [sunflower], Tagetes lucida, Tagetes erecta or Tagetes tenuifolia [Marigold], Brassicaceae such as the genera Brassica, Arabadopsis e.g. the species Brassica napus, Brassica rapa ssp. [canola, oilseed rape, turnip rape] or Arabidopsis thaliana. Fabaceae such as the genera Glycine e.g. the species Glycine max, Soja hispida or Soja max [soybean] (wobei ich nicht sicher bin, ob es Soja max überhaupt gibt, die heiβt eigentlich Glycine max). Linaceae such as the genera Linum e.g. the species Linum usitatissimum, [flax, linseed]; Poaceae such as the genera Hordeum, Secale, Avena, Sorghum, Oryza, Zea, Triticum e.g. the species Hordeum vulgare [barley]; Secale cereale [rye], Avena sativa, Avena fatua, Avena byzantina, Avena fatua var. sativa, Avena hybrida [oat], Sorghum bicolor [Sorghum, millet], Oryza sativa, Oryza latifolia [rice], Zea mays [corn, maize] Triticum aestivum, Triticum durum, Triticum turgidum, Triticum hybernum, Triticum macha, Triticum sativum or Triticum vulgare [wheat, bread wheat, common wheat]; Solanaceae such as the genera Solanum, Lycopersicon e.g. the species Solanum tuberosum [potato], Lycopersicon esculentum, Lycopersicon lycopersicum, Lycopersicon pyriforme, Solanum integrifolium or Solanum lycopersicum [tomato].

[0131] All abovementioned organisms can in principle also function as host organisms.

[0132] With regard to the nucleic acid sequence as depicted a nucleic acid construct which contains a nucleic acid sequence mentioned herein or an organism (=transgenic organism) which is transformed with said nucleic acid sequence or said nucleic acid construct, “transgene” means all those constructs which have been brought about by genetic manipulation methods, preferably in which either
[0133] a) the nucleic acid sequence as shown in table I A and/or I B, application no. 1, columns 5 and 7 or a derivative thereof, or
[0134] b) a genetic regulatory element, for example a promoter, which is functionally linked to the nucleic acid sequence as shown table I A and/or I B, application no. 1, columns 5 and 7 or a derivative thereof, or
[0135] c) (a) and (b)
   is/are not present in its/their natural genetic environment or has/have been modified by means of genetic manipulation methods, it being possible for the modification to be, by way of example, a substitution, addition, deletion, inversion or insertion of one or more nucleotide. “Natural genetic environment” means the natural chromosomal locus in the organism of origin or the presence in a genomic library. In the case of a genomic library, the natural, genetic environment of the nucleic acid sequence is preferably at least partially still preserved. The environment flanks the nucleic acid sequence at least on one side and has a sequence length of at least 50 bp, preferably at least 500 bp, particularly preferably at least 1000 bp, very particularly preferably at least 5000 bp.

[0136] The use of the nucleic acid sequence according to the invention or of the nucleic acid construct according to the invention for the generation of transgenic plants is therefore also subject matter of the invention. As mentioned above the inventive nucleic acid sequence consists advantageously of the nucleic acid sequences as depicted in the sequence protocol and disclosed in table I, application no. 1, columns 5 and 7 joined to a nucleic acid sequence encoding a transit peptide, or a targeting nucleic acid sequence which directs the nucleic acid sequences disclosed in table I, application no. 1, columns 5 and 7 to the organelle preferentially the plastids. Alternatively the inventive nucleic acids sequences consist advantageously of the nucleic acid sequences as depicted in the sequence protocol and disclosed in table I, application no. 1, columns 5 and 7 joined preferably to a nucleic acids sequence mediating the stable integration of nucleic acids into the plastidial genome and optionally sequences mediating the transcription of the sequence in the plastidial compartment. A transient expression is in principal also desirable and possible.

[0137] The fine chemical, which is synthesized in the organism, in particular the microorganism, the cell, the tissue or the plant, of the invention can be isolated if desired. Depending on the use of the fine chemical, different purities resulting from the purification may be advantageous as will be described herein below.

[0138] In an advantageous embodiment of the invention, the organism takes the form of a plant whose amino acid content is modified advantageously owing to the nucleic acid molecule of the present invention expressed. This is important for plant breeders since, for example, the nutritional value of plants for monogastric animals is limited by a few essential amino acids such as lysine, threonine or methionine. After the activity of the protein as shown in table II, application no. 1, column 3 has been increased or generated in the cytsol or plastids, preferentially in the plastids, or after the expression of nucleic acid molecule or polypeptide according to the invention has been generated or increased, the transgenic plant generated thus is grown on or in a nutrient medium or else in the soil and subsequently harvested.

[0139] The plants or parts thereof, e.g. the leaves, roots, flowers, and/or stems and/or other harvestable material as described below, can then be used directly as foodstuffs or animal feeds or else be further processed. Again, the amino acids can be purified further in the customary manner via extraction and precipitation or via ion exchangers and other methods known to the person skilled in the art and described herein below. Products which are suitable for various applications and which result from these different processing procedures are amino acids or amino acid compositions which can still comprise further plant components in different amounts, advantageously in the range of from 0 to 99% by weight, preferably from below 90% by weight, especially preferably below 80% by weight. The plants can also advantageously be used directly without further processing, e.g. as feed or for extraction.

[0140] The chemically pure fine chemical or chemically pure compositions comprising the fine chemical may also be produced by the process described above. To this end, the fine chemical or the compositions are isolated in the known manner from an organism according to the invention, such as the microorganisms, non-human animal or the plants, and/or their culture medium in which or on which the organisms had been grown. These chemically pure fine chemical or said compositions are advantageous for applications in the field of the food industry, the cosmetics industry or the pharmaceutical industry.

[0141] Thus, the content of plant components and preferably also further impurities is as low as possible, and the abovementioned fine chemical is obtained in as pure form as possible. In these applications, the content of plant components advantageously amounts to less than 10%, preferably 1%, more preferably 0.1%, very especially preferably 0.01% or less.

[0142] Accordingly, the fine chemical produced by the present invention is at least 0.1% by weight pure, preferably more than 1% by weight pure, more preferred 10% by weight pure, even more preferred are more than 50, 60, 70 or 80% by weight purity, even more preferred are more than 90 weight-% purity, most preferred are 95% by weight, 99% by weight or more.

[0143] In this context, the amount of the fine chemical in a cell of the invention may be increased according to the process of the invention by at least a factor of 1.1, preferably at least a factor of 1.5; 2; or 5, especially preferably by at least a factor of 10 or 30, very especially preferably by at least a factor of 50, in comparison with the wild type, control or reference. Preferrably, said increase is found a tissue, more preferred in an organism or in a harvestable part thereof.

[0144] In principle, the fine chemicals produced can be increased in two ways by the process according to the invention. The pool of free fine chemicals, in particular of the free fine chemical, and/or the content of protein-bound fine chemicals, in particular of the protein-bound fine chemical may advantageously be increased.

[0145] It may be advantageous to increase the pool of free amino acids in the transgenic organisms by the process according to the invention in order to isolate high amounts of the pure fine chemical.

[0146] In another preferred embodiment of the invention a combination of the increased expression of the nucleic acid sequence or the protein of the invention together with the transformation of a protein or polypeptide, which functions as a sink for the desired amino acid for example methionine, lysine or threonine in the organism is useful to increase the production of the fine chemical (see U.S. Pat. No. 5,589,616, WO 96/38574, WO 97/07665, WO 97/28247, U.S. Pat. No. 4,886,878, U.S. Pat. No. 5,082,993 and U.S. Pat. No. 5,670,635). Galili et al., Transgenic Res. 2000 showed, that enhancing the synthesis of threonine by a feed back insensitive aspertate kinase did not lead only to in increase in free threonine but also in protein bound threonine.

[0147] In may also be advantageous to increase the content of the protein-bound fine chemical.

[0148] In a preferred embodiment, the fine chemical (methionine) is produced in accordance with the invention and, if desired, is isolated. The production of further amino acids such as lysine, threonine etc. and of amino acid mixtures by the process according to the invention is advantageous.

[0149] In the case of the fermentation of microorganisms, the abovementioned fine chemical may accumulate in the medium and/or the cells. If microorganisms are used in the process according to the invention, the fermentation broth can be processed after the cultivation. Depending on the requirement, all or some of the biomass can be removed from the fermentation broth by separation methods such as, for example, centrifugation, filtration, decanting or a combination of these methods, or else the biomass can be left in the fermentation broth. The fermentation broth can subsequently be reduced, or concentrated, with the aid of known methods such as, for example, rotary evaporator, thin-layer evaporator, falling film evaporator, by reverse osmosis or by nanofiltration. This concentrated fermentation broth can subsequently be processed by lyophilization, spray drying, spray granulation or by other methods.

[0150] To purify an amino acid, a product-containing fermentation broth from which the biomass has been separated may be subjected to chromatography with a suitable resin such as ion exchange resin for example anion or cation exchange resin, hydrophobic resin or hydrophilic resin for example epoxy resin, polyurethane resin or polyacrylamide resin, or resin for separation according to the molecular weight of the compounds for example polyvinyl chloride homopolymer resin or resins composed for example of polymers of acrylic acid, crosslinked with polyalkenyl ethers or divinyl glycol such as Carbopol®, Pemulen® and Noveon®. If necessary these chromatography steps may be repeated using the same or other chromatography resins. The skilled worker is familiar with the choice of suitable chromatography resins and their most effective use. The purified product may be concentrated by filtration or ultrafiltration and stored at a temperature, which ensures the maximum stability of the product.

[0151] The identity and purity of the compound(s) isolated can be determined by prior-art techniques. They encompass high-performance liquid chromatography (HPLC), spectroscopic methods, mass spectrometry (MS), staining methods, thin-layer chromatography, NIRS, enzyme assays or microbiological assays. These analytical methods are compiled in: Patek et al. (1994) Appl. Environ. Microbiol. 60:133-140; Malakhova et al. (1996) Biotekhnologiya 11 27-32; and Schmidt et al. (1998) Bioprocess Engineer. 19:67-70. Ulmann's Encyclopedia of Industrial Chemistry (1996) Bd. A27, VCH Weinheim, pp. 89-90, pp. 521-540, pp. 540-547, pp. 559-566, 575-581 and pp. 581-587; Michal, G (1999) Biochemical Pathways: An Atlas of Biochemistry and Molecular Biology, John Wiley and Sons; Fallon, A. et al. (1987) Applications of HPLC in Biochemistry in: Laboratory Techniques in Biochemistry and Molecular Biology, vol. 17.

[0152] Amino acids can for example be detected advantageously via HPLC separation in ethanolic extract as described by Geigenberger et al. (Plant Cell & Environ, 19, 1996: 43-55). Amino acids can be extracted with hot water. After filtration the extracts are diluted with water containing 20 mg/mL sodium acid. The separation and detection of the amino acids is performed using an anion exchange column and an electrochemical detector. Technical details can be taken from Y. Ding et al., 2002, Direct determination of free amino acids and sugars in green tea by anion-exchange chromatography with integrated pulsed amperometric detection, J Chromatogr A, (2002) 982; 237-244, or e.g. from Karchi et al., 1993, Plant J. 3: 721-727; Matthews M J, 1997 (Lysine, threonine and methionine biosynthesis. In B K Singh, ed, Plant Amino Acids: Biochemistry and Biotechnology. Dekker, New York, pp 205-225; H Hesse and R Hoefgen. (2003) Molecular aspects of methionine biosynthesis. TIPS 8(259-262.

[0153] In a preferred embodiment, the present invention relates to a process for the production of the fine chemical comprising or generating in an organism or a part thereof, preferably in a cell compartment such as a plastid or mitochondria, the expression of at least one nucleic acid molecule comprising a nucleic acid molecule selected from the group consisting of:
[0154] a) nucleic acid molecule encoding, preferably at least the mature form, of the polypeptide shown in table II, application no. 1, columns 5 and 7 or a fragment thereof, which confers an increase in the amount of the fine chemical in an organism or a part thereof;
[0155] b) nucleic acid molecule comprising, preferably at least the mature form, of the nucleic acid molecule shown in table I, application no. 1, columns 5 and 7;
[0156] c) nucleic acid molecule whose sequence can be deduced from a polypeptide sequence encoded by a nucleic acid molecule of (a) or (b) as result of the degeneracy of the genetic code and conferring an increase in the amount of the fine chemical in an organism or a part thereof;
[0157] d) nucleic acid molecule encoding a polypeptide which has at least 50% identity with the amino acid sequence of the polypeptide encoded by the nucleic acid molecule of (a) to (c) and conferring an increase in the amount of the fine chemical in an organism or a part thereof;
[0158] e) nucleic acid molecule which hybridizes with a nucleic acid molecule of (a) to (c) under stringent hybridisation conditions and conferring an increase in the amount of the fine chemical in an organism or a part thereof;
[0159] f) nucleic acid molecule encoding a polypeptide, the polypeptide being derived by substituting, deleting and/or adding one or more amino acids of the amino acid sequence of the polypeptide encoded by the nucleic acid molecules (a) to (d), preferably to (a) to (c) and conferring an increase in the amount of the fine chemical in an organism or a part thereof;
[0160] g) nucleic acid molecule encoding a fragment or an epitope of a polypeptide which is encoded by one of the nucleic acid molecules of (a) to (e), preferably to (a) to (c) and conferring an increase in the amount of the fine chemical in an organism or a part thereof;
[0161] h) nucleic acid molecule comprising a nucleic acid molecule which is obtained by amplifying nucleic acid molecules from a cDNA library or a genomic library using the primers shown in table III, application no. 1, column 7 and conferring an increase in the amount of the fine chemical in an organism or a part thereof;
[0162] i) nucleic acid molecule encoding a polypeptide which is isolated, e.g. from an expression library, with the aid of monoclonal antibodies against a polypeptide encoded by one of the nucleic acid molecules of (a) to (h), preferably to (a) to (c), and conferring an increase in the amount of the fine chemical in an organism or a part thereof;
[0163] j) nucleic acid molecule which encodes a polypeptide comprising the consensus sequence shown in table IV, application no. 1, column 7 and conferring an increase in the amount of the fine chemical in an organism or a part thereof;
[0164] k) nucleic acid molecule comprising one or more of the nucleic acid molecule encoding the amino acid sequence of a polypeptide encoding a domain of the polypeptide shown in table II, application no. 1, columns 5 and 7 and conferring an increase in the amount of the fine chemical in an organism or a part thereof; and
[0165] l) nucleic acid molecule which is obtainable by screening a suitable library under stringent conditions with a probe comprising one of the sequences of the nucleic acid molecule of (a) to (k), preferably to (a) to (c), or with a fragment of at least 15 nt, preferably 20 nt, 30 nt, 50 nt, 100 nt, 200 nt or 500 nt of the nucleic acid molecule characterized in (a) to (k), preferably to (a) to (c), and conferring an increase in the amount of the fine chemical in an organism or a part thereof;
   or which comprises a sequence which is complementary thereto.

[0166] In one embodiment, the nucleic acid molecule used in the process of the invention distinguishes over the sequence indicated in table I A, application no. 1, columns 5 and 7 by one or more nucleotides. In one embodiment, the nucleic acid molecule used in the process of the invention does not consist of the sequence indicated in table I A, application no. 1, columns 5 and 7. In one embodiment, the nucleic acid molecule used in the process of the invention is less than 100%, 99.999%, 99.99%, 99.9% or 99% identical to a sequence indicated in Table I A, application no. 1, columns 5 and 7. In another embodiment, the nucleic acid molecule does not encode a polypeptide of a sequence indicated in table II A, application no. 1, columns 5 and 7.

[0167] In one embodiment, the nucleic acid molecule used in the process of the invention distinguishes over the sequence indicated in table I B, application no. 1, columns 5 and 7, by one or more nucleotides. In one embodiment, the nucleic acid molecule used in the process of the invention does not consist of the sequence indicated in table I B, application no. 1, columns 5 and 7. In one embodiment, the nucleic acid molecule used in the process of the invention is less than 100%, 99.999%, 99.99%, 99.9% or 99% identical to a sequence indicated in table I B, application no. 1, columns 5 and 7. In another embodiment, the nucleic acid molecule does not encode a polypeptide of a sequence indicated in table II B, application no. 1, columns 5 and 7.

[0168] In one embodiment, the nucleic acid molecule used in the process distinguishes over the sequence shown in table I, application no. 1, columns 5 and 7 by one or more nucleotides or does not consist of the sequence shown in table I, application no. 1, columns 5 and 7. In one embodiment, the nucleic acid molecule of the present invention is less than 100%, 99.999%, 99.99%, 99.9% or 99% identical to the sequence shown in table I, application no. 1, columns 5 and 7. In another embodiment, the nucleic acid molecule does not encode a polypeptide of the sequence shown in table II, application no. 1, columns 5 and 7.

[0169] Unless otherwise specified, the terms “polynucleotides”, “nucleic acid” and “nucleic acid molecule” as used herein are interchangeably. Unless otherwise specified, the terms “peptide”, “polypeptide” and “protein” are interchangeably in the present context. The term “sequence” may relate to polynucleotides, nucleic acids, nucleic acid molecules, peptides, polypeptides and proteins, depending on the context in which the term “sequence” is used. The terms “gene(s)”, “polynucleotide”, “nucleic acid sequence”, “nucleotide sequence”, or “nucleic acid molecule(s)” as used herein refers to a polymeric form of nucleotides of any length, either ribonucleotides or deoxyribonucleotides. The terms refer only to the primary structure of the molecule.

[0170] Thus, the terms “gene(s)”, “polynucleotide”, “nucleic acid sequence”, “nucleotide sequence”, or “nucleic acid molecule(s)” as used herein include double- and single-stranded DNA and RNA. They also include known types of modifications, for example, methylation, “caps”, substitutions of one or more of the naturally occurring nucleotides with an analog. Preferably, the DNA or RNA sequence of the invention comprises a coding sequence encoding the herein defined polypeptide.

[0171] A “coding sequence” is a nucleotide sequence, which is transcribed into mRNA and/or translated into a polypeptide when placed under the control of appropriate regulatory sequences. The boundaries of the coding sequence are determined by a translation start codon at the 5′-terminus and a translation stop codon at the 3′-terminus. A coding sequence can include, but is not limited to mRNA, cDNA, recombinant nucleotide sequences or genomic DNA, while introns may be present as well under certain circumstances.

[0172] Nucleic acid molecules with the sequence shown in table I, application no. 1, columns 5 and 7, nucleic acid molecules which are derived from the amino acid sequences shown in table II, application no. 1, columns 5 and 7 or from polypeptides comprising the consensus sequence shown in table IV, application no. 1, column 7, or their derivatives or homologues encoding polypeptides with the enzymatic or biological activity of a protein as shown in table II, application no. 1, column 3 or conferring the fine chemical increase after increasing its expression or activity are advantageously increased in the process according to the invention by expression either in the cytsol or in an organelle such as a plastid or mitochondria or both, preferably in plastids.

[0173] In one embodiment, said sequences are cloned into nucleic acid constructs, either individually or in combination. These nucleic acid constructs enable an optimal synthesis of the fine chemical produced in the process according to the invention.

[0174] Nucleic acid molecules, which are advantageous for the process according to the invention and which encode polypeptides with the activity of a protein as shown in table II, application no. 1, column 3 can be determined from generally accessible databases.

[0175] Those, which must be mentioned in particular in this context are general gene databases such as the EMBL database (Stoesser G. et al., Nucleic Acids Res 2001, Vol. 29, 17-21), the GenBank database (Benson D. A. et al., Nucleic Acids Res 2000, Vol. 28, 15-18), or the PIR database (Barker W. C. et al., Nucleic Acids Res. 1999, Vol. 27, 39-43). It is furthermore possible to use organism-specific gene databases for determining advantageous sequences, in the case of yeast for example advantageously the SGD database (Cherry J. M. et al., Nucleic Acids Res. 1998, Vol. 26, 73-80) or the MIPS database (Mewes H. W. et al., Nucleic Acids Res. 1999, Vol. 27, 44-48), in the case of E. coli the GenProtEC database (http://web.bham.ac.uk/bcm4ght6/res.html), and in the case of Arabidopsis the TAIR-database (Huala, E. et al., Nucleic Acids Res. 2001 Vol. 29(1), 102-5) or the MIPS database.

[0176] The nucleic acid molecules used in the process according to the invention take the form of isolated nucleic acid sequences, which encode polypeptides with the activity of the proteins as shown in table II, application no. 1, column 3 and conferring the fine chemical increase by expression either in the cytsol or in an organelle such as a plastid or mitochondria or both, preferably in plastids.

[0177] The nucleic acid sequence(s) used in the process for the production of the fine chemical in transgenic organisms originate advantageously from an eukaryote but may also originate from a prokaryote or an archebacterium, thus it can derived from e.g. a microorganism, an animal or a plant such as the genera Saccharomyces, Nostoc, Brucella, Yersinia, Salmonella, Escherichia, Caulobacter, Vibrio, Pseudomonas, Neisseria, Rickettsia, Xylella, Synechocystis, Schizosaccharomyces, Paramecium, Debaryomyces, Kluyveromyces, Erwinia, Acinetobacter, Candida, Bartonella, Yarrowia, Photobacterium, Rhodopseudomonas, Ashbya, Shigella, Photorhabdus, Chromobacterium, Rickettsia, Neurospora, Haemophilus, Nitrosomonas, Coxiella, Oryza, Xylella, Bradyrhizobium, Wigglesworthia, Synechococcus, Shewanella, Xanthomonas, Pasteurella, Gamma, Arabidopsis, Caenorhabditis, Drosophila, Homo sapiens, Mus musculus, Bacillus, Clostridium, Emericella, Aspergillus, Beta vulgaris, Amanita, Tetragenococcus, Pichia, Trichoderma, Equus caballus, Plantago, Mycobacterium, Orobanche, Prunus, Malus, Bacteroides, Staphylococcus, Zymomonas, Apium, Spinacia oleracea, Canis, Ovis. The nucleic acid sequence encoding the transit peptide part of the inventive nucleic acid originates advantageously from a eukaryote such as a microorganism or a plant.

[0178] For the purposes of the invention, as a rule the plural is intended to encompass the singular and vice versa.

[0179] In order to improve the introduction of the nucleic acid sequences and the expression of the sequences in the transgenic organisms, which are used in the process, the nucleic acid sequences are incorporated into a nucleic acid construct and/or a vector. In addition to the herein described sequences which are used in the process according to the invention, further nucleic acid sequences, advantageously of biosynthesis genes of the fine chemical produced in the process according to the invention, may additionally be present in the nucleic acid construct or in the vector and may be introduced into the organism together. However, these additional sequences may also be introduced into the organisms via other, separate nucleic acid constructs or vectors.

[0180] Using the herein mentioned cloning vectors and transformation methods—such as those which are published and cited in: Plant Molecular Biology and Biotechnology (CRC Press, Boca Raton, Fla.), chapter 6/7, pp. 71-119 (1993); F. F. White, Vectors for Gene Transfer in Higher Plants; in: Transgenic Plants, vol. 1, Engineering and Utilization, Ed.: Kung and R. Wu, Academic Press, 1993, 15-38; B. Jenes et al., Techniques for Gene Transfer, in: Transgenic Plants, vol. 1, Engineering and Utilization, Ed.: Kung and R. Wu, Academic Press (1993), 128-143; Potrykus, Annu. Rev. Plant Physiol. Plant Molec. Biol. 42 (1991), 205-225)) and further cited below, the nucleic acids may be used for the recombinant modification of a wide range of organisms, in particular prokaryotic or eukaryotic microorganisms or plants, so that they become a better and more efficient producer of the fine chemical produced in the process according to the invention. This improved production, or production efficiency, of the fine chemical or products derived there from, such as modified proteins, can be brought about by a direct effect of the manipulation or by an indirect effect of this manipulation.

[0181] In one embodiment, the nucleic acid molecule according to the invention originates from a plant, such as a plant selected from the families Aceraceae, Anacardiaceae, Apiaceae, Asteraceae, Brassicaceae, Cactaceae, Cucurbitaceae, Euphorbiaceae, Fabaceae, Malvaceae, Nymphaeaceae, Papaveraceae, Rosaceae, Salicaceae, Solanaceae, Arecaceae, Bromeliaceae, Cyperaceae, Iridaceae, Liliaceae, Orchidaceae, Gentianaceae, Labiaceae, Magnoliaceae, Ranunculaceae, Carifolaceae, Rubiaceae, Scrophulariaceae, Caryophyllaceae, Ericaceae, Polygonaceae, Violaceae, Juncaceae or Poaceae and preferably from a plant selected from the group of the families Apiaceae, Asteraceae, Brassicaceae, Cucurbitaceae, Fabaceae, Papaveraceae, Rosaceae, Solanaceae, Liliaceae or Poaceae. Preferred are crop plants and in particular plants mentioned herein above as host plants such as the families and genera mentioned above for example preferred the species Anacardium occidentale, Calendula officinalis, Carthamus tinctorius, Cichorium intybus, Cynara scolymus, Helianthus annus, Tagetes lucida, Tagetes erecta, Tagetes tenuifolia; Daucus carota; Corylus avellana, Corylus colurna, Borago officinalis; Brassica napus, Brassica rapa ssp., Sinapis arvensis Brassica juncea, Brassica juncea var. juncea, Brassica juncea var. crispifolia, Brassica juncea var. foliosa, Brassica nigra, Brassica sinapioides, Melanosinapis communis, Brassica oleracea, Arabidopsis thaliana, Anana comosus, Ananas ananas, Bromelia comosa, Carica papaya, Cannabis sative, Ipomoea batatus, Ipomoea pandurata, Convolvulus batatas, Convolvulus tiliaceus, Ipomoea fastigiata, Ipomoea tiliacea, Ipomoea triloba, Convolvulus panduratus, Beta vulgaris, Beta vulgaris var. altissima, Beta vulgaris var. vulgaris, Beta maritima, Beta vulgaris var. perennis, Beta vulgaris var. conditiva, Beta vulgaris var. esculenta, Cucurbita maxima, Cucurbita mixta, Cucurbita pepo, Cucurbita moschata, Olea europaea, Manihot utilissima, Janipha manihot, Jatropha manihot, Manihot aipil, Manihot dulcis, Manihot manihot, Manihot melanobasis, Manihot esculenta, Ricinus communis, Pisum sativum, Pisum arvense, Pisum humile, Medicago sativa, Medicago falcata, Medicago varia, Glycine max Dolichos soja, Glycine gracilis, Glycine hispida, Phaseolus max, Soja hispida, Soja max, Cocos nucifera, Pelargonium grossularioides, Oleum cocoas, Laurus nobilis, Persea americana, Arachis hypogaea, Linum usitatissimum, Linum humile, Linum austriacum, Linum bienne, Linum angustifolium, Linum catharticum, Linum flavum, Linum grandiflorum, Adenolinum grandiflorum, Linum lewisii, Linum narbonense, Linum perenne, Linum perenne var. lewisii, Linum pratense, Linum trigynum, Punica granatum, Gossypium hirsutum, Gossypium arboreum, Gossypium barbadense, Gossypium herbaceum, Gossypium thurberi, Musa nana, Musa acuminata, Musa paradisiaca, Musa spp., Elaeis guineensis, Papaver orientale, Papaver rhoeas, Papaver dubium, Sesamum indicum, Piper aduncum, Piper amalago, Piper angustifolium, Piper auritum, Piper betel, Piper cubeba, Piper longum, Piper nigrum, Piper retrofractum, Artanthe adunca, Artanthe elongata, Peperomia elongata, Piper elongatum, Steffensia elongata, Hordeum vulgare, Hordeum jubatum, Hordeum murinum, Hordeum secalinum, Hordeum distichon Hordeum aegiceras, Hordeum hexastichon., Hordeum hexastichum, Hordeum irregulare, Hordeum sativum, Hordeum secalinum, Avena sativa, Avena fatua, Avena byzantina, Avena fatua var. sativa, Avena hybrida, Sorghum bicolor, Sorghum halepense, Sorghum saccharatum, Sorghum vulgare, Andropogon drummondii, Holcus bicolor, Holcus sorghum, Sorghum aethiopicum, Sorghum arundinaceum, Sorghum caffrorum, Sorghum cernuum, Sorghum dochna, Sorghum drummondii, Sorghum durra, Sorghum guineense, Sorghum lanceolatum, Sorghum nervosum, Sorghum saccharatum, Sorghum subglabrescens, Sorghum verticilliflorum, Sorghum vulgare, Holcus halepensis, Sorghum miliaceum millet, Panicum militaceum, Zea mays, Triticum aestivum, Triticum durum, Triticum turgidum, Triticum hybernum, Triticum macha, Triticum sativum or Triticum vulgare, Cofea spp., Coffea arabica, Coffea canephora, Coffea liberica, Capsicum annuum, Capsicum annuum var. glabriusculum, Capsicum frutescens, Capsicum annuum, Nicotiana tabacum, Solanum tuberosum, Solanum melongena, Lycopersicon esculentum, Lycopersicon lycopersicum, Lycopersicon pyriforme, Solanum integrifolium, Solanum lycopersicum Theobroma cacao or Camellia sinensis.

[0182] In one embodiment, the nucleic acid molecule sequence originates advantageously from a microorganism as mentioned above under host organism such as a fungus for example the genera Aspergillus, Penicillium or Claviceps or from yeasts such as the genera Pichia, Torulopsis, Hansenula, Schizosaccharomyces, Candida, Rhodotorula or Saccharomyces, very especially advantageously from the yeast of the family Saccharomycetaceae, such as the advantageous genus Saccharomyces and the very advantageous genus and species Saccharomyces cerevisiae for the production of the fine chemical in microorganisms.

[0183] The skilled worker knows other suitable sources for the production of fine chemicals, which present also useful nucleic acid molecule sources. They include in general all prokaryotic or eukaryotic cells, preferably unicellular microorganisms, such as fungi like the genus Claviceps or Aspergillus or gram-positive bacteria such as the genera Bacillus, Corynebacterium, Micrococcus, Brevibacterium, Rhodococcus, Nocardia, Caseobacter or Arthrobacter or gram-negative bacteria such as the genera Escherichia, Flavobacterium or Salmonella, or yeasts such as the genera Rhodotorula, Hansenula or Candida. In addition advantageously algae or plants are used as source organism. The nucleic acid sequence encoding the transit peptide part of the inventive nucleic acid originates advantageously from a eukaryote such as a microorganism such as algae like for example Charophyceae, Chlorophyceae or Prasinophyceae or a plant.

[0184] Production strains which are especially advantageously selected in the process according to the invention are microorganisms such as algae selected from the group of the families Bacillariophyceae, Charophyceae, Chlorophyceae, Chrysophyceae, Craspedophyceae, Euglenophyceae, Prymnesiophyceae, Phaeophyceae, Dinophyceae, Rhodophyceae, Xanthophyceae, Prasinophyceae and its described species and strains.

[0185] However, it is also possible to use artificial sequences, which differ in one or more bases from the nucleic acid sequences found in organisms, or in one or more amino acid molecules from polypeptide sequences found in organisms, in particular from the polypeptide sequences shown in table II, application no. 1, columns 5 and 7 or the functional homologues thereof as described herein, preferably conferring above-mentioned activity, i.e. conferring the fine chemical increase after increasing its activity, e.g. after increasing the activity of a protein as shown in table II, column 3 by for example expression either in the cytsol or in an organelle such as a plastid or mitochondria or both, preferably in plastids.

[0186] In the process according to the invention nucleic acid sequences can be used, which, if appropriate, contain synthetic, non-natural or modified nucleotide bases, which can be incorporated into DNA or RNA. Said synthetic, non-natural or modified bases can for example increase the stability of the nucleic acid molecule outside or inside a cell. The nucleic acid molecules of the invention can contain the same modifications as aforementioned.

[0187] As used in the present context the term “nucleic acid molecule” may also encompass the untranslated sequence located at the 3′ and at the 5′ end of the coding gene region, for example at least 500, preferably 200, especially preferably 100, nucleotides of the sequence upstream of the 5′ end of the coding region and at least 100, preferably 50, especially preferably 20, nucleotides of the sequence downstream of the 3′ end of the coding gene region. It is often advantageous only to choose the coding region for cloning and expression purposes.

[0188] Preferably, the nucleic acid molecule used in the process according to the invention or the nucleic acid molecule of the invention is an isolated nucleic acid molecule.

[0189] An “isolated” polynucleotide or nucleic acid molecule is separated from other polynucleotides or nucleic acid molecules, which are present in the natural source of the nucleic acid molecule. An isolated nucleic acid molecule may be a chromosomal fragment of several kb, or preferably, a molecule only comprising the coding region of the gene. Accordingly, an isolated nucleic acid molecule of the invention may comprise chromosomal regions, which are adjacent 5′ and 3′ or further adjacent chromosomal regions, but preferably comprises no such sequences which naturally flank the nucleic acid molecule sequence in the genomic or chromosomal context in the organism from which the nucleic acid molecule originates (for example sequences which are adjacent to the regions encoding the 5′- and 3′-UTRs of the nucleic acid molecule). In various embodiments, the isolated nucleic acid molecule used in the process according to the invention may, for example comprise less than approximately 5 kb, 4 kb, 3 kb, 2 kb, 1 kb, 0.5 kb or 0.1 kb nucleotide sequences which naturally flank the nucleic acid molecule in the genomic DNA of the cell from which the nucleic acid molecule originates.

[0190] The nucleic acid molecules used in the process, for example the polynucleotide of the invention or of a part thereof can be isolated using molecular-biological standard techniques and the sequence information provided herein. Also, for example a homologous sequence or homologous, conserved sequence regions at the DNA or amino acid level can be identified with the aid of comparison algorithms. The former can be used as hybridization probes under standard hybridization techniques (for example those described in Sambrook et al., Molecular Cloning: A Laboratory Manual. 2nd Ed., Cold Spring Harbor Laboratory, Cold Spring Harbor Laboratory Press, Cold Spring Harbor, N.Y., 1989) for isolating further nucleic acid sequences useful in this process.

[0191] A nucleic acid molecule encompassing a complete sequence of the nucleic acid molecules used in the process, for example the polynucleotide of the invention, or a part thereof may additionally be isolated by polymerase chain reaction, oligonucleotide primers based on this sequence or on parts thereof being used. For example, a nucleic acid molecule comprising the complete sequence or part thereof can be isolated by polymerase chain reaction using oligonucleotide primers which have been generated on the basis of this very sequence. For example, mRNA can be isolated from cells (for example by means of the guanidinium thiocyanate extraction method of Chirgwin et al. (1979) Biochemistry 18:5294-5299) and cDNA can be generated by means of reverse transcriptase (for example Moloney MLV reverse transcriptase, available from Gibco/BRL, Bethesda, Md., or AMV reverse transcriptase, obtainable from Seikagaku America, Inc., St. Petersburg, Fla.).

[0192] Synthetic oligonucleotide primers for the amplification, e.g. as shown in table III, application no. 1, column 7, by means of polymerase chain reaction can be generated on the basis of a sequence shown herein, for example the sequence shown in table I, application no. 1, columns 5 and 7 or the sequences derived from table II, application no. 1, columns 5 and 7.

[0193] Moreover, it is possible to identify conserved regions from various organisms by carrying out protein sequence alignments with the polypeptide used in the process of the invention, in particular with sequences of the polypeptide of the invention, from which conserved regions, and in turn, degenerate primers can be derived. Conserved regions are those, which show a very little variation in the amino acid in one particular position of several homologs from different origin. The consensus sequence shown in table IV, application no. 1, column 7 is derived from said alignments.

[0194] Degenerated primers can then be utilized by PCR for the amplification of fragments of novel proteins having above-mentioned activity, e.g. conferring the increase of the fine chemical after increasing the expression or activity or having the activity of a protein as shown in table II, application no. 1, column 3 or further functional homologs of the polypeptide of the invention from other organisms.

[0195] These fragments can then be utilized as hybridization probe for isolating the complete gene sequence. As an alternative, the missing 5′ and 3′ sequences can be isolated by means of RACE-PCR. A nucleic acid molecule according to the invention can be amplified using cDNA or, as an alternative, genomic DNA as template and suitable oligonucleotide primers, following standard PCR amplification techniques. The nucleic acid molecule amplified thus can be cloned into a suitable vector and characterized by means of DNA sequence analysis. Oligonucleotides, which correspond to one of the nucleic acid molecules used in the process can be generated by standard synthesis methods, for example using an automatic DNA synthesizer.

[0196] Nucleic acid molecules which are advantageously for the process according to the invention can be isolated based on their homology to the nucleic acid molecules disclosed herein using the sequences or part thereof as hybridization probe and following standard hybridization techniques under stringent hybridization conditions. In this context, it is possible to use, for example, isolated nucleic acid molecules of at least 15, 20, 25, 30, 35, 40, 50, 60 or more nucleotides, preferably of at least 15, 20 or 25 nucleotides in length which hybridize under stringent conditions with the above-described nucleic acid molecules, in particular with those which encompass a nucleotide sequence of the nucleic acid molecule used in the process of the invention or encoding a protein used in the invention or of the nucleic acid molecule of the invention. Nucleic acid molecules with 30, 50, 100, 250 or more nucleotides may also be used.

[0197] The term “homology” means that the respective nucleic acid molecules or encoded proteins are functionally and/or structurally equivalent. The nucleic acid molecules that are homologous to the nucleic acid molecules described above and that are derivatives of said nucleic acid molecules are, for example, variations of said nucleic acid molecules which represent modifications having the same biological function, in particular encoding proteins with the same or substantially the same biological function. They may be naturally occurring variations, such as sequences from other plant varieties or species, or mutations. These mutations may occur naturally or may be obtained by mutagenesis techniques. The allelic variations may be naturally occurring allelic variants as well as synthetically produced or genetically engineered variants. Structurally equivalents can, for example, be identified by testing the binding of said polypeptide to antibodies or computer based predictions. Structurally equivalent have the similar immunological characteristic, e.g. comprise similar epitopes.

[0198] By “hybridizing” it is meant that such nucleic acid molecules hybridize under conventional hybridization conditions, preferably under stringent conditions such as described by, e.g., Sambrook (Molecular Cloning; A Laboratory Manual, 2nd Edition, Cold Spring Harbor Laboratory Press, Cold Spring Harbor, N.Y. (1989)) or in Current Protocols in Molecular Biology, John Wiley & Sons, N. Y. (1989), 6.3.1-6.3.6.

[0199] According to the invention, DNA as well as RNA molecules of the nucleic acid of the invention can be used as probes. Further, as template for the identification of functional homologues Northern blot assays as well as Southern blot assays can be performed. The Northern blot assay advantageously provides further informations about the expressed gene product: e.g. expression pattern, occurrence of processing steps, like splicing and capping, etc. The Southern blot assay provides additional information about the chromosomal localization and organization of the gene encoding the nucleic acid molecule of the invention.

[0200] A preferred, nonlimiting example of stringent hydridization conditions are hybridizations in 6× sodium chloride/sodium citrate (=SSC) at approximately 45° C., followed by one or more wash steps in 0.2×SSC, 0.1% SDS at 50 to 65° C., for example at 50° C., 55° C. or 60° C. The skilled worker knows that these hybridization conditions differ as a function of the type of the nucleic acid and, for example when organic solvents are present, with regard to the temperature and concentration of the buffer. The temperature under “standard hybridization conditions” differs for example as a function of the type of the nucleic acid between 42° C. and 58° C., preferably between 45° C. and 50° C. in an aqueous buffer with a concentration of 0.1×0.5×, 1×, 2×, 3×, 4× or 5×SSC (pH 7.2). If organic solvent(s) is/are present in the abovementioned buffer, for example 50% formamide, the temperature under standard conditions is approximately 40° C., 42° C. or 45° C. The hybridization conditions for DNA:DNA hybrids are preferably for example 0.1×SSC and 20° C., 25° C., 30° C., 35° C., 40° C. or 45° C., preferably between 30° C. and 45° C. The hybridization conditions for DNA:RNA hybrids are preferably for example 0:1×SSC and 30° C., 35° C., 40° C., 45° C., 50° C. or 55° C., preferably between 45° C. and 55° C. The abovementioned hybridization temperatures are determined for example for a nucleic acid approximately 100 bp (=base pairs) in length and a G+C content of 50% in the absence of formamide. The skilled worker knows to determine the hybridization conditions required with the aid of textbooks, for example the ones mentioned above, or from the following textbooks: Sambrook et al., “Molecular Cloning”, Cold Spring Harbor Laboratory, 1989; Hames and Higgins (Ed.) 1985, “Nucleic Acids Hybridization: A Practical Approach”, IRL Press at Oxford University Press, Oxford; Brown (Ed.) 1991, “Essential Molecular Biology: A Practical Approach”, IRL Press at Oxford University Press, Oxford.

[0201] A further example of one such stringent hybridization condition is hybridization at 4×SSC at 65° C., followed by a washing in 0.1×SSC at 65° C. for one hour. Alternatively, an exemplary stringent hybridization condition is in 50% formamide, 4×SSC at 42° C. Further, the conditions during the wash step can be selected from the range of conditions delimited by low-stringency conditions (approximately 2×SSC at 50° C.) and high-stringency conditions (approximately 0.2×SSC at 50° C., preferably at 65° C.) (20×SSC: 0.3M sodium citrate, 3M NaCl, pH 7.0). In addition, the temperature during the wash step can be raised from low-stringency conditions at room temperature, approximately 22° C., to higher-stringency conditions at approximately 65° C. Both of the parameters salt concentration and temperature can be varied simultaneously, or else one of the two parameters can be kept constant while only the other is varied. Denaturants, for example formamide or SDS, may also be employed during the hybridization. In the presence of 50% formamide, hybridization is preferably effected at 42° C. Relevant factors like 0 length of treatment, ii) salt conditions, iii) detergent conditions, iv) competitor DNAs, v) temperature and vi) probe selection can be combined case by case so that not all possibilities can be mentioned herein.

Thus, in a preferred embodiment, Northern blots are prehybridized with Rothi-HybriQuick buffer (Roth, Karlsruhe) at 68° C. for 2 h. Hybridzation with radioactive labelled probe is done overnight at 68° C. Subsequent washing steps are performed at 68° C. with 1×SSC.
For Southern blot assays the membrane is prehybridized with Rothi-Hybri-Quick buffer (Roth, Karlsruhe) at 68° C. for 2 h. The hybridization with radioactive labelled probe is conducted over night at 68° C. Subsequently the hybridization buffer is discarded and the filter shortly washed using 2×SSC; 0.1% SDS. After discarding the washing buffer new 2×SSC; 0.1% SDS buffer is added and incubated at 68° C. for 15 minutes. This washing step is performed twice followed by an additional washing step using 1×SSC; 0.1% SDS at 68° C. for 10 min.

[0202] Some examples of conditions for DNA hybridization (Southern blot assays) and wash step are shown hereinbelow:
[0203] (1) Hybridization conditions can be selected, for example, from the following conditions:
   [0204] a) 4×SSC at 65° C.,
   [0205] b) 6×SSC at 45° C.,
   [0206] c) 6×SSC, 100 mg/ml denatured fragmented fish sperm DNA at 68° C.,
   [0207] d) 6×SSC, 0.5% SDS, 100 mg/ml denatured salmon sperm DNA at 68° C.,
   [0208] e) 6×SSC, 0.5% SDS, 100 mg/ml denatured fragmented salmon sperm DNA, 50% formamide at 42° C.,
   [0209] f) 50% formamide, 4×SSC at 42° C.,
   [0210] g) 50% (vol/vol) formamide, 0.1% bovine serum albumin, 0.1% Ficoll, 0.1% polyvinylpyrrolidone, 50 mM sodium phosphate buffer pH 6.5, 750 mM NaCl, 75 mM sodium citrate at 42° C.,
   [0211] h) 2× or 4×SSC at 50° C. (low-stringency condition), or
   [0212] i) 30 to 40% formamide, 2× or 4×SSC at 42° C. (low-stringency condition).
[0213] (2) Wash steps can be selected, for example, from the following conditions:
   [0214] a) 0.015 M NaCl/0.0015 M sodium citrate/0.1% SDS at 50° C.
   [0215] b) 0.1×SSC at 65° C.
   [0216] c) 0.1×SSC, 0.5% SDS at 68° C.
   [0217] d) 0.1×SSC, 0.5% SDS, 50% formamide at 42° C.
   [0218] e) 0.2×SSC, 0.1% SDS at 42° C.
   [0219] f) 2×SSC at 65° C. (low-stringency condition).

[0220] Polypeptides having above-mentioned activity, i.e. conferring the fine chemical increase, derived from other organisms, can be encoded by other DNA sequences which hybridize to the sequences shown in table I, application no. 1, columns 5 and 7, preferably shown in table I B, application no. 1, columns 5 and 7 under relaxed hybridization conditions and which code on expression for peptides having the methionine increasing activity.

[0221] Further, some applications have to be performed at low stringency hybridisation conditions, without any consequences for the specificity of the hybridisation. For example, a Southern blot analysis of total DNA could be probed with a nucleic acid molecule of the present invention and washed at low stringency (55° C. in 2×SSPE, 0.1% SDS). The hybridisation analysis could reveal a simple pattern of only genes encoding polypeptides of the present invention or used in the process of the invention, e.g. having herein-mentioned activity of increasing the fine chemical. A further example of such low-stringent hybridization conditions is 4×SSC at 50° C. or hybridization with 30 to 40% formamide at 42° C. Such molecules comprise those which are fragments, analogues or derivatives of the polypeptide of the invention or used in the process of the invention and differ, for example, by way of amino acid and/or nucleotide deletion(s), insertion(s), substitution (s), addition(s) and/or recombination (s) or any other modification(s) known in the art either alone or in combination from the above-described amino acid sequences or their underlying nucleotide sequence(s). However, it is preferred to use high stringency hybridisation conditions.

[0222] Hybridization should advantageously be carried out with fragments of at least 5, 10, 15, 20, 25, 30, 35 or 40 bp, advantageously at least 50, 60, 70 or 80 bp, preferably at least 90, 100 or 110 bp. Most preferably are fragments of at least 15, 20, 25 or 30 bp. Preferably are also hybridizations with at least 100 by or 200, very especially preferably at least 400 by in length. In an especially preferred embodiment, the hybridization should be carried out with the entire nucleic acid sequence with conditions described above.

[0223] The terms “fragment”, “fragment of a sequence” or “part of a sequence” mean a truncated sequence of the original sequence referred to. The truncated sequence (nucleic acid or protein sequence) can vary widely in length; the minimum size being a sequence of sufficient size to provide a sequence with at least a comparable function and/or activity of the original sequence referred to or hybridizing with the nucleic acid molecule of the invention or used in the process of the invention under stringent conditions, while the maximum size is not critical. In some applications, the maximum size usually is not substantially greater than that required to provide the desired activity and/or function(s) of the original sequence.

[0224] Typically, the truncated amino acid sequence will range from about 5 to about 310 amino acids in length. More typically, however, the sequence will be a maximum of about 250 amino acids in length, preferably a maximum of about 200 or 100 amino acids. It is usually desirable to select sequences of at least about 10, 12 or 15 amino acids, up to a maximum of about 20 or 25 amino acids.

[0225] The term “epitope” relates to specific immunoreactive sites within an antigen, also known as antigenic determinates. These epitopes can be a linear array of monomers in a polymeric composition—such as amino acids in a protein—or consist of or comprise a more complex secondary or tertiary structure. Those of skill will recognize that immunogens (i.e., substances capable of eliciting an immune response) are antigens; however, some antigen, such as haptens, are not immunogens but may be made immunogenic by coupling to a carrier molecule. The term “antigen” includes references to a substance to which an antibody can be generated and/or to which the antibody is specifically immunoreactive.

[0226] In one embodiment the present invention relates to a epitope of the polypeptide of the present invention or used in the process of the present invention and conferring above mentioned activity, preferably conferring an increase in the fine chemical.

[0227] The term “one or several amino acids” relates to at least one amino acid but not more than that number of amino acids, which would result in a homology of below 50% identity. Preferably, the identity is more than 70% or 80%, more preferred are 85%, 90%, 91%, 92%, 93%, 94% or 95%, even more preferred are 96%, 97%, 98%, or 99% identity.

[0228] Further, the nucleic acid molecule of the invention comprises a nucleic acid molecule, which is a complement of one of the nucleotide sequences of above mentioned nucleic acid molecules or a portion thereof. A nucleic acid molecule which is complementary to one of the nucleotide sequences shown in table I, application no. 1, columns 5 and 7, preferably shown in table I B, application no. 1, columns 5 and 7 is one which is sufficiently complementary to one of the nucleotide sequences shown in table I, application no. 1, columns 5 and 7, preferably shown in table I B, application no. 1, columns 5 and 7 such that it can hybridize to one of the nucleotide sequences shown in table I, application no. 1, columns 5 and 7, preferably shown in Table I B, application no. 1, columns 5 and 7, thereby forming a stable duplex. Preferably, the hybridisation is performed under stringent hybridization conditions. However, a complement of one of the herein disclosed sequences is preferably a sequence complement thereto according to the base pairing of nucleic acid molecules well known to the skilled person. For example, the bases A and G undergo base pairing with the bases T and U or C, resp. and visa versa. Modifications of the bases can influence the base-pairing partner.

[0229] The nucleic acid molecule of the invention comprises a nucleotide sequence which is at least about 30%, 35%, 40% or 45%, preferably at least about 50%, 55%, 60% or 65%, more preferably at least about 70%, 80%, or 90%, and even more preferably at least about 95%, 97%, 98%, 99% or more homologous to a nucleotide sequence shown in table I, application no. 1, columns 5 and 7, preferably shown in table I B, application no. 1, columns 5 and 7, or a portion thereof and preferably has above mentioned activity, in particular having a fine chemical increasing activity after increasing the activity or an activity of a gene product as shown in table II, application no. 1, column 3 by for example expression either in the cytsol or in an organelle such as a plastid or mitochondria or both, preferably in plastids.

[0230] The nucleic acid molecule of the invention comprises a nucleotide sequence which hybridizes, preferably hybridizes under stringent conditions as defined herein, to one of the nucleotide sequences shown in table I, application no. 1, columns 5 and 7, preferably shown in table I B, application no. 1, columns 5 and 7, or a portion thereof and encodes a protein having above-mentioned activity, e.g. conferring of a methionine increase by for example expression either in the cytsol or in an organelle such as a plastid or mitochondria or both, preferably in plastids, and optionally, the activity of YEL046C, YGR255C, YGR289C, YKR043C and/or YLR153C.

[0231] Moreover, the nucleic acid molecule of the invention can comprise only a portion of the coding region of one of the sequences shown in table I, application no. 1, columns 5 and 7, preferably shown in table I B, application no. 1, columns 5 and 7, for example a fragment which can be used as a probe or primer or a fragment encoding a biologically active portion of the polypeptide of the present invention or of a polypeptide used in the process of the present invention, i.e. having above-mentioned activity, e.g. conferring an increase of the fine chemical if its activity is increased by for example expression either in the cytsol or in an organelle such as a plastid or mitochondria or both, preferably in plastids. The nucleotide sequences determined from the cloning of the present protein-according-to-the-invention-encoding gene allows for the generation of probes and primers designed for use in identifying and/or cloning its homologues in other cell types and organisms. The probe/primer typically comprises substantially purified oligonucleotide. The oligonucleotide typically comprises a region of nucleotide sequence that hybridizes under stringent conditions to at least about 12, 15 preferably about 20 or 25, more preferably about 40, 50 or 75 consecutive nucleotides of a sense strand of one of the sequences set forth, e.g., in table I, application no. 1, columns 5 and 7, preferably shown in table I B, application no. 1, columns 5 and 7, an anti-sense sequence of one of the sequences, e.g., set forth in table I, application no. 1, columns 5 and 7, preferably shown in table I B, application no. 1, columns 5 and 7, or naturally occurring mutants thereof. Primers based on a nucleotide of invention can be used in PCR reactions to clone homologues of the polypeptide of the invention or of the polypeptide used in the process of the invention, e.g. as the primers described in the examples of the present invention, e.g. as shown in the examples. A PCR with the primers shown in table III, application no. 1, column 7 will result in a fragment of the gene product as shown in table II, column 3.

[0232] Primer sets are interchangeable. The person skilled in the art knows to combine said primers to result in the desired product, e.g. in a full length clone or a partial sequence. Probes based on the sequences of the nucleic acid molecule of the invention or used in the process of the present invention can be used to detect transcripts or genomic sequences encoding the same or homologous proteins. The probe can further comprise a label group attached thereto, e.g. the label group can be a radioisotope, a fluorescent compound, an enzyme, or an enzyme co-factor. Such probes can be used as a part of a genomic marker test kit for identifying cells which express an polypeptide of the invention or used in the process of the present invention, such as by measuring a level of an encoding nucleic acid molecule in a sample of cells, e.g., detecting mRNA levels or determining, whether a genomic gene comprising the sequence of the polynucleotide of the invention or used in the process of the present invention has been mutated or deleted.

[0233] The nucleic acid molecule of the invention encodes a polypeptide or portion thereof which includes an amino acid sequence which is sufficiently homologous to the amino acid sequence shown in table II, application no. 1, columns 5 and 7 such that the protein or portion thereof maintains the ability to participate in the fine chemical production, in particular a methionine increasing the activity as mentioned above or as described in the examples in plants or microorganisms is comprised.

[0234] As used herein, the language “sufficiently homologous” refers to proteins or portions thereof which have amino acid sequences which include a minimum number of identical or equivalent amino acid residues (e.g., an amino acid residue which has a similar side chain as an amino acid residue in one of the sequences of the polypeptide of the present invention) to an amino acid sequence shown in table II, application no. 1, columns 5 and 7 such that the protein or portion thereof is able to participate in the increase of the fine chemical production. For examples having the activity of a protein as shown in table II, column 3 and as described herein.

[0235] In one embodiment, the nucleic acid molecule of the present invention comprises a nucleic acid that encodes a portion of the protein of the present invention. The protein is at least about 30%, 35%, 40%, 45% or 50%, preferably at least about 55%, 60%, 65% or 70%, and more preferably at least about 75%, 80%, 85%, 90%, 91%, 92%, 93% or 94% and most preferably at least about 95%, 97%, 98%, 99% or more homologous to an entire amino acid sequence of table II, application no. 1, columns 5 and 7 and having above-mentioned activity, e.g. conferring preferably the increase of the fine chemical by for example expression either in the cytsol or in an organelle such as a plastid or mitochondria or both, preferably in plastids.

[0236] Portions of proteins encoded by the nucleic acid molecule of the invention are preferably biologically active, preferably having above-mentioned annotated activity, e.g. conferring an increase the fine chemical after increase of activity.

[0237] As mentioned herein, the term “biologically active portion” is intended to include a portion, e.g., a domain/motif, that confers increase of the fine chemical or has an immunological activity such that it is binds to an antibody binding specifically to the polypeptide of the present invention or a polypeptide used in the process of the present invention for producing the fine chemical.

[0238] The invention further relates to nucleic acid molecules that differ from one of the nucleotide sequences shown in table I, application no. 1, columns 5 and 7 (and portions thereof) due to degeneracy of the genetic code and thus encode a polypeptide of the present invention, in particular a polypeptide having above mentioned activity, e.g. conferring an increase in the fine chemical in a organism, e.g. as that polypeptides depicted by the sequence shown in table II, application no. 1, columns 5 and 7 or the functional homologues. Advantageously, the nucleic acid molecule of the invention comprises, or in an other embodiment has, a nucleotide sequence encoding a protein comprising, or in an other embodiment having, an amino acid sequence shown in table II, application no. 1, columns 5 and 7 or the functional homologues. In a still further embodiment, the nucleic acid molecule of the invention encodes a full length protein which is substantially homologous to an amino acid sequence shown in table II, application no. 1, columns 5 and 7 or the functional homologues. However, in a preferred embodiment, the nucleic acid molecule of the present invention does not consist of the sequence shown in table I, application no. 1, columns 5 and 7, preferably as indicated in table I A, application no. 1, columns 5 and 7. Preferably the nucleic acid molecule of the invention is a functional homologue or identical to a nucleic acid molecule indicated in table I B, application no. 1, columns 5 and 7.

[0239] In addition, it will be appreciated by those skilled in the art that DNA sequence polymorphisms that lead to changes in the amino acid sequences may exist within a population. Such genetic polymorphism in the gene encoding the polypeptide of the invention or comprising the nucleic acid molecule of the invention may exist among individuals within a population due to natural variation.

[0240] As used herein, the terms “gene” and “recombinant gene” refer to nucleic acid molecules comprising an open reading frame encoding the polypeptide of the invention or comprising the nucleic acid molecule of the invention or encoding the polypeptide used in the process of the present invention, preferably from a crop plant or from a microorganism useful for the production of fine chemicals, in particular for the production of the fine chemical. Such natural variations can typically result in 1-5% variance in the nucleotide sequence of the gene. Any and all such nucleotide variations and resulting amino acid polymorphisms in genes encoding a polypeptide of the invention or comprising a the nucleic acid molecule of the invention that are the result of natural variation and that do not alter the functional activity as described are intended to be within the scope of the invention.

[0241] Nucleic acid molecules corresponding to natural variants homologues of a nucleic acid molecule of the invention, which can also be a cDNA, can be isolated based on their homology to the nucleic acid molecules disclosed herein using the nucleic acid molecule of the invention, or a portion thereof, as a hybridization probe according to standard hybridization techniques under stringent hybridization conditions.

[0242] Accordingly, in another embodiment, a nucleic acid molecule of the invention is at least 15, 20, 25 or 30 nucleotides in length. Preferably, it hybridizes under stringent conditions to a nucleic acid molecule comprising a nucleotide sequence of the nucleic acid molecule of the present invention or used in the process of the present invention, e.g. comprising the sequence shown in table I, application no. 1, columns 5 and 7. The nucleic acid molecule is preferably at least 20, 30, 50, 100, 250 or more nucleotides in length.

[0243] The term “hybridizes under stringent conditions” is defined above. In one embodiment, the term “hybridizes under stringent conditions” is intended to describe conditions for hybridization and washing under which nucleotide sequences at least 30%, 40%, 50% or 65% identical to each other typically remain hybridized to each other. Preferably, the conditions are such that sequences at least about 70%, more preferably at least about 75% or 80%, and even more preferably at least about 85%, 90% or 95% or more identical to each other typically remain hybridized to each other.

[0244] Preferably, nucleic acid molecule of the invention that hybridizes under stringent conditions to a sequence shown in table I, application no. 1, columns 5 and 7 corresponds to a naturally-occurring nucleic acid molecule of the invention. As used herein, a “naturally-occurring” nucleic acid molecule refers to an RNA or DNA molecule having a nucleotide sequence that occurs in nature (e.g., encodes a natural protein). Preferably, the nucleic acid molecule encodes a natural protein having abovementioned activity, e.g. conferring the fine chemical increase after increasing the expression or activity thereof or the activity of a protein of the invention or used in the process of the invention by for example expression the nucleic acid sequence of the gene product in the cytsol and/or in an organelle such as a plastid or mitochondria, preferably in plastids.

[0245] In addition to naturally-occurring variants of the sequences of the polypeptide or nucleic acid molecule of the invention as well as of the polypeptide or nucleic acid molecule used in the process of the invention that may exist in the population, the skilled artisan will further appreciate that changes can be introduced by mutation into a nucleotide sequence of the nucleic acid molecule encoding the polypeptide of the invention or used in the process of the present invention, thereby leading to changes in the amino acid sequence of the encoded said polypeptide, without altering the functional ability of the polypeptide, preferably not decreasing said activity.

[0246] For example, nucleotide substitutions leading to amino acid substitutions at “non-essential” amino acid residues can be made in a sequence of the nucleic acid molecule of the invention or used in the process of the invention, e.g. shown in table I, application no. 1, columns 5 and 7.

[0247] A “non-essential” amino acid residue is a residue that can be altered from the wild-type sequence of one without altering the activity of said polypeptide, whereas an “essential” amino acid residue is required for an activity as mentioned above, e.g. leading to an increase in the fine chemical in an organism after an increase of activity of the polypeptide. Other amino acid residues, however, (e.g., those that are not conserved or only semi-conserved in the domain having said activity) may not be essential for activity and thus are likely to be amenable to alteration without altering said activity.

[0248] Further, a person skilled in the art knows that the codon usage between organisms can differ. Therefore, he may adapt the codon usage in the nucleic acid molecule of the present invention to the usage of the organism or the cell compartment for example of the plastid or mitochondria in which the polynuclestide or polypeptide is expressed.

[0249] Accordingly, the invention relates to nucleic acid molecules encoding a polypeptide having above-mentioned activity, e.g. conferring an increase in the fine chemical in an organisms or parts thereof by for example expression either in the cytsol or in an organelle such as a plastid or mitochondria or both, preferably in plastids that contain changes in amino acid residues that are not essential for said activity. Such polypeptides differ in amino acid sequence from a sequence contained in the sequences shown in table II, application no. 1, columns 5 and 7, preferably shown in table II A, application no. 1, columns 5 and 7 yet retain said activity described herein. The nucleic acid molecule can comprise a nucleotide sequence encoding a polypeptide, wherein the polypeptide comprises an amino acid sequence which is at least about 50% identical to an amino acid sequence shown in table II, application no. 1, columns 5 and 7, preferably shown in table II A, application no. 1, columns 5 and 7 and is capable of participation in the increase of production of the fine chemical after increasing its activity, e.g. its expression by for example expression either in the cytsol or in an organelle such as a plastid or mitochondria or both, preferably in plastids. Preferably, the protein encoded by the nucleic acid molecule is at least about 60% identical to the sequence shown in table II, application no. 1, columns 5 and 7, preferably shown in table II A, application no. 1, columns 5 and 7, more preferably at least about 70% identical to one of the sequences shown in table II, application no. 1, columns 5 and 7, preferably shown in table II A, application no. 1, columns 5 and 7, even more preferably at least about 80%, 90%, 95% homologous to the sequence shown in table II, application no. 1, columns 5 and 7, and most preferably at least about 96%, 97%, 98%, or 99% identical to the sequence shown in table II, application no. 1, columns 5 and 7, preferably shown in table II A, application no. 1, columns 5 and 7.

[0250] To determine the percentage homology (=identity, herein used interchangeably) of two amino acid sequences or of two nucleic acid molecules, the sequences are written one underneath the other for an optimal comparison (for example gaps may be inserted into the sequence of a protein or of a nucleic acid in order to generate an optimal alignment with the other protein or the other nucleic acid).

[0251] The amino acid residues or nucleic acid molecules at the corresponding amino acid positions or nucleotide positions are then compared. If a position in one sequence is occupied by the same amino acid residue or the same nucleic acid molecule as the corresponding position in the other sequence, the molecules are homologous at this position (i.e. amino acid or nucleic acid “homology” as used in the present context corresponds to amino acid or nucleic acid “identity”. The percentage homology between the two sequences is a function of the number of identical positions shared by the sequences (i.e. % homology=number of identical positions/total number of positions×100). The terms “homology” and “identity” are thus to be considered as synonyms.

[0252] For the determination of the percentage homology (=identity) of two or more amino acids or of two or more nucleotide sequences several computer software programs have been developed. The homology of two or more sequences can be calculated with for example the software fasta, which presently has been used in the version fasta 3 (W. R. Pearson and D. J. Lipman (1988), Improved Tools for Biological Sequence Comparison. PNAS 85:2444-2448; W. R. Pearson (1990) Rapid and Sensitive Sequence Comparison with FASTP and FASTA, Methods in Enzymology 183:63-98; W. R. Pearson and D. J. Lipman (1988) Improved Tools for Biological Sequence Comparison. PNAS 85:2444-2448; W. R. Pearson (1990); Rapid and Sensitive Sequence Comparison with FASTP and FASTA Methods in Enzymology 183:63-98). Another useful program for the calculation of homologies of different sequences is the standard blast program, which is included in the Biomax pedant software (Biomax, Munich, Federal Republic of Germany). This leads unfortunately sometimes to suboptimal results since blast does not always include complete sequences of the subject and the query. Nevertheless as this program is very efficient it can be used for the comparison of a huge number of sequences. The following settings are typically used for such a comparisons of sequences:

-p Program Name [String]; -d Database [String]; default=nr; -i Query File [File In]; default=stdin; -e Expectation value (E) [Real]; default=10.0; -m alignment view options: 0=pairwise; 1=query-anchored showing identities; 2=query-anchored no identities; 3=flat query-anchored, show identities; 4=flat query-anchored, no identities; 5=query-anchored no identities and blunt ends; 6=flat query-anchored, no identities and blunt ends; 7=XML Blast output; 8=tabular; 9 tabular with comment lines [Integer]; default=0; -o BLAST report Output File [File Out] Optional; default=stdout; -F Filter query sequence (DUST with blastn, SEG with others) [String]; default=T; -G Cost to open a gap (zero invokes default behavior) [Integer]; default=0; -E Cost to extend a gap (zero invokes default behavior) [Integer]; default=0; -X X dropoff value for gapped alignment (in bits) (zero invokes default behavior); blastn 30, megablast 20, tblastx 0, all others 15 [Integer]; default=0; -I Show GI's in defines [T/F]; default=F; q Penalty for a nucleotide mismatch (blastn only) [Integer]; default=−3; -r Reward for a nucleotide match (blastn only) [Integer]; default=1; -v Number of database sequences to show one-line descriptions for (V) [Integer]; default=500; -b Number of database sequence to show alignments for (B) [Integer]; default=250; -f Threshold for extending hits, default if zero; blastp 11, blastn 0, blastx 12, tblastn 13; tblastx 13, megablast 0 [Integer]; default=0; -g Perform gapped alignment (not available with tblastx) [T/F]; default=T; -Q Query Genetic code to use [Integer]; default=1; -D DB Genetic code (for tblast[nx] only) [Integer]; default=1; -a Number of processors to use [Integer]; default=1; -O SeqAlign file [File Out] Optional; -J Believe the query define [T/F]; default=F; -M Matrix [String]; default=BLOSUM62; -W Word size, default if zero (blastn 11, megablast 28, all others 3) [Integer]; default=0; -z Effective length of the database (use zero for the real size) [Real]; default=0; -K Number of best hits from a region to keep (off by default, if used a value of 100 is recommended) [Integer]; default=0; -P 0 for multiple hit, 1 for single hit [Integer]; default=0; -Y Effective length of the search space (use zero for the real size) [Real]; default=0; -S Query strands to search against database (for blast[nx], and tblastx); 3 is both, 1 is top, 2 is bottom [Integer]; default=3; -T Produce HTML output [T/F]; default=F; -I Restrict search of database to list of GI's [String] Optional; -U Use lower case filtering of FASTA sequence [T/F] Optional; default=F; -y X dropoff value for ungapped extensions in bits (0.0 invokes default behavior); blastn 20, megablast 10, all others 7 [Real]; default=0.0; -Z X dropoff value for final gapped alignment in bits (0.0 invokes default behavior); blastn/megablast 50, tblastx 0, all others 25 [Integer]; default=0; -R PSITBLASTN checkpoint file [File In] Optional; -n MegaBlast search [T/F]; default=F; -L Location on query sequence [String] Optional; -A Multiple Hits window size, default if zero (blastn/megablast 0, all others 40 [Integer]; default=0; -w Frame shift penalty (OOF algorithm for blastx) [Integer]; default=0; -t Length of the largest intron allowed in tblastn for linking HSPs (0 disables linking) [Integer]; default=0.

[0253] Results of high quality are reached by using the algorithm of Needleman and Wunsch or Smith and Waterman. Therefore programs based on said algorithms are preferred. Advantageously the comparisons of sequences can be done with the program PileUp (J. Mol. Evolution., 25, 351-360, 1987, Higgins et al., CABIOS, 5 1989: 151-153) or preferably with the programs Gap and BestFit, which are respectively based on the algorithms of Needleman and Wunsch [J. Mol. Biol. 48; 443-453 (1970)] and Smith and Waterman [Adv. Appl. Math. 2; 482-489 (1981)]. Both programs are part of the GCG software-package [Genetics Computer Group, 575 Science Drive, Madison, Wis., USA 53711 (1991); Altschul et al. (1997) Nucleic Acids Res. 25:3389 et seq.]. Therefore preferably the calculations to determine the percentages of sequence homology are done with the program Gap over the whole range of the sequences. The following standard adjustments for the comparison of nucleic acid sequences were used: gap weight: 50, length weight: 3, average match: 10.000, average mismatch: 0.000.

[0254] For example a sequence, which has 80% homology with sequence SEQ ID NO: 1 at the nucleic acid level is understood as meaning a sequence which, upon comparison with the sequence SEQ ID NO: 1 by the above Gap program algorithm with the above parameter set, has a 80% homology.

[0255] Homology between two polypeptides is understood as meaning the identity of the amino acid sequence over in each case the entire sequence length which is calculated by comparison with the aid of the program algorithm GAP (Wisconsin Package Version 10.0, University of Wisconsin, Genetics Computer Group (GCG), Madison, USA), setting the following parameters:

| | | | |
|---|---|---|---|
| Gap weight: | 8 | Length weight: | 2 |
| Average match: | 2,912 | Average mismatch: | −2,003 |

[0256] For example a sequence which has a 80% homology with sequence SEQ ID NO: 1 at the protein level is understood as meaning a sequence which, upon comparison with the sequence SEQ ID NO: 1 by the above program algorithm with the above parameter set, has a 80% homology.

[0257] Functional equivalents derived from one of the polypeptides as shown in table II, application no. 1, columns 5 and 7, preferably shown in table II B, application no. 1, columns 5 and 7 resp., according to the invention by substitution, insertion or deletion have at least 30%, 35%, 40%, 45% or 50%, preferably at least 55%, 60%, 65% or 70% by preference at least 80%, especially preferably at least 85% or 90%, 91%, 92%, 93% or 94%, very especially preferably at least 95%, 97%, 98% or 99% homology with one of the polypeptides as shown in table II, application no. 1, columns 5 and 7, preferably shown in table II B, application no. 1, columns 5 and 7 resp., according to the invention and are distinguished by essentially the same properties as the polypeptide as shown in table II, application no. 1, columns 5 and 7, preferably shown in table II B, application no. 1, columns 5 and 7.

[0258] Functional equivalents derived from the nucleic acid sequence as shown in table I, application no. 1, columns 5 and 7, preferably shown in table I B, application no. 1, columns 5 and 7 resp., according to the invention by substitution, insertion or deletion have at least 30%, 35%, 40%, 45% or 50%, preferably at least 55%, 60%, 65% or 70% by preference at least 80%, especially preferably at least 85% or 90%, 91%, 92%, 93% or 94%, very especially preferably at least 95%, 97%, 98% or 99% homology with one of the polypeptides as shown in table II, application no. 1, columns 5 and 7, preferably shown in table II B, application no. 1, columns 5 and 7 resp., according to the invention and encode polypeptides having essentially the same properties as the polypeptide as shown in table II, application no. 1, columns 5 and 7, preferably shown in table II B, application no. 1, columns 5 and 7.

[0259] “Essentially the same properties” of a functional equivalent is above all understood as meaning that the functional equivalent has above mentioned activity, e.g conferring an increasing in the fine chemical amount by for example expression either in the cytsol or in an organelle such as a plastid or mitochondria or both, preferably in plastids while increasing the amount of protein, activity or function of said functional equivalent in an organism, e.g. a microorganism, a plant or plant or animal tissue, plant or animal cells or a part of the same.

[0260] A nucleic acid molecule encoding an homologous to a protein sequence of table II, application no. 1, columns 5 and 7, preferably shown in table II B, application no. 1, columns 5 and 7 resp., can be created by introducing one or more nucleotide substitutions, additions or deletions into a nucleotide sequence of the nucleic acid molecule of the present invention, in particular of table I, application no. 1, columns 5 and 7, preferably shown in table I B, application no. 1, columns 5 and 7 resp., such that one or more amino acid substitutions, additions or deletions are introduced into the encoded protein. Mutations can be introduced into the encoding sequences of table I, application no. 1, columns 5 and 7, preferably shown in table I B, application no. 1, columns 5 and 7 resp., by standard techniques, such as site-directed mutagenesis and PCR-mediated mutagenesis.

[0261] Preferably, conservative amino acid substitutions are made at one or more predicted non-essential amino acid residues. A “conservative amino acid substitution” is one in which the amino acid residue is replaced with an amino acid residue having a similar side chain. Families of amino acid residues having similar side chains have been defined in the art. These families include amino acids with basic side chains (e.g., lysine, arginine, histidine), acidic side chains (e.g., aspartic acid, glutamic acid), uncharged polar side chains (e.g., glycine, asparagine, glutamine, serine, threonine, tyrosine, cysteine), nonpolar side chains (e.g., alanine, valine, leucine, isoleucine, proline, phenylalanine, methionine, tryptophane), beta-branched side chains (e.g., threonine, valine, isoleucine) and aromatic side chains (e.g., tyrosine, phenylalanine, tryptophane, histidine).

[0262] Thus, a predicted nonessential amino acid residue in a polypeptide of the invention or a polypeptide used in the process of the invention is preferably replaced with another amino acid residue from the same family. Alternatively, in another embodiment, mutations can be introduced randomly along all or part of a coding sequence of a nucleic acid molecule of the invention or used in the process of the invention, such as by saturation mutagenesis, and the resultant mutants can be screened for activity described herein to identify mutants that retain or even have increased above mentioned activity, e.g. conferring an increase in content of the fine chemical.

[0263] Following mutagenesis of one of the sequences of shown herein, the encoded protein can be expressed recombinantly and the activity of the protein can be determined using, for example, assays described herein (see Examples).

[0264] The highest homology of the nucleic acid molecule used in the process according to the invention was found for the following database entries by Gap search.

[0265] Homologues of the nucleic acid sequences used, with the sequence shown in table I, application no. 1, columns 5 and 7, preferably shown in table I B, application no. 1, columns 5 and 7, comprise also allelic variants with at least approximately 30%, 35%, 40% or 45% homology, by preference at least approximately 50%, 60% or 70%, more preferably at least approximately 90%, 91%, 92%, 93%, 94% or 95% and even more preferably at least approximately 96%, 97%, 98%, 99% or more homology with one of the nucleotide sequences shown or the abovementioned derived nucleic acid sequences or their homologues, derivatives or analogues or parts of these. Allelic variants encompass in particular functional variants which can be obtained by deletion, insertion or substitution of nucleotides from the sequences shown, preferably from table I, application no. 1, columns 5 and 7, preferably shown in table I B, application no. 1, columns 5 and 7, or from the derived nucleic acid sequences, the intention being, however, that the enzyme activity or the biological activity of the resulting proteins synthesized is advantageously retained or increased.

[0266] In one embodiment of the present invention, the nucleic acid molecule of the invention or used in the process of the invention comprises the sequences shown in any of the table I, application no. 1, columns 5 and 7, preferably shown in table I B, application no. 1, columns 5 and 7. It is preferred that the nucleic acid molecule comprises as little as possible other nucleotides not shown in any one of table I, application no. 1, columns 5 and 7, preferably shown in table I B, application no. 1, columns 5 and 7. In one embodiment, the nucleic acid molecule comprises less than 500, 400, 300, 200, 100, 90, 80, 70, 60, 50 or 40 further nucleotides. In a further embodiment, the nucleic acid molecule comprises less than 30, 20 or 10 further nucleotides. In one embodiment, the nucleic acid molecule use in the process of the invention is identical to the sequences shown in table I, application no. 1, columns 5 and 7, preferably shown in table I B, application no. 1, columns 5 and 7.

[0267] Also preferred is that the nucleic acid molecule used in the process of the invention encodes a polypeptide comprising the sequence shown in table II, application no. 1, columns 5 and 7, preferably shown in table II B, application no. 1, columns 5 and 7. In one embodiment, the nucleic acid molecule encodes less than 150, 130, 100, 80, 60, 50, 40 or 30 further amino acids. In a further embodiment, the encoded polypeptide comprises less than 20, 15, 10, 9, 8, 7, 6 or 5 further amino acids. In one embodiment used in the inventive process, the encoded polypeptide is identical to the sequences shown in table II, application no. 1, columns 5 and 7, preferably shown in table II B, application no. 1, columns 5 and 7.

[0268] In one embodiment, the nucleic acid molecule of the invention or used in the process encodes a polypeptide comprising the sequence shown in table II, application no. 1, columns 5 and 7, preferably shown in table II B, application no. 1, columns 5 and 7 comprises less than 100 further nucleotides. In a further embodiment, said nucleic acid molecule comprises less than 30 further nucleotides. In one embodiment, the nucleic acid molecule used in the process is identical to a coding sequence of the sequences shown in table I, application no. 1, columns 5 and 7, preferably shown in table I B, application no. 1, columns 5 and 7.

[0269] Polypeptides (=proteins), which still have the essential biological or enzymatic activity of the polypeptide of the present invention conferring an increase of the fine chemical i.e. whose activity is essentially not reduced, are polypeptides with at least 10% or 20%, by preference 30% or 40%, especially preferably 50% or 60%, very especially preferably 80% or 90 or more of the wild type biological activity or enzyme activity, advantageously, the activity is essentially not reduced in comparison with the activity of a polypeptide shown in table II, application no. 1, columns 5 and 7 expressed under identical conditions.

[0270] Homologues of table I, application no: 1, columns 5 and 7 or of the derived sequences of table II, application no. 1, columns 5 and 7 also mean truncated sequences, cDNA, single-stranded DNA or RNA of the coding and noncoding DNA sequence. Homologues of said sequences are also understood as meaning derivatives, which comprise noncoding regions such as, for example, UTRs, terminators, enhancers or promoter variants. The promoters upstream of the nucleotide sequences stated can be modified by one or more nucleotide substitution(s), insertion(s) and/or deletion(s) without, however, interfering with the functionality or activity either of the promoters, the open reading frame (=ORF) or with the 3′-regulatory region such as terminators or other 3′ regulatory regions, which are far away from the ORF. It is furthermore possible that the activity of the promoters is increased by modification of their sequence, or that they are replaced completely by more active promoters, even promoters from heterologous organisms. Appropriate promoters are known to the person skilled in the art and are mentioned herein below.

[0271] In a further embodiment, the process according to the present invention comprises the following steps:
[0272] (a) selecting an organism or a part thereof expressing the polypeptide of this invention in the cytsol and/or in an organelle such as a plastid or mitochondria, preferably in a plastid;
[0273] (b) mutagenizing the selected organism or the part thereof;
[0274] (c) comparing the activity or the expression level of said polypeptide in the mutagenized organism or the part thereof with the activity or the expression of said polypeptide in the selected organisms or the part thereof;
[0275] (d) selecting the mutagenized organisms or parts thereof, which comprise an increased activity or expression level of said polypeptide compared to the selected organism (a) or the part thereof;
[0276] (e) optionally, growing and cultivating the organisms or the parts thereof; and
[0277] (f) recovering, and optionally isolating, the free or bound the fine chemical produced by the selected mutated organisms or parts thereof.

[0278] The organisms or part thereof produce according to the herein mentioned process of the invention an increased level of free and/or bound fine chemical compared to said control or selected organisms or parts thereof.

[0279] Advantageously the selected organisms are mutagenized according to the invention. According to the invention mutagenesis is any change of the genetic information in the genome of an organism, that means any structural or compositional change in the nucleic acid preferably DNA of an organism that is not caused by normal segregation or genetic recombination processes. Such mutations may occur spontaneously, or may be induced by mutagens as described below. Such change can be induced either randomly or selectively. In both cases the genetic information of the organism is modified. In general this lead to the situation that the activity of the gene product of the relevant genes inside the cells or inside the organism is increased.

[0280] In case of the specific or so called site directed mutagenesis a distinct gene is mutated and thereby its activity and/or the activity or the encoded gene product is repressed, reduced or increased, preferably increased. In the event of a random mutagenesis one or more genes are mutated by chance and their activities and/or the activities of their gene products are repressed, reduced or increased, preferably increased.

[0281] For the purpose of a mutagenesis of a huge population of organisms, such population can be transformed with a DNA construct, which is useful for the activation of as much as possible genes of an organism, preferably all genes. For example the construct can contain a strong promoter or one or more enhancers, which are capable of transcriptionally activate genes in the vicinity of their integration side. With this method it is possible to statistically mutagenize, eg activate nearly all genes of an organism by the random integration of an activation construct. Afterwards the skilled worker can identify those mutagenized lines in which a gene of the invention has been activated, which in turns leads to the desired increase in the fine chemical production.

[0282] The genes of the invention can also be activated by mutagenesis, either of regulatory or coding regions. In the event of a random mutagenesis a huge number of organisms are treated with a mutagenic agent. The amount of said agent and the intensity of the treatment would be chosen in such a manner that statistically nearly every gene be mutated once. The process for the random mutagenesis as well as the respective agents is well known by the skilled person. Such methods are disclosed for example by A. M. van Harten [(1998), “Mutation breeding: theory and practical applications”, Cambridge University Press, Cambridge, UK], E Friedberg, G Walker, W Siede [(1995), “DNA Repair and Mutagenesis”, Blackwell Publishing], or K. Sankaranarayanan, J. M. Gentile, L. R. Ferguson [(2000) “Protocols in Mutagenesis”, Elsevier Health Sciences]. As the skilled worker knows the spontaneous mutation rate in the cells of an organism is very low and that a large number of chemical, physical or biological agents are available for the mutagenesis of organisms. These agents are named as mutagens or mutagenic agents. As mentioned before three different kinds of mutagens (chemical, physical or biological agents) are available.

[0283] There are different classes of chemical mutagens, which can be separated by their mode of action. For example base analogues such as 5-bromouracil, 2-amino purin. Other chemical mutagens are interacting with the DNA such as sulphuric acid, nitrous acid, hydroxylamine; or other alkylating agents such as monofunctional agents like ethyl methanesulfonate, dimethylsulfate, methyl methanesulfonate), bifunctional like dichloroethyl sulphide, Mitomycin, Nitrosoguanidine-dialkylnitrosamine, N-Nitrosoguanidin derivatives, N-alkyl-N-nitro-N-nitroso-guanidine-), intercalating dyes like Acridine, ethidium bromide).

[0284] Physical mutagens are for example ionizing irradiation (X ray), UV irradiation. Different forms of irradiation are available and they are strong mutagens. Two main classes of irradiation can be distinguished: a) non-ionizing irradiation such as UV light or ionizing irradiation such as X ray. Biological mutagens are for example transposable elements for example IS elements such as IS100, transposons such as Tn5, Tn10, Tn916 or Tn1000 or phages like Mu^{amplac}, P1, T5, λplac etc. Methods for introducing this phage DNA into the appropriate microorganism are well known to the skilled worker (see Microbiology, Third Edition, Eds. Davis, B. D., Dulbecco, R., Eisen, H. N. and Ginsberg, H. S., Harper International Edition, 1980). The common procedure of a transposon mutagenesis is the insertion of a transposable element within a gene or nearby for example in the promoter or terminator region and thereby leading to a loss of the gene function. Procedures to localize the transposon within the genome of the organisms are well known by a person skilled in the art.

[0285] Preferably a chemical or biochemical procedure is used for the mutagenesis of the organisms. A preferred chemical method is the mutagenesis with N-methyl-N-nitro-nitrosoguanidine.

[0286] Other biological methods are disclosed by Spee et al. (Nucleic Acids Research, Vol. 21, No. 3, 1993: 777-778). Spee et al. teaches a PCR method using dITP for the random mutagenesis. This method described by Spee et al. was further improved by Rellos et al. (Protein Expr. Purif., 5, 1994: 270-277). The use of an in vitro recombination technique for molecular mutagenesis is described by Stemmer (Proc. Natl. Acad. Sci. USA, Vol. 91, 1994: 10747-10751). Moore et al. (Nature Biotechnology Vol. 14, 1996: 458-467) describe the combination of the PCR and recombination methods for increasing the enzymatic activity of an esterase toward a paranitrobenzyl ester. Another route to the mutagenesis of enzymes is described by Greener et al. in Methods in Molecular Biology (Vol. 57, 1996: 375-385). Greener et al. use the specific Escherichia coli strain XL1-Red to generate Escherichia coli mutants which have increased antibiotic resistance.

[0287] In one embodiment, the protein according to the invention or the nucleic acid molecule characterized herein originates from a eukaryotic or prokaryotic organism such as a non-human animal, a plant, a microorganism such as a fungus, yeast, an alga, a diatom or a bacterium. Nucleic acid molecules, which advantageously can be used in the process of the invention originate from yeasts, for example the family Saccharomycetaceae, in particular the genus Saccharomyces, or yeast genera such as Candida, Hansenula, Pichia, Yarrowia, Rhodotorula or Schizosaccharomyces and the especially advantageous from the species Saccharomyces cerevisiae.

[0288] If, in the process according to the invention, plants are selected as the donor organism, this plant may, in principle, be in any phylogenetic relation of the recipient plant. Donor and recipient plant may belong to the same family, genus, species, variety or line, resulting in an increasing homology between the nucleic acids to be integrated and corresponding parts of the genome of the recipient plant. This also applies analogously to microorganisms as donor and recipient organism.

It might also be advantageously to use nuclei acids molecules from very distinct species, since these might exhibit reduced sensitivity against endogenous regulatory mechanisms and such sequences might not be recognized by endogenous silencing mechanisms.

[0289] Accordingly, one embodiment of the application relates to the use of nucleic acid molecules in the process of the invention from algae or plants, e.g. crop plants, e.g. from: B. napus; Glycine max; Oryza sativa, sunflower linseed or maize or their homologues.

[0290] Accordingly, in one embodiment, the invention relates to a nucleic acid molecule, which comprises a nucleic acid molecule selected from the group consisting of:
[0291] a) nucleic acid molecule encoding, preferably at least the mature form, of the polypeptide shown in table II, application no. 1, columns 5 and 7, preferably shown in table II B, application no. 1, columns 5 and 7; or a fragment thereof conferring an increase in the amount of the fine chemical in an organism or a part thereof
[0292] b) nucleic acid molecule comprising, preferably at least the mature form, of the nucleic acid molecule shown in table I, application no. 1, columns 5 and 7, preferably shown in table I B, application no. 1, columns 5 and 7 or a fragment thereof conferring an increase in the amount of the fine chemical in an organism or a part thereof;
[0293] c) nucleic acid molecule whose sequence can be deduced from a polypeptide sequence encoded by a nucleic acid molecule of (a) or (b) as result of the degeneracy of the genetic code and conferring an increase in the amount of the fine chemical in an organism or a part thereof;
[0294] d) nucleic acid molecule encoding a polypeptide whose sequence has at least 50% identity with the amino acid sequence of the polypeptide encoded by the nucleic acid molecule of (a) to (c) and conferring an increase in the amount of the fine chemical in an organism or a part thereof;
[0295] e) nucleic acid molecule which hybridizes with a nucleic acid molecule of (a) to (c) under stringent hybridisation conditions and conferring an increase in the amount of the fine chemical in an organism or a part thereof;
[0296] f) nucleic acid molecule encoding a polypeptide, the polypeptide being derived by substituting, deleting and/or adding one or more amino acids of the amino acid sequence of the polypeptide encoded by the nucleic acid molecules (a) to (d), preferably to (a) to (c), and conferring an increase in the amount of the fine chemical in an organism or a part thereof;
[0297] g) nucleic acid molecule encoding a fragment or an epitope of a polypeptide which is encoded by one of the nucleic acid molecules of (a) to (e), preferably to (a) to (c) and conferring an increase in the amount of the fine chemical in an organism or a part thereof;
[0298] h) nucleic acid molecule comprising a nucleic acid molecule which is obtained by amplifying a cDNA library or a genomic library using the primers in table III, application no. 1, column 7 and conferring an increase in the amount of the fine chemical in an organism or a part thereof;
[0299] i) nucleic acid molecule encoding a polypeptide which is isolated, e.g. from a expression library, with the aid of monoclonal antibodies against a polypeptide encoded by one of the nucleic acid molecules of (a) to (g), preferably to (a) to (c) and conferring an increase in the amount of the fine chemical in an organism or a part thereof;
[0300] j) nucleic acid molecule which encodes a polypeptide comprising the consensus sequence shown in table IV, application no. 1, columns 0.7 and conferring an increase in the amount of the fine chemical in an organism or a part thereof;
[0301] k) nucleic acid molecule encoding the amino acid sequence of a polypeptide encoding a domain of the polypeptide shown in table II, application no. 1, columns 5 and 7 and conferring an increase in the amount of the fine chemical in an organism or a part thereof; and
[0302] l) nucleic acid molecule which is obtainable by screening a suitable nucleic acid library under stringent hybridization conditions with a probe comprising one of the sequences of the nucleic acid molecule of (a) to (k) or with a fragment of at least 15 nt, preferably 20 nt, 30 nt, 50 nt, 100 nt, 200 nt or 500 nt of the nucleic acid molecule characterized in (a) to (h) or of the nucleic acid molecule shown in table I, application no. 1, columns 0.5 and 7 or a nucleic acid molecule encoding, preferably at least the mature form of, the polypeptide shown in table II, application no. 1, columns 5 and 7, and conferring an increase in the amount of the fine chemical in an organism or a part thereof; or which encompasses a sequence which is complementary thereto;
   whereby, preferably, the nucleic acid molecule according to (a) to (l) distinguishes over the sequence depicted in table I A and/or I B, application no. 1, columns 5 and 7 by one or more nucleotides. In one embodiment, the nucleic acid molecule of the invention does not consist of the sequence shown in table I A and/or I B, application no. 1, columns 5 and 7. In an other embodiment, the nucleic acid molecule of the present invention is at least 30% identical and less than 100%, 99.999%, 99.99%, 99.9% or 99% identical to the sequence shown in table I A and/or I B, application no. 1, columns 5 and 7. In a further embodiment the nucleic acid molecule does not encode the polypeptide sequence shown in table II A and/or II B, application no. 1, columns 5 and 7. Accordingly, in one embodiment, the nucleic acid molecule of the present invention encodes in one embodiment a polypeptide which differs at least in one or more amino acids from the polypeptide shown in table II, application no. 1, columns 5 and 7 does not encode a protein of the sequence shown in table II A and/or II B, application no. 1, columns 5 and 7. Accordingly, in one embodiment, the protein encoded by a sequence of a nucleic acid according to (a) to (l) does not consist of the sequence shown in table I A and/or I B, application no. 1, columns 5 and 7. In a further embodiment, the protein of the present invention is at least 30% identical to protein sequence depicted in table II A and/or II B, application no. 1, columns 5 and 7 and less than 100%, preferably less than 99.999%, 99.99% or 99.9%, more preferably less than 99%, 985, 97%, 96% or 95% identical to the sequence shown in table II A and/or II B, application no. 1, columns 5 and 7.

[0303] The nucleic acid sequence according to the invention mentioned above is advantageously functionally joined to a nucleic acid sequence encoding a transit peptide, in such a manner that a preprotein is translated, which is able to direct the polypeptide to the organelle such as to the plastid. In another preferred embodiment the nucleic acids according to the invention mentioned above is advantageously functionally joined to a promoter region functional in plastids like for example the RNA operon promoter fused to the 5′UTR of the rbcL gene and in another preferred embodiment joined to a plastome sequences homologous to the integration sites. Example for useful integration sites are the tmV-rps12/7 (Skidar et al., Plant Cell Rep. 1998, 18: 20-24 and other reports), thr rbvL-aacD site (Svab et al. 1993, Proc. Natl. Acad. Sci. USA 90: 913-917), the trnI-trnA site (De Cosa et al., 2001, Nat. Biotech. 19, 71-74) the rps7-ndhB site (Hou et al., 2003, Transgenic Res. 12, 111-114) and the ndhF-tmL site Zhang et al., 2001c, Plant Physiol. 127, 131-141)

[0304] The nucleic acid sequence coding for the transit peptide is advantageously derived from a nucleic acid sequence encoding a protein finally resided in the plastid and is stemming from an organism selected from the group consisting of the Genera

Acetabularia, Arabidopsis, Brassica, Chlamydomonas, Cururbita, Dunaliella, Euglena, Flaveria, Glycine, Helianthus, Hordeum, Lemna, Lolium, Lycopersion, Malus, Mesembryanthemum, Nicotiana, Oenotherea, Oryza, Petúnia, Phaseolus, Physcomitrella, Pinus, Pisum Raphanus, Silene, Sinapis, Solanum, Spinacea, Triticum and Zea. Preferably the transit peptide is derived from a protein selected from the group consisting of
ribulose bisphosphate carboxylase/oxygenase, 5-enolpyruvyl-shikimate-3-phosphate synthase, acetolactate synthase, chloroplast ribosomal protein CS17, Cs protein, ferredoxin, plastocyanin, ribulose bisphosphate carboxylase activase, tryptophan synthase, acyl carrier protein, plastid chaperonin-60, cytochrome c₅₅₂, 22-kDA heat shock protein, 33-kDa Oxygen-evolving enhancer protein 1, ATP synthase γ subunit, ATP synthase δ subunit, chlorophyll-a/b-binding proteinII-1, Oxygen-evolving enhancer protein 2, Oxygen-evolving enhancer protein 3, photosystem I: P21, photosystem I: P28, photosystem I: P30, photosystem I: P35, photosystem I: P37, glycerol-3-phosphate acyltransferases, chlorophyll a/b binding protein, CAB2 protein, hydroxymethyl-bilane synthase, pyruvate-orthophosphate dikinase, CAB3 protein, plastid ferritin, ferritin, early light-inducible protein, glutamate-1-semialdehyde aminotransferase, protochlorophyllide reductase, starch-granule-bound amylase synthase, light-harvesting chlorophyll a/b-binding protein of photosystem II, major pollen allergen Lol p 5a, plastid CIpB ATP-dependent protease, superoxide dismutase, ferredoxin NADP oxidoreductase, 28-kDa ribonucleoprotein, 31-kDa ribonucleoprotein, 33-kDa ribonucleoprotein, acetolactate synthase, ATP synthase CF₀ subunit 1, ATP synthase CF₀ subunit 2, ATP synthase CF₀ subunit 3, ATP synthase CF₀ subunit 4, cytochrome f, ADP-glucose pyrophosphorylase, glutamine synthase, glutamine synthase 2, carbonic anhydrase, GapA protein, heat-shock-protein hsp21, phosphate translocator, plastid ClpA ATP-dependent protease, plastid ribosomal protein CL24, plastid ribosomal protein CL9, plastid ribosomal protein PsCL18, plastid ribosomal protein PsCL25, DAHP synthase, starch phosphorylase, root acyl carrier protein II, betaine-aldehyde dehydrogenase, GapB protein, glutamine synthetase 2, phosphoribulokinase, nitrite reductase, ribosomal protein L12, ribosomal protein L13, ribosomal protein L21, ribosomal protein L35, ribosomal protein L40, triose phosphate-3-phosphoglycerate-phosphate translocator, ferredoxin-dependent glutamate synthase, glyceraldehyde-3-phosphate dehydrogenase, NADP-dependent malic enzyme and NADP-malate dehydrogenase. The plastome sequences are preferential derived from the plastome of the target organisms themselves and are advantageously derived from one of the following intergration sites: tmV-rps12/7 (Skidar et al., Plant Cell Rep. 1998, 18: 20-24 and other reports), rbvL-aacD (Svab et al. 1993, Proc. Natl. Acad. Sci. USA 90: 913-917), trnI-trnA (De Cosa et al., 2001, Nat. Biotech. 19, 71-74) rps7-ndhB (Hou et al., 2003, Transgenic Res. 12, 111-114) or ndhF-trnL site Zhang et al., 2001c, Plant Physiol. 127, 131-141).

[0305] The nucleic acid sequences used in the process are advantageously introduced in a nucleic acid construct, preferably an expression cassette, which makes possible the expression of the nucleic acid molecules in an organism, advantageously a plant or a microorganism such as an algae, advantageously in the plastids of those organisms.

[0306] Accordingly, the invention also relates to a nucleic acid construct, preferably to an expression construct, comprising the nucleic acid molecule of the present invention functionally linked to one or more regulatory elements or signals.

[0307] As described herein, the nucleic acid construct can also comprise further genes, which are to be introduced into the organisms or cells. It is possible and advantageous to introduce into, and express in, the host organisms regulatory genes such as genes for inductors, repressors or enzymes, which, owing to their enzymatic activity, engage in the regulation of one or more genes of a biosynthetic pathway. These genes can be of heterologous or homologous origin. Moreover, further biosynthesis genes may advantageously be present, or else these genes may be located on one or more further nucleic acid constructs. Genes, which are advantageously employed as biosynthesis genes are genes of the fatty acid metabolism, amino acid metabolism, of glycolysis, of the tricarboxylic acid metabolism or their combinations. As described herein, regulator sequences or factors can have a positive effect on preferably the gene expression of the genes introduced, thus increasing it. Thus, an enhancement of the regulator elements may advantageously take place at the transcriptional level by using strong transcription signals such as promoters and/or enhancers. In addition, however, an enhancement of translation is also possible, for example by increasing mRNA stability or by inserting a translation enhancer. sequence.

[0308] In principle, the nucleic acid construct can comprise the herein described regulator sequences and further sequences relevant for the expression of the comprised genes. Thus, the nucleic acid construct of the invention can be used as expression cassette and thus can be used directly for introduction into the plant, or else they may be introduced into a vector. Accordingly in one embodiment the nucleic acid construct is an expression cassette comprising a microorganism promoter or a microorganism terminator or both. In another embodiment the expression cassette encompasses a plant promoter or a plant terminator or both. In another embodiment the expression cassette encompasses sequences for transcription by plastid RNA polymerases.

[0309] Accordingly, in one embodiment, the process according to the invention comprises the following steps:
[0310] (a) introducing of a nucleic acid construct comprising the nucleic acid molecule of the invention or used in the process of the invention or encoding the polypeptide of the present invention or used in the process of the invention; or
[0311] (b) introducing of a nucleic acid molecule, including regulatory sequences or factors, which expression increases the expression of the nucleic acid molecule of the invention or used in the process of the invention or encoding the polypeptide of the present invention or used in the process of the invention;
   [0312] in a cell, or an organism or a part thereof, preferably in a plant, plant cell or a microorganism preferably in the organelles such as the plastids thereof, and
[0313] (c) expressing of the gene product encoded by the nucleic acid construct or the nucleic acid molecule mentioned under (a) or (b) in the cell or the organism or part thereof.

[0314] After the introduction and expression of the nucleic acid construct the transgenic organism or cell is advantageously cultured and subsequently harvested. The transgenic organism or cell is advantageously a eukaryotic organism such as a microorganism, a non-human animal or plant preferably a microorganism such as an algae or a plant such as a plant selected from the families Aceraceae, Anacardiaceae, Apiaceae, Asteraceae, Brassicaceae, Cactaceae, Cucurbitaceae, Euphorbiaceae, Fabaceae, Malvaceae, Nymphaeaceae, Papaveraceae, Rosaceae, Salicaceae, Solanaceae, Arecaceae, Bromeliaceae, Cyperaceae, Iridaceae, Liliaceae, Orchidaceae, Gentianaceae, Labiaceae, Magnoliaceae, Ranunculaceae, Carifolaceae, Rubiaceae, Scrophulariaceae, Caryophyllaceae, Ericaceae, Polygonaceae, Violaceae, Juncaceae or Poaceae and preferably from a plant selected from the group of the families Apiaceae, Asteraceae, Brassicaceae, Cucurbitaceae, Fabaceae, Papaveraceae, Rosaceae, Solanaceae, Liliaceae or Poaceae, preferably a crop or oilseed crop plant, or a part thereof.

[0315] To introduce a nucleic acid molecule into a nucleic acid construct, e.g. as part of an expression cassette, the codogenic gene segment is advantageously subjected to an amplification and ligation reaction in the manner known by a skilled person. It is preferred to follow a procedure similar to the protocol for the Pfu DNA polymerase or a Pfu/Taq DNA polymerase mixture. The primers are selected according to the sequence to be amplified. The primers should expediently be chosen in such a way that the amplificate comprise the codogenic sequence from the start to the stop codon. After the amplification, the amplificate is expediently analyzed. For example, the analysis may consider quality and quantity and be carried out following separation by gel electrophoresis. Thereafter, the amplificate can be purified following a standard protocol (for example Qiagen). An aliquot of the purified amplificate is then available for the subsequent cloning step. The skilled worker generally knows suitable cloning vectors.

[0316] They include, in particular, vectors which are capable of replication in easy to handle cloning systems like as bacterial yeast or insect cell based (e.g. baculovirus expression) systems, that is to say especially vectors which ensure efficient cloning in E. coli, and which make possible the stable transformation of plants. Vectors, which must be mentioned, in particular are various binary and cointegrated vector systems, which are suitable for the T-DNA-mediated transformation. Such vector systems are generally characterized in that they contain at least the vir genes, which are required for the Agrobacterium-mediated transformation, and the T-DNA border sequences.

[0317] In general, vector systems preferably also comprise further cis-regulatory regions such as promoters and terminators and/or selection markers by means of which suitably transformed organisms can be identified. While vir genes and T-DNA sequences are located on the same vector in the case of cointegrated vector systems, binary systems are based on at least two vectors, one of which bears vir genes, but no T-DNA, while a second one bears T-DNA, but no vir gene. Owing to this fact, the last-mentioned vectors are relatively small, easy to manipulate and capable of replication in E. coli and in Agrobacterium. These binary vectors include vectors from the series pBIB-HYG, pPZP, pBecks, pGreen. Those which are preferably used in accordance with the invention are Bin19, pB1101, pBinAR, pGPTV and pCAMBIA. An overview of binary vectors and their use is given by Hellens et al, Trends in Plant Science (2000) 5, 446-451. The vectors are preferably modified in such a manner, that they already contain the nucleic acid coding for the transitpeptide and that the nucleic acids of the invention, preferentially the nucleic acid sequences encoding the polypeptides shown in table II, application no. 1, columns 5 and 7 can be cloned 3″ prime to the transitpeptide encoding sequence, leading to a functional preprotein, which is directed to the plastids and which means that the mature protein fulfills its biological activity.

[0318] For a vector preparation, vectors may first be linearized using restriction endonuclease(s) and then be modified enzymatically in a suitable manner. Thereafter, the vector is purified, and an aliquot is employed in the cloning step. In the cloning step, the enzyme-cleaved and, if required, purified amplificate is cloned together with similarly prepared vector fragments, using ligase. In this context, a specific nucleic acid construct, or vector or plasmid construct, may have one or else more codogenic gene segments. The codogenic gene segments in these constructs are preferably linked operably to regulatory sequences. The regulatory sequences include, in particular, plant sequences like the above-described promoters and terminators. The constructs can advantageously be propagated stably in microorganisms, in particular Escherichia coli and/or Agrobacterium tumefaciens, under selective conditions and enable the transfer of heterologous DNA into plants or other microorganisms. In accordance with a particular embodiment, the constructs are based on binary vectors (overview of a binary vector: Hellens et al., 2000). As a rule, they contain prokaryotic regulatory sequences, such as replication origin and selection markers, for the multiplication in microorganisms such as Escherichia coli and Agrobacterium tumefaciens. Vectors can further contain agrobacterial T-DNA sequences for the transfer of DNA into plant genomes or other eukaryotic regulatory sequences for transfer into other eukaryotic cells, e.g. Saccharomyces sp. or other prokaryotic regulatory sequences for the transfer into other prokaryotic cells, e.g. Corynebacterium sp. or Bacillus sp. For the transformation of plants, the right border sequence, which comprises approximately 25 base pairs, of the total agrobacterial T-DNA sequence is advantageously included. Usually, the plant transformation vector constructs according to the invention contain T-DNA sequences both from the right and from the left border region, which contain expedient recognition sites for site-specific acting enzymes, which, in turn, are encoded by some of the vir genes.

[0319] Alternatively the nucleic acids of the invention are cloned into vectors, which are designed for the direct transformation of organelles such as plastids. Generally such vectors additionally carry a specific resistance gene (as mentioned above), like the spectomycin resistance gene (aad) under control of a plastid regulatory sequence and two adjacent plastome sequences of the target organism, which mediated the directed insertion of the sequences of interest, eg the resistance gene and the expression cassette, into the plastidal genome through homologous recombination. As transformation can be achieved by particle bombardment or other physical or chemical methods e.g. PEG treatment or microinjection, the vectors do not need to contain the elements necessary for agrobacterial T-DNA transfer (see, below).

[0320] Suitable host organisms are known to the skilled worker. Advantageous organisms are described further above in the present application. They include in particular eukaryotes such as microorganisms and plants. Other useful organisms are prokaryotic host organisms, which may be useful for the cloning of desired nucleic acid constructs or vectors such as the genera Escherichia for example the species Escherichia coli, specifically Escherichia coli K12 and its described strains or Agrobacterium for example the species Agrobacterium tumefaciens.

[0321] Advantageously preferred in accordance with the invention are host organisms of the genus Agrobacterium tumefaciens or plants. Preferred plants are selected from among the families Aceraceae, Anacardiaceae, Apiaceae, Asteraceae, Apiaceae, Betulaceae, Boraginaceae, Brassicaceae, Bromeliaceae, Cactaceae, Caricaceae, Caryophyllaceae, Cannabaceae, Convolvulaceae, Chenopodiaceae, Elaeagnaceae, Geraniaceae, Gramineae, Juglandaceae, Lauraceae, Leguminosae, Linaceae, Cucurbitaceae, Cyperaceae, Euphorbiaceae, Fabaceae, Malvaceae, Nymphaeaceae, Papaveraceae, Rosaceae, Salicaceae, Solanaceae, Arecaceae, Iridaceae, Liliaceae, Orchidaceae, Gentianaceae, Labiaceae, Magnoliaceae, Ranunculaceae, Carifolaceae, Rubiaceae, Scrophulariaceae, Ericaceae, Polygonaceae, Violaceae, Juncaceae, Poaceae, perennial grass, fodder crops, vegetables and ornamentals.

[0322] Especially preferred are plants selected from the groups of the families Apiaceae, Asteraceae, Brassicaceae, Cucurbitaceae, Fabaceae, Papaveraceae, Rosaceae, Solanaceae, Liliaceae or Poaceae. Especially advantageous are, in particular, crop plants. Accordingly, an advantageous plant preferably belongs to the group of the genus peanut, oilseed rape, canola, sunflower, safflower, olive, sesame, hazelnut, almond, avocado, bay, pumpkin/squash, linseed, soya, pistachio, borage, maize, wheat, rye, oats, sorghum and millet, triticale, rice, barley, cassava, potato, sugarbeet, fodder beet, egg plant, and perennial grasses and forage plants, oil palm, vegetables (brassicas, root vegetables, tuber vegetables, pod vegetables, fruiting vegetables, onion vegetables, leafy vegetables and stem vegetables), buckwheat, Jerusalem artichoke, broad bean, vetches, lentil, alfalfa, dwarf bean, lupin, clover and lucerne.

[0323] In order to introduce, into a plant, the nucleic acid molecule of the invention or used in the process according to the invention, it has proved advantageous first to transfer them into an intermediate host, for example a bacterium or a eukaryotic unicellular cell. The transformation into E. coli, which can be carried out in a manner known per se, for example by means of heat shock or electroporation, has proved itself expedient in this context. Thus, the transformed E. coli colonies can be analysed for their cloning efficiency. This can be carried out with the aid of a PCR. Here, not only the identity, but also the integrity, of the plasmid construct can be verified with the aid of a defined colony number by subjecting an aliquot of the colonies to said PCR. As a rule, universal primers which are derived from vector sequences are used for this purpose, it being possible, for example, for a forward primer to be arranged upstream of the start ATG and a reverse primer to be arranged downstream of the stop codon of the codogenic gene segment. The amplificates are separated by electrophoresis and assessed with regard to quantity and quality.

[0324] The nucleic acid constructs, which are optionally verified, are subsequently used for the transformation of the plants or other hosts, e.g. other eukaryotic cells or other prokaryotic cells. To this end, it may first be necessary to obtain the constructs from the intermediate host. For example, the constructs may be obtained as plasmids from bacterial hosts by a method similar to conventional plasmid isolation.

[0325] The nucleic acid molecule of the invention or used in the process according to the invention can also be introduced into modified viral vectors like baculovirus vectors for expression in insect cells or plant viral vectors like tobacco mosaic virus or potato virus X-based vectors. Approaches leading to the expression of proteins from the modified viral genome including the nucleic acid molecule of the invention or used in the process according to the invention involve for example the inoculation of tobacco plants with infectious RNA transcribed in vitro from a cDNA copy of the recombinant viral genome. Another approach utilizes the transfection of whole plants from wounds inoculated with Agrobacterium tumefaciens containing cDNA copies of recombinant plus-sense RNA viruses. Different vectors and virus are known to the skilled worker for expression in different target eg. production plants.

[0326] A large number of methods for the transformation of plants are known. Since, in accordance with the invention, a stable integration of heterologous DNA into the genome of plants is advantageous, the T-DNA-mediated transformation has proved expedient in particular. For this purpose, it is first necessary to transform suitable vehicles, in particular agrobacteria, with a codogenic gene segment or the corresponding plasmid construct comprising the nucleic acid molecule of the invention. This can be carried out in a manner known per se. For example, said nucleic acid construct of the invention, or said expression construct or said plasmid construct, which has been generated in accordance with what has been detailed above, can be transformed into competent agrobacteria by means of electroporation or heat shock. In principle, one must differentiate between the formation of cointegrated vectors on the one hand and the transformation with binary vectors on the other hand. In the case of the first alternative, the constructs, which comprise the codogenic gene segment or the nucleic acid molecule of the invention have no T-DNA sequences, but the formation of the cointegrated vectors or constructs takes place in the agrobacteria by homologous recombination of the construct with T-DNA. The T-DNA is present in the agrobacteria in the form of Ti or Ri plasmids in which exogenous DNA has expediently replaced the oncogenes. If binary vectors are used, they can be transferred to agrobacteria either by bacterial conjugation or by direct transfer. These agrobacteria expediently already comprise the vector bearing the vir genes (currently referred to as helper Ti(Ri) plasmid). As mentioned before the stable integration of the heterologous nucleic acids into the plastidial genome may also be advantageously.

[0327] One or more markers may expediently also be used together with the nucleic acid construct, or the vector of the invention and, if plants or plant cells shall be transformed together with the T-DNA, with the aid of which the isolation or selection of transformed organisms, such as agrobacteria or transformed plant cells, is possible. These marker genes enable the identification of a successful transfer of the nucleic acid molecules according to the invention via a series of different principles, for example via visual identification with the aid of fluorescence, luminescence or in the wavelength range of light which is discernible for the human eye, by a resistance to herbicides or antibiotics, via what are known as nutritive markers (auxotrophism markers) or antinutritive markers, via enzyme assays or via phytohormones. Examples of such markers which may be mentioned are GFP (=green fluorescent protein); the luciferin/luciferase system, the β-galactosidase with its colored substrates, for example X-Gal, the herbicide resistances to, for example, imidazolinone, glyphosate, phosphinothricin or sulfonylurea, the antibiotic resistances to, for example, bleomycin, hygromycin, streptomycin, kanamycin, tetracyclin, chloramphenicol, ampicillin, gentamycin, geneticin (G418), spectinomycin or blasticidin, to mention only a few, nutritive markers such as the utilization of mannose or xylose, or antinutritive markers such as the resistance to 2-deoxyglucose. This list is a small number of possible markers. The skilled worker is very familiar with such markers. Different markers are preferred, depending on the organism and the selection method. In case of plastidal transformation methods other markers genes, like the ones mentioned above like spectomycin resistance gene (aadA) are preferably used.

[0328] As a rule, it is desired that the plant nucleic acid constructs are flanked by T-DNA at one or both sides of the codogenic gene segment. This is particularly useful when bacteria of the species Agrobacterium tumefaciens or Agrobacterium rhizogenes are used for the transformation. A method, which is preferred in accordance with the invention, is the transformation with the aid of Agrobacterium tumefaciens. However, biolistic methods may also be used advantageously for introducing the sequences in the process according to the invention, and the introduction by means of PEG is also possible. The transformed agrobacteria can be grown in the manner known per se and are thus available for the expedient transformation of the plants. The plants or plant parts to be transformed are grown or provided in the customary manner. The transformed agrobacteria are subsequently allowed to act on the plants or plant parts until a sufficient transformation rate is reached. Allowing the agrobacteria to act on the plants or plant parts can take different forms. For example, a culture of morphogenic plant cells or tissue may be used. After the T-DNA transfer, the bacteria are, as a rule, eliminated by antibiotics, and the regeneration of plant tissue is induced. This is done in particular using suitable plant hormones in order to initially induce callus formation and then to promote shoot development.

[0329] The transfer of foreign genes into the genome of a plant is called transformation. In doing this the methods described for the transformation and regeneration of plants from plant tissues or plant cells are utilized for transient or stable transformation. An advantageous transformation method is the transformation in planta. To this end, it is possible, for example, to allow the agrobacteria to act on plant seeds or to inoculate the plant meristem with agrobacteria. It has proved particularly expedient in accordance with the invention to allow a suspension of transformed agrobacteria to act on the intact plant or at least the flower primordia. The plant is subsequently grown on until the seeds of the treated plant are obtained (Clough and Bent, Plant J. (1998) 16, 735-743). To select transformed plants, the plant material obtained in the transformation is, as a rule, subjected to selective conditions so that transformed plants can be distinguished from untransformed plants. For example, the seeds obtained in the above-described manner can be planted and, after an initial growing period, subjected to a suitable selection by spraying. A further possibility consists in growing the seeds, if appropriate after sterilization, on agar plates using a suitable selection agent so that only the transformed seeds can grow into plants. Further advantageous transformation methods, in particular for plants, are known to the skilled worker and are described hereinbelow.

[0330] Further advantageous and suitable methods are protoplast transformation by poly(ethylene glycol)-induced DNA uptake, the “biolistic” method using the gene cannon—referred to as the particle bombardment method, electroporation, the incubation of dry embryos in DNA solution, microinjection and gene transfer mediated by Agrobacterium. Said methods are described by way of example in B. Jenes et al., Techniques for Gene Transfer, in: Transgenic Plants, Vol. 1, Engineering and Utilization, eds. S. D. Kung and R. Wu, Academic Press (1993) 128-143 and in Potrykus Annu. Rev. Plant Physiol. Plant Molec. Biol. 42 (1991) 205-225). The nucleic acids or the construct to be expressed is preferably cloned into a vector, which is suitable for transforming Agrobacterium tumefaciens, for example pBin19 (Bevan et al., Nucl. Acids Res. 12 (1984) 8711). Agrobacteria transformed by such a vector can then be used in known manner for the transformation of plants, in particular of crop plants such as by way of example tobacco plants, for example by bathing bruised leaves or chopped leaves in an agrobacterial solution and then culturing them in suitable media. The transformation of plants by means of Agrobacterium tumefaciens is described, for example, by Hofgen and Willmitzer in Nucl. Acid Res. (1988) 16, 9877 or is known inter alia from F. F. White, Vectors for Gene Transfer in Higher Plants; in Transgenic Plants, Vol. 1, Engineering and Utilization, eds. S. D. Kung and R. Wu, Academic Press, 1993, pp. 15-38. For the transformation of plastids physical methods like PEG-treatment (O'Neil et al., 1993 Plant Journal. 3, 729-738, Golds et al., 1993 BioTechnology 11, 95-97) microinjection (Knoblauch et al., 1999, Nat. Biotech. 17, 906-910) or biolistics (Svab et al., 1990, Proc. Natl. Acad. Sci. USA 90, 8526-8530) are preferred. Such transformation methods are especially useful for the direct transformation of plastids and are well known to the skilled worker.

[0331] The abovementioned nucleic acid molecules can be cloned into the nucleic acid constructs or vectors according to the invention in combination together with further genes, or else different genes are introduced by transforming several nucleic acid constructs or vectors (including plasmids) into a host cell, advantageously into a plant cell or a microorganisms.

In addition to the sequence mentioned in table I, application no. 1, columns 5 and 7 or its derivatives, it is advantageous additionally to express and/or mutate further genes in the organisms. Especially advantageously, additionally at least one further gene of the amino acid biosynthetic pathway such as for L-lysine, L-threonine and/or L-methionine is expressed in the organisms such as plants or microorganisms. It is also possible that the regulation of the natural genes has been modified advantageously so that the gene and/or its gene product is no longer subject to the regulatory mechanisms which exist in the organisms. This leads to an increased synthesis of the amino acids desired since, for example, feedback regulations no longer exist to the same extent or not at all. In addition it might be advantageously to combine the nucleic acids sequences of the invention containing the sequences shown in table I, application no. 1, columns 5 and 7 with genes which generally support or enhances to growth or yield of the target organism, for example genes which lead to faster growth rate of microorganisms or genes which produces stress-, pathogen, or herbicide resistant plants.

[0332] In a further embodiment of the process of the invention, therefore, organisms are grown, in which there is simultaneous expression of at least one nucleic acid or one of the genes which code for proteins involved in the amino acid metabolism, in particular in amino acid synthesis especially genes selected from the group of gene products consisting of aspartate kinase (lysC), of aspartate-semialdehyde dehydrogenase (asd), of glyceraldehyde-3-phosphate dehydrogenase (gap), of 3-phosphoglycerate kinase (pgk), of pyruvate carboxylase (pyc), of triosephosphate isomerase (tpi), of homoserine 0-acetyltransferase (metA), of cystathionine γ-synthase (metB), of cystathionine gamma-lyase (metC), cystathionine δ-lyase, of methionine synthase (metH), of serine hydroxymethyltransferase (glyA), of O-acetylhomoserine sulfhydrylase (metY), of methylenetetrahydrofolate reductase (metF), of phosphoserine aminotransferase (serC), of phosphoserine phosphatase (serB), of serine acetyltransferase (cysE), of cysteine synthase (cysK), of homoserine dehydrogenase (hom) and S-adenosylmethionine synthase (metX) in the cytsol or in the plastids.

[0333] A further advantageous nucleic acid sequence which can be expressed in combination with the sequences used in the process and/or the abovementioned biosynthesis genes is the sequence of the ATP/ADP translocator as described in WO 01/20009. This ATP/ADP translocator leads to an increased synthesis of the essential amino acids lysine and/or methionine.

[0334] In a further advantageous embodiment of the process of the invention, the organisms used in the process are those in which simultaneously at least one of the aforementioned genes or one of the aforementioned nucleic acids is mutated so that the activity of the corresponding proteins is influenced by metabolites to a smaller extent compared with the unmutated proteins, or not at all, and that in particular the production according to the invention of the fine chemical is not impaired, or so that their specific enzymatic activity is increased. Less influence means in this connection that the regulation of the enzymic activity is less by at least 10%, advantageously at least 20, 30 or 40%, particularly advantageously by at least 50, 60 or 70%, compared with the starting organism, and thus the activity of the enzyme is increased by these figures mentioned compared with the starting organism. An increase in the enzymatic activity means an enzymatic activity which is increased by at least 10%, advantageously at least 20, 30 or 40%, particularly advantageously by at least 50, 60 or 70%, compared with the starting organism. This leads to an increased productivity of the desired fine chemical or of the desired fine chemicals

[0335] In a further advantageous embodiment of the process of the invention, the organisms used in the process are those in which simultaneously a the fine chemical degrading protein is attenuated, in particular by reducing the rate of expression of the corresponding gene.

[0336] In another embodiment of the process of the invention, the organisms used in the process are those in which simultaneously at least one of the aforementioned nucleic acids or of the aforementioned genes is mutated in such a way that the enzymatic activity of the corresponding protein is partially reduced or completely blocked. A reduction in the enzymatic activity means an enzymatic activity, which is reduced by at least 10%, advantageously at least 20, 30 or 40%, particularly advantageously by at least 50, 60 or 70%, preferably more, compared with the starting organism.

[0337] If it is intended to transform the host cell, in particular the plant cell, with several constructs or vectors, the marker of a preceding transformation must be removed or a further marker employed in a following transformation. The markers can be removed from the host cell, in particular the plant cell, as described hereinbelow via methods with which the skilled worker is familiar. In particular plants without a marker, in particular without resistance to antibiotics, are an especially preferred embodiment of the present invention.

[0338] In the process according to the invention, the nucleic acid sequences used in the process according to the invention are advantageously linked operably to one or more regulatory signals in order to increase gene expression. These regulatory sequences are intended to enable the specific expression of the genes and the expression of protein. Depending on the host organism for example plant or microorganism, this may mean, for example, that the gene is expressed and/or overexpressed after induction only, or that it is expressed and/or overexpressed constitutively. These regulatory sequences are, for example, sequences to which the inductors or repressors bind and which thus regulate the expression of the nucleic acid. In addition to these novel regulatory sequences, or instead of these sequences, the natural regulation of these sequences may still be present before the actual structural genes and, if appropriate, may have been genetically modified so that the natural regulation has been switched off and gene expression has been increased. However, the nucleic acid construct of the invention suitable as expression cassette (=expression construct=gene construct) can also be simpler in construction, that is to say no additional regulatory signals have been inserted before the nucleic acid sequence or its derivatives, and the natural promoter together with its regulation has not been removed. Instead, the natural regulatory sequence has been mutated in such a way that regulation no longer takes place and/or gene expression is increased. These modified promoters can also be introduced on their own before the natural gene in the form of part sequences (=promoter with parts of the nucleic acid sequences according to the invention) in order to increase the activity. Moreover, the gene construct can advantageously also comprise one or more of what are known as enhancer sequences in operable linkage with the promoter, and these enable an increased expression of the nucleic acid sequence. Also, it is possible to insert additional advantageous sequences at the 3′ end of the DNA sequences, such as, for example, further regulatory elements or terminators. In another preferred embodiment, the natural or created expression cassette is further modified in such a manner, that a nucleic acid sequence encoding a transitpeptide is functionally introduced between the regulatory and the coding region such, that a functionally preprotein is expressed, which is targeted to the plastids.

[0339] The nucleic acid molecules, which encode proteins according to the invention and nucleic acid molecules, which encode other polypeptides may be present in one nucleic acid construct or vector or in several ones. Advantageously, only one copy of the nucleic acid molecule of the invention or its encoding genes is present in the nucleic acid construct or vector. Several vectors or nucleic acid construct or vector can be expressed together in the host organism. The nucleic acid molecule or the nucleic acid construct or vector according to the invention can be inserted in a vector and be present in the cell in a free form. If a stable transformation is preferred, a vector is used, which is stably duplicated over several generations or which is else be inserted into the genome. In the case of plants, integration into the plastid genome or, in particular, into the nuclear genome may have taken place. For the insertion of more than one gene in the host genome the genes to be expressed are present together in one gene construct, for example in above-described vectors bearing a plurality of genes.

[0340] As a rule, regulatory sequences for the expression rate of a gene are located upstream (5′), within, and/or downstream (3′) relative to the coding sequence of the nucleic acid molecule of the invention or another codogenic gene segment. They control in particular transcription and/or translation and/or the transcript stability. The expression level is dependent on the conjunction of further cellular regulatory systems, such as the protein biosynthesis and degradation systems of the cell.

[0341] Regulatory sequences include transcription and translation regulating sequences or signals, e.g. sequences located upstream (5′), which concern in particular the regulation of transcription or translation initiation, such as promoters or start codons, and sequences located downstream (3′), which concern in particular the regulation of transcription or translation termination and transcript stability, such as polyadenylation signals or stop codons. Regulatory sequences can also be present in transcribed coding regions as well in transcribed non-coding regions, e.g. in introns, as for example splicing sites, promoters for the regulation of expression of the nucleic acid molecule according to the invention in a cell and which can be employed are, in principle, all those which are capable of stimulating the transcription of genes in the organisms in question, such as microorganisms or plants. Suitable promoters, which are functional in these organisms are generally known. They may take the form of constitutive or inducible promoters. Suitable promoters can enable the development- and/or tissue-specific expression in multi-celled eukaryotes; thus, leaf-, root-, flower-, seed-, stomata-, tuber- or fruit-specific promoters may advantageously be used in plants. Furthermore in case of direct transformation of organelles such as plastids, promoters recognized by the plastid RNA-polymerases such as the plastid encoded Escherichia coli-like RNA polymerase or the nuclear encoded plastid RNA polymerase my advantageously be used.

[0342] The regulatory sequences or factors can, as described above, have a positive effect on, the expression of the genes introduced, thus increasing their expression. Thus, an enhancement of the expression can advantageously take place at the transcriptional level by using strong transcription signals such as strong promoters and/or strong enhancers. In addition, enhancement of expression on the translational level is also possible, for example by introducing translation enhancer sequences, e.g., the Ωenhancer e.g. improving the ribosomal binding to the transcript, or by increasing the stability of the mRNA, e.g. by replacing the 3′UTR coding region by a region encoding a 3′UTR known as conferring an high stability of the transcript or by stabilization of the transcript through the elimination of transcript instability, so that the mRNA molecule is translated more often than the wild type. For example in plants AU-rich elements (AREs) and DST (downstream) elements destabilized transcripts. Mutagenesis studies have demonstrated that residues within two of the conserved domains, the ATAGAT and the GTA regions, are necessary for instability function. Therefore removal or mutation of such elements would obviously lead to more stable transcripts, higher transcript rates and higher protein activity. Translation enhancers are also the “overdrive sequence”, which comprises the tobacco mosaic virus 5′-untranslated leader sequence and which increases the protein/RNA ratio (Gallie et al., 1987, Nucl. Acids Research 15:8693-8711)

[0343] Enhancers are generally defined as cis active elements, which can stimulate gene transcription independent of position and orientation. Different enhancers have been identified in plants, which can either stimulate transcription constitutively or tissue or stimuli specific. Well known examples for constitutive enhancers are the enhancer from the 35S promoter (Odell et al., 1985, Nature 313:810-812) or the ocs enhancer (Fromm et al., 1989, Plant Cell 1: 977:984) Another examples are the G-Box motif tetramer which confers high-level constitutive expression in dicot and monocot plants (Ishige et al., 1999, Plant Journal, 18, 443-448) or the petE, a A/T-rich sequence which act as quantitative enhancers of gene expression in transgenic tobacco and potato plants (Sandhu et al., 1998; Plant Mol Biol. 37(5):885-96). Beside that, a large variety of cis-active elements have been described which contribute to specific expression pattern, like organ specific expression or induced expression in response to biotic or abiotic stress. Examples are elements, which provide pathogen or wound-induced expression (Rushton, 2002, Plant Cell, 14, 749-762) or guard cell-specific expression (Plesch, 2001, Plant Journal 28, 455-464).

[0344] Advantageous regulatory sequences for the expression of the nucleic acid molecule according to the invention in microorganisms are present for example in promoters such as the cos, tac, rha, trp, tet, trp-tet, lpp, lac, lpp-lac, lacl^{q-}, T7, T5, T3, gal, trc, ara, SP6, λ-P_{R} or λ-P_{L} promoter, which are advantageously used in Gram-negative bacteria. Further advantageous regulatory sequences are present for example in the Gram-positive promoters amy, dnaK, xylS and SPO2, in the yeast or fungal promoters ADC1, MFα, AC, P-60, UASH, MCB, PHO, CYC1, GAPDH, TEF, rp28, ADH. Promoters, which are particularly advantageous, are constitutive, tissue or compartment specific and inducible promoters. In general, “promoter” is understood as meaning, in the present context, a regulatory sequence in a nucleic acid molecule, which mediates the expression of a coding sequence segment of a nucleic acid molecule. In general, the promoter is located upstream to the coding sequence segment. Some elements, for example expression-enhancing elements such as enhancer may, however, also be located downstream or even in the transcribed region.

[0345] In principle, it is possible to use natural promoters together with their regulatory sequences, such as those mentioned above, for the novel process. It is also possible advantageously to use synthetic promoters, either additionally or alone, in particular when they mediate seed-specific expression such as described in, for example, WO 99/16890.

[0346] The expression of the nucleic acid molecules used in the process may be desired alone or in combination with other genes or nucleic acids. Multiple nucleic acid molecules conferring the expression of advantageous genes can be introduced via the simultaneous transformation of several individual suitable nucleic acid constructs, i.e. expression constructs, or, preferably, by combining several expression cassettes on one construct. It is also possible to transform several vectors with in each case several expression cassettes stepwise into the recipient organism

[0347] As described above, the transcription of the genes introduced should advantageously be terminated by suitable terminators at the 3′ end of the biosynthesis genes introduced (behind the stop codon). A terminator, which may be used for this purpose is, for example, the OCS1 terminator, the nos3 terminator or the 35S terminator. As is the case with the promoters, different terminator sequences should be used for each gene. Terminators, which are useful in microorganism are for example the fimA terminator, txn terminator or trp terminator. Such terminators can be rho-dependent or rho-independent.

[0348] Different plant promoters such as, for example, the USP, the LegB4-, the DC3 promoter or the ubiquitin promoter from parsley or other herein mentioned promoter and different terminators may advantageously be used in the nucleic acid construct.

[0349] In order to ensure the stable integration, into the transgenic plant, of nucleic acid molecules used in the process according to the invention in combination with further biosynthesis genes over a plurality of generations, each of the coding regions used in the process should be expressed under the control of its own, preferably unique, promoter since repeating sequence motifs may lead to recombination events or to silencing or, in plants, to instability of the T-DNA.

[0350] The nucleic acid construct is advantageously constructed in such a way that a promoter is followed by a suitable cleavage site for insertion of the nucleic acid to be expressed, advantageously in a polylinker, followed, if appropriate, by a terminator located behind the polylinker. If appropriate, this order is repeated several times so that several genes are combined in one construct and thus can be introduced into the transgenic plant in order to be expressed. The sequence is advantageously repeated up to three times. For the expression, the nucleic acid sequences are inserted via the suitable cleavage site, for example in the polylinker behind the promoter. It is advantageous for each nucleic acid sequence to have its own promoter and, if appropriate, its own terminator, as mentioned above. However, it is also possible to insert several nucleic acid sequences behind a promoter and, if appropriate, before a terminator if a polycistronic transcription is possible in the host or target cells. In this context, the insertion site, or the sequence of the nucleic acid molecules inserted, in the nucleic acid construct is not decisive, that is to say a nucleic acid molecule can be inserted in the first or last position in the cassette without this having a substantial effect on the expression. However, it is also possible to use only one promoter type in the construct. However, this may lead to undesired recombination events or silencing effects, as said.

[0351] Accordingly, in a preferred embodiment, the nucleic acid construct according to the invention confers expression of the nucleic acid molecule of the invention, and, optionally further genes, in a plant and comprises one or more plant regulatory elements. Said nucleic acid construct according to the invention advantageously encompasses a plant promoter or a plant terminator or a plant promoter and a plant terminator.

[0352] A “plant” promoter comprises regulatory elements, which mediate the expression of a coding sequence segment in plant cells. Accordingly, a plant promoter need not be of plant origin, but may originate from viruses or microorganisms, in particular for example from viruses which attack plant cells. The term plant promoter also shall also encompass plastidal promoters.

[0353] The plant promoter can also originates from a plant cell, e.g. from the plant, which is transformed with the nucleic acid construct or vector as described herein.

This also applies to other “plant” regulatory signals, for example in “plant” terminators.

[0354] A nucleic acid construct suitable for plant expression preferably comprises regulatory elements which are capable of controlling the expression of genes in plant cells and which are operably linked so that each sequence can fulfill its function. Accordingly, the nucleic acid construct can also comprise transcription terminators. Examples for transcriptional termination are polyadenylation signals. Preferred polyadenylation signals are those which originate from Agrobacterium tumefaciens T-DNA, such as the gene 3 of the Ti plasmid pTiACH5, which is known as octopine synthase (Gielen et al., EMBO J. 3 (1984) 835 et seq.) or functional equivalents thereof, but all the other terminators which are functionally active in plants are also suitable.

[0355] The nucleic acid construct suitable for plant expression preferably also comprises other operably linked regulatory elements such as translation enhancers, for example the overdrive sequence, which comprises the tobacco mosaic virus 5′-untranslated leader sequence, which increases the protein/RNA ratio (Gallie et al., 1987, Nucl. Acids Research 15:8693-8711).

[0356] Other preferred sequences for use in operable linkage in gene expression constructs are targeting sequences, which are required for targeting the gene product into specific cell compartments (for a review, see Kermode, Crit. Rev. Plant Sci. 15, 4 (1996) 285-423 and references cited therein), for example into the vacuole, the nucleus, all types of plastids, such as amyloplasts, chloroplasts, chromoplasts, the extracellular space, the mitochondria, the endoplasmic reticulum, elaioplasts, peroxisomes, glycosomes, and other compartments of cells or extracellular preferred are sequences, which are involved in targeting to plastids as mentioned above. Sequences, which must be mentioned in this context are, in particular, the signal-peptide or transit-peptide-encoding sequences which are known per se. For example, plastid-transit-peptide-encoding sequences enable the targeting of the expression product into the plastids of a plant cell. Targeting sequences are also known for eukaryotic and to a lower extent for prokaryotic organisms and can advantageously be operable linked with the nucleic acid molecule of the present invention as shown in table I, application no. 1, columns 5 and 7 and described herein to achieve an expression in one of said compartments or extracellular.

[0357] For expression in plants, the nucleic acid molecule must, as described above, be linked operably to or comprise a suitable promoter which expresses the gene at the right point in time and in a cell- or tissue-specific manner. Usable promoters are constitutive promoters (Benfey et al., EMBO J. 8 (1989) 2195-2202), such as those which originate from plant viruses, such as 35S CAMV (Franck et al., Cell 21 (1980) 285-294), 19S CaMV (see also U.S. Pat. No. 5,352,605 and WO 84/02913), 34S FMV (Sanger et al., Plant. Mol. Biol., 14, 1990: 433-443), the parsley ubiquitin promoter, or plant promoters such as the Rubisco small subunit promoter described in U.S. Pat. No. 4,962,028 or the plant promoters PRP1 [Ward et al., Plant. Mol. Biol. 22 (1993)], SSU, PGEL1, OCS [Leisner (1988) Proc Natl Acad Sci USA 85(5):2553-2557], lib4, usp, mas [Comai (1990) Plant Mol Biol 15 (3):373-381], STLS1, ScBV (Schenk (1999) Plant Mol Biol 39(6):1221-1230), B33, SAD1 or SAD2 (flax promoters, Jain et al., Crop Science, 39 (6), 1999: 1696-1701) or nos [Shaw et al. (1984) Nucleic Acids Res. 12(20):7831-7846]. Stable, constitutive expression of the proteins according to the invention a plant can be advantageous. However, inducible expression of the polypeptide of the invention is advantageous, if a late expression before the harvest is of advantage, as metabolic manipulation may lead to plant growth retardation.

[0358] The expression of plant genes can also be facilitated as described above via a chemical inducible promoter (for a review, see Gatz 1997, Annu. Rev. Plant Physiol. Plant Mol. Biol., 48:89-108). Chemically inducible promoters are particularly suitable when it is desired to express the gene in a time-specific manner. Examples of such promoters are a salicylic acid inducible promoter (WO 95/19443), and abscisic acid-inducible promoter (EP 335 528), a tetracyclin-inducible promoter (Gatz et al. (1992) Plant J. 2, 397-404), a cyclohexanol- or ethanol-inducible promoter (WO 93/21334) or others as described herein.

[0359] Other suitable promoters are those which react to biotic or abiotic stress conditions, for example the pathogen-induced PRP1 gene promoter (Ward et al., Plant. Mol. Biol. 22 (1993) 361-366), the tomato heat-inducible hsp80 promoter (U.S. Pat. No. 5,187,267), the potato chill-inducible alpha-amylase promoter (WO 96/12814) or the wound-inducible pinII promoter (EP-A-0 375 091) or others as described herein.

[0360] Preferred promoters are in particular those which bring about gene expression in tissues and organs in which the biosynthesis of amino acids takes place, in seed cells, such as endosperm cells and cells of the developing embryo. Suitable promoters are the oilseed rape napin gene promoter (U.S. Pat. No. 5,608,152), the Vicia faba USP promoter (Baeumlein et al., Mol Gen Genet, 1991, 225 (3): 459-67), the Arabidopsis oleosin promoter (WO 98/45461), the Phaseolus vulgaris phaseolin promoter (U.S. Pat. No. 5,504,200), the Brassica Bce4 promoter (WO 91/13980), the bean arc5 promoter, the carrot DcG3 promoter, or the Legumin B4 promoter (LeB4; Baeumlein et al., 1992, Plant Journal, 2 (2):233-9), and promoters which bring about the seed-specific expression in monocotyledonous plants such as maize, barley, wheat, rye, rice and the like. Advantageous seed-specific promoters are the sucrose binding protein promoter (WO 00/26388), the phaseolin promoter and the napin promoter. Suitable promoters which must be considered are the barley Ipt2 or Ipt1 gene promoter (WO 95/15389 and WO 95/23230), and the promoters described in WO 99/16890 (promoters from the barley hordein gene, the rice glutelin gene, the rice oryzin gene, the rice prolamin gene, the wheat gliadin gene, the wheat glutelin gene, the maize zein gene, the oat glutelin gene, the sorghum kasirin gene and the rye secalin gene). Further suitable promoters are Amy32b, Amy 6-6 and Aleurain [U.S. Pat. No. 5,677,474], Bce4 (oilseed rape) [U.S. Pat. No. 5,530,149], glycinin (soya) [EP 571 741], phosphoenolpyruvate carboxylase (soya) [JP 06/62870], ADR12-2 (soya) [WO 98/08962], isocitrate lyase (oilseed rape) [U.S. Pat. No. 5,689,040] or α-amylase (barley) [EP 781 849]. Other promoters which are available for the expression of genes in plants are leaf-specific promoters such as those described in DE-A 19644478 or light-regulated promoters such as, for example, the pea petE promoter.

[0361] Further suitable plant promoters are the cytosolic FBPase promoter or the potato ST-LSI promoter (Stockhaus et al., EMBO J. 8, 1989, 2445), the Glycine max phosphoribosylpyrophosphate amidotransferase promoter (GenBank Accession No. U87999) or the node-specific promoter described in EP-A-0 249 676.

[0362] Other promoters, which are particularly suitable, are those which bring about plastid-specific expression. Advantageously such promoters are used. Suitable promoters such as the viral RNA polymerase promoter are described in WO 95/16783 and WO 97/06250, and the Arabidopsis clpP promoter, which is described in WO 99/46394.

[0363] Other promoters, which are used for the strong expression of heterologous sequences in as many tissues as possible, in particular also in leaves, are, in addition to several of the abovementioned viral and bacterial promoters, preferably, plant promoters of actin or ubiquitin genes such as, for example, the rice actin1 promoter. Further examples of constitutive plant promoters are the sugarbeet V-ATPase promoters (WO 01/14572). Examples of synthetic constitutive promoters are the Super promoter (WO 95/14098) and promoters derived from G-boxes (WO 94/12015). If appropriate, chemical inducible promoters may furthermore also be used, compare EP-A 388186, EP-A 335528, WO 97/06268.

[0364] As already mentioned herein, further regulatory sequences, which may be expedient, if appropriate, also include sequences, which target the transport and/or the localization of the expression products. Sequences, which must be mentioned in this context are, in particular, the signal-peptide- or transit-peptide-encoding sequences which are known per se. For example, plastid-transit-peptide-encoding sequences enable the targeting of the expression product into the plastids of a plant cell.

[0365] Preferred recipient plants are, as described above, in particular those plants, which can be transformed in a suitable manner. These include monocotyledonous and dicotyledonous plants. Plants which must be mentioned in particular are agriculturally useful plants such as cereals and grasses, for example Triticum spp., Zea mays, Hordeum vulgare, oats, Secale cereale, Oryza sativa, Pennisetum glaucum, Sorghum bicolor, Triticale, Agrostis spp., Cenchrus ciliaris, Dactylis glomerata, Festuca arundinacea, Lolium spp., Medicago spp. and Saccharum spp., legumes and oil crops, for example Brassica juncea, Brassica napus, Glycine max, Arachis hypogaea, Gossypium hirsutum, Cicer arietinum, Helianthus annuus, Lens culinaris, Linum usitatissimum, Sinapis alba, Trifolium repens and Vicia narbonensis, vegetables and fruits, for example bananas, grapes, Lycopersicon esculentum, asparagus, cabbage, watermelons, kiwi fruit, Solanum tuberosum, Beta vulgaris, cassava and chicory, trees, for example Coffea species, Citrus spp., Eucalyptus spp., Picea spp., Pinus spp. and Populus spp., medicinal plants and trees, and flowers.

[0366] One embodiment of the present invention also relates to a method for generating a vector, which comprises the insertion, into a vector, of the nucleic acid molecule characterized herein, the nucleic acid molecule according to the invention or the expression cassette according to the invention. The vector can, for example, be introduced in to a cell, e.g. a microorganism or a plant cell, as described herein for the nucleic acid construct, or below under transformation or transfection or shown in the examples. A transient or stable transformation of the host or target cell is possible, however, a stable transformation is preferred. The vector according to the invention is preferably a vector, which is suitable for expressing the polypeptide according to the invention in a plant. The method can thus also encompass one or more steps for integrating regulatory signals into the vector, in particular signals, which mediate the expression in microorganisms or plants.

[0367] Accordingly, the present invention also relates to a vector comprising the nucleic acid molecule characterized herein as part of a nucleic acid construct suitable for plant expression or the nucleic acid molecule according to the invention.

[0368] The advantageous vectors of the invention comprise the nucleic acid molecules which encode proteins according to the invention, nucleic acid molecules which are used in the process, or nucleic acid construct suitable for plant expression comprising the nucleic acid molecules used, either alone or in combination with further genes such as the biosynthesis or regulatory genes of the fine chemical metabolism e.g. with the genes mentioned herein above. In accordance with the invention, the term “vector” refers to a nucleic acid molecule, which is capable of transporting another nucleic acid to which it is linked. One type of vector is a “plasmid”, which means a circular double-stranded DNA loop into which additional DNA segments can be ligated. A further type of vector is a viral vector, it being possible to ligate additional nucleic acids segments into the viral genome. Certain vectors are capable of autonomous replication in a host cell into which they have been introduced (for example bacterial vectors with bacterial replication origin). Other preferred vectors are advantageously completely or partly integrated into the genome of a host cell when they are introduced into the host cell and thus replicate together with the host genome. Moreover, certain vectors are capable of controlling the expression of genes with which they are in operable linkage. In the present context, these vectors are referred to as “expression vectors”. As mentioned above, they are capable of autonomous replication or may be integrated partly or completely into the host genome. Expression vectors, which are suitable for DNA recombination techniques usually take the form of plasmids. In the present description, “plasmid” and “vector” can be used interchangeably since the plasmid is the most frequently used form of a vector. However, the invention is also intended to encompass these other forms of expression vectors, such as viral vectors, which exert similar functions. The term vector is furthermore also to encompass other vectors which are known to the skilled worker, such as phages, viruses such as SV40, CMV, TMV, transposons, IS elements, phasmids, phagemids, cosmids, and linear or circular DNA.

[0369] The recombinant expression vectors which are advantageously used in the process comprise the nucleic acid molecules according to the invention or the nucleic acid construct according to the invention in a form which is suitable for expressing, in a host cell, the nucleic acid molecules according to the invention or described herein. Accordingly, the recombinant expression vectors comprise one or more regulatory signals selected on the basis of the host cells to be used for the expression, in operable linkage with the nucleic acid sequence to be expressed. Furthermore the vector can comprise plastome sequences of the recipient organism to facilitate integration into the plastidal genome by homologous recombination as mentioned above.

[0370] In a recombinant expression vector, “operable linkage” means that the nucleic acid molecule of interest is linked to the regulatory signals in such a way that expression of the nucleic acid molecule is possible: they are linked to one another in such a way that the two sequences fulfill the predicted function assigned to the sequence (for example in an in-vitro transcription/translation system, or in a host cell if the vector is introduced into the host cell).

[0371] The term “regulatory sequence” is intended to comprise promoters, enhancers and other expression control elements (for example polyadenylation signals). These regulatory sequences are described, for example, in Goeddel: Gene Expression Technology: Methods in Enzymology 185, Academic Press, San Diego, Calif. (1990), or see: Gruber and Crosby, in: Methods in Plant Molecular Biology and Biotechnolgy, CRC Press, Boca Raton, Fla., Ed.: Glick and Thompson, chapter 7, 89-108, including the references cited therein. Regulatory sequences encompass those, which control the constitutive expression of a nucleotide sequence in many types of host cells and those which control the direct expression of the nucleotide sequence in specific host cells only, and under specific conditions. The skilled worker knows that the design of the expression vector may depend on factors such as the selection of the host cell to be transformed, the extent to which the desired protein is expressed, and the like. A preferred selection of regulatory sequences is described above, for example promoters, terminators, enhancers and the like. The term regulatory sequence is to be considered as being encompassed by the term regulatory signal. Several advantageous regulatory sequences, in particular promoters and terminators are described above. In general, the regulatory sequences described as advantageous for nucleic acid construct suitable for expression are also applicable for vectors.

[0372] The recombinant expression vectors used can be designed specifically for the expression, in prokaryotic and/or eukaryotic cells, of nucleic acid molecules used in the process. This is advantageous since intermediate steps of the vector construction are frequently carried out in microorganisms for the sake of simplicity. For example, the genes according to the invention and other genes can be expressed in bacterial cells, insect cells (using baculovirus expression vectors), yeast cells and other fungal cells [Romanos (1992), Yeast 8:423-488; van den Hondel, (1991), in: More Gene Manipulations in Fungi, J. W. Bennet & L. L. Lasure, Ed., pp. 396-428: Academic Press: San Diego; and van den Hondel, C. A. M. J. J. (1991), in: Applied Molecular Genetics of Fungi, Peberdy, J. F., et al., Ed., pp. 1-28, Cambridge University Press: Cambridge], algae [Falciatore et al., 1999, Marine Biotechnology. 1, 3:239-251] using vectors and following a transformation method as described in WO 98/01572, and preferably in cells of multi-celled plants [see Schmidt, R. and Willmitzer, L. (1988) Plant Cell Rep.: 583-586; Plant Molecular Biology and Biotechnology, C Press, Boca Raton, Fla., chapter 6/7, pp. 71-119 (1993); F. F. White, in: Transgenic Plants, Bd. 1, Engineering and Utilization, Ed.: Kung and R. Wu, Academic Press (1993), 128-43; Potrykus, Annu. Rev. Plant Physiol. Plant Molec. Biol. 42 (1991), 205-225 (and references cited therein)]. Suitable host cells are furthermore discussed in Goeddel, Gene Expression Technology: Methods in Enzymology 185, Academic Press, San Diego, Calif. (1990). As an alternative, the sequence of the recombinant expression vector can be transcribed and translated in vitro, for example using T7 promoter-regulatory sequences and T7 polymerase.

[0373] In the event it is necessary proteins can be expressed in prokaryotes using vectors comprising constitutive or inducible promoters, which control the expression of fusion proteins or nonfusion proteins. Typical fusion expression vectors are, inter alia, pGEX (Pharmacia Biotech Inc; Smith, D. B., and Johnson, K. S. (1988) Gene 67:31-40), pMAL (New England Biolabs, Beverly, Mass.) and pRIT5 (Pharmacia, Piscataway, N.J.), in which glutathione-S-transferase (GST), maltose-E-binding protein or protein A is fused with the recombinant target protein. Examples of suitable inducible nonfusion E. coli expression vectors are, inter alia, pTrc (Amann et al. (1988) Gene 69:301-315) and pET 11d [Studier et al., Gene Expression Technology: Methods in Enzymology 185, Academic Press, San Diego, Calif. (1990) 60-89]. The target gene expression of the pTrc vector is based on the transcription of a hybrid trp-lac fusion promoter by the host RNA polymerase. The target gene expression from the pET 11d vector is based on the transcription of a T7-gn10-lac fusion promoter, which is mediated by a coexpressed viral RNA polymerase (T7 gn1). This viral polymerase is provided by the host strains BL21 (DE3) or HMS174 (DE3) by a resident λ-prophage, which harbors a T7 gn1 gene under the transcriptional control of the lacUV 5 promoter.

[0374] Other vectors which are suitable in prokaryotic organisms are known to the skilled worker; these vectors are for example in E. coli pLG338, pACYC184, the pBR series, such as pBR322, the pUC series such as pUC18 or pUC19, the M113mp series, pKC30, pRep4, pHS1, pHS2, pPLc236, pMBL24, pLG200, pUR290, pIN-III¹¹³-B1, □gt11 or pBdCl, in Streptomyces pIJ101, pIJ364, pIJ702 or pIJ361, in Bacillus pUB110, pC194 or pBD214, in Corynebacterium pSA77 or pAJ667.

[0375] In a further embodiment, the expression vector is a yeast expression vector. Examples of vectors for expression in the yeasts S. cerevisiae encompass pY-eDesaturasec1 (Baldari et al. (1987) Embo J. 6:229-234), pMFa (Kurjan and Herskowitz (1982) Cell 30:933-943), pJRY88 (Schultz et al. (1987) Gene 54:113-123) and pYES2 (Invitrogen Corporation, San Diego, Calif.). Vectors and methods for the construction of vectors which are suitable for use in other fungi, such as the filamentous fungi, encompass those which are described in detail in: van den Hondel, C. A. M. J. J. [(1991), J. F. Peberdy, Ed., pp. 1-28, Cambridge University Press: Cambridge; or in: More Gene Manipulations in Fungi; J. W. Bennet & L. L. Lasure, Ed., pp. 396-428: Academic Press: San Diego]. Examples of other suitable yeast vectors are 2αM, pAG-1, YEp6, YEp13 or pEMBLYe23.

[0376] Further vectors, which may be mentioned by way of example, are pALS1, pIL2 or pBB116 in fungi or pLGV23, pGHlac⁺, pBIN19, pAK2004 or pDH51 in plants.

[0377] As an alternative, the nucleic acid sequences can be expressed in insect cells using baculovirus expression vectors. Baculovirus vectors, which are available for expressing proteins in cultured insect cells (for example Sf9 cells) encompass the pAc series (Smith et al. (1983) Mol. Cell Biol. 3:2156-2165) and the pVL series (Lucklow and Summers (1989) Virology 170:31-39).

[0378] The abovementioned vectors are only a small overview of potentially suitable vectors. Further plasmids are known to the skilled worker and are described, for example, in: Cloning Vectors (Ed. Pouwels, P. H., et al., Elsevier, Amsterdam-New York-Oxford, 1985, ISBN 0 444 904018). Further suitable expression systems for prokaryotic and eukaryotic cells, see the chapters 16 and 17 by Sambrook, J., Fritsch, E. F., and Maniatis, T., Molecular Cloning: A Laboratory Manual, 2nd Edition, Cold Spring Harbor Laboratory, Cold Spring Harbor Laboratory Press, Cold Spring Harbor, N.Y., 1989.

[0379] Accordingly, one embodiment of the invention relates to a vector where the nucleic acid molecule according to the invention is linked operably to regulatory sequences which permit the expression in a prokaryotic or eukaryotic or in a prokaryotic and eukaryotic host. A further preferred embodiment of the invention relates to a vector in which a nucleic acid sequence encoding one of the polypeptides shown in table II, application no. 1, columns 5 and 7 or their homologs is functionally linked to a plastidial targeting sequence. A further preferred embodiment of the invention relates to a vector in which a nucleic acid sequence encoding one of the polypeptides shown in table II, application no. 1, columns 5 and 7 or their homologs is functionally linked to a regulatory sequences which permit the expression in plastids.

[0380] Accordingly, one embodiment of the invention relates to a host cell, which has been transformed stably or transiently with the vector according to the invention or the nucleic acid molecule according to the invention or the nucleic acid construct according to the invention.

[0381] Depending on the host organism, the organisms used in the process according to the invention are cultured or grown in a manner with which the skilled worker is familiar. As a rule, microorganisms are grown in a liquid medium comprising a carbon source, usually in the form of sugars, a nitrogen source, usually in the form of organic nitrogen sources such as yeast extract or salts such as ammonium sulfate, trace elements such as iron salts, manganese salts, magnesium salts, and, if appropriate, vitamins, at temperatures between 0° C. and 100° C., preferably between 10° C. and 60° C., while passing in oxygen. In the event the microorganism is anaerobe, no oxygen is blown through the culture medium. The pH value of the liquid nutrient medium may be kept constant, that is to say regulated during the culturing phase, or not. The organisms may be cultured batchwise, semibatchwise or continuously. Nutrients may be provided at the beginning of the fermentation or fed in semicontinuously or continuously. Advantageously microorganisms such as algae are grown under sunlight in open ponds or in fermentors illuminated with a light intensity between 10 to 2000 μmol/m²×sec, preferred between 100 to 1000 μmol/m²×sec, more preferred between 200 to 800 μmol/m²×sec, most preferred between 300 to 600 μmol/m²×sec. The cells are grown between several hours for example 3 to 48 h and several days 1 to 20 days, preferably 2 to 10 days. Algae as autotrophic organisms grow well in the presence of light as energy source, anorganic hydrogen donors and CO₂ as sole carbon source.

[0382] The amino acids produced can be isolated from the organism by methods with which the skilled worker is familiar. For example via extraction, salt precipitation and/or ion-exchange chromatography. To this end, the organisms may be disrupted beforehand. The process according to the invention can be conducted batchwise, semibatchwise or continuously. A summary of known culture and isolation techniques can be found in the textbook by Chmiel [Bioprozeβtechnik 1, Einführung in die Bioverfahrenstechnik (Gustav Fischer Verlag, Stuttgart, 1991)], Demain et al. (Industrial Microbiology and Biotechnology, second edition, ASM Press, Washington, D.C., 1999, ISBN 1-55581-128-0] or in the textbook by Storhas (Bioreaktoren and periphere Einrichtungen (Vieweg Verlag, Braunschweig/Wiesbaden, 1994)).

[0383] In one embodiment, the present invention relates to a polypeptide encoded by the nucleic acid molecule according to the present invention, preferably conferring an increase in the fine chemical content in an organism or cell after increasing the expression or activity in the cytsol and/or the organelles such as the plastids or mitochondria, preferentially in the plastids.

[0384] The present invention also relates to a process for the production of a polypeptide according to the present invention, the polypeptide being expressed in a host cell according to the invention, preferably in a microorganism or a transgenic plant cell.

[0385] In one embodiment, the nucleic acid molecule used in the process for the production of the polypeptide is derived from a microorganism such as a eukaryotic or prokaryotic cell, preferably from a eukaryotic cell such as an algae e.g., in one embodiment the polypeptide is produced in a plant cell or plant with a nucleic acid molecule derived from an alga or an other microorganisms but not from plant.

[0386] The skilled worker knows that protein and DNA expressed in different organisms differ in many respects and properties, eg. DNA modulation and imprinting, such as. methylation or post-translational modification, as for example glucosylation, phosphorylation, acetylation, myristoylation, ADP-ribosylation, farnesylation, carboxylation, sulfation, ubiquination, etc. though having the same coding sequence. Preferably, the cellular expression control of the corresponding protein differs accordingly in the control mechanisms controlling the activity and expression of an endogenous protein or another eukaryotic protein. One major difference between proteins expressed in prokaryotic or eukaryotic organisms is the amount and pattern of glycosylation. For example in E. coli there are no glycosylated proteins. Proteins expressed in yeasts have a high mannose content in the glycosylated proteins, whereas in plants the glycosylation pattern is complex.

[0387] The polypeptide of the present invention is preferably produced by recombinant DNA techniques. For example, a nucleic acid molecule encoding the protein is cloned into an vector (as described above), the vector is introduced into a host cell (as described above) and said polypeptide is expressed in the host cell. Said polypeptide can then be isolated from the cells by an appropriate purification scheme using standard protein purification techniques. Alternative to recombinant expression, the polypeptide or peptide of the present invention can be synthesized chemically using standard peptide synthesis techniques.

[0388] Moreover, native polypeptide conferring the increase of the fine chemical in an organism or part thereof can be isolated from cells (e.g., endothelial cells), for example using the antibody of the present invention as described below, in particular, an anti-b2827, anti-YEL046C, YGR255C, YGR289C, YKR043C and/or YLR153C protein antibody or an antibody against polypeptides as shown in table II, application no. 1, columns 5 and 7, which can be produced by standard techniques utilizing the polypeptide of the present invention or fragment thereof, i.e., the polypeptide of this invention. Preferred are monoclonal antibodies.

[0389] In one embodiment, the present invention relates to a polypeptide having the amino acid sequence encoded by a nucleic acid molecule of the invention or obtainable by a process of the invention. Said polypeptide confers preferably the aforementioned activity, in particular, the polypeptide confers the increase of the fine chemical in a cell or an organism or a part thereof after increasing the cellular activity, e.g. by increasing the expression or the specific activity of the polypeptide.

[0390] In one embodiment, the present invention relates to a polypeptide having the sequence shown in table II, application no. 1, columns 5 and 7 or as coded by the nucleic acid molecule shown in table I, application no. 1, columns 5 and 7 or functional homologues thereof.

[0391] In one advantageous embodiment, in the method of the present invention the activity of a polypeptide is increased comprising or consisting of the consensus sequence shown in table IV, application no. 1, columns 7 and in one another embodiment, the present invention relates to a polypeptide comprising or consisting of the consensus sequence shown in table IV, application no. 1, columns 7 whereby 20 or less, preferably 15 or 10, preferably 9, 8, 7, or 6, more preferred 5 or 4, even more preferred 3, even more preferred 2, even more preferred 1, most preferred 0 of the amino acids positions indicated can be replaced by any amino acid.

[0392] In one embodiment not more than 15%, preferably 10%, even more preferred 5%, 4%, 3%, or 2%, most preferred 1% or 0% of the amino acid position indicated by a letter are/is replaced another amino acid.

[0393] In one embodiment 20 or less, preferably 15 or 10, preferably 9, 8, 7, or 6, more preferred 5 or 4, even more preferred 3, even more preferred 2, even more preferred 1, most preferred 0 amino acids are inserted into the consensus sequence.

[0394] The consensus sequence was derived from a multiple alignment of the sequences as listed in table II. The letters represent the one letter amino acid code and indicate that the amino acids are conserved in all aligned proteins. The letter X stands for amino acids, which are not conserved in all sequences.

In one example, in the cases where only a small selected subset of amino acids are possible at a certain position these amino acids are given in brackets. The number of given X indicates the distances between conserved amino acid residues, e.g. Y-X(21,23)-F means that conserved tyrosine and phenylalanine residues are separated from each other by minimum 21 and maximum 23 amino acid residues in all investigated sequences.

[0395] Conserved domains were identified from multiple alignment of all sequences and are described using a subset of the standard Prosite notation, e.g the pattern Y-X-(21,23)[FW] means that a conserved tyrosine is separated by minimum 21 and maximum 23 amino acid residues from either a phenylalanine or tryptophane.

Prosite patterns for conserved domains were generated with the software tool Pratt version 2.1 or manually. Pratt was developed by Inge Jonassen, Dept. of Informatics, University of Bergen, Norway and is described by Jonassen et al. [I. Jonassen, J. F. Collins and D. G. Higgins, Finding flexible patterns in unaligned protein sequences, Protein Science 4 (1995), pp. 1587-1595; I. Jonassen, Efficient discovery of conserved patterns using a pattern graph, Submitted to CABIOS Febr. 1997]. The source code (ANSI C) for the stand-alone program is public available, e.g. at established Bioinformatic centers like EBI (European Bioinformatics Institute).
For generating patterns with the software tool Pratt, following settings were used: PL (max Pattern Length): 100, PN (max Nr of Pattern Symbols): 100, PX (max Nr of consecutive x's): 30, FN (max Nr of flexible spacers): 5, FL (max Flexibility): 30, FP (max Flex.Product): 10, ON (max number patterns): 50. Input sequences for Pratt were distinct regions of the protein sequences exhibiting high similarity as identified from multiple alignments and provided to the program as multiple FASTA files. The minimum number of sequences, which have to match the generated patterns (CM, min Nr of Seqs to Match) was set to at least 80% of the provided sequences. Parameters not mentioned here were used in their default settings.
The Prosite patterns of the conserved domains can be used to search for protein sequences matching this pattern. Various established Bioinformatic centers provide public internet portals for using those patterns in data base searches (e.g. PIR [Protein Information Resource, located at Georgetown University Medical Center] or ExPASy [Expert Protein Analysis System]). Alternatively, stand-alone software is available, like the program Fuzzpro, which is part of the EMBOSS software package. For example, the program Fuzzpro not only allows to search for an exact pattern-protein match but also allows to set various ambiguities in the performed search.

[0396] The alignment was performed with the Software AlignX (Sep. 25, 2002) a component of Vector NTI Suite 8.0, InforMax™, Invitrogen™ life science software, U.S. Main Office, 7305 Executive Way, Frederick, Md. 21704,USA with the following settings: For pairwise alignments: gap opening penalty: 10.0; gap extension penalty 0.1. For multiple alignments: Gap opening penalty: 10.0; Gap extension penalty: 0.1; Gap separation penalty range: 8; Residue substitution matrix: blosum62; Hydrophilic residues: G P S N D Q E K R; Transition weighting: 0.5; Consensus calculation options: Residue fraction for consensus: 0.9. Presettings were selected to allow also for the alignment of conserved aminoacids.

[0397] In one advantageous embodiment, the method of the present invention comprises the increasing of a polypeptide comprising or consisting of plant or microorganism specific consensus sequences.

In one embodiment, said polypeptide of the invention distinguishes over the sequence shown in table II A and/or II B, application no. 1, columns 5 and 7 by one or more amino acids. In one embodiment, polypeptide distinguishes form the sequence shown in table II A and/or II B, application no. 1, columns 5 and 7 by more than 5, 6, 7, 8 or 9 amino acids, preferably by more than 10, 15, 20, 25 or 30 amino acids, even more preferred are more than 40, 50, or 60 amino acids and, preferably, the sequence of the polypeptide of the invention distinguishes from the sequence shown in table II A and/or II B, application no. 1, columns 5 and 7 by not more than 80% or 70% of the amino acids, preferably not more than 60% or 50%, more preferred not more than 40% or 30%, even more preferred not more than 20% or 10%. In an other embodiment, said polypeptide of the invention does not consist of the sequence shown in table II A and/or II B, application no. 1, columns 5 and 7.

[0398] In one embodiment, the polypeptide of the invention comprises any one of the sequences not known to the public before. In one embodiment, the polypeptide of the invention originates from a non-plant cell, in particular from a microorganism, and was expressed in a plant cell. In one embodiment, the present invention relates to a polypeptide encoded by the nucleic acid molecule of the invention or used in the process of the invention for which an activity has not been described yet.

[0399] In one embodiment, the invention relates to polypeptide conferring an increase in the fine chemical in an organism or part being encoded by the nucleic acid molecule of the invention or used in the process of the invention and having a sequence which distinguishes from the sequence as shown in table II A and/or II B, application no. 1, columns 5 and 7 by one or more amino acids. In another embodiment, said polypeptide of the invention does not consist of the sequence shown in table II A and/or II B, application no. 1, columns 5 and 7. In a further embodiment, said polypeptide of the present invention is less than 100%, 99.999%, 99.99%, 99.9% or 99% identical. In one embodiment, said polypeptide does not consist of the sequence encoded by the nucleic acid molecules shown in table I A and/or II B, application no. 1, columns 5 and 7.

[0400] In one embodiment, the present invention relates to a polypeptide having the activity of the protein as shown in table II A and/or II B, application no. 1, column 3, which distinguishes over the sequence depicted in table II A and/or II B, application no. 1, columns 5 and 7 by one or more amino acids, preferably by more than 5, 6, 7, 8 or 9 amino acids, preferably by more than 10, 15, 20, 25 or 30 amino acids, even more preferred are more than 40, 50, or 60 amino acids but even more preferred by less than 70% of the amino acids, more preferred by less than 50%, even more preferred my less than 30% or 25%, more preferred are 20% or 15%, even more preferred are less than 10%. In a further preferred embodiment the polypeptide of the invention takes the form of a preprotein consisting of a plastidial transitpeptide joint to a polypeptide having the activity of the protein as shown in table II A and/or II B, column 3, from which the transitpeptide is preferably cleaved off upon transport of the preprotein into the organelle for example into the plastid or mitochondria.

[0401] The terms “protein” and “polypeptide” used in this application are interchangeable. “Polypeptide” refers to a polymer of amino acids (amino acid sequence) and does not refer to a specific length of the molecule. Thus peptides and oligopeptides are included within the definition of polypeptide. This term does also refer to or include post-translational modifications of the polypeptide, for example, glycosylations, acetylations, phosphorylations and the like. Included within the definition are, for example, polypeptides containing one or more analogs of an amino acid (including, for example, unnatural amino acids, etc.), polypeptides with substituted linkages, as well as other modifications known in the art, both naturally occurring and non-naturally occurring.

[0402] Preferably, the polypeptide is isolated. An “isolated” or “purified” protein or nucleic acid molecule or biologically active portion thereof is substantially free of cellular material when produced by recombinant DNA techniques or chemical precursors or other chemicals when chemically synthesized.

[0403] The language “substantially free of cellular material” includes preparations of the polypeptide of the invention in which the protein is separated from cellular components of the cells in which it is naturally or recombinantly produced. In one embodiment, the language “substantially free of cellular material” includes preparations having less than about 30% (by dry weight) of “contaminating protein”, more preferably less than about 20% of “contaminating protein”, still more preferably less than about 10% of “contaminating protein”, and most preferably less than about 5% “contaminating protein”. The term “Contaminating protein” relates to polypeptides, which are not polypeptides of the present invention. When the polypeptide of the present invention or biologically active portion thereof is recombinantly produced, it is also preferably substantially free of culture medium, i.e., culture medium represents less than about 20%, more preferably less than about 10%, and most preferably less than about 5% of the volume of the protein preparation. The language “substantially free of chemical precursors or other chemicals” includes preparations in which the polypeptide of the present invention is separated from chemical precursors or other chemicals, which are involved in the synthesis of the protein. The language “substantially free of chemical precursors or other chemicals” includes preparations having less than about 30% (by dry weight) of chemical precursors, other chemicals or other proteins, which are not identical to the proteins as shown in table II A and/or II B, column 3, 5 or 7. Other chemical precursors, other chemicals or other proteins, which are not identical to the proteins as shown in table II, column 3, 5 or 7 are all collectively named as impurities. The term “chemical precursors” shall mean in the sense of the specification chemical substances, which are intermediates of the biochemical pathway within the organism or within the cell(s) of the organism for example glucose-6-phosphate, citrate, fumarate, homoserine etc. The term “other chemicals” shall mean in the sense of the specification chemical substances, which are end products of the biochemical pathway within the organism or within the cell(s) of the organism for example amino acids such as lysine, alanine etc; fatty acids such as linolenic acid, eicosapentaenoic acid etc, sugars such as glucose, mannose, ribose, desoxy ribose etc, vitamins such as vitamin C, vitamin B2 etc. and all other chemical substances of the cell. The term “other proteins” shall mean in the sense of the specification all other proteins, which are not identical to the proteins mentioned in table II, columns 2, 5 and 7. The fine chemical preparations advantageously shall have less than about 25% impurities, preferably less than about 20% impurities, still more preferably less than about 10% impurities, and most preferably less than about 5% impurities. In preferred embodiments, isolated proteins or biologically active portions thereof lack contaminating proteins from the same organism from which the polypeptide of the present invention is derived. Typically, such proteins are produced by recombinant techniques.

[0404] A polypeptide of the invention can participate in the process of the present invention. The polypeptide or a portion thereof comprises preferably an amino acid sequence, which is sufficiently homologous to an amino acid sequence shown in table II A and/or II B, application no. 1, columns 5 and 7.

[0405] Further, the polypeptide can have an amino acid sequence which is encoded by a nucleotide sequence which hybridizes, preferably hybridizes under stringent conditions as described above, to a nucleotide sequence of the nucleic acid molecule of the present invention. Accordingly, the polypeptide has an amino acid sequence which is encoded by a nucleotide sequence that is at least about 35%, 40%, 45%, 50%, 55%, 60%, 65% or 70%, preferably at least about 75%, 80%, 85% or 90, and more preferably at least about 91%, 92%, 93%, 94% or 95%, and even more preferably at least about 96%, 97%, 98%, 99% or more homologous to one of the amino acid sequences as shown in table II A and/or II B, application no. 1, columns 5 and 7. The preferred polypeptide of the present invention preferably possesses at least one of the activities according to the invention and described herein. A preferred polypeptide of the present invention includes an amino acid sequence encoded by a nucleotide sequence which hybridizes, preferably hybridizes under stringent conditions, to a nucleotide sequence of table I A and/or II B, application no. 1, columns 5 and 7 or which is homologous thereto, as defined above.

[0406] Accordingly the polypeptide of the present invention can vary from the sequences shown in table II A and/or II B, application no. 1, columns 5 and 7 in amino acid sequence due to natural variation or mutagenesis, as described in detail herein. Accordingly, the polypeptide comprise an amino acid sequence which is at least about 35%, 40%, 45%, 50%, 55%, 60%, 65% or 70%, preferably at least about 75%, 80%, 85% or 90, and more preferably at least about 91%, 92%, 93%, 94% or 95%, and most preferably at least about 96%, 97%, 98%, 99% or more homologous to an entire amino acid sequence shown in table II A and/or II B, application no. 1, columns 5 and 7.

[0407] For the comparison of amino acid sequences the same algorithms as described above or nucleic acid sequences can be used. Results of high quality are reached by using the algorithm of Needleman and Wunsch or Smith and Waterman. Therefore programs based on said algorithms are preferred. Advantageously the comparisons of sequences can be done with the program PileUp (J. Mol. Evolution., 25, 351-360, 1987, Higgins et al., CABIOS, 5 1989: 151-153) or preferably with the programs Gap and BestFit, which are respectively based on the algorithms of Needleman and Wunsch [J. Mol. Biol. 48; 443-453 (1970)] and Smith and Waterman [Adv. Appl. Math. 2; 482-489 (1981)]. Both programs are part of the GCG software-package [Genetics Computer Group, 575 Science Drive, Madison, Wis., USA 53711 (1991); Altschul et al. (1997) Nucleic Acids Res. 25:3389 et seq.]. Therefore preferably the calculations to determine the percentages of sequence homology are done with the program Gap over the whole range of the sequences. The following standard adjustments for the comparison of amino acid sequences were used: gap weight: 8, length weight: 2, average match: 2.912, average mismatch: −2.003.

[0408] Biologically active portions of an polypeptide of the present invention include peptides comprising amino acid sequences derived from the amino acid sequence of the polypeptide of the present invention or used in the process of the present invention, e.g., the amino acid sequence shown in table II, application no. 1, columns 5 and 7 or the amino acid sequence of a protein homologous thereto, which include fewer amino acids than a full length polypeptide of the present invention or used in the process of the present invention or the full length protein which is homologous to an polypeptide of the present invention or used in the process of the present invention depicted herein, and exhibit at least one activity of polypeptide of the present invention or used in the process of the present invention.

[0409] Typically, biologically (or immunologically) active portions i.e. peptides, e.g., peptides which are, for example, 5, 10, 15, 20, 30, 35, 36, 37, 38, 39, 40, 50, 100 or more amino acids in length comprise a domain or motif with at least one activity or epitope of a polypeptide of the present invention or used in the process of the present invention. Moreover, other biologically active portions, in which other regions of the polypeptide are deleted, can be prepared by recombinant techniques and evaluated for one or more of the activities described herein.

[0410] Manipulation of the nucleic acid molecule of the invention may result in the production of a protein having differences from the wild-type protein as shown in table II, application no. 1, column 3. Differences shall mean at least one amino acid different from the sequences as shown in table II, application no. 1, column 3, preferably at least 2, 3, 4, 5, 6, 7, 8, 9 or 10 amino acids, more preferably at least 15, 20, 25, 30, 35, 40, 45 or 50 amino acids different from the sequences as shown in table II, application no. 1, column 3. These proteins may be improved in efficiency or activity, may be present in greater numbers in the cell than is usual, or may be decreased in efficiency or activity in relation to the wild type protein.

[0411] Any mutagenesis strategies for the polypeptide of the present invention or the polypeptide used in the process of the present invention to result in increasing said activity are not meant to be limiting; variations on these strategies will be readily apparent to one skilled in the art. Using such strategies, and incorporating the mechanisms disclosed herein, the nucleic acid molecule and polypeptide of the invention may be utilized to generate plants or parts thereof, expressing wildtype proteins or mutated proteins of the proteins as shown in table II, application no. 1, column 3. The nucleic acid molecules and polypeptide molecules of the invention are expressed such that the yield, production, and/or efficiency of production of a desired compound is improved.

[0412] This desired compound may be any natural product of plants, which includes the final products of biosynthesis pathways and intermediates of naturally-occurring metabolic pathways, as well as molecules which do not naturally occur in the metabolism of said cells, but which are produced by a said cells of the invention. Preferrably, the compound is a composition of amino acids or a recovered amino acid, in particular, the fine chemical, free or in protein-bound form.

[0413] The invention also provides chimeric or fusion proteins.

[0414] As used herein, an “chimeric protein” or “fusion protein” comprises an polypeptide operatively linked to a polypeptide which does not confer above-mentioned activity, in particular, which does not confer an increase of content of the fine chemical in a cell or an organism or a part thereof, if its activity is increased.

[0415] In one embodiment, a protein (=polypeptide) as shown in table II, application no. 1, column 3 refers to a polypeptide having an amino acid sequence corresponding to the polypeptide of the invention or used in the process of the invention, whereas a “non-inventive protein or polypeptide” or “other polypeptide” refers to a polypeptide having an amino acid sequence corresponding to a protein which is not substantially homologous to a polypeptide of the invention, preferably which is not substantially homologous to a polypeptide or protein as shown in table II, application no. 1, column 3, e.g., a protein which does not confer the activity described herein and which is derived from the same or a different organism.

[0416] Within the fusion protein, the term “operatively linked” is intended to indicate that the polypeptide of the invention or a polypeptide used in the process of the invention and the “other polypeptide” or a part thereof are fused to each other so that both sequences fulfil the proposed function addicted to the sequence used. The “other polypeptide” can be fused to the N-terminus or C-terminus preferable to the C-terminus of the polypeptide of the invention or used in the process of the invention. For example, in one embodiment the fusion protein is a GST-LMRP fusion protein in which the sequences of the polypeptide of the invention or the polypeptide used in the process of the invention are fused to the C-terminus of the GST sequences. Such fusion proteins can facilitate the purification of recombinant polypeptides of the invention or a polypeptide useful in the process of the invention.

[0417] In another preferred embodiment, the fusion protein is a polypeptide of the invention or a polypeptide used in the process of the invention containing a heterologous signal sequence at its N-terminus. In certain host cells (e.g., mammalian host cells), expression and/or secretion of a polypeptide of the invention or a polypeptide used in the process of the invention can be increased through use of a heterologous signal sequence. As already mentioned above, targeting sequences, are required for targeting the gene product into specific cell compartment (for a review, see Kermode, Crit. Rev. Plant Sci. 15, 4 (1996) 285-423 and references cited therein), for example into the vacuole, the nucleus, all types of plastids, such as amyloplasts, chloroplasts, chromoplasts, the extracellular space, the mitochondria, the endoplasmic reticulum, elaioplasts, peroxisomes, glycosomes, and other compartments of cells or extracellular. Sequences, which must be mentioned in this context are, in particular, the signal-peptide- or transit-peptide-encoding sequences which are known per se. For example, plastid-transit-peptide-encoding sequences enable the targeting of the expression product into the plastids of a plant cell. Targeting sequences are also known for eukaryotic and to a lower extent for prokaryotic organisms and can advantageously be operable linked with the nucleic acid molecule of the present invention to achieve an expression in one of said compartments or extracellular.

[0418] Preferably, a chimeric or fusion protein of the invention is produced by standard recombinant DNA techniques. For example, DNA fragments coding for the different polypeptide sequences are ligated together in-frame in accordance with conventional techniques, for example by employing blunt-ended or stagger-ended termini for ligation, restriction enzyme digestion to provide for appropriate termini, filling-in of cohesive ends as appropriate, alkaline phosphatase treatment to avoid undesirable joining, and enzymatic ligation. The fusion gene can be synthesized by conventional techniques including automated DNA synthesizers. Alternatively, PCR amplification of gene fragments can be carried out using anchor primers, which give rise to complementary overhangs between two consecutive gene fragments which can subsequently be annealed and reamplified to generate a chimeric gene sequence (see, for example, Current Protocols in Molecular Biology, eds. Ausubel et al. John Wiley & Sons: 1992). Moreover, many expression vectors are commercially available that already encode a fusion moiety (e.g., a GST polypeptide). The nucleic acid molecule of the invention can be cloned into such an expression vector such that the fusion moiety is linked in-frame to the encoded protein.

[0419] Furthermore, folding simulations and computer redesign of structural motifs of the protein of the invention can be performed using appropriate computer programs (Olszewski, Proteins 25 (1996), 286-299; Hoffman, Comput. Appl. Biosci. 11 (1995), 675-679). Computer modeling of protein folding can be used for the conformational and energetic analysis of detailed peptide and protein models (Monge, J. Mol. Biol. 247 (1995), 995-1012; Renouf, Adv. Exp. Med. Biol. 376 (1995), 37-45). The appropriate programs can be used for the identification of interactive sites the polypeptide of the invention or polypeptides used in the process of the invention and its substrates or binding factors or other interacting proteins by computer assistant searches for complementary peptide sequences (Fassina, Immunomethods (1994), 114-120). Further appropriate computer systems for the design of protein and peptides are described in the prior art, for example in Berry, Biochem. Soc. Trans. 22 (1994), 1033-1036; Wodak, Ann. N. Y. Acad. Sci. 501 (1987), 1-13; Pabo, Biochemistry 25 (1986), 5987-5991. The results obtained from the above-described computer analysis can be used for, e.g., the preparation of peptidomimetics of the protein of the invention or fragments thereof. Such pseudopeptide analogues of the, natural amino acid sequence of the protein may very efficiently mimic the parent protein (Benkirane, J. Biol. Chem. 271 (1996), 33218-33224). For example, incorporation of easily available achiral Q-amino acid residues into a protein of the invention or a fragment thereof results in the substitution of amide bonds by polymethylene units of an aliphatic chain, thereby providing a convenient strategy for constructing a peptidomimetic (Banerjee, Biopolymers 39 (1996), 769-777).

[0420] Furthermore, a three-dimensional and/or crystallographic structure of the protein of the invention and the identification of interactive sites the polypeptide of the invention and its substrates or binding factors can be used for design of mutants with modulated binding or turn over activities. For example, the active center of the polypeptide of the present invention can be modelled and amino acid residues participating in the catalytic reaction can be modulated to increase or decrease the binding of the substrate to activate or improve the polypeptide. The identification of the active center and the amino acids involved in the catalytic reaction facilitates the screening for mutants having an increased activity.

[0421] The sequences shown herein have also been described under its protein name as described in table I or II, column 3.

[0422] In an especially preferred embodiment, the polypeptide according to the invention furthermore also does not have the sequences of those proteins which are encoded by the sequences shown in table II, application no. 1, columns 5 and 7.

[0423] One embodiment of the invention also relates to an antibody, which binds specifically to the polypeptide according to the invention or parts, i.e. specific fragments or epitopes of such a protein.

[0424] The antibodies of the invention can be used to identify and isolate the polypeptide according to the invention and encoding genes in any organism, preferably plants, prepared in plants described herein. These antibodies can be monoclonal antibodies, polyclonal antibodies or synthetic antibodies as well as fragments of antibodies, such as Fab, Fv or scFv fragments etc. Monoclonal antibodies can be prepared, for example, by the techniques as originally described in Köhler and Milstein, Nature 256 (1975), 495, and Galfr6, Meth. Enzymol. 73 (1981), 3, which comprise the fusion of mouse myeloma cells to spleen cells derived from immunized mammals.

[0425] Furthermore, antibodies or fragments thereof to the aforementioned peptides can be obtained by using methods, which are described, e.g., in Harlow and Lane “Antibodies, A Laboratory Manual”, CSH Press, Cold Spring Harbor, 1988. These antibodies can be used, for example, for the immunoprecipitation and immunolocalization of proteins according to the invention as well as for the monitoring of the synthesis of such proteins, for example, in recombinant organisms, and for the identification of compounds interacting with the protein according to the invention. For example, surface plasmon resonance as employed in the BIAcore system can be used to increase the efficiency of phage antibodies selections, yielding a high increment of affinity from a single library of phage antibodies, which bind to an epitope of the protein of the invention (Schier, Human Antibodies Hybridomas 7 (1996), 97-105; Malmborg, J. Immunol. Methods 183 (1995), 7-13). In many cases, the binding phenomena of antibodies to antigens are equivalent to other ligand/anti-ligand binding.

[0426] A further embodiment of the invention also relates to a method for the generation of a transgenic host or host cell, e.g. a eukaryotic or prokaryotic cell, preferably a transgenic microorganism, a transgenic plant cell or a transgenic plant tissue or a transgenic plant, which comprises introducing, into the plant, the plant cell or the plant tissue, the nucleic acid construct according to the invention, the vector according to the invention, or the nucleic acid molecule according to the invention.

[0427] A further embodiment of the invention also relates to a method for the transient generation of a host or host cell, prokaryotic or eukaryotic cell, preferably a transgenic microorganism such as a transgenic algae, a transgenic plant cell or a transgenic plant tissue or a transgenic plant, which comprises introducing, into the plant, the plant cell or the plant tissue, the nucleic acid construct according to the invention, the vector according to the invention, the nucleic acid molecule characterized herein as being contained in the nucleic acid construct of the invention or the nucleic acid molecule according to the invention, whereby the introduced nucleic acid molecules, nucleic acid construct and/or vector is not integrated into the genome of the host or host cell. Therefore the transformants are not stable during the propagation of the host in respect of the introduced nucleic acid molecules, nucleic acid construct and/or vector.

[0428] In the process according to the invention, transgenic organisms are also to be understood as meaning—if they take the form of plants—plant cells, plant tissues, plant organs such as root, shoot, stem, seed, flower, tuber or leaf, or intact plants which are grown for the production of the fine chemical.

[0429] Growing is to be understood as meaning for example culturing the transgenic plant cells, plant tissue or plant organs on or in a nutrient medium or the intact plant on or in a substrate, for example in hydroponic culture, potting compost or on a field soil.

[0430] In a further advantageous embodiment of the process, the nucleic acid molecules can be expressed in single-celled plant cells (such as algae), see Falciatore et al., 1999, Marine Biotechnology 1 (3): 239-251 and references cited therein, and plant cells from higher plants (for example spermatophytes such as crops). Examples of plant expression vectors encompass those which are described in detail herein or in: Becker, D. [(1992) Plant Mol. Biol. 20:1195-1197] and Bevan, M. W. [(1984), Nucl. Acids Res. 12:8711-8721; Vectors for Gene Transfer in Higher Plants; in: Transgenic Plants, Vol. 1, Engineering and Utilization, Ed.: Kung and R. Wu, Academic Press, 1993, pp. 15-38]. An overview of binary vectors and their use is also found in Hellens, R. [(2000), Trends in Plant Science, Vol. 5 No. 10, 446-451.

[0431] Vector DNA can be introduced into prokaryotic or eukaryotic cells via conventional transformation or transfection techniques. The terms “transformation” and “transfection” include conjugation and transduction and, as used in the present context, are intended to encompass a multiplicity of prior-art methods for introducing foreign nucleic acid molecules (for example DNA) into a host cell, including calcium phosphate coprecipitation or calcium chloride coprecipitation, DEAE-dextran-mediated transfection, PEG-mediated transfection, lipofection, natural competence, chemically mediated transfer, electroporation or particle bombardment. Suitable methods for the transformation or transfection of host cells, including plant cells, can be found in Sambrook et al. (Molecular Cloning: A Laboratory Manual., 2nd Ed., Cold Spring Harbor Laboratory, Cold Spring Harbor Laboratory Press, Cold Spring Harbor, N.Y., 1989) and in other laboratory handbooks such as Methods in Molecular Biology, 1995, Vol. 44, Agrobacterium protocols, Ed.: Gartland and Davey, Humana Press, Totowa, N.J.

[0432] The above-described methods for the transformation and regeneration of plants from plant tissues or plant cells are exploited for transient or stable transformation of plants. Suitable methods are the transformation of protoplasts by polyethylene-glycol-induced DNA uptake, the biolistic method with the gene gun—known as the particle bombardment method—, electroporation, the incubation of dry embryos in DNA-containing solution, microinjection and the Agrobacterium-mediated gene transfer. The abovementioned methods are described for example in B. Jenes, Techniques for Gene Transfer, in: Transgenic Plants, Vol. 1, Engineering and Utilization, edited by S. D. Kung and R. Wu, Academic Press (1993) 128-143 and in Potrykus Annu. Rev. Plant Physiol. Plant Molec. Biol. 42 (1991) 205-225. The construct to be expressed is preferably cloned into a vector, which is suitable for transforming Agrobacterium tumefaciens, for example pBin19 (Bevan, Nucl. Acids Res. 12 (1984) 8711). Agrobacteria transformed with such a vector can then be used in the known manner for the transformation of plants, in particular crop plants, such as, for example, tobacco plants, for example by bathing scarified leaves or leaf segments in an agrobacterial solution and subsequently culturing them in suitable media. The transformation of plants with Agrobacterium tumefaciens is described for example by Höfgen and Willmitzer in Nucl. Acid Res. (1988) 16, 9877 or known from, inter alia, F. F. White, Vectors for Gene Transfer in Higher Plants; in Transgenic Plants, Vol. 1, Engineering and Utilization, edited by S. D. Kung and R. Wu, Academic Press, 1993, pp. 15-38. Alternatively the construct to be expressed can be cloned into vectors suitable for plastid transformation, as for example described in WO2004029256, WO2004004445 or Dufourmantel et al., 2004, Plant Mol. Biol. 55, 479-489.

[0433] To select for the successful transfer of the nucleic acid molecule, vector or nucleic acid construct of the invention according to the invention into a host organism, it is advantageous to use marker genes as have already been described above in detail. It is known of the stable or transient integration of nucleic acids into plant cells that only a minority of the cells takes up the foreign DNA and, if desired, integrates it into its genome, depending on the expression vector used and the transfection technique used. To identify and select these integrants, a gene encoding for a selectable marker (as described above, for example resistance to antibiotics) is usually introduced into the host cells together with the gene of interest. Preferred selectable markers in plants comprise those, which confer resistance to an herbicide such as glyphosate or gluphosinate. Other suitable markers are, for example, markers, which encode genes involved in biosynthetic pathways of, for example, sugars or amino acids, such as 1-galactosidase, ura3 or ilv2. Markers, which encode genes such as luciferase, gfp or other fluorescence genes, are likewise suitable. These markers and the aforementioned markers can be used in mutants in whom these genes are not functional since, for example, they have been deleted by conventional methods. Furthermore, nucleic acid molecules, which encode a selectable marker, can be introduced into a host cell on the same vector as those, which encode the polypeptides of the invention or used in the process or else in a separate vector. Cells which have been transfected stably with the nucleic acid introduced can be identified for example by selection (for example, cells which have integrated the selectable marker survive whereas the other cells die).

[0434] Since the marker genes, as a rule specifically the gene for resistance to antibiotics and herbicides, are no longer required or are undesired in the transgenic host cell once the nucleic acids have been introduced successfully, the process according to the invention for introducing the nucleic acids advantageously employs techniques which enable the removal, or excision, of these marker genes. One such a method is what is known as cotransformation. The cotransformation method employs two vectors simultaneously for the transformation, one vector bearing the nucleic acid according to the invention and a second bearing the marker gene(s). A large proportion of transformants receives or, in the case of plants, comprises (up to 40% of the transformants and above), both vectors. In case of transformation with Agrobacteria, the transformants usually receive only a part of the vector, the sequence flanked by the T-DNA, which usually represents the expression cassette. The marker genes can subsequently be removed from the transformed plant by performing crosses. In another method, marker genes integrated into a transposon are used for the transformation together with desired nucleic acid (known as the Ac/Ds technology). The transformants can be crossed with a transposase resource or the transformants are transformed with a nucleic acid construct conferring expression of a transposase, transiently or stable. In some cases (approx. 10%), the transposon jumps out of the genome of the host cell once transformation has taken place successfully and is lost. In a further number of cases, the transposon jumps to a different location. In these cases, the marker gene must be eliminated by performing crosses. In microbiology, techniques were developed which make possible, or facilitate, the detection of such events. A further advantageous method relies on what are known as recombination systems, whose advantage is that elimination by crossing can be dispensed with. The best-known system of this type is what is known as the Cre/lox system. Cre1 is a recombinase, which removes the sequences located between the loxP sequences. If the marker gene is integrated between the loxP sequences, it is removed, once transformation has taken place successfully, by expression of the recombinase. Further recombination systems are the HIN/HIX, FLP/FRT and REP/STB system (Tribble et al., J. Biol. Chem., 275, 2000: 22255-22267; Velmurugan et al., J. Cell Biol., 149, 2000: 553-566). A site-specific integration into the plant genome of the nucleic acid sequences according to the invention is possible. Naturally, these methods can also be applied to microorganisms such as yeast, fungi or bacteria. Also methods for the production of marker-free plastid transformants using a transiently cointegrated selection gene have been described for example by Koop et al., Nature Biotechology, (2004) 22, 2, 225-229.

[0435] Agrobacteria transformed with an expression vector according to the invention may also be used in the manner known per se for the transformation of plants such as experimental plants like Arabidopsis or crop plants, such as, for example, cereals, maize, oats, rye, barley, wheat, soya, rice, cotton, sugarbeet, canola, sunflower, flax, hemp, potato, tobacco, tomato, carrot, bell peppers, oilseed rape, tapioca, cassava, arrow root, tagetes, alfalfa, lettuce and the various tree, nut, and grapevine species, in particular oil-containing crop plants such as soya, peanut, castor-oil plant, sunflower, maize, cotton, flax, oilseed rape, coconut, oil palm, safflower (Carthamus tinctorius) or cocoa beans, for example by bathing scarified leaves or leaf segments in an agrobacterial solution and subsequently growing them in suitable media.

[0436] In addition to the transformation of somatic cells, which then has to be regenerated into intact plants, it is also possible to transform the cells of plant meristems and in particular those cells which develop into gametes. In this case, the transformed gametes follow the natural plant development, giving rise to transgenic plants. Thus, for example, seeds of Arabidopsis are treated with agrobacteria and seeds are obtained from the developing plants of which a certain proportion is transformed and thus transgenic (Feldman, K A and Marks M D (1987). Mol Gen Genet 208:274-289; Feldmann K (1992). In: C Koncz, N-H Chua and J Shell, eds, Methods in Arabidopsis Research. Word Scientific, Singapore, pp. 274-289). Alternative methods are based on the repeated removal of the influorescences and incubation of the excision site in the center of the rosette with transformed agrobacteria, whereby transformed seeds can likewise be obtained at a later point in time (Chang (1994). Plant J. 5: 551-558; Katavic (1994). Mol Gen Genet, 245: 363-370). However, an especially effective method is the vacuum infiltration method with its modifications such as the “floral dip” method. In the case of vacuum infiltration of Arabidopsis, intact plants under reduced pressure are treated with an agrobacterial suspension (Bechthold, N (1993). C R Acad Sci Paris Life Sci, 316: 1194-1199), while in the case of the“floral dip” method the developing floral tissue is incubated briefly with a surfactant-treated agrobacterial suspension (Clough, S J and Bent, A F (1998). The Plant J. 16, 735-743). A certain proportion of transgenic seeds are harvested in both cases, and these seeds can be distinguished from nontransgenic seeds by growing under the above-described selective conditions. In addition the stable transformation of plastids is of advantages because plastids are inherited maternally is most crops reducing or eliminating the risk of transgene flow through pollen. The transformation of the chloroplast genome is generally achieved by a process, which has been schematically displayed in Klaus et al., 2004 (Nature Biotechnology 22(2), 225-229). Briefly the sequences to be transformed are cloned together with a selectable marker gene between flanking sequences homologous to the chloroplast genome. These homologous flanking sequences direct site specific integration into the plastome. Plastidal transformation has been described for many different plant species and an overview can be taken from Bock (2001) Transgenic plastids in basic research and plant biotechnology. J Mol Biol. 2001 Sep. 21; 312 (3):425-38 or Maliga, P (2003) Progress towards commercialization of plastid transformation technology. Trends Biotechnol. 21, 20-28. Further biotechnological progress has recently been reported in form of marker free plastid transformants, which can be produced by a transient cointegrated maker gene (Klaus et al., 2004, Nature Biotechnology 22(2), 225-229).

[0437] The genetically modified plant cells can be regenerated via all methods with which the skilled worker is familiar. Suitable methods can be found in the abovementioned publications by S. D. Kung and R. Wu, Potrykus or Höfgen and Willmitzer.

[0438] Accordingly, the present invention thus also relates to a plant cell comprising the nucleic acid construct according to the invention, the nucleic acid molecule according to the invention or the vector according to the invention.

[0439] Accordingly the present invention relates to any cell transgenic for any nucleic acid characterized as part of the invention, e.g. conferring the increase of the fine chemical in a cell or an organism or a part thereof, e.g. the nucleic acid molecule of the invention, the nucleic acid construct of the invention, the antisense molecule of the invention, the vector of the invention or a nucleic acid molecule encoding the polypeptide of the invention, e.g. encoding a polypeptide having an activity as the protein as shown in table II, application no. 1, column 3. Due to the above mentioned activity the fine chemical content in a cell or an organism is increased. For example, due to modulation or manipulation, the cellular activity is increased preferably in organelles such as plastids or mitochondria, e.g. due to an increased expression or specific activity or specific targeting of the subject matters of the invention in a cell or an organism or a part thereof especially in organelles such as plastids or mitochondria. Transgenic for a polypeptide having a protein or activity means herein that due to modulation or manipulation of the genome, the activity of protein as shown in table II, application no. 1, column 3 or a protein as shown in table II, application no. 1, column 3-like activity is increased in the cell or organism or part thereof especially in organelles such as plastids or mitochondria. Examples are described above in context with the process of the invention.

[0440] “Transgenic”, for example regarding a nucleic acid molecule, an nucleic acid construct or a vector comprising said nucleic acid molecule or an organism transformed with said nucleic acid molecule, nucleic acid construct or vector, refers to all those subjects originating by recombinant methods in which either
[0441] a) the nucleic acid sequence, or
[0442] b) a genetic control sequence linked operably to the nucleic acid sequence, for example a promoter, or
[0443] c) (a) and (b)
   are not located in their natural genetic environment or have been modified by recombinant methods, an example of a modification being a substitution, addition, deletion, inversion or insertion of one or more nucleotide residues. Natural genetic environment refers to the natural chromosomal locus in the organism of origin, or to the presence in a genomic library. In the case of a genomic library, the natural genetic environment of the nucleic acid sequence is preferably retained, at least in part. The environment flanks the nucleic acid sequence at least at one side and has a sequence of at least 50 bp, preferably at least 500 bp, especially preferably at least 1000 bp, very especially preferably at least 5000 bp, in length.

[0444] A naturally occurring expression cassette—for example the naturally occurring combination of the promoter of the gene encoding a protein as shown in table II, application no. 1, column 3 with the corresponding encoding gene—becomes a transgenic expression cassette when it is modified by non-natural, synthetic “artificial” methods such as, for example, mutagenization. Such methods have been described (U.S. Pat. No. 5,565,350; WO 00/15815; also see above).

[0445] Further, the plant cell, plant tissue or plant can also be transformed such that further enzymes and proteins are (over)expressed which expression supports an increase of the fine chemical.

[0446] However, transgenic also means that the nucleic acids according to the invention are located at their natural position in the genome of an organism, but that the sequence has been modified in comparison with the natural sequence and/or that the regulatory sequences of the natural sequences have been modified. Preferably, transgenic/recombinant is to be understood as meaning the transcription of the nucleic acids used in the process according to the invention occurs at a non-natural position in the genome, that is to say the expression of the nucleic acids is homologous or, preferably, heterologous. This expression can be transiently or of a sequence integrated stably into the genome.

[0447] The term “transgenic plants” used in accordance with the invention also refers to the progeny of a transgenic plant, for example the T₁, T₂, T₃ and subsequent plant generations or the BC₁, BC₂, BC₃ and subsequent plant generations. Thus, the transgenic plants according to the invention can be raised and selfed or crossed with other individuals in order to obtain further transgenic plants according to the invention. Transgenic plants may also be obtained by propagating transgenic plant cells vegetatively. The present invention also relates to transgenic plant material, which can be derived from a transgenic plant population according to the invention. Such material includes plant cells and certain tissues, organs and parts of plants in all their manifestations, such as seeds, leaves, anthers, fibers, tubers, roots, root hairs, stems, embryo, calli, cotelydons, petioles, harvested material, plant tissue, reproductive tissue and cell cultures, which are derived from the actual transgenic plant and/or can be used for bringing about the transgenic plant.

[0448] Any transformed plant obtained according to the invention can be used in a conventional breeding scheme or in in vitro plant propagation to produce more transformed plants with the same characteristics and/or can be used to introduce the same characteristic in other varieties of the same or related species. Such plants are also part of the invention. Seeds obtained from the transformed plants genetically also contain the same characteristic and are part of the invention. As mentioned before, the present invention is in principle applicable to any plant and crop that can be transformed with any of the transformation method known to those skilled in the art.

[0449] In an especially preferred embodiment, the organism, the host cell, plant cell, plant, microorganism or plant tissue according to the invention is transgenic.

[0450] Accordingly, the invention therefore relates to transgenic organisms transformed with at least one nucleic acid molecule, nucleic acid construct or vector according to the invention, and to cells, cell cultures, tissues, parts—such as, for example, in the case of plant organisms, plant tissue, for example leaves, roots and the like or propagation material derived from such organisms, or intact plants. The terms “recombinant (host)”, and “transgenic (host)” are used interchangeably in this context. Naturally, these terms refer not only to the host organism or target cell in question, but also to the progeny, or potential progeny, of these organisms or cells. Since certain modifications may occur in subsequent generations owing to mutation or environmental effects, such progeny is not necessarily identical with the parental cell, but still comes within the scope of the term as used herein.

[0451] Suitable organisms for the process according to the invention or as hosts are all these eukaryotic organisms, which are capable of synthesizing the fine chemical. The organisms used as hosts are microorganisms, such as algae or plants, such as dicotyledonous or monocotyledonous plants.

[0452] In principle all plants can be used as host organism, especially the plants mentioned above as source organism. Preferred transgenic plants are, for example, selected from the families Aceraceae, Anacardiaceae, Apiaceae, Asteraceae, Brassicaceae, Cactaceae, Cucurbitaceae, Euphorbiaceae, Fabaceae, Malvaceae, Nymphaeaceae, Papaveraceae, Rosaceae, Salicaceae, Solanaceae, Arecaceae, Bromeliaceae, Cyperaceae, Iridaceae, Liliaceae, Orchidaceae, Gentianaceae, Labiaceae, Magnoliaceae, Ranunculaceae, Carifolaceae, Rubiaceae, Scrophulariaceae, Caryophyllaceae, Ericaceae, Polygonaceae, Violaceae, Juncaceae or Poaceae and preferably from a plant selected from the group of the families Apiaceae, Asteraceae, Brassicaceae, Cucurbitaceae, Fabaceae, Papaveraceae, Rosaceae, Solanaceae, Liliaceae or Poaceae. Preferred are crop plants such as plants advantageously selected from the group of the genus peanut, oilseed rape, canola, sunflower, safflower, olive, sesame, hazelnut, almond, avocado, bay, pumpkin/squash, linseed, soya, pistachio, borage, maize, wheat, rye, oats, sorghum and millet, triticale, rice, barley, cassava, potato, sugarbeet, egg plant, alfalfa, and perennial grasses and forage plants, oil palm, vegetables (brassicas, root vegetables, tuber vegetables, pod vegetables, fruiting vegetables, onion vegetables, leafy vegetables and stem vegetables), buckwheat, Jerusalem artichoke, broad bean, vetches, lentil, dwarf bean, lupin, clover and Lucerne for mentioning only some of them.

[0453] Preferred plant cells, plant organs, plant tissues or parts of plants originate from the under source organism mentioned plant families, preferably from the abovementioned plant genus, more preferred from abovementioned plants species.

[0454] Transgenic plants comprising the amino acids synthesized in the process according to the invention can be marketed directly without isolation of the compounds synthesized. In the process according to the invention, plants are understood as meaning all plant parts, plant organs such as leaf, stalk, root, tubers or seeds or propagation material or harvested material or the intact plant. In this context, the seed encompasses all parts of the seed such as the seed coats, epidermal cells, seed cells, endosperm or embryonic tissue. The amino acids produced in the process according to the invention may, however, also be isolated from the plant in the form of their free amino acids or bound in proteins. Amino acids produced by this process can be harvested by harvesting the organisms either from the culture in which they grow or from the field. This can be done via expressing, grinding and/or extraction, salt precipitation and/or ion-exchange chromatography of the plant parts, preferably the plant seeds, plant fruits, plant tubers and the like.

[0455] In a further embodiment, the present invention relates to a process for the generation of a microorganism, comprising the introduction, into the microorganism or parts thereof, of the nucleic acid construct of the invention, or the vector of the invention or the nucleic acid molecule of the invention.

[0456] In another embodiment, the present invention relates also to a transgenic microorganism comprising the nucleic acid molecule of the invention, the nucleic acid construct of the invention or the vector as of the invention. Appropriate microorganisms have been described herein before under source organism, preferred are in particular aforementioned strains suitable for the production of fine chemicals.

[0457] Accordingly, the present invention relates also to a process according to the present invention whereby the produced amino acid composition or the produced the fine chemical is isolated.

[0458] In this manner, more than 50% by weight, advantageously more than 60% by weight, preferably more than 70% by weight, especially preferably more than 80% by weight, very especially preferably more than 90% by weight, of the amino acids produced in the process can be isolated. The resulting amino acids can, if appropriate, subsequently be further purified, if desired mixed with other active ingredients such as vitamins, amino acids, carbohydrates, antibiotics and the like, and, if appropriate, formulated.

[0459] In one embodiment, the amino acid is the fine chemical.

[0460] The amino acids obtained in the process are suitable as starting material for the synthesis of further products of value. For example, they can be used in combination with each other or alone for the production of pharmaceuticals, foodstuffs, animal feeds or cosmetics. Accordingly, the present invention relates a method for the production of a pharmaceuticals, food stuff, animal feeds, nutrients or cosmetics comprising the steps of the process according to the invention, including the isolation of the amino acid composition produced or the fine chemical produced if desired and formulating the product with a pharmaceutical acceptable carrier or formulating the product in a form acceptable for an application in agriculture. A further embodiment according to the invention is the use of the amino acids produced in the process or of the transgenic organisms in animal feeds, foodstuffs, medicines, food supplements, cosmetics or pharmaceuticals.

[0461] In principle all microorganisms can be used as host organism especially the ones mentioned under source organism above. It is advantageous to use in the process of the invention transgenic microorganisms such as algae selected from the group of the families Bacillariophyceae, Charophyceae, Chlorophyceae, Chrysophyceae, Craspedophyceae, Euglenophyceae, Prymnesiophyceae, Phaeophyceae, Dinophyceae, Rhodophyceae, Xanthophyceae, Prasinophyceae and its described species and strains. Examples for such algae are the following species Isochrysis galbana, Chaetoceros gracilis, Chaetoceros calcitrans, Tetraselmis suecica, Thalassiosira pseudonana, Pavlova lutheri, Isochrysis sp., Skeletonema costatum, Chroomonas salina, Dunaliella tertiolecta, Chaetoceros simplex, Chaetoceros muelleri, Nannochloropsis sp., Cyclotella sp., Phaeodactylum tricornutum, Tetraselmis chui, Pavlova salina, Dicruteria sp., Tetraselmis levis, Dunaliella perva, Thalassiosira weissfloggii, Chlamydomonas sp., Chlorella vulgaris, Neochloris oleoabundans or Chlorella sp, which are only smahl overview.

[0462] The process of the invention is, when the host organisms are microorganisms, advantageously carried out at a temperature between 0° C. and 95° C., preferably between 10° C. and 85° C., particularly preferably between 15° C. and 75° C., very particularly preferably between 15° C. and 45° C. The pH is advantageously kept at between pH 4 and 12, preferably between pH 6 and 9, particularly preferably between pH 7 and 8, during this. The process of the invention can be operated batchwise, semibatchwise or continuously. A summary of known cultivation methods is to be found in the textbook by Chmiel (Bioprozeβtechnik 1. Einführung in die Bioverfahrenstechnik (Gustav Fischer Verlag, Stuttgart, 1991)) or in the textbook by Storhas (Bioreaktoren and periphere Einrichtungen (Vieweg Verlag, Braunschweig/Wiesbaden, 1994)). The culture medium to be used must meet the requirements of the respective strains in a suitable manner. Descriptions of culture media for various microorganisms are present in the handbook “Manual of Methods for General Bacteriology” of the American Society for Bacteriology (Washington D. C., USA, 1981) and for algae in McLellan et al. [(1991): Maintenance of algae and protozoa.—A. Doyle and B. Kirsop (eds.) Maintenance of Microorganisms London: 183-208]; Provasoli et al. [(1960): Artificial media for freshwater algae: problems and suggestions.—R. T. Hartman (eds.) The Ecology of Algae. Pymatunig Laboratory of Field Biology Special publication 2, University of Pittsburgh: 84-96] or Starr, R. C. [(1971): Algal cultures-sources and methods of cultivation.—A. San Pietro (eds.) Photosynthesis Part A, Methods in Enzymology 23, N. Y.: 29-53]. These media, which can be employed according to the invention include, as described above, usually one or more carbon sources, nitrogen sources, inorganic salts, vitamins and/or trace elements. Preferred carbon sources are sugars such as mono-, di- or polysaccharides. Examples of very good carbon sources are glucose, fructose, mannose, galactose, ribose, sorbose, ribulose, lactose, maltose, sucrose, raffinose, starch or cellulose. Sugars can also be added to the media via complex compounds such as molasses, or other byproducts of sugar refining. It may also be advantageous to add mixtures of various carbon sources. Other possible carbon sources are oils and fats such as, for example, soybean oil, sunflower oil, peanut oil and/or coconut fat, fatty acids such as, for example, palmitic acid, stearic acid and/or linoleic acid, alcohols and/or polyalcohols such as, for example, glycerol, methanol and/or ethanol and/or organic acids such as, for example, acetic acid and/or lactic acid. Nitrogen sources are usually organic or inorganic nitrogen compounds or materials, which contain these compounds. Examples of nitrogen sources include ammonia in liquid or gaseous form or ammonium salts such as ammonium sulfate, ammonium chloride, ammonium phosphate, ammonium carbonate or ammonium nitrate, nitrates, urea, amino acids or complex nitrogen sources such as corn steep liquor, soybean meal, soybean protein, yeast extract, meat extract and others. The nitrogen sources may be used singly or as a mixture. Inorganic salt compounds, which may be present in the media include the chloride, phosphorus or sulfate salts of calcium, magnesium, sodium, cobalt, molybdenum, potassium, manganese, zinc, copper and iron. For the cultivation of algae the so called soilwater media are preferred. Such media are composed of soil extract, trace element solutions, filtered seawater, a nitrogen source and a buffer substance. Such culture media are well known by the skilled person and are available for example from culture collections such as the culture collection of algae (SAG) at the University of Göttingen, the Culture collection of algae in Coimbra, Portugal (ACOI) or the culture collection of algae (UTEX) in Texas, USA.

[0463] For preparing sulfur-containing fine chemicals, in particular the fine chemical, it is possible to use as sulfur source inorganic sulfur-containing compounds such as, for example, sulfates, sulfites, dithionites, tetrathionates, thiosulfates, sulfides or else organic sulfur compounds such as mercaptans and thiols.

[0464] It is possible to use as phosphorus source phosphoric acid, potassium dihydrogenphosphate or dipotassium hydrogenphosphate or the corresponding sodium-containing salts. Chelating agents can be added to the medium in order to keep the metal ions in solution. Particularly suitable chelating agents include dihydroxyphenols such as catechol or protocatechuate, or organic acids such as citric acid. The fermentation media employed according to the invention for cultivating microorganisms normally also contain other growth factors such as vitamins or growth promoters, which include, for example, biotin, riboflavin, thiamine, folic acid, nicotinic acid, pantothenate and pyridoxine. All media components are sterilized either by heat (1.5 bar and 121° C. for 20 min) or by sterilizing filtration. The components can be sterilized either together or, if necessary, separately. All media components can be present at the start of the cultivation or optionally be added continuously or batchwise. The temperature of the culture is normally between 0° C. and 55° C., preferably at 10° C. to 30° C., and can be kept constant or changed during the experiment. The pH of the medium should be in the range from 3.5 to 8.5, preferably in the range between 5 to 7. The pH for the cultivation can be controlled during the cultivation by adding basic compounds such as sodium hydroxide, potassium hydroxide, ammonia or aqueous ammonia or acidic compounds such as phosphoric acid or sulfuric acid. Foaming can be controlled by employing antifoams such as, for example, fatty acid polyglycol esters. The stability of plasmids can be maintained by adding to the medium suitable substances having a selective effect, for example antibiotics. Aerobic conditions are maintained by introducing oxygen or oxygen-containing gas mixtures such as, for example, ambient air into the culture. The temperature of the culture is normally from 20° C. to 45° C. and preferably from 25° C. to 40° C. The culture is continued until formation of the desired product is at a maximum. This aim is normally achieved within 10 hours to 160 hours.

[0465] The fermentation broths obtained in this way, containing in particular L-methionine, L-threonine and/or L-lysine preferably L-methionine, normally have a dry matter content of from 7.5 to 25% by weight. The fermentation broth can be processed further. Depending on requirements, the biomass can be removed entirely or partly by separation methods, such as, for example, centrifugation, filtration, decantation or a combination of these methods, from the fermentation broth or left completely in it. The fermentation broth can then be thickened or concentrated by known methods, such as, for example, with the aid of a rotary evaporator, thin-film evaporator, falling film evaporator, by reverse osmosis or by nanofiltration. This concentrated fermentation broth can then be worked up by freeze-drying, spray drying, spray granulation or by other processes.

[0466] However, it is also possible to purify the amino acid produced further. For this purpose, the product-containing composition is subjected to a chromatography on a suitable resin, in which case the desired product or the impurities are retained wholly or partly on the chromatography resin. These chromatography steps can be repeated if necessary, using the same or different chromatography resins. The skilled worker is familiar with the choice of suitable chromatography resins and their most effective use. The purified product can be concentrated by filtration or ultrafiltration and stored at a temperature at which the stability of the product is a maximum.

[0467] The identity and purity of the isolated compound(s) can be determined by prior art techniques. These include high performance liquid chromatography (HPLC), spectroscopic methods, mass spectrometry (MS), staining methods, thin-layer chromatography, NIRS, enzyme assay or microbiological assays. These analytical methods are summarized in: Patek et al. (1994) Appl. Environ. Microbiol. 60:133-140; Malakhova et al. (1996) Biotekhnologiya 11 27-32; and Schmidt et al. (1998) Bioprocess Engineer. 19:67-70. Ulmann's Encyclopedia of Industrial Chemistry (1996) Vol. A27, VCH: Weinheim, pp. 89-90, pp. 521-540, pp. 540-547, pp. 559-566, 575-581 and pp. 581-587; Michal, G (1999) Biochemical Pathways: An Atlas of Biochemistry and Molecular Biology, John Wiley and Sons; Fallon, A. et al. (1987) Applications of HPLC in Biochemistry in: Laboratory Techniques in Biochemistry and Molecular Biology, Vol. 17.

[0468] In yet another aspect, the invention also relates to harvestable parts and to propagation material of the transgenic plants according to the invention which either contain transgenic plant cells expressing a nucleic acid molecule according to the invention or which contains cells which show an increased cellular activity of the polypeptide of the invention, e.g. an increased expression level or higher activity of the described protein.

[0469] Harvestable parts can be in principle any useful parts of a plant, for example, flowers, pollen, seedlings, tubers, leaves, stems, fruit, seeds, roots etc. Propagation material includes, for example, seeds, fruits, cuttings, seedlings, tubers, rootstocks etc. Preferred are seeds, fruits, seedlings or tubers as harvestable or propagation material.

[0470] The invention furthermore relates to the use of the transgenic organisms according to the invention and of the cells, cell cultures, parts—such as, for example, roots, leaves and the like as mentioned above in the case of transgenic plant organisms—derived from them, and to transgenic propagation material such as seeds or fruits and the like as mentioned above, for the production of foodstuffs or feeding stuffs, pharmaceuticals or fine chemicals.

[0471] Accordingly in another embodiment, the present invention relates to the use of the nucleic acid molecule, the organism, e.g. the microorganism, the plant, plant cell or plant tissue, the vector, or the polypeptide of the present invention for making fatty acids, carotenoids, isoprenoids, vitamins, lipids, wax esters, (poly)saccharides and/or polyhydroxyalkanoates, and/or its metabolism products, in particular, steroid hormones, cholesterol, prostaglandin, triacylglycerols, bile acids and/or ketone bodies producing cells, tissues and/or plants. There are a number of mechanisms by which the yield, production, and/or efficiency of production of fatty acids, carotenoids, isoprenoids, vitamins, wax esters, lipids, (poly)saccharides and/or polyhydroxyalkanoates, and/or its metabolism products, in particular, steroid hormones, cholesterol, triacylglycerols, prostaglandin, bile acids and/or ketone bodies or further of above defined fine chemicals incorporating such an altered protein can be affected. In the case of plants, by e.g. increasing the expression of acetyl-CoA which is the basis for many products, e.g., fatty acids, carotenoids, isoprenoids, vitamines, lipids, (poly)saccharides, wax esters, and/or polyhydroxyalkanoates, and/or its metabolism products, in particular, prostaglandin, steroid hormones, cholesterol, triacylglycerols, bile acids and/or ketone bodies in a cell, it may be possible to increase the amount of the produced said compounds thus permitting greater ease of harvesting and purification or in case of plants more efficient partitioning. Further, one or more of said metabolism products, increased amounts of the cofactors, precursor molecules, and intermediate compounds for the appropriate biosynthetic pathways maybe required. Therefore, by increasing the number and/or activity of transporter proteins involved in the import of nutrients, such as carbon sources (i.e., sugars), nitrogen sources (i.e., amino acids, ammonium salts), phosphate, and sulfur, it may be possible to improve the production of acetyl CoA and its metabolism products as mentioned above, due to the removal of any nutrient supply limitations on the biosynthetic process. In particular, it may be possible to increase the yield, production, and/or efficiency of production of said compounds, e.g. fatty acids, carotenoids, isoprenoids, vitamins, was esters, lipids, (poly)saccharides, and/or polyhydroxyalkanoates, and/or its metabolism products, in particular, steroid hormones, cholesterol, prostaglandin, triacylglycerols, bile acids and/or ketone bodies molecules etc. in plants.

[0472] Further in another embodiment, the present invention relates to the use of the nucleic acid molecule of the invention or used in the method of the invention alone or in combination with other genes of the respective fine chemical synthesis for example of the amino acid biosynthesis, the polypeptide of the invention or used in the method of the invention, the nucleic acid construct of the invention, the vector of the invention, the plant or plant tissue or the host cell of the invention, for the production of plant resistant to a herbicide inhibiting the production of leucine, isoleucine and/or valine.

[0473] Furthermore preferred is a method for the recombinant production of pharmaceuticals or fine chemicals in host organisms, wherein a host organism is transformed with one of the above-described nucleic acid constructs comprising one or more structural genes which encode the desired fine chemical or catalyze the biosynthesis of the desired fine chemical, the transformed host organism is cultured, and the desired fine chemical is isolated from the culture medium. This method can be applied widely to fine chemicals such as enzymes, vitamins, amino acids, sugars, fatty acids, and natural and synthetic flavorings, aroma substances and colorants or compositions comprising these. Especially preferred is the additional production of further amino acids, tocopherols and tocotrienols and carotenoids or compositions comprising said compounds. The transformed host organisms are cultured and the products are recovered from the host organisms or the culture medium by methods known to the skilled worker or the organism itself servers as food or feed supplement. The production of pharmaceuticals such as, for example, antibodies or vaccines, is described by Hood E E, Jilka J M. Curr Opin Biotechnol. 1999 August; 10(4):382-6; Ma J K, Vine N D. Curr Top Microbiol Immunol. 1999; 236:275-92.

[0474] In one embodiment, the present invention relates to a method for the identification of a gene product conferring an increase in the fine chemical production in a cell, comprising the following steps:
[0475] (a) contacting e.g. hybridising, the nucleic acid molecules of a sample, e.g. cells, tissues, plants or microorganisms or a nucleic acid library, which can contain a candidate gene encoding a gene product conferring an increase in the fine chemical after expression, with the nucleic acid molecule of the present invention;
[0476] (b) identifying the nucleic acid molecules, which hybridize under relaxed stringent conditions with the nucleic acid molecule of the present invention in particular to the nucleic acid molecule sequence shown in table I, application no. 1, columns 5 and 7, preferably in table I B, application no. 1, columns 5 and 7, and, optionally, isolating the full length cDNA clone or complete genomic clone;
[0477] (c) introducing the candidate nucleic acid molecules in host cells, preferably in a plant cell or a microorganism, appropriate for producing the fine chemical;
[0478] (d) expressing the identified nucleic acid molecules in the host cells;
[0479] (e) assaying the fine chemical level in the host cells; and
[0480] (f) identifying the nucleic acid molecule and its gene product which expression confers an increase in the fine chemical level in the host cell after expression compared to the wild type.

[0481] Relaxed hybridisation conditions are: After standard hybridisation procedures washing steps can be performed at low to medium stringency conditions usually with washing conditions of 40°-55° C. and salt conditions between 2×SSC and 0.2×SSC with 0.1% SDS in comparison to stringent washing conditions as e.g. 60°-68° C. with 0.1% SDS. Further examples can be found in the references listed above for the stringend hybridization conditions. Usually washing steps are repeated with increasing stringency and length until a useful signal to noise ratio is detected and depend on many factors as the target, e.g. its purity, GC-content, size etc, the probe, e.g.its length, is it a RNA or a DNA probe, salt conditions, washing or hybridisation temperature, washing or hybridisation time etc.

[0482] In another embodiment, the present invention relates to a method for the identification of a gene product conferring an increase in the fine chemical production in a cell, comprising the following steps:
[0483] (a) identifying nucleic acid molecules of an organism; which can contain a candidate gene encoding a gene product conferring an increase in the fine chemical after expression, which are at least 20%, preferably 25%, more preferably 30%, even more preferred are 35%. 40% or 50%, even more preferred are 60%, 70% or 80%, most preferred are 90% or 95% or more homology to the nucleic acid molecule of the present invention, for example via homology search in a data bank;
[0484] (b) introducing the candidate nucleic acid molecules in host cells, preferably in a plant cells or microorganisms, appropriate for producing the fine chemical;
[0485] (c) expressing the identified nucleic acid molecules in the host cells;
[0486] (d) assaying the fine chemical level in the host cells; and
[0487] (e) identifying the nucleic acid molecule and its gene product which expression confers an increase in the fine chemical level in the host cell after expression compared to the wild type.

[0488] The nucleic acid molecules identified can then be used for the production of the fine chemical in the same way as the nucleic acid molecule of the present invention. Accordingly, in one embodiment, the present invention relates to a process for the production of the fine chemical, comprising (a) identifying a nucleic acid molecule according to aforementioned steps (a) to (f) or (a) to (e) and recovering the free or bound fine chemical from a organism having an increased cellular activity of a polypeptide encoded by the isolated nucleic acid molecule compared to a wild type.

[0489] Furthermore, in one embodiment, the present invention relates to a method for the identification of a compound stimulating production of the fine chemical to said plant comprising:
[0490] a) contacting cells which express the polypeptide of the present invention or its mRNA with a candidate compound under cell cultivation conditions;
[0491] b) assaying an increase in expression of said polypeptide or said mRNA;
[0492] c) comparing the expression level to a standard response made in the absence of said candidate compound; whereby, an increased expression over the standard indicates that the compound is stimulating production of the fine chemical.

[0493] Furthermore, in one embodiment, the present invention relates to process for the identification of a compound conferring increased the fine chemical production in a plant or microorganism, comprising the steps:
[0494] (a) culturing a cell or tissue or microorganism or maintaining a plant expressing the polypeptide according to the invention or a nucleic acid molecule encoding said polypeptide and a readout system capable of interacting with the polypeptide under suitable conditions which permit the interaction of the polypeptide with said readout system in the presence of a compound or a sample comprising a plurality of compounds and capable of providing a detectable signal in response to the binding of a compound to said polypeptide under conditions which permit the expression of said readout system and the polypeptide of the present invention or used in the process of the invention; and
[0495] (b) identifying if the compound is an effective agonist by detecting the presence or absence or increase of a signal produced by said readout system.

[0496] The screen for a gene product or an agonist conferring an increase in the fine chemical production can be performed by growth of an organism for example a microorganism in the presence of growth reducing amounts of an inhibitor of the synthesis of the fine chemical. Better growth, eg higher dividing rate or high dry mass in comparison to the control under such conditions would identify a gene or gene product or an agonist conferring an increase in fine chemical production.

One can think to screen for increased fine chemical production by for example resistance to drugs blocking fine chemical synthesis and looking whether this effect is dependent on the proteins as shown in table II, application no. 1, column 3, eg comparing near identical organisms with low and high activity of the proteins as shown in table II, application no. 1, column 3.

[0497] Said compound may be chemically synthesized or microbiologically produced and/or comprised in, for example, samples, e.g., cell extracts from, e.g., plants, animals or microorganisms, e.g. pathogens. Furthermore, said compound(s) may be known in the art but hitherto not known to be capable of suppressing or activating the polypeptide of the present invention. The reaction mixture may be a cell free extract or may comprise a cell or tissue culture. Suitable set ups for the method of the invention are known to the person skilled in the art and are, for example, generally described in Alberts et al., Molecular Biology of the Cell, third edition (1994), in particular Chapter 17. The compounds may be, e.g., added to the reaction mixture, culture medium, injected into the cell or sprayed onto the plant.

[0498] If a sample containing a compound is identified in the method of the invention, then it is either possible to isolate the compound from the original sample identified as containing the compound capable of activating or increasing the content of the fine chemical in an organism or part thereof, or one can further subdivide the original sample, for example, if it consists of a plurality of different compounds, so as to reduce the number of different substances per sample and repeat the method with the subdivisions of the original sample. Depending on the complexity of the samples, the steps described above can be performed several times, preferably until the sample identified according to the method of the invention only comprises a limited number of or only one substance(s). Preferably said sample comprises substances of similar chemical and/or physical properties, and most preferably said substances are identical. Preferably, the compound identified according to the above-described method or its derivative is further formulated in a form suitable for the application in plant breeding or plant cell and tissue culture.

[0499] The compounds which can be tested and identified according to a method of the invention may be expression libraries, e.g., cDNA expression libraries, peptides, proteins, nucleic acids, antibodies, small organic compounds, hormones, peptidomimetics, PNAs or the like (Milner, Nature Medicine 1 (1995), 879-880; Hupp, Cell 83 (1995), 237-245; Gibbs, Cell 79 (1994), 193-198 and references cited supra). Said compounds can also be functional derivatives or analogues of known inhibitors or activators. Methods for the preparation of chemical derivatives and analogues are well known to those skilled in the art and are described in, for example, Beilstein, Handbook of Organic Chemistry, Springer edition New York Inc., 175 Fifth Avenue, New York, N.Y. 10010 U.S.A. and Organic Synthesis, Wiley, New York, USA. Furthermore, said derivatives and analogues can be tested for their effects according to methods known in the art. Furthermore, peptidomimetics and/or computer aided design of appropriate derivatives and analogues can be used, for example, according to the methods described above. The cell or tissue that may be employed in the method of the invention preferably is a host cell, plant cell or plant tissue of the invention described in the embodiments hereinbefore.

[0500] Thus, in a further embodiment the invention relates to a compound obtained or identified according to the method for identifying an agonist of the invention said compound being an agonist of the polypeptide of the present invention or used in the process of the present invention.

[0501] Accordingly, in one embodiment, the present invention further relates to a compound identified by the method for identifying a compound of the present invention.

[0502] Said compound is, for example, a homologous of the polypeptide of the present invention. Homologues of the polypeptide of the present invention can be generated by mutagenesis, e.g., discrete point mutation or truncation of the polypeptide of the present invention. As used herein, the term “homologue” refers to a variant form of the protein, which acts as an agonist of the activity of the polypeptide of the present invention. An agonist of said protein can retain substantially the same, or a subset, of the biological activities of the polypeptide of the present invention. In particular, said agonist confers the increase of the expression level of the polypeptide of the present invention and/or the expression of said agonist in an organisms or part thereof confers the increase of free and/or bound the fine chemical in the organism or part thereof.

[0503] In one embodiment, the invention relates to an antibody specifically recognizing the compound or agonist of the present invention.

[0504] In a further embodiment, the present invention relates to a method for the production of a agricultural composition providing the nucleic acid molecule, the vector or the polypeptide of the invention or comprising the steps of the method according to the invention for the identification of said compound, agonist; and formulating the nucleic acid molecule, the vector or the polypeptide of the invention or the agonist, or compound identified according to the methods or processes of the present invention or with use of the subject matters of the present invention in a form applicable as plant agricultural composition.

[0505] In another embodiment, the present invention relates to a method for the production of a “the fine chemical”-production supporting plant culture composition comprising the steps of the method for of the present invention; and formulating the compound identified in a form acceptable as agricultural composition.

[0506] Under “acceptable as agricultural composition” is understood, that such a composition is in agreement with the laws regulating the content of fungicides, plant nutrients, herbizides, etc. Preferably such a composition is without any harm for the protected plants and the animals (humans included) fed therewith.

[0507] The present invention also pertains to several embodiments relating to further uses and methods. The nucleic acid molecule, polypeptide, protein homologues, fusion proteins, primers, vectors, host cells, described herein can be used in one or more of the following methods: identification of plants useful for the fine chemical production as mentioned and related organisms; mapping of genomes; identification and localization of sequences of interest; evolutionary studies; determination of regions required for function; modulation of an activity.

[0508] The nucleic acid molecule of the invention, the vector of the invention or the nucleic acid construct of the invention may also be useful for the production of organisms resistant to inhibitors of the amino acid production biosynthesis pathways. In particular, the overexpression of the polypeptide of the present invention in the cytsol or more preferred in the plastids may protect plants against herbicides, which block the amino acid, in particular the fine chemical, synthesis in said plant. Examples of herbicides blocking the amino acid synthesis in plants are for example sulfonylurea and imidazolinone herbicides, which catalyze the first step in branched-chain amino acid biosynthesis.

[0509] Accordingly, the nucleic acid molecules of the present invention have a variety of uses. First, they may be used to identify an organism or a close relative thereof. Also, they may be used to identify the presence thereof or a relative thereof in a mixed population of microorganisms or plants. By probing the extracted genomic DNA of a culture of a unique or mixed population of plants under stringent conditions with a probe spanning a region of the gene of the present invention which is unique to this, one can ascertain whether the present invention has been used or whether it or a close relative is present.

[0510] Further, the nucleic acid molecule of the invention may be sufficiently homologous to the sequences of related species such that these nucleic acid molecules may serve as markers for the construction of a genomic map in related organism.

[0511] Accordingly, the present invention relates to a method for breeding plants for the production of the fine chemical, comprising
[0512] (a) providing a first plant variety produced according to the process of the invention preferably (over)expressing the nucleic acid molecule of the invention;
[0513] (b) crossing the first plant variety with a second plant variety; and
[0514] (c) selecting the offspring plants which overproduce the fine chemical by means of analysis the distribution of a molecular marker in the offspring representing the first plant variety and its capability to (over)produce the fine chemical.

[0515] Details about the use of molecular markers in breeding can be found in Kumar et al., 1999 (Biotech Adv., 17:143-182) and Peleman and van der Voort 2003 (Trends Plant Sci. 2003 July; 8(7):330-334)

[0516] The molecular marker can e.g. relate to the nucleic acid molecule of the invention and/or its expression level. Accordingly, the molecular marker can be a probe or a PCR primer set useful for identification of the genomic existence or genomic localisation of the nucleic acid molecule of the invention, e.g. in a Southern blot analysis or a PCR or its expression level, i.g. in a Northern Blot analysis or a quantitative PCR. Accordingly, in one embodiment, the present invention relates to the use of the nucleic acid molecule of the present invention or encoding the polypeptide of the present invention as molecular marker for breeding.

[0517] The nucleic acid molecules of the invention are also useful for evolutionary and protein structural studies. By comparing the sequences of the invention or used in the process of the invention to those encoding similar enzymes from other organisms, the evolutionary relatedness of the organisms can be assessed. Similarly, such a comparison permits an assessment of which regions of the sequence are conserved and which are not, which may aid in determining those regions of the protein which are essential for the functioning of the enzyme. This type of determination is of value for protein engineering studies and may give an indication of what the protein can tolerate in terms of mutagenesis without losing function.

[0518] Accordingly, the nucleic acid molecule of the invention can be used for the identification of other nucleic acids conferring an increase of the fine chemical after expression.

[0519] Further, the nucleic acid molecule of the invention or a fragment of a gene conferring the expression of the polypeptide of the invention, preferably comprising the nucleic acid molecule of the invention, can be used for marker assisted breeding or association mapping of the fine chemical derived traits.

[0520] Accordingly, the nucleic acid of the invention, the polypeptide of the invention, the nucleic acid construct of the invention, the organisms, the host cell, the microorganisms, the plant, plant tissue, plant cell, or the part thereof the invention, the vector of the invention, the agonist identified with the method of the invention, the nucleic acid molecule identified with the method of the present invention, can be used for the production of the fine chemical or of the fine chemical and one or more other amino acids, in particular Threonine, Alanine, Glutamin, Glutamic acid, Valine, Aspargine, Phenylalanine, Leucine, Proline, Tryptophan Tyrosine, Valine, Isoleucine and Arginine.

Accordingly, the nucleic acid of the invention, or the nucleic acid molecule identified with the method of the present invention or the complement sequences thereof, the polypeptide of the invention, the nucleic acid construct of the invention, the organisms, the host cell, the microorganisms, the plant, plant tissue, plant cell, or the part thereof of the invention, the vector of the invention, the agonist identified with the method of the invention, the antibody of the present invention, can be used for the reduction of the fine chemical in a organism or part thereof, e.g. in a cell.

[0521] Further, the nucleic acid of the invention, the polypeptide of the invention, the nucleic acid construct of the invention, the organisms, the host cell, the microorganisms, the plant, plant tissue, plant cell, or the part thereof the invention, the vector of the invention, the agonist identified with the method of the invention, the antibody of the present invention or the nucleic acid molecule identified with the method of the present invention, can be used for the preparation of an agricultural composition.

[0522] Furthermore, the nucleic acid of the invention, the polypeptide of the invention, the nucleic acid construct of the invention, the organisms, the host cell, the microorganisms, the plant, plant tissue, plant cell, or the part thereof the invention, the vector of the invention or the agonist identified with the method of the invention, the antibody of the present invention or the nucleic acid molecule identified with the method of the present invention, can be used for the identification and production of compounds capable of conferring a modulation of the fine chemical levels in an organism or parts thereof, preferably to identify and produce compounds conferring an increase of the fine chemical levels in an organism or parts thereof, if said identified compound is applied to the organism or part thereof, i.e. as part of its food, or in the growing or culture media.

[0523] These and other embodiments are disclosed and encompassed by the description and examples of the present invention. Further literature concerning any one of the methods, uses and compounds to be employed in accordance with the present invention may be retrieved from public libraries, using for example electronic devices. For example the public database “Medline” may be utilized which is available on the Internet, for example under hftp://www.ncbi.nlm.nih.gov/PubMed/medline.html. Further databases and addresses, such as hftp://www.ncbi.nlm.nih.gov/, hftp://www.infobiogen.fr/, hftp://www.fmi.ch/biology/research-tools.html, hftp://www.tigr.org/, are known to the person skilled in the art and can also be obtained using, e.g., hftp://www.lycos.com. An overview of patent information in biotechnology and a survey of relevant sources of patent information useful for retrospective searching and for current awareness is given in Berks, TIBTECH 12 (1994), 352-364.

[0524] Table 1 gives an overview about the sequences disclosed in the present invention.
[0525] 1) Increase of the metabolites:
   [0526] Max: maximal x-fold (normalised to wild type)−

[0527] Min: minimal x-fold (normalised to wild type)
[0528] 2) Decrease of the metabolites:
   [0529] Max: maximal x-fold (normalised to wild type) (minimal decrease)
   [0530] Min: minimal x-fold (normalised to wild type) (maximal decrease)

[0531] The present invention is illustrated by the examples, which follow. The present examples illustrate the basic invention without being intended as limiting the subject of the invention. The content of all of the references, patent applications, patents and published patent applications cited in the present patent application is herewith incorporated by reference.

### EXAMPLES

### Example 1

### Cloning of the Inventive Sequences as Shown in Table I, Column 5 and 7 in Escherichia coli

[0532] The inventive sequences as shown in table I, column 5 and 7 were cloned into the plasmids pBR322 (Sutcliffe, J. G. (1979) Proc. Natl Acad. Sci. USA, 75: 3737-3741); pACYC177 (Change & Cohen (1978) J. Bacteriol. 134: 1141-1156); plasmids of the pBS series (pBSSK+, pBSSK− and others; Stratagene, LaJolla, USA) or cosmids such as SuperCosi (Stratagene, LaJolla, USA) or Lorist6 (Gibson, T. J. Rosenthal, A., and Waterson, R. H. (1987) Gene 53: 283-286) for expression in E. coli using known, well-established procedures (see, for example, Sambrook, J. et al. (1989) “Molecular Cloning: A Laboratory Manual”. Cold Spring Harbor Laboratory Press or Ausubel, F. M. et al. (1994) “Current Protocols in Molecular Biology”, John Wiley & Sons).

### Example 2

### DNA Sequencing and Computerized Functional Analysis

[0533] The DNA was sequenced by standard procedures, in particular the chain determination method, using ABI377 sequencers (see, for example, Fleischman, R. D. et al. (1995) “Whole-genome Random Sequencing and Assembly of Haemophilus Influenzae Rd., Science 269; 496-512)”.

### Example 3

### In-Vivo and In-Vitro Mutagenesis

[0534] An in vivo mutagenesis of organisms such as Saccharomyces, Mortierella, Escherichia and others mentioned above, which are beneficial for the production of fatty acids can be carried out by passing a plasmid DNA (or another vector DNA) containing the desired nucleic acid sequence or nucleic acid sequences through E. coli and other microorganisms (for example Bacillus spp. or yeasts such as Saccharomyces cerevisiae) which are not capable of maintaining the integrity of its genetic information. Usual mutator strains have mutations in the genes for the DNA repair system [for example mutHLS, mutD, mutT and the like; for comparison, see Rupp, W. D. (1996) DNA repair mechanisms in Escherichia coli and Salmonella, pp. 2277-2294, ASM: Washington]. The skilled worker knows these strains. The use of these strains is illustrated for example in Greener, A. and Callahan, M. (1994) Strategies 7; 32-34. In-vitro mutation methods such as increasing the spontaneous mutation rates by chemical or physical treatment are well known to the skilled person. Mutagens like 5-bromo-uracil, N-methyl-N-nitro-N-nitrosoguanidine (=NTG), ethyl methanesulfonate (=EMS), hydroxylamine and/or nitrous acid are widely used as chemical agents for random in-vitro mutagenesis. The most common physical method for mutagenesis is the treatment with UV irradiation. Another random mutagenesis technique is the error-prone PCR for introducing amino acid changes into proteins. Mutations are deliberately introduced during PCR through the use of error-prone DNA polymerases and special reaction conditions known to a person skilled in the art. For this method randomized DNA sequences are cloned into expression vectors and the resulting mutant libraries screened for altered or improved protein activity as described below.

Site-directed mutagenesis method such as the introduction of desired mutations with an M13 or phagemid vector and short oligonucleotides primers is a well-known approach for site-directed mutagenesis. The clou of this method involves cloning of the nucleic acid sequence of the invention into an M13 or phagemid vector, which permits recovery of single-stranded recombinant nucleic acid sequence. A mutagenic oligonucleotide primer is then designed whose sequence is perfectly complementary to nucleic acid sequence in the region to be mutated, but with a single difference: at the intended mutation site it bears a base that is complementary to the desired mutant nucleotide rather than the original. The mutagenic oligonucleotide is then allowed to prime new DNA synthesis to create a complementary full-length sequence containing the desired mutation. Another site-directed mutagenesis method is the PCR mismatch primer mutagenesis method also known to the skilled person. DpnI site-directed mutagenesis is a further known method as described for example in the Stratagene Quickchange™ site-directed mutagenesis kit protocol. A huge number of other methods are also known and used in common practice.
Positive mutation events can be selected by screening the organisms for the production of the desired fine chemical.

### Example 4

### DNA Transfer Between Escherichia coli, Saccharomyces Cerevisiae and Mortierella alpina

[0535] Shuttle vectors such as pYE22m, pPAC-ResQ, pClasper, pAUR224, pAMH10, pAML10, pAMT10, pAMU10, pGMH10, pGML10, pGMT10, pGMU10, pPGAL1, pPADH1, pTADH1, pTAex3, pNGA142, pHT3101 and derivatives thereof which allow the transfer of nucleic acid sequences between Escherichia coli, Saccharomyces cerevisiae and/or Mortierella alpina are available to the skilled worker. An easy method to isolate such shuttle vectors is disclosed by Soni R. and Murray J.A.H. [Nucleic Acid Research, vol. 20 no. 21, 1992: 5852]: If necessary such shuttle vectors can be constructed easily using standard vectors for E. coli (Sambrook, J. et al., (1989), “Molecular Cloning: A Laboratory Manual”, Cold Spring Harbor Laboratory Press or Ausubel, F. M. et al. (1994) “Current Protocols in Molecular Biology”, John Wiley & Sons) and/or the aforementioned vectors, which have a replication origin for, and suitable marker from, Escherichia coli, Saccharomyces cerevisiae or Mortierella alpina added. Such replication origins are preferably taken from endogenous plasmids, which have been isolated from species used in the inventive process. Genes, which are used in particular as transformation markers for these species are genes for kanamycin resistance (such as those which originate from the Tn5 or Tn-903 transposon) or for chloramphenicol resistance (Winnacker, E. L. (1987) “From Genes to Clones—Introduction to Gene Technology, VCH, Weinheim) or for other antibiotic resistance genes such as for G418, gentamycin, neomycin, hygromycin or tetracycline resistance.

[0536] Using standard methods, it is possible to clone a gene of interest into one of the above-described shuttle vectors and to introduce such hybrid vectors into the microorganism strains used in the inventive process. The transformation of Saccharomyces can be achieved for example by LiCl or sheroplast transformation (Bishop et al., Mol. Cell. Biol., 6, 1986: 3401-3409; Sherman et al., Methods in Yeasts in Genetics, [Cold Spring Harbor Lab. Cold Spring Harbor, N. Y.] 1982, Agatep et al., Technical Tips Online 1998, 1:51: P01525 or Gietz et al., Methods Mol. Cell. Biol. 5, 1995: 255-269) or electroporation (Delorme E., Appl. Environ. Microbiol., vol. 55, no. 9, 1989: 2242-2246).

[0537] If the transformed sequence(s) is/are to be integrated advantageously into the genome of the microorganism used in the inventive process for example into the yeast or fungi genome, standard techniques known to the skilled worker also exist for this purpose. Solinger et al. (Proc Natl Acad Sci USA., 2001 (15): 8447-8453) and Freedman et al. (Genetics, Vol. 162, 15-27, September 2002,) teaches a homolog recombination system dependent on rad 50, rad51, rad54 and rad59 in yeasts. Vectors using this system for homologous recombination are vectors derived from the YIp series. Plasmid vectors derived for example from the 2μ-Vector are known by the skilled worker and used for the expression in yeasts. Other preferred vectors are for example pART1, pCHY21 or pEVP11 as they have been described by McLeod et al. (EMBO J. 1987, 6:729-736) and Hoffman et al. (Genes Dev. 5, 1991: 561-571.) or Russell et al. (J. Biol. Chem. 258, 1983: 143-149.). Other beneficial yeast vectors are plasmids of the REP, REP-X, pYZ or RIP series.

### Example 5

### Determining the Expression of the Mutant/Transgenic Protein

[0538] The observations of the activity of a mutated, or transgenic, protein in a transformed host cell are based on the fact that the protein is expressed in a similar manner and in a similar quantity as the wild-type protein. A suitable method for determining the transcription quantity of the mutant, or transgenic, gene (a sign for the amount of mRNA which is available for the translation of the gene product) is to carry out a Northern blot (see, for example, Ausubel et al., (1988) Current Protocols in Molecular Biology, Wiley: New York), where a primer which is designed in such a way that it binds to the gene of interest is provided with a detectable marker (usually a radioactive or chemiluminescent marker) so that, when the total RNA of a culture of the organism is extracted, separated on a gel, applied to a stable matrix and incubated with this probe, the binding and quantity of the binding of the probe indicates the presence and also the amount of mRNA for this gene. Another method is a quantitative PCR. This information detects the extent to which the gene has been transcribed. Total cell RNA can be isolated for example from yeasts or E. coli by a variety of methods, which are known in the art, for example with the Ambion kit according to the instructions of the manufacturer or as described in Edgington et al., Promega Notes Magazine Number 41, 1993, p. 14.

[0539] Standard techniques, such as Western blot, may be employed to determine the presence or relative amount of protein translated from this mRNA (see, for example, Ausubel et al. (1988) “Current Protocols in Molecular Biology”, Wiley, New York). In this method, total cell proteins are extracted, separated by gel electrophoresis, transferred to a matrix such as nitrocellulose and incubated with a probe, such as an antibody, which binds specifically to the desired protein. This probe is usually provided directly or indirectly with a chemiluminescent or colorimetric marker, which can be detected readily. The presence and the observed amount of marker indicate the presence and the amount of the sought mutant protein in the cell. However, other methods are also known.

### Example 6

### Growth of Genetically Modified Organism: Media and Culture Conditions

[0540] Genetically modified Yeast, Mortierella or Escherichia coli are grown in synthetic or natural growth media known by the skilled worker. A number of different growth media for Yeast, Mortierella or Escherichia coli are well known and widely available. A method for culturing Mortierella is disclosed by Jang et al. [Bot. Bull. Acad. Sin. (2000) 41: 41-48]. Mortierella can be grown at 20° C. in a culture medium containing: 10 g/l glucose, 5 g/l yeast extract at pH 6.5. Furthermore Jang et al. teaches a submerged basal medium containing 20 g/l soluble starch, 5 g/l Bacto yeast extract, 10 g/l KNO₃, 1 g/l KH₂PO₄, and 0.5 g/l MgSO₄.7H₂O, pH 6.5.

[0541] Said media, which can be used according to the invention usually consist of one or more carbon sources, nitrogen sources, inorganic salts, vitamins and trace elements. Preferred carbon sources are sugars such as mono-, di- or polysaccharides. Examples of very good carbon sources are glucose, fructose, mannose, galactose, ribose, sorbose, ribulose, lactose, maltose, sucrose, raffinose, starch or cellulose. Sugars may also be added to the media via complex compounds such as molasses or other by-products of sugar refining. It may also be advantageous to add mixtures of various carbon sources. Other possible carbon sources are alcohols and/or organic acids such as methanol, ethanol, acetic acid or lactic acid. Nitrogen sources are usually organic or inorganic nitrogen compounds or materials containing said compounds. Examples of nitrogen sources include ammonia gas, aqueous ammonia solutions or ammonium salts such as NH₄Cl, or (NH₄)₂SO₄, NH₄OH, nitrates, urea, amino acids or complex nitrogen sources such as cornsteep liquor, soybean flour, soybean protein, yeast extract, meat extract and others. Mixtures of the above nitrogen sources may be used advantageously.

[0542] Inorganic salt compounds, which may be included in the media comprise the chloride, phosphorus or sulfate salts of calcium, magnesium, sodium, cobalt, molybdenum, potassium, manganese, zinc, copper and iron. Chelating agents may be added to the medium in order to keep the metal ions in solution. Particularly suitable chelating agents include dihydroxyphenols such as catechol or protocatechulate or organic acids such as citric acid. The media usually also contain other growth factors such as vitamins or growth promoters, which include, for example, biotin, riboflavin, thiamine, folic acid, nicotinic acid, panthothenate and pyridoxine. Growth factors and salts are frequently derived from complex media components such as yeast extract, molasses, cornsteep liquor and the like. The exact composition of the compounds used in the media depends heavily on the particular experiment and is decided upon individually for each specific case. Information on the optimization of media can be found in the textbook “Applied Microbiol. Physiology, A Practical Approach” (Ed. P.M. Rhodes, P.F. Stanbury, IRL Press (1997) S. 53-73, ISBN 0 19 963577 3). Growth media can also be obtained from commercial suppliers, for example Standard 1 (Merck) or BHI (Brain heart infusion, DIFCO) and the like.

[0543] All media components are sterilized, either by heat (20 min at 1.5 bar and 121° C.) or by filter sterilization. The components may be sterilized either together or, if required, separately. All media components may be present at the start of the cultivation or added continuously or batchwise, as desired.

[0544] The culture conditions are defined separately for each experiment. The temperature is normally between 15° C. and 45° C. and may be kept constant or may be altered during the experiment. The pH of the medium should be in the range from 5 to 8.5, preferably around 7.0, and can be maintained by adding buffers to the media. An example of a buffer for this purpose is a potassium phosphate buffer. Synthetic buffers such as MOPS, HEPES, ACES and the like may be used as an alternative or simultaneously. The culture pH value may also be kept constant during the culture period by addition of, for example, NaOH or NH₄OH. If complex media components such as yeast extract are used, additional buffers are required less since many complex compounds have a high buffer capacity. When using a fermenter for the culture of microorganisms, the pH value can also be regulated using gaseous ammonia.

[0545] The incubation period is generally in a range of from several hours to several days. This time period is selected in such a way that the maximum amount of product accumulates in the fermentation broth. The growth experiments, which are disclosed can be carried out in a multiplicity of containers such as microtiter plates, glass tubes, glass flasks or glass or metal fermenters of various sizes. To screen a large number of clones, the microorganisms should be grown in microtiter plates, glass tubes or shake flasks, either using simple flasks or baffle flasks. 100 ml shake flasks filled with 10% (based on the volume) of the growth medium required are preferably used. The flasks should be shaken on an orbital shaker (amplitude 25 mm) at a rate ranging from 100 to 300 rpm. Evaporation losses can be reduced by maintaining a humid atmosphere; as an alternative, a mathematical correction should be carried out for the evaporation losses.

[0546] If genetically modified clones are examined, an unmodified control clone, or a control clone, which contains the basic plasmid without insertion, should also be included in the tests. If a transgenic sequence is expressed, a control clone should advantageously again be included in these tests. The medium is advantageously inoculated to an OD600 of 0.5 to 1.5 using cells which have been grown on agar plates, such as CM plates (10 g/l glucose, 2.5 g/l NaCl, 2 g/l urea, 10 g/l polypeptone, 5 g/l yeast extract, 5 g/l meat extract, 22 g/l agar, pH value 6.8 established with 2M NaOH), which have been incubated at 30° C. The media are inoculated for example by addition of a liquid preculture of seed organism such as E. coli or S. cerevisiae.

### Example 7

### Growth of Genetically Modified Algae: Media and Culture Conditions

[0547] Growing Chlamydomonas Chlamydomonas reinhardtii is able to grow under various growth conditions. It is a unicellular algae. The cells of Chlamydomonas reinhardtii can be normally cultured autotrophically in the media mentioned below. Cells of Chlamydomonas reinhardtii can be cultivated at 25° C. under cool-white fluorescence light at 10,000 lux (120 μE m⁻² s⁻¹ photosynthetically active radiation) as described by Ghirardi et al., Appl. Biochem. Biotechnol. 63, 1997: 141-151 or Semin et al., Plant. Physiol., Vol. 131, 2003: 1756-1764.

### Chlamydomonas Growth Medium:

[0548] 1 l growth medium is prepared by adding the following volumes of the stock solutions as mentioned below:

| | |
|---|---|
| 1 ml solution A | |
| 5 ml solution B | |
| 1 ml solution C | |
| 1 ml solution D | |
| 3 ml solution E | |
| 3 ml solution F | |
| 1 ml solution G | |
| 1 ml solution H | |
| A) Trace elements solution: | 1 g/l H₃BO₃ |
| | 1 g/l ZnSO₄ × 7 H₂O |
| | 0.3 g/l MnSO₄ × H₂O |
| | 0.2 g/l CoCl₂ × 6 H₂O |
| | 0.2 g/l Na₂MoO₄ × 2 H₂O |
| | 0.04 g/l CuSO₄ |
| B) Na Citrate solution: | 10% w/v Na citrate × 2 H₂O |
| C) Iron solution: | 1% w/v FeCl₃ × 6 H₂O |
| D) Calcium solution: | 5.3% w/v CaCl₂ × H₂O |
| E) Magnesium solution: | 10% w/v MgSO₄ × 7 H₂O |
| F) Ammonium solution: | 10% w/v NH₄NO₃ |
| G) Potassium solution: | 10% w/v KH₂PO₄ |
| H) Dipotassium solution | 10% w/v K₂HPO₄ |

### Bristol's Soil Extract Medium:

[0549] Soil extract medium can generally be used for the growth of axenic and xenic algae cultures. The soil extract is prepared by adding a teaspoon of dry garden soil and a pinch of CaCO₃ to 200 ml distilled water and steaming said solution for approximately 2 h on two consecutive days. Afterwards the supernatant is decanted and added to the desired medium.

[0550] To 940 ml bristol's solution 40 ml of soil extract medium is added.

### Bristol's Solution:

[0551] To 940 ml of distilled water, the following stock solutions are added:

| | | |
|---|---|---|
| 10 ml | NaNO₃ | (25 g/l) |
| 10 ml | CaCl₂x2H₂O | (2.5 g/l) |
| 10 ml | MgSO₄x7H₂O | (7.5 g/l) |
| 10 ml | K₂HPO₄ | (7.5 g/l) |
| 10 ml | KH₂PO₄ | (17.5 g/l) |
| 10 ml | NaCl | (2.5 g/l) |

[0552] Amplification and Cloning of DNA from Chlamydomonas reinhardtii

[0553] The DNA can be amplified by the polymerase chain reaction (PCR) from Chlamydomonas reinhardtii by the method of Crispin A. Howitt (Howitt C A (1996) BioTechniques 21:32-34).

[0554] Methionine Production in Chlamydomonas reinhardtii

[0555] The amino acid production can be analysed as mentioned above. The proteins and nucleic acids can be analysed as mentioned below.

### Example 8

### In-Vitro Analysis of the Function of the Proteins Encoded by the Transformed Sequences

[0556] The determination of the activities and kinetic parameters of enzymes is well known in the art. Experiments for determining the activity of a specific modified enzyme must be adapted to the specific activity of the wild-enzyme type, which is well within the capabilities of the skilled worker. Overviews of enzymes in general and specific details regarding the structure, kinetics, principles, methods, applications and examples for the determination of many enzyme activities can be found for example in the following literature: Dixon, M., and Webb, E.C: (1979) Enzymes, Longmans, London; Fersht (1985) Enzyme Structure and Mechanism, Freeman, New York; Walsh (1979) Enzymatic Reaction Mechanisms. Freeman, San Francisco; Price, N.C., Stevens, L. (1982) Fundamentals of Enzymology. Oxford Univ. Press: Oxford; Boyer, P.D: Ed. (1983) The Enzymes, 3rd Ed. Academic Press, New York; Bisswanger, H. (1994) Enzymkinetik, 2nd Ed. VCH, Weinheim (ISBN 3527300325); Bergmeyer, H.U., Bergmeyer, J., Graβl, M. Ed. (1983-1986) Methods of Enzymatic Analysis, 3rd Ed. Vol. I-XII, Verlag Chemie: Weinheim; and Ullmann's Encyclopedia of Industrial Chemistry (1987) Vol. A9, “Enzymes”, VCH, Weinheim, pp. 352-363.

### Example 9

### Analysis of the Effect of the Nucleic Acid Molecule on the Production of the Amino Acids

[0557] The effect of the genetic modification in plants, fungi, algae, ciliates on the production of an amino acid can be determined by growing the modified microorganisms for example Chlamydomonas reinhardtii under suitable conditions (such as those described above) and analyzing the medium and/or the cellular components for the increased production of the amino acid. Such analytical techniques are well known to the skilled worker and encompass spectroscopy, thin-layer chromatography, various types of staining methods, enzymatic and microbiological methods and analytical chromatography such as high-performance liquid chromatography (see, for example, Ullman, Encyclopedia of Industrial Chemistry, Vol. A2, pp. 89-90 and pp. 443-613, VCH: Weinheim (1985); Fallon, A., et al., (1987) “Applications of HPLC in Biochemistry” in: Laboratory Techniques in Biochemistry and Molecular Biology, Vol. 17; Rehm et al. (1993) Biotechnology, Vol. 3, Chapter III: “Product recovery and purification”, pp. 469-714, VCH: Weinheim; Belter, P.A. et al. (1988) Bioseparations: downstream processing for Biotechnology, John Wiley and Sons; Kennedy, J. F. and Cabral, J. M. S. (1992) Recovery processes for biological Materials, John Wiley and Sons; Shaeiwitz, J.A. and Henry, J. D. (1988) Biochemical Separations, in Ullmann's Encyclopedia of Industrial Chemistry, Vol. B3; chapter 11, pp. 1-27, VCH: Weinheim; and Dechow, F. J. (1989) Separation and purification techniques in biotechnology, Noyes Publications).

[0558] In addition to the determination of the fermentation end product, other components of the metabolic pathways which are used for the production of the desired compound, such as intermediates and by-products, may also be analyzed in order to determine the total productivity of the organism, the yield and/or production efficiency of the compound. The analytical methods encompass determining the amounts of nutrients in the medium (for example sugars, hydrocarbons, nitrogen sources, phosphate and other ions), determining biomass composition and growth, analyzing the production of ordinary metabolites from biosynthetic pathways and measuring gases generated during the fermentation. Standard methods for these are described in Applied Microbial Physiology; A Practical Approach, P.M. Rhodes and P.F. Stanbury, Ed. IRL Press, pp. 103-129; 131-163 and 165-192 (ISBN: 0199635773) and the references cited therein.

### Example 10

### Purification of the Amino Acid

[0559] The amino acid can be recovered from cells or from the supernatant of the above-described culture by a variety of methods known in the art. For example, the culture supernatant is recovered first. To this end, the cells are harvested from the culture by slow centrifugation. Cells can generally be disrupted or lysed by standard techniques such as mechanical force or sonication. The cell debris is removed by centrifugation and the supernatant fraction, if appropriate together with the culture supernatant, is used for the further purification of the amino acid. However, it is also possible to process the supernatant alone if the amino acid is present in the supernatant in sufficiently high a concentration. In this case, the amino acid, or the amino acid mixture, can be purified further for example via extraction and/or salt precipitation or via ion-exchange chromatography.

[0560] If required and desired, further chromatography steps with a suitable resin may follow, the amino acid, but not many contaminants in the sample, being retained on the chromatography resin or the contaminants, but not the sample with the product (amino acid), being retained on the resin. If necessary, these chromatography steps may be repeated, using identical or other chromatography resins. The skilled worker is familiar with the selection of suitable chromatography resin and the most effective use for a particular molecule to be purified. The purified product can be concentrated by filtration or ultrafiltration and stored at a temperature at which maximum product stability is ensured. Many purification methods, which are not limited to the above purification method are known in the art. They are described, for example, in Bailey, J.E. & Ollis, D. F. Biochemical Engineering Fundamentals, McGraw-Hill: New York (1986).

[0561] Identity and purity of the amino acid isolated can be determined by standard techniques of the art. They encompass high-performance liquid chromatography (HPLC), spectroscopic methods, mass spectrometry (MS), staining methods, thin-layer chromatography, NIRS, enzyme assay or microbiological assays. These analytical methods are compiled in: Patek et al. (1994) Appl. Environ. Microbiol. 60: 133-140; Malakhova et al. (1996) Biotekhnologiya 11: 27-32; and Schmidt et al. (1998) Bioprocess Engineer. 19: 67-70. Ulmann's Encyclopedia of Industrial Chemistry (1996) Vol. A27, VCH: Weinheim, pp. 89-90, pp. 521-540, pp. 540-547, pp. 559-566, 575-581 and pp. 581-587; Michal, G (1999) Biochemical Pathways: An Atlas of Biochemistry and Molecular Biology, John Wiley and Sons; Fallon, A. et al. (1987) Applications of HPLC in Biochemistry in: Laboratory Techniques in Biochemistry and Molecular Biology, Vol. 17.

### Example 11

### Cloning of the Inventive Sequences as Shown in Table I, Column 5 and 7 for the Expression in Plants

[0562] Unless otherwise specified, standard methods as described in Sambrook et al., Molecular Cloning: A laboratory manual, Cold Spring Harbor 1989, Cold Spring Harbor Laboratory Press are used.

[0563] The inventive sequences as shown in table I, column 5 and 7 were amplified by PCR as described in the protocol of the Pfu Turbo or Herculase DNA polymerase (Stratagene).

[0564] The composition for the protocol of the Pfu Turbo or Herculase DNA polymerase was as follows: 1×PCR buffer (Stratagene), 0.2 mM of each dNTP, 100 ng genomic DNA of Saccharomyces cerevisiae (strain S288C; Research Genetics, Inc., now Invitrogen) or Escherichia coli (strain MG1655; E. coli Genetic Stock Center), 50 pmol forward primer, 50 pmol reverse primer, 2.5 u Pfu Turbo or Herculase DNA polymerase. The amplification cycles were as follows:

[0565] 1 cycle of 3 minutes at 94-95° C., followed by 25-36 cycles of in each case 1 minute at 95° C. or 30 seconds at 94° C., 45 seconds at 50° C., 30 seconds at 50° C. or 30 seconds at 55° C. and 210-480 seconds at 72° C., followed by 1 cycle of 8 minutes at 72° C., then 4° C.

[0566] 1 cycle of 2-3 minutes at 94° C., followed by 25-30 cycles of in each case 30 seconds at 94° C., 30 seconds at 55-60° C. and 5-10 minutes at 72° C., followed by 1 cycle of 10 minutes at 72° C., then 4° C.

[0567] The following adapter sequences were added to Saccharomyces cerevisiae ORF specific primers (see table IV) for cloning purposes:

SEQ ID NO: 14615

| | |
|---|---|
| i) | primer: 5′-GGAATTCCAGCTGACCACC-3′ |

SEQ ID NO: 14616

| | |
|---|---|
| ii) | reverse primer: 5′-GATCCCCGGGAATTGCCATG-3′ |

The following adapter sequences were added to Escherichia coli ORF specific primers for cloning purposes:

| | |
|---|---|
| iii) | |
| forward primer: 5′-TTGCTCTTCC-3′ | SEQ ID NO: 14609 |
| iiii) | |
| reverse primer: 5′-TTGCTCTTCG-3′: | SEQ ID NO: 14610 |

Therefore for amplification and cloning of Saccharomyces cerevisiae SEQ ID NO: 1, a primer consisting of the adaptor sequence i) and the ORF specific sequence SEQ ID NO: 159 and a second primer consisting of the adaptor sequence ii) and the ORF specific sequence SEQ ID NO: 160 were used.
Following this example every sequence disclosed in table I, column 5 can be cloned by fusing the adaptor sequences to the respective specific primers sequences as disclosed in table III, column 7.

[0568] Construction of Binary Vectors for Targeting of Expressed Proteins to the Plastids.

[0569] The binary vectors used for cloning the targeting sequence were 1bxSuperResgen SEQ ID NO: 14586 (FIG. 4), and 1bxSupercoli SEQ ID NO: 14585 (FIG. 3). Other useful binary vectors are known to the skilled worker; an overview of binary vectors and their use can be found in Hellens, R., Mullineaux, P. and Klee H., [(2000) “A guide to Agrobacterium binary vectors”, Trends in Plant Science, Vol. 5 No. 10, 446-451. Such vectors have to be equally equipped with appropriate promoters and targeting sequences.

[0570] Amplification of the Targeting Sequence of the Gene FNR from Spinacia oleracea

[0571] In order to amplify the targeting sequence of the FNR gene from S. oleracea, genomic DNA was extracted from leaves of 4 weeks old S. oleracea plants (DNeasy Plant Mini Kit, Qiagen, Hilden). The gDNA was used as the template for a PCR.

[0572] To enable cloning of the transit sequence into the vector 1bxSuperResgen an EcoRI restriction enzyme recognition sequence was added to both the forward and reverse primers, whereas for cloning in the vectors 1 bxSupercoli a PmeI restriction enzyme recognition sequence was added to the forward primer and a NcoI site was added to the reverse primer.

FNR5EcoResgen

SEQ ID NO: 14613

ATA GAA TTC GCA TAA ACT TAT CTT CAT AGT TGC C
FNR3EcoResgen

SEQ ID NO: 14611

ATA GAA TTC AGA GGC GAT CTG GGC CCT
FNR5PmeColic

SEQ ID NO: 14614

ATA GTT TAA ACG CAT AAA CTT ATC TTC ATA GTT GCC
FNR3NcoColic

SEQ ID NO: 14612

ATA CCA TGG AAG AGC AAG AGG CGA TCT GGG CCC T

The sequence amplified from spinach SEQ ID NO: 14589 comprised a 5′UTR (bp1-167), and the coding region (bp 168-275 and 353-419). The coding sequence is interrupted by an intronic sequence from bp 276 to-bp 352.

(see SEQ ID NO: 14589)

Gcataaacttatcttcatagttgccactccaatttgctccttgaatctcc
tccacccaatacataatccactcctccatcacccacttcactactaaatc
aaacttaactctgtttttctctctcctcctttcatttcttattcttccaa
tcatcgtactccgccatgaccaccgctgtcaccgccgctgtttctttccc
ctctaccaaaaccacctctctctccgcccgaagctcctccgtcatttccc
ctgacaaaatcagctacaaaaaggtgattcccaatttcactgtgtttttt
attaataatttgttattttgatgatgagatgattaatttgggtgctgcag
gttcctttgtactacaggaatgtatctgcaactgggaaaatgggacccat
cagggcccagatcgcctct

The PCR fragment derived with the primers FNR5EcoResgen and FNR3EcoResgen was digested with EcoRI and ligated in the vector 1bxSuperResgen SeqIDxx that had also been digested with EcoRI. The correct orientation of the FNR targeting sequence was tested by sequencing. The vector generated in this ligation step was 1bxSuperTPFNRResgen.
The PCR fragment derived with the primers FNR5Pmecoli and FNR3Ncocoli was digested with PmeI and NcoI and ligated in the vector 1bxSupercolic (FIG. 3) SEQ ID NO: 14585 that had also been digested with PmeI and NcoI. The vector generated in this ligation step was 1bxSuperTPFNRcoli.

[0573] For cloning the ORF of SEQ ID NO: 1, from S. cerevisiae the vector DNA was treated with the restriction enzyme NcoI. For cloning of ORFs from E. coli the vector DNA was treated with the restriction enzymes PacI and NcoI following the standard protocol (MBI Fermentas). The reaction was stopped by inactivation at 70° C. for 20 minutes and purified over QIAquick columns following the standard protocol (Qiagen).

Then the PCR-product representing the amplified ORF and the vector DNA was treated with T4 DNA polymerase according to the standard protocol (MBI Fermentas) to produce single stranded overhangs with the parameters 1 unit T4 DNA polymerase at 37° C. for 2-10 minutes for the vector and 1 u T4 DNA polymerase at 15° C. for 10-60 minutes for the PCR product representing SEQ ID NO: 1.
The reaction was stopped by addition of high-salt buffer and purified over QIAquick columns following the standard protocol (Qiagen).
According to this example the skilled person is able to clone all sequences disclosed in table I, column 5.

[0574] Approximately 30 ng of prepared vector and a defined amount of prepared amplificate were mixed and hybridized at 65° C. for 15 minutes followed by 37° C. 0.1° C./1 seconds, followed by 37° C. 10 minutes, followed by 0.1° C./1 seconds, then 4° C.

[0575] The ligated constructs were transformed in the same reaction vessel by addition of competent E. coli cells (strain DHSalpha) and incubation for 20 minutes at 1° C. followed by a heat shock for 90 seconds at 42° C. and cooling to 4° C. Then, complete medium (SOC) was added and the mixture was incubated for 45 minutes at 37° C. The entire mixture was subsequently plated onto an agar plate with 0.05 mg/ml kanamycine and incubated overnight at 37° C.

[0576] The outcome of the cloning step was verified by amplification with the aid of primers which bind upstream and downstream of the integration site, thus allowing the amplification of the insertion. The amplifications were carried as described in the protocol of Taq DNA polymerase (Gibco-BRL).

[0577] The amplification cycles were as follows: 1 cycle of 5 minutes at 94° C., followed by 35 cycles of in each case 15 seconds at 94° C., 15 seconds at 50-66° C. and 5 minutes at 72° C., followed by 1 cycle of 10 minutes at 72° C., then 4° C.

[0578] Several colonies were checked, but only one colony for which a PCR product of the expected size was detected was used in the following steps.

[0579] A portion of this positive colony was transferred into a reaction vessel filled with complete medium (LB) supplemented with kanamycin( ) and incubated overnight at 37° C.

[0580] The plasmid preparation was carried out as specified in the Qiaprep standard protocol (Qiagen).

### Example 12

### Generation of Transgenic Plants which Express SEQ ID NO: 1 or any Other Sequence Disclosed in Table I, Column 5

[0581] 1-5 ng of the plasmid DNA isolated was transformed by electroporation into competent cells of Agrobacterium tumefaciens, of strain GV 3101 pMP90 (Koncz and Schell, Mol. Gen. Gent. 204, 383-396, 1986). Thereafter, complete medium (YEP) was added and the mixture was transferred into a fresh reaction vessel for 3 hours at 28° C. Thereafter, all of the reaction mixture was plated onto YEP agar plates supplemented with the respective antibiotics, e.g. rifampicine (0.1 mg/ml), gentamycine (0.025 mg/ml and kanamycine (0.05 mg/ml) and incubated for 48 hours at 28° C.

[0582] The agrobacteria that contains the plasmid construct were then used for the transformation of plants.

[0583] A colony was picked from the agar plate with the aid of a pipette tip and taken up in 3 ml of liquid TB medium, which also contained suitable antibiotics as described above. The preculture was grown for 48 hours at 28° C. and 120 rpm.

[0584] 400 ml of LB medium containing the same antibiotics as above were used for the main culture. The preculture was transferred into the main culture. It was grown for 18 hours at 28° C. and 120 rpm. After centrifugation at 4 000 rpm, the pellet was resuspended in infiltration medium (MS medium, 10% sucrose).

[0585] In order to grow the plants for the transformation, dishes (Piki Saat 80, green, provided with a screen bottom, 30×20×4.5 cm, from Wiesauplast, Kunststofftechnik, Germany) were half-filled with a GS 90 substrate (standard soil, Werkverband E.V., Germany). The dishes were watered overnight with 0.05% Proplant solution (Chimac-Apriphar, Belgium). Arabidopsis thaliana C24 seeds (Nottingham Arabidopsis Stock Centre, UK; NASC Stock N906) were scattered over the dish, approximately 1 000 seeds per dish. The dishes were covered with a hood and placed in the stratification facility (8 h, 110 μmol/m²/s⁻¹, 22° C.; 16 h, dark, 6° C.). After 5 days, the dishes were placed into the short-day controlled environment chamber (8 h 130 μmol/m²/s⁻¹, 22° C.; 16 h, dark 20° C.), where they remained for approximately 10 days until the first true leaves had formed.

[0586] The seedlings were transferred into pots containing the same substrate (Teku pots, 7 cm, LC series, manufactured by Pöppelmann GmbH & Co, Germany). Five plants were pricked out into each pot. The pots were then returned into the short-day controlled environment chamber for the plant to continue growing.

[0587] After 10 days, the plants were transferred into the greenhouse cabinet (supplementary illumination, 16 h, 340 μE, 22° C.; 8 h, dark, 20° C.), where they were allowed to grow for further 17 days.

[0588] For the transformation, 6-week-old Arabidopsis plants, which had just started flowering were immersed for 10 seconds into the above-described agrobacterial suspension which had previously been treated with 10 μl Silwett L77 (Crompton S.A., Osi Specialties, Switzerland). The method in question is described in Clough and Bent, 1998 (Clough, J C and Bent, A F. 1998 Floral dip: a simplified method for Agrobacterium-mediated transformation of Arabidopsis thaliana, Plant J. 16:735-743.

[0589] The plants were subsequently placed for 18 hours into a humid chamber. Thereafter, the pots were returned to the greenhouse for the plants to continue growing. The plants remained in the greenhouse for another 10 weeks until the seeds were ready for harvesting.

[0590] Depending on the resistance marker used for the selection of the transformed plants the harvested seeds were planted in the greenhouse and subjected to a spray selection or else first sterilized and then grown on agar plates supplemented with the respective selection agent. Since the vector contained the bar gene as the resistance marker, plantlets were sprayed four times at an interval of 2 to 3 days with 0.02% BASTA® and transformed plants were allowed to set seeds. The seeds of the transgenic A. thaliana plants were stored in the freezer (at −20° C.).

### Example 13

### Plant Culture (Arabidopsis) for Bioanalytical Analyses

[0591] For the bioanalytical analyses of the transgenic plants, the latter were grown uniformly a specific culture facility. To this end the GS-90 substrate as the compost mixture was introduced into the potting machine (Laible System GmbH, Singen, Germany) and filled into the pots. Thereafter, 35 pots were combined in one dish and treated with Previcur. For the treatment, 25 ml of Previcur were taken up in 10 l of tap water. This amount was sufficient for the treatment of approximately 200 pots. The pots were placed into the Previcur solution and additionally irrigated overhead with tap water without Previcur. They were used within four days.

[0592] For the sowing, the seeds, which had been stored in the refrigerator (at 20° C.), were removed from the Eppendorf tubes with the aid of a toothpick and transferred into the pots with the compost. In total, approximately 5 to 12 seeds were distributed in the middle of the pot.

[0593] After the seeds had been sown, the dishes with the pots were covered with matching plastic hood and placed into the stratification chamber for 4 days in the dark at 4° C. The humidity was approximately 90%. After the stratification, the test plants were grown for 22 to 23 days at a 16-h-light, 8-h-dark rhythm at 20° C., an atmospheric humidity of 60% and a CO₂ concentration of approximately 400 ppm. The light sources used were Powerstar HQI-T 250 W/D Daylight lamps from Osram, which generate a light resembling the solar color spectrum with a light intensity of approximately 220 μE/m2/s-1.

[0594] When the plants were 8, 9 and 10 days old, they were subjected to selection for the resistance marker. Approximately pots with transgenic plants were treated with 1 l 0.015% vol/vol of Basta® (Glufosinate-ammonium) solution in water (Aventis Cropsience, Germany). After a further 3 to 4 days, the transgenic, resistant seedlings (plantlets in the 4-leaf stage) could be distinguished clearly from the untransformed plantlets. The nontransgenic seedlings were bleached or dead. The transgenic resistance plants were thinned when they had reached the age of 14 days. The plants, which had grown best in the center of the pot were considered the target plants. All the remaining plants were removed carefully with the aid of metal tweezers and discarded.

[0595] During their growth, the plants received overhead irrigation with distilled water (onto the compost) and bottom irrigation into the placement grooves. Once the grown plants had reached the age of 23 days, they were harvested.

### Example 14

### Metabolic Analysis of Transformed Plants

[0596] The modifications identified in accordance with the invention, in the content of above-described metabolites, were identified by the following procedure.

[0597] a) Sampling and Storage of the Samples

[0598] Sampling was performed directly in the controlled-environment chamber. The plants were cut using small laboratory scissors, rapidly weighed on laboratory scales, transferred into a pre-cooled extraction sleeve and placed into an aluminum rack cooled by liquid nitrogen. If required, the extraction sleeves can be stored in the freezer at −80° C. The time elapsing between cutting the plant to freezing it in liquid nitrogen amounted to not more than 10 to 20 seconds.

[0599] b) Lyophilization

[0600] During the experiment, care was taken that the plants either remained in the deep-frozen state (temperatures<−40° C.) or were freed from water by lyophilization until the first contact with solvents.

[0601] The aluminum rack with the plant samples in the extraction sleeves was placed into the pre-cooled (−40° C.) lyophilization facility. The initial temperature during the main drying phase was −35° C. and the pressure was 0.120 mbar. During the drying phase, the parameters were altered following a pressure and temperature program.

[0602] The final temperature after 12 hours was +30° C. and the final pressure was 0.001 to 0.004 mbar. After the vacuum pump and the refrigerating machine had been switched off, the system was flushed with air (dried via a drying tube) or argon.

[0603] c) Extraction

[0604] Immediately after the lyophilization apparatus had been flushed, the extraction sleeves with the lyophilized plant material were transferred into the 5 ml extraction cartridges of the ASE device (Accelerated Solvent Extractor ASE 200 with Solvent Controller and AutoASE software (DIONEX)).

[0605] The 24 sample positions of an ASE device (Accelerated Solvent Extractor ASE 200 with Solvent Controller and AutoASE software (DIONEX)) were filled with plant samples, including some samples for testing quality control.

[0606] The polar substances were extracted with approximately 10 ml of methanol/water (80/20, v/v) at T=70° C. and p=140 bar, 5 minutes heating-up phase, 1 minute static extraction. The more lipophilic substances were extracted with approximately 10 ml of methanol/dichloromethane (40/60, v/v) at T=70° C. and p=140 bar, 5 minute heating-up phase, 1 minute static extraction. The two solvent mixtures were extracted into the same glass tubes (centrifuge tubes, 50 ml, equipped with screw cap and pierceable septum for the ASE (DIONEX)).

[0607] The solution was treated with internal standards: ribitol, L-glycine-2,2-d₂, L-alanine-2,3,3,3-d₄, methionine-methyl-d₃, and α-methylglucopyranoside and methyl nonadecanoate, methyl undecanoate, methyl tridecanoate, methyl pentadecanoate, methyl nonacosanoate.

[0608] The total extract was treated with 8 ml of water. The solid residue of the plant sample and the extraction sleeve were discarded.

[0609] The extract was shaken and then centrifuged for 5 to 10 minutes at at least 1 400 g in order to accelerate phase separation. 1 ml of the supernatant methanol/water phase (“polar phase”, colorless) was removed for the further GC analysis, and 1 ml was removed for the LC analysis. The remainder of the methanol/water phase was discarded. 0.5 ml of the organic phase (“lipid phase”, dark green) was removed for the further GC analysis and 0.5 ml was removed for the LC analysis. All the portions removed were evaporated to dryness using the IR Dancer infrared vacuum evaporator (Hettich). The maximum temperature during the evaporation process did not exceed 40° C. Pressure in the apparatus was not less than 10 mbar.

[0610] d) Processing the Lipid Phase for the LC/MS or LC/MS/MS Analysis

[0611] The lipid extract, which had been evaporated to dryness was taken up in mobile phase. The HPLC was run with gradient elution.

[0612] The polar extract, which had been evaporated to dryness was taken up in mobile phase. The HPLC was run with gradient elution.

[0613] e) Derivatization of the Lipid Phase for the GC/MS Analysis

[0614] For the transmethanolysis, a mixture of 140 μl of chloroform, 37 μl of hydrochloric acid (37% by weight HCl in water), 320 μl of methanol and 20 μl of toluene was added to the evaporated extract. The vessel was sealed tightly and heated for 2 hours at 100° C., with shaking. The solution was subsequently evaporated to dryness. The residue was dried completely.

[0615] The methoximation of the carbonyl groups was carried out by reaction with methoxyamine hydrochloride (5 mg/ml in pyridine, 100 μl for 1.5 hours at 60° C.) in a tightly sealed vessel. 20 μl of a solution of odd-numbered, straight-chain fatty acids (solution of each 0.3 mg/mL of fatty acids from 7 to 25 carbon atoms and each 0.6 mg/mL of fatty acids with 27, 29 and 31 carbon atoms in 3/7 (v/v) pyridine/toluene) were added as time standards. Finally, the derivatization with 100 μl of N-methyl-N(trimethylsilyl)-2,2,2-trifluoroacetamide (MSTFA) was carried out for 30 minutes at 60° C., again in the tightly sealed vessel. The final volume before injection into the GC was 220 μl.

[0616] f) Derivatization of the Polar Phase for the GC/MS Analysis

[0617] The methoximation of the carbonyl groups was carried out by reaction with methoxyamine hydrochloride (5 mg/ml in pyridine, 50 μl for 1.5 hours at 60° C.) in a tightly sealed vessel. 10 μl of a solution of odd-numbered, straight-chain fatty acids (solution of each 0.3 mg/mL of fatty acids from 7 to 25 carbon atoms and each 0.6 mg/mL of fatty acids with 27, 29 and 31 carbon atoms in 3/7 (v/v) pyridine/toluene) were added as time standards. Finally, the derivatization with 50 μl of N-methyl-N(trimethylsilyl)-2,2,2-trifluoroacetamide (MSTFA) was carried out for 30 minutes at 60° C., again in the tightly sealed vessel. The final volume before injection into the GC was 110 μl.

[0618] g) Analysis of the Various Plant Samples

[0619] The samples were measured in individual series of 20 plant samples each (also referred to as sequences), each sequence containing at least 5 wild-type plants as controls. The peak area of each analyte was divided by the peak area of the respective internal standard. The data were standardized for the fresh weight established for the plant. The values calculated thus were related to the wild-type control group by being divided by the mean of the corresponding data of the wild-type control group of the same sequence. The values obtained were referred to as ratio_by_WT, they are comparable between sequences and indicate how much the analyte concentration in the mutant differs in relation to the wild-type control. Appropriate controls were done before to proof that the vector and transformation procedure itself has no significant influence on the metabolic composition of the plants. Therefore the described changes in comparison with wildtypes were caused by the introduced genes.

[0620] As an alternative, the amino acids can be detected advantageously via HPLC separation in ethanolic extract as described by Geigenberger et al. (Plant Cell & Environ, 19, 1996: 43-55).
[0621] The results of the different plant analyses can be seen from the table, which follows:

TABLE VI

| ORF | Metabolite | Method | Min | Max |
|---|---|---|---|---|
| b2827 | methionine | LC | 1.47 | 1.51 |
| YEL046c | methionine | GC + LC | 1.70 | 4.28 |
| YGR255C | methionine | GC | 1.36 | 3.92 |
| YGR289C | methionine | GC | 1.24 | 1.36 |
| YKR043C | methionine | LC | 1.37 | 1.58 |
| YLR153C | methionine | GC | 1.29 | 2.17 |

[0622] Column 1 shows the identified ORF, Column 2 shows the metabolite analyzed. Columns 4 and 5 show the ratio of the analyzed metabolite such as the amino acid between the transgenic plants and the wild type; Increase of the metabolites: Max: maximal x-fold (normalized to wild type)-Min: minimal x-fold (normalized to wild type). Decrease of the metabolites: Max: maximal x-fold (normalized to wild type) (minimal decrease), Min: minimal x-fold (normalized to wild type) (maximal decrease). Column 3 indicates the analytical method.

[0623] When the analyses were repeated independently, all results proved to be significant.

### Example 15a

### Engineering Ryegrass Plants by Over-Expressing YGR255c from Saccharomyces cerevisiae or Homologs of YGR255c from Other Organisms

[0624] Seeds of several different ryegrass varieties can be used as explant sources for transformation, including the commercial variety Gunne available from Svalof Weibull seed company or the variety Affinity. Seeds are surface-sterilized sequentially with 1% Tween-20 for 1 minute, 100% bleach for 60 minutes, 3 rinses with 5 minutes each with de-ionized and distilled H₂O, and then germinated for 3-4 days on moist, sterile filter paper in the dark. Seedlings are further sterilized for 1 minute with 1% Tween-20, 5 minutes with 75% bleach, and rinsed 3 times with ddH₂O, 5 minutes each.

[0625] Surface-sterilized seeds are placed on the callus induction medium containing Murashige and Skoog basal salts and vitamins, 20 g/l sucrose, 150 mg/l asparagine, 500 mg/l casein hydrolysate, 3 g/l Phytagel, 10 mg/l BAP, and 5 mg/l dicamba. Plates are incubated in the dark at 25° C. for 4 weeks for seed germination and embryogenic callus induction.

[0626] After 4 weeks on the callus induction medium, the shoots and roots of the seedlings are trimmed away, the callus is transferred to fresh media, is maintained in culture for another 4 weeks, and is then transferred to MSO medium in light for 2 weeks. Several pieces of callus (11-17 weeks old) are either strained through a 10 mesh sieve and put onto callus induction medium, or are cultured in 100 ml of liquid ryegrass callus induction media (same medium as for callus induction with agar) in a 250 ml flask. The flask is wrapped in foil and shaken at 175 rpm in the dark at 23° C. for 1 week. Sieving the liquid culture with a 40-mesh sieve is collected the cells. The fraction collected on the sieve is plated and is cultured on solid ryegrass callus induction medium for 1 week in the dark at 25° C. The callus is then transferred to and is cultured on MS medium containing 1% sucrose for 2 weeks.

[0627] Transformation can be accomplished with either Agrobacterium or with particle bombardment methods. An expression vector is created containing a constitutive plant promoter a appropriate targeting sequence and the cDNA of the gene in a pUC vector. The plasmid DNA is prepared from E. coli cells using with Qiagen kit according to manufacturer's instruction. Approximately 2 g of embryogenic callus is spread in the center of a sterile filter paper in a Petri dish. An aliquot of liquid MSO with 10 g/l sucrose is added to the filter paper. Gold particles (1.0 μm in size) are coated with plasmid DNA according to method of Sanford et al., 1993 and are delivered to the embryogenic callus with the following parameters: 500 μg particles and 2 μg DNA per shot, 1300 psi and a target distance of 8.5 cm from stopping plate to plate of callus and 1 shot per plate of callus.

[0628] After the bombardment, calli are transferred back to the fresh callus development medium and maintained in the dark at room temperature for a 1-week period. The callus is then transferred to growth conditions in the light at 25° C. to initiate embryo differentiation with the appropriate selection agent, e.g. 250 nM Arsenal, 5 mg/l PPT or 50 mg/L Kanamycin. Shoots resistant to the selection agent are appearing and once rooted are transferred to soil.

[0629] Samples of the primary transgenic plants (T0) are analyzed by PCR to confirm the presence of T-DNA. These results are confirmed by Southern hybridization in which DNA is electrophoresed on a 1% agarose gel and transferred to a positively charged nylon membrane (Roche Diagnostics). The PCR DIG Probe Synthesis Kit (Roche Diagnostics) is used to prepare a digoxigenin-labelled probe by PCR, and used as recommended by the manufacturer.

[0630] Transgenic T0 ryegrass plants are propagated vegetatively by excising tillers. The transplanted tillers are maintained in the greenhouse for 2 months until well established. The shoots are defoliated and allowed to grow for 2 weeks.

### Example 15b

### Engineering Soybean Plants by Over-Expressing YGR255c from Saccharomyces cerevisiae or Homologs of YGR255c from Other Organisms

[0631] Soybean can be transformed according to the following modification of the method described in the Texas A&M patent U.S. Pat. No. 5,164,310. Several commercial soybean varieties are amenable to transformation by this method. The cultivar Jack (available from the Illinois Seed Foundation) is commonly used for transformation. Seeds are sterilized by immersion in 70% (v/v) ethanol for 6 min and in 25% commercial bleach (NaOCl) supplemented with 0.1% (v/v) Tween for 20 min, followed by rinsing 4 times with sterile double distilled water. Removing the radicle, hypocotyl and one cotyledon from each seedling propagates seven-day seedlings. Then, the epicotyl with one cotyledon is transferred to fresh germination media in petri dishes and incubated at 25° C. under a 16-hr photoperiod (approx. 100 μE-m-2s-1) for three weeks. Axillary nodes (approx. 4 mm in length) are cut from 3-4 week-old plants. Axillary nodes are excised and incubated in Agrobacterium LBA4404 culture.

[0632] Many different binary vector systems have been described for plant transformation (e.g. An, G. in Agrobacterium Protocols. Methods in Molecular Biology vol 44, pp 47-62, Gartland K M A and M R Davey eds. Humana Press, Totowa, N.J.). Many are based on the vector pBIN19 described by Bevan (Nucleic Acid Research. 1984. 12:8711-8721) that includes a plant gene expression cassette flanked by the left and right border sequences from the Ti plasmid of Agrobacterium tumefaciens. A plant gene expression cassette consists of at least two genes—a selection marker gene and a plant promoter regulating the transcription of the cDNA or genomic DNA of the trait gene. Various selection marker genes can be used as described above, including the Arabidopsis gene encoding a mutated acetohydroxy acid synthase (AHAS) enzyme (U.S. Pat. Nos. 57,673,666 and 6,225,105). Similarly, various promoters can be used to regulate the trait gene to provide constitutive, developmental, tissue or environmental regulation of gene transcription as described above. In this example, the 34S promoter (GenBank Accession numbers M59930 and X16673) is used to provide constitutive expression of the trait gene. For plastidal expression a nucleic acid encoding an appropriate targeting sequence (see for example SEQ ID NO: 14590 to 14608) need to be inserted 5′ to ORF in a way similar as described in example 11 in order to express a functional preprotein which is directed to the plastids.

[0633] After the co-cultivation treatment, the explants are washed and transferred to selection media supplemented with 500 mg/L timentin. Shoots are excised and placed on a shoot elongation medium. Shoots longer than 1 cm are placed on rooting medium for two to four weeks prior to transplanting to soil.

[0634] The primary transgenic plants (T0) are analyzed by PCR to confirm the presence of T-DNA. These results are confirmed by Southern hybridization in which DNA is electrophoresed on a 1% agarose gel and transferred to a positively charged nylon membrane (Roche Diagnostics). The PCR DIG Probe Synthesis Kit (Roche Diagnostics) is used to prepare a digoxigenin-labelled probe by PCR, and is used as recommended by the manufacturer.

### Example 15c

### Engineering Corn Plants by Over-Expressing YGR255c from Saccharomyces cerevisiae or Homologs of YGR255c from Other Organisms

[0635] Amplification of SEQ ID NO: 1 was achieved as described in example 11 except that the upstream primer SEQ ID NO: 159 and the reverse primer SEQ ID NO: 160 contained the following 5′ extensions:

SEQ ID NO: 14619

| | |
|---|---|
| i) | forward primer: 5′-GGGTCGCTCCTACGCG-3′ |

SEQ ID NO: 14620

| | |
|---|---|
| ii) | reverse primer 5′-CTCGGGCTCGGCGTCC-3′ |

The maize transformation vector for plastidial targeting was constructed as follows. In order to amplify the targeting sequence of the rbcS gene from Z. maize, total RNA was extracted from leaves of 4 weeks old Z. maize plants (RNeasy Plant Mini Kit, Qiagen, Hilden). The RNA was transcribed in cDNA using SuperScript III First Strand Synthesis System from Invitrogen (Karlsruhe). The cDNA was used as template for a PCR.
To enable cloning of the nucleic acid encoding the transitpeptide into the vector EG065PoccLic (SEQ ID NO: 14587, FIG. 1) and subsequently in EG073qcz (SEQ ID NO: 14588, FIG. 2) XmaI restriction enzyme recognition sequence were added to both the forward and reverse primer.

| | |
|---|---|
| ZmTPrbcs5xma | |
| ATACCCGGGATGGCGCCCACCGTGATGATG | SEQ ID NO: 14618 |
| ZmTPrbcs3xma | |
| ATACCCGGGCACCGGATCCTTCCGCCGTTG | SEQ ID NO: 14617 |

The PCR fragment was digested with XmaI and ligated in the vector EG065PoccLic (FIG. 1) that had also been digested with XmaI. The correct orientation of the rbcS targeting sequence was tested by sequencing. The vector generated in this ligation step was EG065PoccLicTPrbcS.

[0636] From the vector EG065PoccLicTPrbcS the expression cassette comprising the ScBV promoter, transit sequence and NOS terminator was cut out with the restriction enzymes AscI and PacI and ligated into the vector EG073qcz (FIG. 2) that had also been digested with AscI and PacI yielding the vector pMTX0584.

Cloning of the ORF SEQ ID NO: 1 into vector pMTX0584 was achieved as described in example 11 except the restriction enzymes MluI and SaclI were used to open the vector.
According to the disclosure of this example a person skilled in the art is able to clone all other sequences mentioned in table I, column 5.

[0637] Corn Transformation

[0638] The preparation of the immature embryos and Agrobacterium were basically as stated in U.S. Pat. No. 5,591,616. In brief, the Agrobacterium strain LBA4404 transformed with the plasmid by a standard method, such as the triple cross method or the electroporation, was grown on LB plates for 2 days prior to cocultivation. A loop of cells was resuspended in liquid infection media at an O.D. of approximately 1.0. Immature Embryos of about 1.5 mm in size were incubated in the soln of agrobacterium for around 30 minutes. Excised embryos were removed from liquid and then co-cultivated in the dark at 22° C. with Agrobacterium tumefacians on solid MS-based callus induction medium containing 2 mg/l 2,4-D, 10 um AgNO3, and 200 um Acetosyringone. After several days of co-cultivation, embryos were transferred to MS-based media containing 2 mg/l 2,4, 10 um AgNO3 and 200 mg/l Timentin the dark at 27° C. for 1 week. Embryos were transferred to MS-based selection media containing imidazoline herbicide (500 nM Pursuit) as a selection agent in the dark for 3 weeks. After 3 weeks putative transgenic events were transferred to an MS-based media containing 2 mg/L Kinetin 500 nM Pursuit, 200 mg/l Timentin and incubated under cool white fluorescent light (100 uE/m2/s-1 with photoperiod of 16 hrs) at 25° C. for 2-3 weeks, or until shoots develop. The shoots were transferred to MS-based rooting medium and incubated under light at 25° C. for 2 weeks. The rooted shoots were transplanted to 4 inch pots containing artificial soil mix. Metro-Mix® 360 in and grown in an environmental chamber for 1-2 weeks. The environmental chamber maintained 16-h-light, 8-h-dark cycles at 27° C. day and 22° C. respectively. Light was supplied by a mixture of incandescent and cool white fluorescent bulbs with an intensity of ˜400 uE/m2/s-1. After plants were grown to 4-6 leaf stage they were moved to 14 inch pots containing Metro-Mix® 360. Supplemental metal-halide lamps were used to maintain >800 uE/m2/s-1 with a 16-h-light, 8-h-dark cycles at 28° C. day and 22° C. Transplantation occurs weekly on Tuesday. Peters 20-20-20 plus micronutrients (200 ppm) is used to fertilize plants 2× weekly on Monday and Thursday after sampling of T0's is performed. T1 seeds were produced from plants that exhibit tolerance to the imidazolinone herbicides and which are PCR positive for the transgenes. T0 plants with single locus insertions of the T-DNA (self-pollinated) produced T1 generation that segregated for the transgene in a 3:1 ratio. Progeny containing copies of the transgene were tolerant of imidazolinone herbicides and could be detected by PCR analysis.

[0639] T0 plants with single locus insertions of the T-DNA (self-pollinated) produce T1 generation that can segregate for the transgene in a 3:1 ratio. Progeny containing copies of the transgene are tolerant of imidazolinone herbicides and can be detected by PCR analysis.

[0640] Growth of T0 Corn Plants for Metabolic Analysis

Plants are grown under the following standardized conditions to properly stage them for T0 sampling. T0 plantlets are transferred to 14″ pots in the greenhouse after they grow to 4-6 leaf stage (1-3 weeks). pBSMM232 containing plants are produced carried along with each experiment to serve as controls for T0 samples. Plantlets are moved to 14″ die Zeichen besser ausschreiben pots on Tuesday of each week. Plants are grown for 9 days until the 7-13 leaf stage is reached. On Thursday between 10 am and 2 pm leaf sampling is performed on the 3rd youngest (1^{st} fully elongated). Within 30 seconds 250-500 mg of leaf material (without midrib), are removed weighed and placed into pre-extracted glass thimbles in liquid nitrogen. A second sample (opposite side of the midrib) from each plant is sampled as described above for qPCR analysis.

[0641] Growth of T1 Corn Plant for Metabolic Analysis

For the bioanalytical analyses of the transgenic plants, the latter were grown uniformly in a specific culture facility. To this end the GS-90 substrate as the compost mixture was introduced into the potting machine (Laible System GmbH, Singen, Germany) and filled into the pots. Thereafter, 26 pots were combined in one dish and treated with Previcur. For the treatment, 25 ml of Previcur were taken up in 10 l of tap water. This amount was sufficient for the treatment of approximately 150 pots. The pots were placed into the Previcur solution and additionally irrigated overhead with tap water without Previcur. They were used within four days.

[0642] For the sowing, the seeds, which had been stored at room temperature were removed from the paper-bag and transferred into the pots with the soil. In total, approximately 1 to 3 seeds were distributed in the middle of the pot.

[0643] After the seeds had been sown, the dishes with the pots were covered with matching plastic hood and placed into growth chambers for 2 days. After this time the plastic hood was removed and plants were placed on the growth table and cultivated for 22 to 24 days under following growth conditions: 16-h-light, 8-h-dark rhythm at 20° C., an atmospheric humidity of 60% and a CO₂ concentration of approximately 400 ppm. The light sources used were Powerstar HQI-T 250 W/D Daylight lamps from Osram, which generate a light resembling the solar color spectrum with a light intensity of approximately 220 μE/m2/s-1.

[0644] When the plants were 7 days old, they were subjected to select transgenic plants. For this purposes pieces of plant leaves were sampled and a PCR reaction with the respective primers for the transgene were performed. Plants exhibiting the transgen were used for the metabolic analysis. The nontransgenic seedlings were removed. The transgenic plants were thinned when they had reached the age of 18 days. The transgenic plants, which had grown best in the center of the pot were considered the target plants. All the remaining plants were removed carefully with the aid of metal tweezers and discarded.

[0645] During their growth, the plants received overhead irrigation with distilled water (onto the compost) and bottom irrigation into the placement grooves. Once the grown plants had reached the age of 24 days, they were harvested.

[0646] Metabolic analysis of maize leaves.

The modifications identified in accordance with the invention, in the content of above-described metabolites, were identified by the following procedure.

[0647] a) Sampling and Storage of the Samples

[0648] Sampling was performed in corridor next to the green house. The leaves were incised twice using small laboratory scissors and this part of the leave was removed manually from the middle rib. The sample was rapidly weighed on laboratory scales, transferred into a pre-cooled extraction sleeve and placed into kryo-box cooled by liquid nitrogen. The time elapsing between cutting the leave to freezing it in liquid nitrogen amounted to not more than 30 seconds. The boxes were stored in a freezer at −80° C., an shipped on dry ice.

[0649] b) Lyophilization

[0650] During the experiment, care was taken that the plants either remained in the deep-frozen state (temperatures<−40° C.) or were freed from water by lyophilization until the first contact with solvents. Before entering the analytical process the extraction sleeves with the samples were transferred to a pre-cooled aluminium rack.

[0651] The aluminum rack with the plant samples in the extraction sleeves was placed into the pre-cooled (−40° C.) lyophilization facility. The initial temperature during the main drying phase was −35° C. and the pressure was 0.120 mbar. During the drying phase, the parameters were altered following a pressure and temperature program. The final temperature after 12 hours was +30° C. and the final pressure was 0.001 to 0.004 mbar. After the vacuum pump and the refrigerating machine had been switched off, the system was flushed with air (dried via a drying tube) or argon.

[0652] c) Extraction

[0653] Immediately after the lyophilization apparatus had been flushed, the extraction sleeves with the lyophilized plant material were transferred into the 5 ml extraction cartridges of the ASE device (Accelerated Solvent Extractor ASE 200 with Solvent Controller and AutoASE software (DIONEX)).

[0654] Immediately after the lyophilization apparatus had been flushed, the extraction sleeves with the lyophilized plant material were transferred into the 5 ml extraction cartridges of the ASE device (Accelerated Solvent Extractor ASE 200 with Solvent Controller and AutoASE software (DIONEX)).

[0655] The 24 sample positions of an ASE device (Accelerated Solvent Extractor ASE 200 with Solvent Controller and AutoASE software (DIONEX)) were filled with plant samples, including some samples for testing quality control.

[0656] The polar substances were extracted with approximately 10 ml of methanol/water (80/20, v/v) at T=70° C. and p=140 bar, 5 minutes heating-up phase, 1 minute static extraction. The more lipophilic substances were extracted with approximately 10 ml of methanol/dichloromethane (40/60, v/v) at T=70° C. and p=140 bar, 5 minute heating-up phase, 1 minute static extraction. The two solvent mixtures were extracted into the same glass tubes (centrifuge tubes, 50 ml, equipped with screw cap and pierceable septum for the ASE (DIONEX)).

[0657] The solution was treated with internal standards: ribitol, L-alanine-2,3,3,3-d₄, methionine-methyl-d₃, and α-methylglucopyranoside and methyl nona-decanoate, methyl undecanoate, methyl tridecanoate, methyl pentadecanoate, methyl nonacosanoate.

[0658] The total extract was treated with 8 ml of water. The solid residue of the plant sample and the extraction sleeve were discarded.

[0659] The extract was shaken and then centrifuged for 5 to 10 minutes at at least 1 400 g in order to accelerate phase separation. 0.5 ml of the supernatant methanol/water phase (“polar phase”, colorless) was removed for the further GC analysis, and 0.5 ml was removed for the LC analysis. The remainder of the methanol/water phase of all samples was used for additional quality controls. 0.5 ml of the organic phase (“lipid phase”, dark green) was removed for the further GC analysis and 0.5 ml was removed for the LC analysis. All the portions removed were evaporated to dryness using the IR Dancer infrared vacuum evaporator (Hettich). The maximum temperature during the evaporation process did not exceed 40° C. Pressure in the apparatus was not less than 10 mbar.

[0660] d) Processing the Lipid Phase for the LC/MS or LC/MS/MS Analysis

[0661] The lipid extract, which had been evaporated to dryness was taken up in mobile phase. The HPLC was run with gradient elution.

[0662] The polar extract, which had been evaporated to dryness was taken up in mobile phase. The HPLC was run with gradient elution.

[0663] e) Derivatization of the Lipid Phase for the GC/MS Analysis

[0664] For the transmethanolysis, a mixture of 140 μl of chloroform, 37 μl of hydrochloric acid (37% by weight HCl in water), 320 μl of methanol and 20 μl of toluene was added to the evaporated extract. The vessel was sealed tightly and heated for 2 hours at 100° C., with shaking. The solution was subsequently evaporated to dryness. The residue was dried completely.

[0665] The methoximation of the carbonyl groups was carried out by reaction with methoxyamine hydrochloride (20 mg/ml in pyridine, 100 μl for 1.5 hours at 60° C.) in a tightly sealed vessel. 20 μl of a solution of odd-numbered, straight-chain fatty acids (solution of each 0.3 mg/mL of fatty acids from 7 to 25 carbon atoms and each 0.6 mg/mL of fatty acids with 27, 29 and 31 carbon atoms in 3/7 (v/v) pyridine/toluene) were added as time standards. Finally, the derivatization with 100 μl of N-methyl-N(trimethylsilyl)-2,2,2-trifluoroacetamide (MSTFA) was carried out for 30 minutes at 60° C., again in the tightly sealed vessel. The final volume before injection into the GC was 220 μl.

[0666] f) Derivatization of the Polar Phase for the GC/MS Analysis

[0667] The methoximation of the carbonyl groups was carried out by reaction with methoxyamine hydrochloride (20 mg/ml in pyridine, 50 μl for 1.5 hours at 60° C.) in a tightly sealed vessel. 10 μl of a solution of odd-numbered, straight-chain fatty acids (solution of each 0.3 mg/mL of fatty acids from 7 to 25 carbon atoms and each 0.6 mg/mL of fatty acids with 27, 29 and 31 carbon atoms in 3/7 (v/v) pyridine/toluene) were added as time standards. Finally, the derivatization with 50 μl of N-methyl-N(trimethylsilyl)-2,2,2-trifluoroacetamide (MSTFA) was carried out for 30 minutes at 60° C., again in the tightly sealed vessel. The final volume before injection into the GC was 110 μl.

[0668] g) Analysis of the Various Plant Samples

[0669] The samples were measured in individual series of 20 plant (leaf) samples each (also referred to as sequences), each sequence containing at least 5 samples from individual control plants containing GUS. The peak area of each analyte was divided by the peak area of the respective internal standard. The data were standardized for the fresh weight established for the respective harvested sample. The values calculated were then related to the GUS-containing control group by being divided by the mean of the corresponding data of the control group of the same sequence. The values obtained were referred to as ratio_by_WT, they are comparable between sequences and indicate how much the analyte concentration in the mutant differs in relation to the control. The GUS-containing plants were chosen in order to assure that the vector and transformation procedure itself has no significant influence on the metabolic composition of the plants. Therefore the described changes in comparison with the controls were caused by the introduced genes.

### Example 15d

### Engineering Wheat Plants by Over-Expressing YGR255c from Saccharomyces cerevisiae or Homologs of YGR255c from Other Organisms

[0670] Transformation of wheat is performed with the method described by Ishida et al. (1996 Nature Biotech. 14745-50). The cultivar Bobwhite (available from CYMMIT, Mexico) is commonly used in transformation. Immature embryos are cocultivated with Agrobacterium tumefaciens that carry “super binary” vectors, and transgenic plants are recovered through organogenesis. The super binary vector system of Japan Tobacco is described in WO patents WO94/00977 and WO95/06722. Vectors were constructed as described. Various selection marker genes can be used including the maize gene encoding a mutated acetohydroxy acid synthase (AHAS) enzyme (U.S. Pat. No. 6,025,541). Similarly, various promoters can be used to regulate the trait gene to provide constitutive, developmental, tissue or environmental regulation of gene transcription. In this example, the 34S promoter (GenBank Accession numbers M59930 and X16673) can be used to provide constitutive expression of the trait gene. For plastidal expression a nucleic acid encoding an appropriate targeting sequence) need to be inserted 5′ to ORF in a way similar as described in example 15c in order to express a functional preprotein which is directed to the plastids.

[0671] After incubation with Agrobacterium, the embryos are grown on callus induction medium, then regeneration medium, containing imidazolinone as a selection agent. The Petri plates are incubated in the light at 25° C. for 2-3 weeks, or until shoots develop. The green shoots are transferred from each embryo to rooting medium and incubated at 25° C. for 2-3 weeks, until roots develop. The rooted shoots are transplanted to soil in the greenhouse. T1 seeds are produced from plants that exhibit tolerance to the imidazolinone herbicides and which are PCR positive for the transgenes.

[0672] The T1 generation of single locus insertions of the T-DNA can segregate for the transgene in a 3:1 ratio. Those progeny containing one or two copies of the transgene are tolerant of the imidazolinone herbicide. Homozygous T2 plants exhibited similar phenotypes.

### Example 15e

### Engineering Rapeseed/Canola Plants by Over-Expressing YGR255c from Saccharomyces cerevisiae or Homologs of YGR255c from Other Organisms

[0673] Cotyledonary petioles and hypocotyls of 5-6 day-old young seedlings are used as explants for tissue culture and transformed according to Babic et al. (1998, Plant Cell Rep 17: 183-188). The commercial cultivar Westar (Agriculture Canada) is the standard variety used for transformation, but other varieties can be used.

[0674] Agrobacterium tumefaciens LBA4404 containing a binary vector are used for canola transformation. Many different binary vector systems have been described for plant transformation (e.g. An, G. in Agrobacterium Protocols. Methods in Molecular Biology vol 44, pp 47-62, Gartland K M A and M R Davey eds. Humana Press, Totowa, N.J.). Many are based on the vector pBIN19 described by Bevan (Nucleic Acid Research. 1984. 12:8711-8721) that includes a plant gene expression cassette flanked by the left and right border sequences from the Ti plasmid of Agrobacterium tumefaciens. A plant gene expression cassette consists of at least two genes—a selection marker gene and a plant promoter regulating the transcription of the cDNA or genomic DNA of the trait gene. Various selection marker genes can be used including the Arabidopsis gene encoding a mutated acetohydroxy acid synthase (AHAS) enzyme (U.S. Pat. Nos. 57,673,666 and 6,225,105). Similarly, various promoters can be used to regulate the trait gene to provide constitutive, developmental, tissue or environmental regulation of gene transcription. In this example, the 34S promoter (GenBank Accession numbers M59930 and X16673) can be used to provide constitutive expression of the trait gene. For plastidal expression a nucleic acid encoding an appropriate targeting sequence (see for example SEQ ID NO: 14590 to 14608) need to be inserted 5′ to ORF in a way similar as described in example 11 in order to express a functional preprotein which is directed to the plastids.

[0675] Canola seeds are surface-sterilized in 70% ethanol for 2 min., and then in 30% Clorox with a drop of Tween-20 for 10 min, followed by three rinses with sterilized distilled water. Seeds are then germinated in vitro 5 days on half strength MS medium without hormones, 1% sucrose, 0.7% Phytagar at 23° C., 16 hr. light. The cotyledon petiole explants with the cotyledon attached are excised from the in vitro seedlings, and are inoculated with Agrobacterium by dipping the cut end of the petiole explant into the bacterial suspension. The explants are then cultured for 2 days on MSBAP-3 medium containing 3 mg/l BAP, 3% sucrose, 0.7% Phytagar at 23° C., 16 hr light. After two days of co-cultivation with Agrobacterium, the petiole explants are transferred to MSBAP-3 medium containing 3 mg/l BAP, cefotaxime, carbenicillin, or timentin (300 mg/l) for 7 days, and then cultured on MSBAP-3 medium with cefotaxime, carbenicillin, or timentin and selection agent until shoot regeneration. When the shoots are 5-10 mm in length, they are cut and transferred to shoot elongation medium (MSBAP-0.5, containing 0.5 mg/l BAP). Shoots of about 2 cm in length are transferred to the rooting medium (MS0) for root induction.

[0676] Samples of the primary transgenic plants (T0) are analyzed by PCR to confirm the presence of T-DNA. These results are confirmed by Southern hybridization in which DNA is electrophoresed on a 1% agarose gel and are transferred to a positively charged nylon membrane (Roche Diagnostics). The PCR DIG Probe Synthesis Kit (Roche Diagnostics) is used to prepare a digoxigenin-labelled probe by PCR, and used as recommended by the manufacturer.

### Example 15f

### Engineering Alfalfa Plants by Over-Expressing YGR255c from Saccharomyces cerevisiae or Homologs of YGR255c from Other Organisms

[0677] A regenerating clone of alfalfa (Medicago sativa) is transformed using the method of (McKersie et al., 1999 Plant Physiol 119: 839-847). Regeneration and transformation of alfalfa is genotype dependent and therefore a regenerating plant is required. Methods to obtain regenerating plants have been described. For example, these can be selected from the cultivar Rangelander (Agriculture Canada) or any other commercial alfalfa variety as described by Brown D C W and A Atanassov (1985. Plant Cell Tissue Organ Culture 4: 111-112). Alternatively, the RA3 variety (University of Wisconsin) has been selected for use in tissue culture (Walker et al., 1978 Am J Bot 65:654-659).

[0678] Petiole explants are cocultivated with an overnight culture of Agrobacterium tumefaciens C58C1 pMP90 (McKersie et al., 1999 Plant Physiol 119: 839-847) or LBA4404 containing a binary vector. Many different binary vector systems have been described for plant transformation (e.g. An, G. in Agrobacterium Protocols. Methods in Molecular Biology vol 44, pp 47-62, Gartland K M A and M R Davey eds. Humana Press, Totowa, N.J.). Many are based on the vector pBIN19 described by Bevan (Nucleic Acid Research. 1984. 12:8711-8721) that includes a plant gene expression cassette flanked by the left and right border sequences from the Ti plasmid of Agrobacterium tumefaciens. A plant gene expression cassette consists of at least two genes—a selection marker gene and a plant promoter regulating the transcription of the cDNA or genomic DNA of the trait gene. Various selection marker genes can be used including the Arabidopsis gene encoding a mutated acetohydroxy acid synthase (AHAS) enzyme (U.S. Pat. Nos. 57,673,666 and 6,225,105). Similarly, various promoters can be used to regulate the trait gene that provides constitutive, developmental, tissue or environmental regulation of gene transcription. In this example, the 34S promoter (GenBank Accession numbers M59930 and X16673) can be used to provide constitutive expression of the trait gene. For plastidal expression a nucleic acid encoding an appropriate targeting sequence (see for example SEQ ID NO: 14590 to 14608) need to be inserted 5′ to ORF in a way similar as described in example 11 in order to express a functional preprotein which is directed to the plastids.

[0679] The explants are cocultivated for 3 d in the dark on SH induction medium containing 288 mg/L Pro, 53 mg/L thioproline, 4.35 g/L K2SO4, and 100 μm acetosyringinone. The explants are washed in half-strength Murashige-Skoog medium (Murashige and Skoog, 1962) and plated on the same SH induction medium without acetosyringinone but with a suitable selection agent and suitable antibiotic to inhibit Agrobacterium growth. After several weeks, somatic embryos are transferred to BOi2Y development medium containing no growth regulators, no antibiotics, and 50 g/L sucrose. Somatic embryos are subsequently germinated on half-strength Murashige-Skoog medium. Rooted seedlings are transplanted into pots and grown in a greenhouse.

[0680] The T0 transgenic plants are propagated by node cuttings and rooted in Turface growth medium. The plants are defoliated and grown to a height of about 10 cm (approximately 2 weeks after defoliation).

### Example 16

### Metabolite Profiling Info from Zea mays

[0681] Zea mays plants were engineered as described in Example 15c.
Metabolic results were either obtained from regenerated primary transformants (T0) or from the following progeny generation (T1) in comparison to appropriate control plants. The results are shown in table VII

TABLE VII

| ORF_NAME | Metabolite | MIN | MAX |
|---|---|---|---|
| YEL046C | Methionine | 1.48 | 2.10 |
| YGR255C | Methionine | 1.49 | 1.90 |
| YKR043C | Methionine | 2.78 | 3.67 |

Table VII shows the increase in methionine in genetically modified corn plants expressing the Saccharomyces cerevisiae nucleic acid sequences YEL046C, YGR255C and YKR043C.
In one embodiment, in case the activity of the Saccharomyces cerevisiae protein YEL046C or its homologs, e.g. a “L-threonine aldolase”, is increased in corn plants, preferably, an increase of the fine chemical methionine between 48% and 110% is conferred.
In one embodiment, in case the activity of the Saccharomyces cerevisiae protein YGR255C or its homologs, e.g. a “putative flavin-dependent monooxygenase”, is increased in corn plants, preferably, an increase of the fine chemical methionine between 49% and 90% is conferred.
In one embodiment, in case the activity of the Saccharomyces cerevisiae protein YKR043C or its homologs, e.g. a “unknown ORF”, is increased in corn plants, preferably, an increase of the fine chemicals methionine between 178% and 267% or more is conferred.

### Example 16

### Preparation of Homologous Sequences from Plants

[0682] Different plants can be grown under standard or varying conditions in the greenhouse. RNA can be extracted following the protocol of Jones, Dunsmuir and Bedbrook (1985) EMBO J. 4: 2411-2418. Approx. 1 gram of tissue material from various organs is grounded in liquid nitrogen. The powder is transferred to a 13 ml Falcon tube containing 4.5 ml NTES buffer (100 mM NaCl, 10 mM Tris/HCl pH 7.5, 1 mM EDTA, 1% SDS; in RNase-free water) and 3 ml phenol/chloroform/isoamylalcohol (25/24/1), immediately mixed and stored on ice. The mixture is spun for 10 minutes at 7000 rpm using a centrifuge (Sorval; SM24 or SS34 rotor). The supernatant is transferred to a new tube, 1/10th volume of 3 M NaAcetate (pH 5.2; in RNase-free water) and 1 volume of isopropanol is added, mixed at stored for 1 hour or overnight at −20° C. The mixture is spun for 10 minutes at 7000 rpm. The supernatant is discarded and the pellet washed with 70% ethanol (v/v). The mixture is spun for 5 minutes at 7000 rpm, the supernatant is discarded and the pellet is air-dried. 1 ml RNase-free water is added and allows the DNA/RNA pellet to dissolve on ice at 4 C. The nucleic acid solution is transferred to a 2 ml Eppendorf tube and 1 ml of 4 M LiAcetate is added. After mixing the solution is kept for at least 3 hours, or overnight, at 4 C. The mixture is spun for 10 minutes at 14000 rpm, the supernatant discarded, the pellet washed with 70% Ethanol, air-dried and dissolved in 200 μl of RNase-free water.
Total RNA can be used to construct a cDNA-library according to the manufacturer's protocol (for example using the ZAP-cDNA synthesis and cloning kit of Stratagene, La Jolla, USA). Basically, messenger RNA (mRNA) is primed in the first strand synthesis with a oligo(dT) linker-primer and is reverse-transcribed using reverse transcriptase. After second strand cDNA synthesis, the double-stranded cDNA is ligated into the Uni-ZAP XR vector. The Uni-ZAP XR vector allows in vivo excision of the pBluescript phagemid. The polylinker of the pBluescript phagemid has 21 unique cloning sites flanked by T3 and T7 promoters and a choice of 6 different primer sites for DNA sequencing. Systematic single run sequencing of the expected 5 prime end of the clones can allow preliminary annotation of the sequences for example with the help of the pedant pro Software package (Biomax, Munchen, Germany). Clones for the nucleic acids of the invention or used in the process according to the invention can be identified based on homology search with standard algorithms like blastp or gap. Identified putative full length clones with identity or high homology can be subjected to further sequencing in order to obtain the complete sequence.
Additional new homologous sequences can be identified in a similar manner by preparing respective cDNA libraries from various plant sources as described above. Libraries can then be screened with available sequences of the invention under low stringency conditions for example as described in Sambrook et al., Molecular Cloning: A laboratory manual, Cold Spring Harbor 1989, Cold Spring Harbor Laboratory Press. Purified positive clones can be subjected to the in vivo excision and complete sequencing. A pairwise sequence alignment of the original and the new sequence using the blastp or gap program allows the identification of orthologs, meaning homologous sequences from different organisms, which should have a sequence identity of at least 30%. Furthermore the conservation of functionally important amino acid residues or domains, which can be identified by the alignment of several already available paralogs, can identify a new sequence as a new orthologs.
Alternatively libraries can be subjected to mass sequencing and obtained sequences can be stored in a sequence database, which then can be screened for putative orthologs by different search algorithms, for example the tbastn algorithm to search the obtained nucleic acid sequences with a amino acid sequence of the invention. Clones with the highest sequence identity are used for a complete sequence determination and orthologs can be identified as described above.

[0683] Equivalents

Those skilled in the art will recognize, or will be able to ascertain using no more than routine experimentation, many equivalents to the specific embodiments of the invention described herein. Such equivalents are intended to be encompassed by the claims.

[0684] for the disclosure of the paragraphs [0001.0.0.1] to [0007.0.0.1] see paragraphs [0001.0.0.0] to [0007.0.0.0] above.

[0685] Following the approach of deregulating specific enzymes in the amino acid biosynthetic pathway an increase of the levels of free threonine is disclosed in U.S. Pat. No. 5,942,660 which is achieved by overexpression of either a wild-type or deregulated aspartate kinase, homoserine dehydrogenase or threonine synthase.

[0686] for the disclosure of this paragraph see [0008.0.0.0] above.

[0687] As described above, the essential amino acids are necessary for humans and many mammals, for example for livestock. Threonine is an important constituent in many body proteins and is necessary for the formation of tooth enamel protein, collagen and elastin, which both needed for healthy skin and wound healing. It is a precursor to the amino acids glycine and serine. It acts as a lipotropic in controlling fat build-up in the liver. Threonine is an immune stimulant because it promotes thymus growth and activity. It is a component of digestive enzymes and immune secretions from the gut, particularly mucins. It has been used as a supplement to help alleviate anxiety and some cases of depression. In animal production, as an important essential amino acid, threonine is normally the second limiting amino acid for pigs and the third limiting amino acid for chicken (Gallus gallus f. domestica), e.g. laying hen or broiler.

[0688] for the disclosure of the paragraphs [0010.0.0.1] and [0011.0.0.1] see paragraphs [0010.0.0.0] and [0011.0.0.0] above.

[0689] It is an object of the present invention to develop an inexpensive process for the synthesis of threonine, preferably L-threonine. Threonine is with lysin and methionine (depending on the organism) one of the amino acids, which are most frequently limiting

[0690] for the disclosure of this paragraph see [0013.0.0.0] above.

[0691] Accordingly, in a first embodiment, the invention relates to a process for the production of a fine chemical, whereby the fine chemical is threonine, preferably L-threonine. Accordingly, in the present invention, the term “the fine chemical” as used herein relates to “threonine”. Further, the term “the fine chemicals” as used herein also relates to fine chemicals comprising threonine.

[0692] In one embodiment, the term “the fine chemical” means threonine, preferably L-threonine. Throughout the specification the term “the fine chemical” means threonine, preferably L-threonine, its salts, ester or amids in free form or bound to proteins. In a preferred embodiment, the term “the fine chemical” means threonine, preferably L-threonine in free form or its salts or bound to proteins.

[0693] Accordingly, the present invention relates to a process for the production of threonine, which comprises
[0694] (a) increasing or generating the activity of a protein as shown in table II, application no. 2, column 3 encoded by the nucleic acid sequences as shown in table I, application no. 2, column 5, in an organelle of a microorganism or plant, or
[0695] (b) increasing or generating the activity of a protein as shown in table II, application no. 2, column 3 encoded by the nucleic acid sequences as shown in table I, application no. 2, column 5 in the plastid of a microorganism or plant, or in one or more parts thereof; and
[0696] (b) growing the organism under conditions which permit the production of the fine chemical, thus, threonine or fine chemicals comprising threonine, in said organism or in the culture medium surrounding the organism.

[0697] In another embodiment the present invention is related to a process for the production of threonine, which comprises
[0698] a) increasing or generating the activity of a protein as shown in table II, application no. 2, column 3 encoded by the nucleic acid sequences as shown in table I, application no. 2, column 5, in an organelle of a non-human organism, or
[0699] b) increasing or generating the activity of a protein as shown in table II, application no. 2, column 3 encoded by the nucleic acid sequences as shown in table I, application no. 2, column 5, which are joined to a nucleic acid sequence encoding a transit peptide in a non-human organism, or in one or more parts thereof; or
[0700] c) increasing or generating the activity of a protein as shown in table II, application no. 2, column 3 encoded by the nucleic acid sequences as shown in table I, application no. 2, column 5, which are joined to a nucleic acid sequence encoding chloroplast localization sequence, in a non-human organism, or in one or more parts thereof, and
[0701] d) growing the organism under conditions which permit the production of threonine in said organism.

[0702] In another embodiment, the present invention relates to a process for the production of threonine, which comprises
[0703] (a) increasing or generating the activity of a protein as shown in table II, application no. 2, column 3 encoded by the nucleic acid sequences as shown in table I, application no. 2, column 5, in an organelle of a microorganism or plant through the transformation of the organelle, or
[0704] (b) increasing or generating the activity of a protein as shown in table II, application no. 2, column 3 encoded by the nucleic acid sequences as shown in table I, application no. 2, column 5 in the plastid of a microorganism or plant, or in one or more parts thereof through the transformation of the plastids; and
[0705] (c) growing the organism under conditions which permit the production of the fine chemical, thus, threonine or fine chemicals comprising threonine, in said organism or in the culture medium surrounding the organism.

[0706] Advantageously the activity of the protein as shown in table II, application no. 2, column 3 encoded by the nucleic acid sequences as shown in table I, application no. 2, column 5 is increased or generated in the abovementioned process in the plastid of a microorganism or plant.

[0707] for the disclosure of the paragraphs [0019.0.0.1] to [0024.0.0.1] see paragraphs [0019.0.0.0] and [0024.0.0.0] above.

[0708] Even more preferred nucleic acid sequences are encoding transit peptides as disclosed by von Heijne et al. [Plant Molecular Biology Reporter, Vol. 9 (2), 1991: 104-126], which are hereby incorporated by reference. Table V shows some examples of the transit peptide sequences disclosed by von Heijne et al. According to the disclosure of the invention especially in the examples the skilled worker is able to link other nucleic acid sequences disclosed by von Heijne et al. to the nucleic acid sequences shown in table I, application no. 2, columns 5 and 7. Most preferred nucleic acid sequences encoding transit peptides are derived from the genus Spinacia such as chloroplast 30S ribosomal protein PSrp-1, root acyl carrier protein II, acyl carrier protein, ATP synthase: γ subunit, ATP synthase: δ subunit, cytochrom f, ferredoxin I, ferredoxin NADP oxidoreductase (=FNR), nitrite reductase, phosphoribulokinase, plastocyanin or carbonic anhydrase. The skilled worker will recognize that various other nucleic acid sequences encoding transit peptides can easily isolated from plastid-localized proteins, which are expressed from nuclear genes as precursors and are then targeted to plastids. Such transit peptides encoding sequences can be used for the construction of other expression constructs. The transit peptides advantageously used in the inventive process and which are part of the inventive nucleic acid sequences and proteins are typically 20 to 120 amino acids, preferably 25 to 110, 30 to 100 or 35 to 90 amino acids, more preferably 40 to 85 amino acids and most preferably 45 to 80 amino acids in length and functions post-translationally to direct the protein to the plastid preferably to the chloroplast. The nucleic acid sequences encoding such transit peptides are localized upstream of nucleic acid sequence encoding the mature protein. For the correct molecular joining of the transit peptide encoding nucleic acid and the nucleic acid encoding the protein to be targeted it is sometimes necessary to introduce additional base pairs at the joining position, which forms restriction enzyme recognition sequences useful for the molecular joining of the different nucleic acid molecules. This procedure might lead to very few additional amino acids at the N-terminal of the mature imported protein, which usually and preferably do not interfere with the protein function. In any case, the additional base pairs at the joining position which forms restriction enzyme recognition sequences have to be chosen with care, in order to avoid the formation of stop codons or codons which encode amino acids with a strong influence on protein folding, like e.g. proline. It is preferred that such additional codons encode small n.d. structural flexible amino acids such as glycine or alanine.

[0709] As mentioned above the nucleic acid sequences coding for the proteins as shown in table II, application no. 2, column 3 and its homologs as disclosed in table I, application no. 2, columns 5 and 7 are joined to a nucleic acid sequence encoding a transit peptide, This nucleic acid sequence encoding a transit peptide ensures transport of the protein to the plastid. The nucleic acid sequence of the gene to be expressed and the nucleic acid sequence encoding the transit peptide are operably linked. Therefore the transit peptide is fused in frame to the nucleic acid sequence coding for proteins as shown in table II, application no. 2, column 3 and its homologs as disclosed in table I, application no. 2, columns 5 and 7.

[0710] for the disclosure of the paragraphs [0027.0.0.1] to [0029.0.0.1] see paragraphs [0027.0.0.0] and [0029.0.0.0] above.

[0711] Alternatively, nucleic acid sequences coding for the transit peptides may be chemically synthesized either in part or wholly according to structure of transit peptide sequences disclosed in the prior art. Said natural or chemically synthesized sequences can be directly linked to the sequences encoding the mature protein or via a linker nucleic acid sequence, which may be typically less than 500 base pairs, preferably less than 450, 400, 350, 300, 250 or 200 base pairs, more preferably less than 150, 100, 90, 80, 70, 60, 50, 40 or 30 base pairs and most preferably less than 25, 20, 15, 12, 9, 6 or 3 base pairs in length and are in frame to the coding sequence. Furthermore favorable nucleic acid sequences encoding transit peptides may comprise sequences derived from more than one biological and/or chemical source and may include a nucleic acid sequence derived from the amino-terminal region of the mature protein, which in its native state is linked to the transit peptide. In a preferred embodiment of the invention said amino-terminal region of the mature protein is typically less than 150 amino acids, preferably less than 140, 130, 120, 110, 100 or 90 amino acids, more preferably less than 80, 70, 60, 50, 40, 35, 30, 25 or 20 amino acids and most preferably less than 19, 18, 17, 16, 15, 14, 13, 12, 11 or 10 amino acids in length. But even shorter or longer stretches are also possible. In addition target sequences, which facilitate the transport of proteins to other cell compartments such as the vacuole, endoplasmic reticulum, golgi complex, glyoxysomes, peroxisomes or mitochondria may be also part of the inventive nucleic acid sequence. The proteins translated from said inventive nucleic acid sequences are a kind of fusion proteins that means the nucleic acid sequences encoding the transit peptide for example the ones shown in table V, preferably the last one of the table are joint to the nucleic acid sequences shown in table I, application no. 2, columns 5 and 7. The person skilled in the art is able to join said sequences in a functional manner. Advantageously the transit peptide part is cleaved off from the protein part shown in table II, application no. 2, columns 5 and 7 during the transport preferably into the plastids. All products of the cleavage of the preferred transit peptide shown in the last line of table V have preferably the N-terminal amino acid sequences QIA CSS or QIA EFQLTT in front of the start methionine of the protein mentioned in table II, application no. 2, columns 5 and 7. Other short amino acid sequences of an range of 1 to 20 amino acids preferable 2 to 15 amino acids, more preferable 3 to 10 amino acids most preferably 4 to 8 amino acids are also possible in front of the start methionine of the protein mentioned in table II, application no. 2, columns 5 and 7. In case of the amino acid sequence QIA CSS the three amino acids in front of the start methionine are stemming from the LIC (=ligatation independent cloning) cassette. Said short amino acid sequence is preferred in the case of the expression of E. coli genes. In case of the amino acid sequence QIA EFQLTT the six amino acids in front of the start methionine are stemming from the LIC cassette. Said short amino acid sequence is preferred in the case of the expression of S. cerevisiae genes. The skilled worker knows that other short sequences are also useful in the expression of the genes mentioned in table I, application no. 2, columns 5 and 7. Furthermore the skilled worker is aware of the fact that there is not a need for such short sequences in the expression of the genes.

[0712] Table V: Examples of transit peptides disclosed by von Heijne et al. for the disclosure of Table V see paragraph [0030.2.0.0] above.

[0713] Alternatively to the targeting of the sequences shown in table II, application no. 2, columns 5 and 7 preferably of sequences in general encoded in the nucleus with the aid of the targeting sequences mentioned for example in table V alone or in combination with other targeting sequences preferably into the plastids, the nucleic acids of the invention can directly introduced into the plastidal genome. Therefore in a preferred embodiment the nucleic acid sequences shown in table I, application no. 2, columns 5 and 7 are directly introduced and expressed in plastids.

The term “introduced” in the context of this specification shall mean the insertion of a nucleic acid sequence into the organism by means of a “transfection”, “transduction” or preferably by “transformation”.
A plastid, such as a chloroplast, has been “transformed” by an exogenous (preferably foreign) nucleic acid sequence if nucleic acid sequence has been introduced into the plastid that means that this sequence has crossed the membrane or the membranes of the plastid. The foreign DNA may be integrated (covalently linked) into plastid DNA making up the genome of the plastid, or it may remain unintegrated (e.g., by including a chloroplast origin of replication). “Stably” integrated DNA sequences are those, which are inherited through plastid replication, thereby transferring new plastids, with the features of the integrated DNA sequence to the progeny.

[0714] for the disclosure of the paragraphs [0030.2.0.1] and [0030.3.0.1] see paragraphs [0030.2.0.0] and [0030.3.0.0] above.

[0715] For the inventive process it is of great advantage that by transforming the plastids the intraspecies specific transgene flow is blocked, because a lot of species such as corn, cotton and rice have a strict maternal inheritance of plastids. By placing the genes specified in table I, application no. 2, columns 5 and 7 or active fragments thereof in the plastids of plants, these genes will not be present in the pollen of said plants.

A further preferred embodiment of the invention relates to the use of so called “chloroplast localization sequences”, in which a first RNA sequence or molecule is capable of transporting or “chaperoning” a second RNA sequence, such as a RNA sequence transcribed from the sequences depicted in table I, application no. 2, columns 5 and 7 or a sequence encoding a protein, as depicted in table II, application no. 2, columns 5 and 7, from an external environment inside a cell or outside a plastid into a chloroplast. In one embodiment the chloroplast localization signal is substantially similar or complementary to a complete or intact viroid sequence. The chloroplast localization signal may be encoded by a DNA sequence, which is transcribed into the chloroplast localization RNA. The term “viroid” refers to a naturally occurring single stranded RNA molecule (Flores, C R Acad Sci III. 2001 October; 324(10): 943-52). Viroids usually contain about 200-500 nucleotides and generally exist as circular molecules. Examples of viroids that contain chloroplast localization signals include but are not limited to ASBVd, PLMVd, CChMVd and ELVd. The viroid sequence or a functional part of it can be fused to the sequences depicted in table I, application no. 2, columns 5 and 7 or a sequence encoding a protein, as depicted in table II, application no. 2, columns 5 and 7 in such a manner that the viroid sequence transports a sequence transcribed from a sequence as depicted in table I, application no. 2 columns 5 and 7 or a sequence encoding a protein as depicted in table II, application no. 2 columns 5 and 7 into the chloroplasts. A preferred embodiment uses a modified ASBVd (Navarro et al., Virology. 2000 Mar. 1; 268(1): 218-25).
In a further specific embodiment the protein to be expressed in the plastids such as the proteins depicted in table II, application no. 2, columns 5 and 7 are encoded by different nucleic acids. Such a method is disclosed in WO 2004/040973, which shall be incorporated by reference. WO 2004/040973 teaches a method, which relates to the translocation of an RNA corresponding to a gene or gene fragment into the chloroplast by means of a chloroplast localization sequence. The genes, which should be expressed in the plant or plants cells, are split into nucleic acid fragments, which are introduced into different compartments in the plant e.g. the nucleus, the plastids and/or mitochondria. Additionally plant cells are described in which the chloroplast contains a ribozyme fused at one end to an RNA encoding a fragment of a protein used in the inventive process such that the ribozyme can trans-splice the translocated fusion RNA to the RNA encoding the gene fragment to form and as the case may be reunite the nucleic acid fragments to an intact mRNA encoding a functional protein for example as disclosed in table II, application no. 2, columns 5 and 7.

[0716] In a preferred embodiment of the invention the nucleic acid sequences as shown in table I, application no. 2, columns 5 and 7 used in the inventive process are transformed into plastids, which are metabolical active. Those plastids should preferably maintain at a high copy number in the plant or plant tissue of interest, most preferably the chloroplasts found in green plant tissues, such as leaves or cotyledons or in seeds.

[0717] For a good expression in the plastids the nucleic acid sequences as shown in table I, application no. 2, columns 5 and 7 are introduced into an expression cassette using a preferably a promoter and terminator, which are active in plastids preferably a chloroplast promoter. Examples of such promoters include the psbA promoter from the gene from spinach or pea, the rbcL promoter, and the atpB promoter from corn.

[0718] for the disclosure of the paragraphs [0031.0.0.1] and [0032.0.0.1] see paragraphs [0031.0.0.0] and [0032.0.0.0] above.

[0719] Advantageously the process for the production of the fine chemical leads to an enhanced production of the fine chemical. The terms “enhanced” or “increase” mean at least a 10%, 20%, 30%, 40% or 50%, preferably at least 60%, 70%, 80%, 90% or 100%, more preferably 150%, 200%, 300%, 400% or 500% higher production of the fine chemical in comparison to the reference as defined below, e.g. that means in comparison to an organism without the aforementioned modification of the activity of a protein as shown in table II, application no. 2, column 3. Preferably the modification of the activity of a protein as shown in table II, application no. 2, column 3 or their combination can be achieved by joining the protein to a transit peptide.

[0720] Surprisingly it was found, that the transgenic expression of the Saccharomyces cerevisiae protein as shown in table II, application no. 2, column 3 in plastids of a plant such as Arabidopsis thaliana for example through the linkage to at least one targeting sequence for example as mentioned in table V conferred an increase in the fine chemical content of the transformed plants.

[0721] for the disclosure of this paragraph see paragraph [0035.0.0.0] above.

[0722] The sequence of b0760 from Escherichia coli (Accession PIR:JC6038) has been published in Blattner et al., Science 277 (5331), 1453-1474 (1997), and its activity is being defined as “ATP-binding component of molybdate transport system”. Accordingly, in one embodiment, the process of the present invention comprises the use of a “ATP-binding component of molybdate transport system” or its homolog, e.g. as shown herein, for the production of the fine chemical, meaning of threonine, in particular for increasing the amount of threonine in free or bound form in an organism or a part thereof, as mentioned. In one embodiment, in the process of the present invention the activity of a b0760 protein is increased or generated, e.g. from Escherichia coli or a homolog thereof, preferably linked at least to one transit peptide as mentioned for example in table V.

In another embodiment, in the process of the present invention the activity of a b0760 protein is increased or generated in a subcellular compartment of the organism or organism cell such as in an organelle like a plastid or mitochondria.
The sequence of b1062 from Escherichia coli (Accession PIR:DEECOO) has been published in Blattner et al., Science 277 (5331), 1453-1474 (1997), and its activity is being defined as “dihydro-orotase”. Accordingly, in one embodiment, the process of the present invention comprises the use of a “dihydro-orotase” or its homolog, e.g. as shown herein, for the production of the fine chemical, meaning of threonine, in particular for increasing the amount of threonine in free or bound form in an organism or a part thereof, as mentioned. In one embodiment, in the process of the present invention the activity of a b1062 protein is increased or generated, e.g. from Escherichia coli or a homolog thereof, preferably linked at least to one transit peptide as mentioned for example in table V.
In another embodiment, in the process of the present invention the activity of a b1062 protein is increased or generated in a subcellular compartment of the organism or organism cell such as in an organelle like a plastid or mitochondria.
The sequence of b1131 (Accession number NP_{—}415649) from Escherichia coli has been published in Blattner et al., Science 277 (5331), 1453-1474 (1997), and its activity is being defined as “adenylosuccinate lyase”. Accordingly, in one embodiment, the process of the present invention comprises the use of a “adenylosuccinate lyase” or its homolog, e.g. as shown herein, for the production of the fine chemical, meaning of threonine, in particular for increasing the amount of threonine in free or bound form in an organism or a part thereof, as mentioned. In one embodiment, in the process of the present invention the activity of a b1131 protein is increased or generated, e.g. from Escherichia coli or a homolog thereof, preferably linked at least to one transit peptide as mentioned for example in table V.
In another embodiment, in the process of the present invention the activity of a b1131 protein is increased or generated in a subcellular compartment of the organism or organism cell such as in an organelle like a plastid or mitochondria.
The sequence of b1264 (Accession number NP_{—}415780) from Escherichia coli has been published in Blattner et al., Science 277 (5331), 1453-1474 (1997), and its activity is being defined as “anthranilate synthase component I”. Accordingly, in one embodiment, the process of the present invention comprises the use of a “anthranilate synthase component I” or its homolog, e.g. as shown herein, for the production of the fine chemical, meaning of threonine, in particular for increasing the amount of threonine in free or bound form in an organism or a part thereof, as mentioned. In one embodiment, in the process of the present invention the activity of a b1264 protein is increased or generated, e.g. from Escherichia coli or a homolog thereof, preferably linked at least to one transit peptide as mentioned for example in table V.
In another embodiment, in the process of the present invention the activity of a b1264 protein is increased or generated in a subcellular compartment of the organism or organism cell such as in an organelle like a plastid or mitochondria.
The sequence of b1277 from Escherichia coli (Accession PIR:A40654) has been published in Blattner et al., Science 277 (5331), 1453-1474 (1997), and its activity is being defined as “GTP cyclohydrolase II”. Accordingly, in one embodiment, the process of the present invention comprises the use of a “GTP cyclohydrolase II” or its homolog, e.g. as shown herein, for the production of the fine chemical, meaning of threonine, in particular for increasing the amount of threonine in free or bound form in an organism or a part thereof, as mentioned. In one embodiment, in the process of the present invention the activity of a b1277 protein is increased or generated, e.g. from Escherichia coli or a homolog thereof, preferably linked at least to one transit peptide as mentioned for example in table V.
In another embodiment, in the process of the present invention the activity of a b1277 protein is increased or generated in a subcellular compartment of the organism or organism cell such as in an organelle like a plastid or mitochondria.
The sequence of b2040 from Escherichia coli (Accession PIR:G64969) has been published in Blattner et al., Science 277 (5331), 1453-1474 (1997), and its activity is being defined as “TDP-rhamnose synthetase, NAD(P)-binding”. Accordingly, in one embodiment, the process of the present invention comprises the use of a “TDP-rhamnose synthetase, NAD(P)-binding” or its homolog, e.g. as shown herein, for the production of the fine chemical, meaning of threonine, in particular for increasing the amount of threonine in free or bound form in an organism or a part thereof, as mentioned. In one embodiment, in the process of the present invention the activity of a b2040 protein is increased or generated, e.g. from Escherichia coli or a homolog thereof, preferably linked at least to one transit peptide as mentioned for example in table V.
In another embodiment, in the process of the present invention the activity of a b2040 protein is increased or generated in a subcellular compartment of the organism or organism cell such as in an organelle like a plastid or mitochondria.
The sequence of b2066 (Accession number NP_{—}416570) from Escherichia coli has been published in Blattner et al., Science 277 (5331), 1453-1474 (1997), and its activity is being defined as “uridine/cytidine kinase”. Accordingly, in one embodiment, the process of the present invention comprises the use of a “uridine/cytidine kinase” or its homolog, e.g. as shown herein, for the production of the fine chemical, meaning of threonine, in particular for increasing the amount of threonine in free or bound form in an organism or a part thereof, as mentioned. In one embodiment, in the process of the present invention the activity of a b2066 protein is increased or generated, e.g. from Escherichia coli or a homolog thereof, preferably linked at least to one transit peptide as mentioned for example in table V.
In another embodiment, in the process of the present invention the activity of a b2066 protein is increased or generated in a subcellular compartment of the organism or organism cell such as in an organelle like a plastid or mitochondria.
The sequence of b2388 from Escherichia coli (Accession PIR:A65013) has been published in Blattner et al., Science 277 (5331), 1453-1474 (1997), and its activity is being defined as “glucokinase”. Accordingly, in one embodiment, the process of the present invention comprises the use of a “glucokinase” or its homolog, e.g. as shown herein, for the production of the fine chemical, meaning of threonine, in particular for increasing the amount of threonine in free or bound form in an organism or a part thereof, as mentioned. In one embodiment, in the process of the present invention the activity of a b2388 protein is increased or generated, e.g. from Escherichia coli or a homolog thereof, preferably linked at least to one transit peptide as mentioned for example in table V.
In another embodiment, in the process of the present invention the activity of a b2388 protein is increased or generated in a subcellular compartment of the organism or organism cell such as in an organelle like a plastid or mitochondria.
The sequence of b2779 (Accession number NP_{—}417259) from Escherichia coli has been published in Blattner et al., Science 277 (5331), 1453-1474 (1997), and its activity is being defined as “enolase”. Accordingly, in one embodiment, the process of the present invention comprises the use of a “enolase” or its homolog, e.g. as shown herein, for the production of the fine chemical, meaning of threonine, in particular for increasing the amount of threonine in free or bound form in an organism or a part thereof, as mentioned. In one embodiment, in the process of the present invention the activity of a b2779 protein is increased or generated, e.g. from Escherichia coli or a homolog thereof, preferably linked at least to one transit peptide as mentioned for example in table V.
In another embodiment, in the process of the present invention the activity of a b2779 protein is increased or generated in a subcellular compartment of the organism or organism cell such as in an organelle like a plastid or mitochondria.
The sequence of b3213 (Accession number NP_{—}417680) from Escherichia coli has been published in Blattner et al., Science 277 (5331), 1453-1474 (1997), and its activity is being defined as “glutamate synthase” (small subunit, nucleotide-binding, 4Fe-4S protein). Accordingly, in one embodiment, the process of the present invention comprises the use of a “glutamate synthase” or its homolog, e.g. as shown herein, for the production of the fine chemical, meaning of threonine, in particular for increasing the amount of threonine in free or bound form in an organism or a part thereof, as mentioned. In one embodiment, in the process of the present invention the activity of a b3213 protein is increased or generated, e.g. from Escherichia coli or a homolog thereof, preferably linked at least to one transit peptide as mentioned for example in table V.
In another embodiment, in the process of the present invention the activity of a b3213 protein is increased or generated in a subcellular compartment of the organism or organism cell such as in an organelle like a plastid or mitochondria.
The sequence of b3429 (Accession number NP_{—}417887) from Escherichia coli has been published in Blattner et al., Science 277 (5331), 1453-1474 (1997), and its activity is being defined as “glycogen synthase”. Accordingly, in one embodiment, the process of the present invention comprises the use of a “glycogen synthase” or its homolog, e.g. as shown herein, for the production of the fine chemical, meaning of threonine, in particular for increasing the amount of threonine in free or bound form in an organism or a part thereof, as mentioned. In one embodiment, in the process of the present invention the activity of a b3429 protein is increased or generated, e.g. from Escherichia coli or a homolog thereof, preferably linked at least to one transit peptide as mentioned for example in table V.
In another embodiment, in the process of the present invention the activity of a b3429 protein is increased or generated in a subcellular compartment of the organism or organism cell such as in an organelle like a plastid or mitochondria.
The sequence of b3443 from Escherichia coli (Accession NP_{—}417900) has been published in Blattner et al., Science 277 (5331), 1453-1474 (1997), and its activity is being defined as a “uncharacterized ORF”. Accordingly, in one embodiment, the process of the present invention comprises the use of a “uncharacterized ORF” or its homolog, e.g. as shown herein, for the production of the fine chemical, meaning of threonine, in particular for increasing the amount of threonine in free or bound form in an organism or a part thereof, as mentioned. In one embodiment, in the process of the present invention the activity of a b3443 protein is increased or generated, e.g. from Escherichia coli or a homolog thereof, preferably linked at least to one transit peptide as mentioned for example in table V.
In another embodiment, in the process of the present invention the activity of a b3443 protein is increased or generated in a subcellular compartment of the organism or organism cell such as in an organelle like a plastid or mitochondria.
The sequence of b4039 (Accession number PIR:S25660) from Escherichia coli has been published in Blattner et al., Science 277 (5331), 1453-1474 (1997), and its activity is being defined as “4-hydroxybenzoate synthetase”. Accordingly, in one embodiment, the process of the present invention comprises the use of a “4-hydroxybenzoate synthetase” or its homolog, e.g. as shown herein, for the production of the fine chemical, meaning of threonine, in particular for increasing the amount of threonine in free or bound form in an organism or a part thereof, as mentioned. In one embodiment, in the process of the present invention the activity of a b4039 protein is increased or generated, e.g. from Escherichia coli or a homolog thereof, preferably linked at least to one transit peptide as mentioned for example in table V.
In another embodiment, in the process of the present invention the activity of a b4039 protein is increased or generated in a subcellular compartment of the organism or organism cell such as in an organelle like a plastid or mitochondria.
The sequence of YDR430C from Saccharomyces cerevisiae (Accession PIR:S69711) has been published in published in Jacq et al., Nature 387 (6632 Suppl), 75-78, 1997 and Goffeau, Science 274 (5287), 546-547, 1996, and its activity is being defined as “metalloprotease”. Accordingly, in one embodiment, the process of the present invention comprises the use of a “metalloprotease” or its homolog, e.g. as shown herein, for the production of the fine chemical, meaning of threonine, in particular for increasing the amount of threonine in free or bound form in an organism or a part thereof, as mentioned. In one embodiment, in the process of the present invention the activity of a YDR430C protein is increased or generated, e.g. from Saccharomyces cerevisiae or a homolog thereof, preferably linked at least to one transit peptide as mentioned for example in table V.
In another embodiment, in the process of the present invention the activity of a YDR430C protein is increased or generated in a subcellular compartment of the organism or organism cell such as in an organelle like a plastid or mitochondria.
The sequence of YMR262W from Saccharomyces cerevisiae (Accession PIR:S54474) has been published in published in Bowman et al., Nature 387:90-93 (1997), and its activity is being defined as a “uncharacterized ORF”. Accordingly, in one embodiment, the process of the present invention comprises the use of a “uncharacterized ORF” or its homolog, e.g. as shown herein, for the production of the fine chemical, meaning of threonine, in particular for increasing the amount of threonine in free or bound form in an organism or a part thereof, as mentioned. In one embodiment, in the process of the present invention the activity of a YMR262W protein is increased or generated, e.g. from Saccharomyces cerevisiae or a homolog thereof, preferably linked at least to one transit peptide as mentioned for example in table V.
In another embodiment, in the process of the present invention the activity of a YMR262W protein is increased or generated in a subcellular compartment of the organism or organism cell such as in an organelle like a plastid or mitochondria.
The sequence of YOR350C (Accession number PIR|S67259) from Saccharomyces cerevisiae has been published in Dujon et al., Nature 387:98-102(1997), and its activity is being, defined as “a protein, which is similar to Lucilia illustris mitochondria cytochrome oxidase”. Accordingly, in one embodiment, the process of the present invention comprises the use of a “protein, which is similar to Lucilia illustris mitochondria cytochrome oxidase” or its homolog, e.g. as shown herein, for the production of the fine chemical, meaning of threonine, in particular for increasing the amount of threonine in free or bound form in an organism or a part thereof, as mentioned. In one embodiment, in the process of the present invention the activity of a YOR350C protein is increased or generated, e.g. from Escherichia coli or a homolog thereof, preferably linked at least to one transit peptide as mentioned for example in table V.
In another embodiment, in the process of the present invention the activity of a YOR350C protein is increased or generated in a subcellular compartment of the organism or organism cell such as in an organelle like a plastid or mitochondria.
The sequence of YBL082C (Accession number NP_{—}009471) from Saccharomyces cerevisiae has been published in Goffeau et al., Science 274 (5287), 546-547, 1996 and

[0723] Feldmann et al. EMBO J. 13 (24), 5795-5809 (1994), and its activity is being defined as “Dol-P-Man dependent alpha(1-3) mannosyl-transferase”. Accordingly, in one embodiment, the process of the present invention comprises the use of a “Dol-P-Man dependent alpha(1-3) mannosyl-transferase” or its homolog, e.g. as shown herein, for the production of the fine chemical, meaning of threonine, in particular for increasing the amount of threonine in free or bound form in an organism or a part thereof, as mentioned. In one embodiment, in the process of the present invention the activity of a YBL082C protein is increased or generated, e.g. from Saccharomyces cerevisiae or a homolog thereof, preferably linked at least to one transit peptide as mentioned for example in table V.

In another embodiment, in the process of the present invention the activity of an YBL082C protein is increased or generated in a subcellular compartment of the organism or organism cell such as in an organelle like a plastid or mitochondria.
The sequence of YDR204W (Accession number NP_{—}010490) from Saccharomyces cerevisiae has been published in Goffeau et al., Science 274 (5287), 546-547, 1996 and Jacq et al., Nature 387 (6632 Suppl), 75-78 (1997), and its activity is being defined as a “putative protein” with a role in ubiquinone (Coenzyme Q) biosynthesis, possibly functioning in stabilization of Coq7p; located on the matrix face of the mitochondrial inner membrane; Coq4p″. Accordingly, in one embodiment, the process of the present invention comprises the use of said putative protein or its homolog, e.g. as shown herein, for the production of the fine chemical, meaning of threonine, in particular for increasing the amount of threonine in free or bound form in an organism or a part thereof, as mentioned. In one embodiment, in the process of the present invention the activity of a YDR204W protein is increased or generated, e.g. from Saccharomyces cerevisiae or a homolog thereof, preferably linked at least to one transit peptide as mentioned for example in table V.
In another embodiment, in the process of the present invention the activity of a YDR204W protein is increased or generated in a subcellular compartment of the organism or organism cell such as in an organelle like a plastid or mitochondria.
The sequence of YKR043C (Accession number NP_{—}012969) from Saccharomyces cerevisiae has been published in Goffeau et al., Science 274 (5287), 546-547, 1996 and Dujon et al., Nature 369 (6479), 371-378 (1994) and its activity is being defined as a phosphoglycerate mutase like protein. Accordingly, in one embodiment, the process of the present invention comprises the use of said “phosphoglycerate mutase like protein” or its homolog, e.g. as shown herein, for the production of the fine chemical, meaning of threonine, in particular for increasing the amount of threonine in free or bound form in an organism or a part thereof, as mentioned. In one embodiment, in the process of the present invention the activity of a YKR043C protein is increased or generated, e.g. from Saccharomyces cerevisiae or a homolog thereof, preferably linked at least to one transit peptide as mentioned for example in table V.
In another embodiment, in the process of the present invention the activity of an YKR043C protein is increased or generated in a subcellular compartment of the organism or organism cell such as in an organelle like a plastid or mitochondria.
The sequence of YLR153C (Accession number NP_{—}013254) from Saccharomyces cerevisiae has been published in Goffeau et al., Science 274 (5287), 546-547, 1996 and Johnston et al., Nature 387 (6632 Suppl), 87-90 (1997), and its activity is being defined as a “acetyl-CoA synthetase”. Accordingly, in one embodiment, the process of the present invention comprises the use of said “acetyl-CoA synthetase” or its homolog, e.g. as shown herein, for the production of the fine chemical, meaning of threonine, in particular for increasing the amount of threonine in free or bound form in an organism or a part thereof, as mentioned. In one embodiment, in the process of the present invention the activity of a YLR153C protein is increased or generated, e.g. from Saccharomyces cerevisiae or a homolog thereof, preferably linked at least to one transit peptide as mentioned for example in table V.
In another embodiment, in the process of the present invention the activity of an YLR153C protein is increased or generated in a subcellular compartment of the organism or organism cell such as in an organelle like a plastid or mitochondria.
The sequence of YLR174W (Accession number NP_{—}013275) from Saccharomyces cerevisiae has been published in Goffeau et al., Science 274 (5287), 546-547, 1996 and Johnston et al., Nature 387 (6632 Suppl), 87-90 (1997), and its activity is being defined as “cytosolic NADP-specific isocitrate dehydrogenase”, which catalyzes oxidation of isocitrate to alpha-ketoglutarate (Idp2p). Accordingly, in one embodiment, the process of the present invention comprises the use of said “NADP-specific isocitrate dehydrogenase” or its homolog, e.g. as shown herein, for the production of the fine chemical, meaning of threonine, in particular for increasing the amount of threonine in free or bound form in an organism or a part thereof, as mentioned. In one embodiment, in the process of the present invention the activity of a YLR174W protein is increased or generated, e.g. from Saccharomyces cerevisiae or a homolog thereof, preferably linked at least to one transit peptide as mentioned for example in table V.
In another embodiment, in the process of the present invention the activity of an YLR174W protein is increased or generated in a subcellular compartment of the organism or organism cell such as in an organelle like a plastid or mitochondria.
The sequence of YNL241C (Accession number NP_{—}014158) from Saccharomyces cerevisiae has been published in Goffeau et al., Science 274 (5287), 546-547, 1996: and Philippsen et al., Nature 387 (6632 Suppl), 93-98 (1997), and its activity is being defined as “glucose-6-phosphate dehydrogenase (Zwf1p)”. Accordingly, in one embodiment, the process of the present invention comprises the use of said “glucose-6-phosphate dehydrogenase” or its homolog, e.g. as shown herein, for the production of the fine chemical, meaning of threonine, in particular for increasing the amount of threonine in free or bound form in an organism or a part thereof, as mentioned. In one embodiment, in the process of the present invention the activity of a YNL241C protein is increased or generated, e.g. from Saccharomyces cerevisiae or a homolog thereof, preferably linked at least to one transit peptide as mentioned for example in table V.
In another embodiment, in the process of the present invention the activity of an YNL241C protein is increased or generated in a subcellular compartment of the organism or organism cell such as in an organelle like a plastid or mitochondria.

[0724] In one embodiment, the homolog of the YDR430C, YMR262W, YOR350C, YBL082C, YDR204W, YKR043C, YLR153C, YLR174W and/or YNL241C, is a homolog having said activity and being derived from Eukaryot. In one embodiment, the homolog of the b0760, b1062, b1277, b2040, b2388, b3443, b4039, b1131, b1264, b2066, b2779, b3213 and/or b3429 is a homolog having said activity and being derived from bacteria. In one embodiment, the homolog of the YDR430C, YMR262W, YOR350C, YBL082C, YDR204W, YKR043C, YLR153C, YLR174W and/or YNL241C_is a homolog having said activity and being derived from Fungi. In one embodiment, the homolog of the b0760, b1062, b1277, b2040, b2388, b3443, b4039, b1131, b1264, b2066, b2779, b3213 and/or b3429 is a homolog having said activity and being derived from Proteobacteria. In one embodiment, the homolog of the YDR430C, YMR262W, YOR350C, YBL082C, YDR204W, YKR043C, YLR153C, YLR174W and/or YNL241C is a homolog having said activity and being derived from Ascomycota. In one embodiment, the homolog of the b0760, b1062, b1277, b2040, b2388, b3443, b4039, b1131, b1264, b2066, b2779, b3213 and/or b3429 is a homolog having said activity and being derived from Gammaproteobacteria. In one embodiment, the homolog of the YDR430C, YMR262W, YOR350C, YBL082C, YDR204W, YKR043C, YLR153C, YLR174W and/or YNL241C is a homolog having said activity and being derived from Saccharomycotina. In one embodiment, the homolog of the b0760, b1062, b1277, b2040, b2388, b3443, b4039, b1131, b1264, b2066, b2779, b3213 and/or b3429 is a homolog having said activity and being derived from Enterobacteriales. In one embodiment, the homolog of the YDR430C, YMR262W, YOR350C, YBL082C, YDR204W, YKR043C, YLR153C, YLR174W and/or YNL241C is a homolog having said activity and being derived from Saccharomycetes. In one embodiment, the homolog of the b0760, b1062, b1277, b2040, b2388, b3443, b4039, b1131, b1264, b2066, b2779, b3213 and/or b3429 is a homolog having said activity and being derived from Enterobacteriaceae. In one embodiment, the homolog of the YDR430C, YMR262W, YOR350C, YBL082C, YDR204W, YKR043C, YLR153C, YLR174W and/or YNL241C is a homolog having said activity and being derived from Saccharomycetales. In one embodiment, the homolog of the b0760, b1062, b1277, b2040, b2388, b3443, b4039, b1131, b1264, b2066, b2779, b3213 and/or b3429 is a homolog having said activity and being derived from Escherichia, preferably from Escherichia coli. In one embodiment, the homolog of the YDR430C, YMR262W, YOR350C, YBL082C, YDR204W, YKR043C, YLR153C, YLR174W and/or YNL241C is a homolog having said activity and being derived from Saccharomycetaceae. In one embodiment, the homolog of the YDR430C, YMR262W, YOR350C, YBL082C, YDR204W, YKR043C, YLR153C, YLR174W and/or YNL241C is a homolog having said activity and being derived from Saccharomycetes, preferably from Saccharomyces cerevisiae.

[0725] for the disclosure of this paragraph see paragraph [0038.0.0.0] above.

[0726] In accordance with the invention, a protein or polypeptide has the “activity of an protein as shown in table II, application no. 2, column 3” if its de novo activity, or its increased expression directly or indirectly leads to an increased in the fine chemical level in the organism or a part thereof, preferably in a cell of said organism, more preferably in an organelle such as a plastid or mitochondria of said organism and the protein has the above mentioned activities of a protein as shown in table II, application no. 2, column 3, preferably in the event the nucleic acid sequences encoding said proteins is functionally joined to the nucleic acid sequence of a transit peptide. Throughout the specification the activity or preferably the biological activity of such a protein or polypeptide or an nucleic acid molecule or sequence encoding such protein or polypeptide is identical or similar if it still has the biological or enzymatic activity of a protein as shown in table II, application no. 2, column 3, or which has at least 10% of the original enzymatic activity, preferably 20%, particularly preferably 30%, most particularly preferably 40% in comparison to a protein as shown in table II, application no. 2, column 3 of Saccharomyces cerevisiae.

[0727] for the disclosure of the paragraphs [0040.0.0.1] to [0047.0.0.1] see paragraphs [0040.0.0.0] to [0047.0.0.0] above.

[0728] Preferably, the reference, control or wild type differs form the subject of the present invention only in the cellular activity, preferably of the plastidial activity of the polypeptide of the invention, e.g. as result of an increase in the level of the nucleic acid molecule of the present invention or an increase of the specific activity of the polypeptide of the invention, e.g. by or in the expression level or activity of an protein having the activity of a protein as shown in table II, application no. 2, column 3 its biochemical or genetical causes and the increased amount of the fine chemical.

[0729] for the disclosure of the paragraphs [0049.0.0.1] to [0051.0.0.1] see paragraphs [0049.0.0.0] to [0051.0.0.0] above.

[0730] For example, the molecule number or the specific activity of the polypeptide or the nucleic acid molecule may be increased. Larger amounts of the fine chemical can be produced if the polypeptide or the nucleic acid of the invention is expressed de novo in an organism lacking the activity of said protein, preferably the nucleic acid molecules as mentioned in table I, application no. 2, columns 5 and 7 alone or preferably in combination with a transit peptide for example as mentioned in table V or in another embodiment by introducing said nucleic acid molecules into an organelle such as an plastid or mitochondria in the transgenic organism. However, it is also possible to modify the expression of the gene which is naturally present in the organisms, for example by integrating a nucleic acid sequence, encoding a plastidic targeting sequence in front (5 prime) of the coding sequence, leading to a functional preprotein, which is directed for example to the plastids.

[0731] for the disclosure of the paragraphs [0053.0.0.1] to [0058.0.0.1] see paragraphs [0053.0.0.0] to [0058.0.0.0] above.

[0732] In case the activity of the Escherichia coli protein b0760 or its homologs, e.g. an “ATP-binding component of molybdate transport system” is increased advantageously in an organelle such as a plastid or mitochondria, preferably, in one embodiment an increase of the fine chemical, preferably of threonine between 18% and 33% or more is conferred.

In case the activity of the Escherichia coli protein b1062 or its homologs, e.g. a “dihydro-orotase” is increased advantageously in an organelle such as a plastid or mitochondria, preferably, in one embodiment an increase of the fine chemical, preferably of threonine between 23% and 42% or more is conferred.
In case the activity of the Escherichia coli protein b1131 or its homologs, e.g. a “adenylosuccinate lyase” is increased advantageously in an organelle such as a plastid or mitochondria, preferably, in one embodiment an increase of the fine chemical, preferably of threonine between 17% and 41% or more is conferred.
In case the activity of the Escherichia coli protein b1264 or its homologs, e.g. an “anthranilate synthase component I” is increased advantageously in an organelle such as a plastid or mitochondria, preferably, in one embodiment an increase of the fine chemical, preferably of threonine between 17% and 15% or more is conferred.
In case the activity of the Escherichia coli protein b1277 or its homologs, e.g. a “GTP cyclohydrolase II” is increased advantageously in an organelle such as a plastid or mitochondria, preferably, in one embodiment an increase of the fine chemical, preferably of threonine between 17% and 28% or more is conferred.
In case the activity of the Escherichia coli protein b2040 or its homologs, e.g. a “TDP-rhamnose synthetase, NAD(P)-binding” is increased advantageously in an organelle such as a plastid or mitochondria, preferably, in one embodiment an increase of the fine chemical, preferably of threonine between 19% and 67% or more is conferred.
In case the activity of the Escherichia coli protein b2066 or its homologs, e.g. an “uridine/cytidine kinase” is increased advantageously in an organelle such as a plastid or mitochondria, preferably, in one embodiment an increase of the fine chemical, preferably of threonine between 25% and 93% or more is conferred.
In case the activity of the Escherichia coli protein b2388 or its homologs, e.g. a “glucokinase” is increased advantageously in an organelle such as a plastid or mitochondria, preferably, in one embodiment an increase of the fine chemical, preferably of threonine between 24% and 56% or more is conferred.
In case the activity of the Escherichia coli protein b2779 or its homologs, e.g. an “enolase” is increased advantageously in an organelle such as a plastid or mitochondria, preferably, in one embodiment an increase of the fine chemical, preferably of threonine between 18% and 33% or more is conferred.
In case the activity of the Escherichia coli protein b3213 or its homologs, e.g. a “glutamate synthase (small subunit)” is increased advantageously in an organelle such as a plastid or mitochondria, preferably, in one embodiment an increase of the fine chemical, preferably of threonine between 24% and 77% or more is conferred.
In case the activity of the Escherichia coli protein b3429 or its homologs, e.g. a “glycogen synthase” is increased advantageously in an organelle such as a plastid or mitochondria, preferably, in one embodiment an increase of the fine chemical, preferably of threonine between 18% and 55% or more is conferred.
In case the activity of the Escherichia coli protein b3443 or its homologs, e.g. a “unknown ORF” is increased advantageously in an organelle such as a plastid or mitochondria, preferably, in one embodiment an increase of the fine chemical, preferably of threonine between 41% and 45% or more is conferred.
In case the activity of the Escherichia coli protein b4039 or its homologs, e.g. a “4-hydroxybenzoate synthetase” is increased advantageously in an organelle such as a plastid or mitochondria, preferably, in one embodiment an increase of the fine chemical, preferably of threonine between 18% and 38% or more is conferred.
In case the activity of the Saccharomyces cerevisiae protein YDR430C or its homologs, e.g. a “metalloprotease” is increased advantageously in an organelle such as a plastid or mitochondria, preferably, in one embodiment an increase of the fine chemical, preferably of threonine between 67% and 155% or more is conferred.
In case the activity of the Saccharomyces cerevisiae protein YMR262W or its homologs, e.g. a “unknown ORF” is increased advantageously in an organelle such as a plastid or mitochondria, preferably, in one embodiment an increase of the fine chemical, preferably of threonine between 26% and 51% or more is conferred.
In case the activity of the Saccharomyces cerevisiae protein YOR350c or its homologs, e.g. a “protein similar to Lucilia illustris mitochondria cytochrome oxidase” is increased advantageously in an organelle such as a plastid or mitochondria, preferably, in one embodiment an increase of the fine chemical, preferably of threonine between 17% and 70% or more is conferred.
In case the activity of the Saccharomyces cerevisiae protein YBL082C or its homologs, e.g. a “Dol-P-Man dependent alpha(1-3) mannosyl-transferase” is increased advantageously in an organelle such as a plastid or mitochondria, preferably, in one embodiment an increase of the fine chemical, preferably of threonine between 16% and 55% or more is conferred.
In case the activity of the Saccharomyces cerevisiae protein YDR204W or its homologs, e.g. a “protein which encodes component of the coenzyme Q biosynthetic pathway” is increased advantageously in an organelle such as a plastid or mitochondria, preferably, in one embodiment an increase of the fine chemical, preferably of threonine between 21% and 36% or more is conferred.
In case the activity of the Saccharomyces cerevisiae protein YKR043C or its homologs, e.g. a “phosphoglycerate mutase like protein” is increased advantageously in an organelle such as a plastid or mitochondria, preferably, in one embodiment an increase of the fine chemical, preferably of threonine between 25% and 335% or more is conferred.
In case the activity of the Saccharomyces cerevisiae protein YLR153C or its homologs, e.g. an “acetyl-CoA synthetase” is increased advantageously in an organelle such as a plastid or mitochondria, preferably, in one embodiment an increase of the fine chemical, preferably of threonine between 23% and 32% or more is conferred.
In case the activity of the Saccharomyces cerevisiae protein YLR174W or its homologs, e.g. a “cytosolic NADP-specific isocitrate dehydrogenase” is increased advantageously in an organelle such as a plastid or mitochondria, preferably, in one embodiment an increase of the fine chemical, preferably of threonine between 23% and 31% or more is conferred.
In case the activity of the Saccharomyces cerevisiae protein YNL241C or its homologs, e.g. a “glucose-6-phosphate dehydrogenase” is increased advantageously in an organelle such as a plastid or mitochondria, preferably, in one embodiment an increase of the fine chemical, preferably of threonine between 17% and 56% or more is conferred.

[0733] In case the activity of the Escherichia coli protein b0760 or its homologs, e.g. an “ATP-binding component of molybdate transport system” is increased advantageously in an organelle such as a plastid or mitochondria, preferably an increase of the fine chemical and of proteins containing threonine is conferred.

In case the activity of the Escherichia coli protein b1062 or its homologs, e.g. a “dihydro-orotase” is increased advantageously in an organelle such as a plastid or mitochondria, preferably an increase of the fine chemical and of proteins containing threonine is conferred.
In case the activity of the Escherichia coli protein b1131 or its homologs, e.g. a “adenylosuccinate lyase” is increased advantageously in an organelle such as a plastid or mitochondria, preferably an increase of the fine chemical and of proteins containing threonine is conferred.
In case the activity of the Escherichia coli protein b1264 or its homologs, e.g. an “anthranilate synthase component I” is increased advantageously in an organelle such as a plastid or mitochondria, preferably an increase of the fine chemical and of proteins containing threonine is conferred.
In case the activity of the Escherichia coli protein b1277 or its homologs, e.g. a “GTP cyclohydrolase II” is increased advantageously in an organelle such as a plastid or mitochondria, preferably an increase of the fine chemical and of proteins containing threonine is conferred.
In case the activity of the Escherichia coli protein b2040 or its homologs, e.g. a “TDP-rhamnose synthetase, NAD(P)-binding” is increased advantageously in an organelle such as a plastid or mitochondria, preferably an increase of the fine chemical and of proteins containing threonine is conferred.
In case the activity of the Escherichia coli protein b2066 or its homologs, e.g. an “uridine/cytidine kinase” is increased advantageously in an organelle such as a plastid or mitochondria, preferably an increase of the fine chemical and of proteins containing threonine is conferred.
In case the activity of the Escherichia coli protein b2388 or its homologs, e.g. a “glucokinase” is increased advantageously in an organelle such as a plastid or mitochondria, preferably an increase of the fine chemical and of proteins containing threonine is conferred.
In case the activity of the Escherichia coli protein b2779 or its homologs, e.g. an “enolase” is increased advantageously in an organelle such as a plastid or mitochondria, preferably an increase of the fine chemical and of proteins containing threonine is conferred.
In case the activity of the Escherichia coli protein b3213 or its homologs, e.g. a “glutamate synthase (small subunit)” is increased advantageously in an organelle such as a plastid or mitochondria, preferably an increase of the fine chemical and of proteins containing threonine is conferred.
In case the activity of the Escherichia coli protein b3429 or its homologs, e.g. a “glycogen synthase” is increased advantageously in an organelle such as a plastid or mitochondria, preferably an increase of the fine chemical and of proteins containing threonine is conferred.
In case the activity of the Escherichia coli protein b3443 or its homologs, e.g. a “unknown ORF” is increased advantageously in an organelle such as a plastid or mitochondria, preferably an increase of the fine chemical and of proteins containing threonine is conferred.
In case the activity of the Escherichia coli protein b4039 or its homologs, e.g. a “4-hydroxybenzoate synthetase” is increased advantageously in an organelle such as a plastid or mitochondria, preferably an increase of the fine chemical and of proteins containing threonine is conferred.
In case the activity of the Saccharomyces cerevisiae protein YDR430C or its homologs, e.g. a “metalloprotease” is increased advantageously in an organelle such as a plastid or mitochondria, preferably an increase of the fine chemical and of proteins containing threonine is conferred.
In case the activity of the Saccharomyces cerevisiae protein YMR262W or its homologs, e.g. a “unknown ORF” is increased advantageously in an organelle such as a plastid or mitochondria, preferably an increase of the fine chemical and of proteins containing threonine is conferred.
In case the activity of the Saccharomyces cerevisiae protein YOR350C or its homologs, e.g. a “protein similar to Lucilia illustris mitochondria cytochrome oxidase” is increased advantageously in an organelle such as a plastid or mitochondria, preferably an increase of the fine chemical and of proteins containing threonine is conferred.
In case the activity of the Saccharomyces cerevisiae protein YBL082C or its homologs, e.g. a “Dol-P-Man dependent alpha(1-3) mannosyl-transferase” is increased advantageously in an organelle such as a plastid or mitochondria, preferably an increase of the fine chemical and of proteins containing threonine is conferred.
In case the activity of the Saccharomyces cerevisiae protein YDR204W or its homologs, e.g. a “protein which encodes component of the coenzyme Q biosynthetic pathway” is increased advantageously in an organelle such as a plastid or mitochondria, preferably an increase of the fine chemical and of proteins containing threonine is conferred.
In case the activity of the Saccharomyces cerevisiae protein YKR043C or its homologs, e.g. a “phosphoglycerate mutase like protein” is increased advantageously in an organelle such as a plastid or mitochondria, preferably an increase of the fine chemical and of proteins containing threonine is conferred.
In case the activity of the Saccharomyces cerevisiae protein YLR153C or its homologs, e.g. an “acetyl-CoA synthetase” is increased advantageously in an organelle such as a plastid or mitochondria, preferably an increase of the fine chemical and of proteins containing threonine is conferred.
In case the activity of the Saccharomyces cerevisiae protein YLR174W or its homologs, e.g. a “cytosolic NADP-specific isocitrate dehydrogenase” is increased advantageously in an organelle such as a plastid or mitochondria, preferably an increase of the fine chemical and of proteins containing threonine is conferred.
In case the activity of the Saccharomyces cerevisiae protein YNL241C or its homologs, e.g. a “glucose-6-phosphate dehydrogenase” is increased advantageously in an organelle such as a plastid or mitochondria, preferably an increase of the fine chemical and of proteins containing threonine is conferred.

[0734] for the disclosure of the paragraphs [0061.0.0.1] and [0062.0.0.1] see paragraphs [0061.0.0.0] and [0062.0.0.0] above.

[0735] A protein having an activity conferring an increase in the amount or level of the fine chemical, preferably upon targeting to the plastids preferably has the structure of the polypeptide described herein, in particular of the polypeptides comprising the consensus sequence shown in table IV, application no. 2, column 7 or of the polypeptide as shown in the amino acid sequences as disclosed in table II, application no. 2, columns 5 and 7 or the functional homologues thereof as described herein, or is encoded by the nucleic acid molecule characterized herein or the nucleic acid molecule according to the invention, for example by the nucleic acid molecule as shown in table I, application no. 2, columns 5 and 7 or its herein described functional homologues and has the herein mentioned activity.

[0736] For the purposes of the present invention, the terms “L-threonine” and “threonine also encompass the corresponding salts, such as, for example, threonine hydrochloride or threonine sulfate. Preferably the terms threonine is intended to encompass the term L-threonine.

[0737] for the disclosure of the paragraphs [0065.0.0.1] and [0066.0.0.1] see paragraphs [0065.0.0.0] and [0066.0.0.0] above.

[0738] In one embodiment, the process of the present invention comprises one or more of the following steps
[0739] a) stabilizing a protein conferring the increased expression of a protein encoded by the nucleic acid molecule of the invention or of the polypeptide of the invention, e.g. of a polypeptide having the activity of a protein as indicated in table II, application no. 2, columns 5 and 7 or its homologs activity having herein-mentioned threonine increasing activity; and/or
[0740] b) stabilizing a mRNA conferring the increased expression of a protein encoded by the nucleic acid molecule of the invention, which is in the sense of the invention a fusion of a nucleic acid sequence encoding a transit peptide and of a nucleic acid sequence as shown in table I, application no. 2, columns 5 and 7, e.g. a nucleic acid sequence encoding a polypeptide having the activity of a protein as indicated in table II, application no. 2, columns 5 and 7 or its homologs or of a mRNA encoding the polypeptide of the present invention having herein-mentioned threonine increasing activity; and/or
[0741] c) increasing the specific activity of a protein conferring the increased expression of a protein encoded by the nucleic acid molecule of the invention or of the polypeptide of the present invention having herein-mentioned threonine increasing activity, e.g. of a polypeptide having the activity of a protein as indicated in table II, application no. 2, columns 5 and 7 or its homologs activity, or decreasing the inhibitory regulation of the polypeptide of the invention; and/or
[0742] d) generating or increasing the expression of an endogenous or artificial transcription factor mediating the expression of a protein conferring the increased expression of a protein encoded by the nucleic acid molecule of the invention or of the polypeptide of the invention having herein-mentioned threonine increasing activity, e.g. of a polypeptide having the activity of a protein as indicated in table II, application no. 2, columns 5 and 7 or its homologs activity; and/or
[0743] e) stimulating activity of a protein conferring the increased expression of a protein encoded by the nucleic acid molecule of the present invention or a polypeptide of the present invention having herein-mentioned threonine increasing activity, e.g. of a polypeptide having the activity of a protein as indicated in table II, application no. 2, columns 5 and 7 or its homologs activity, by adding one or more exogenous inducing factors to the organisms or parts thereof; and/or
[0744] f) expressing a transgenic gene encoding a protein conferring the increased expression of a polypeptide encoded by the nucleic acid molecule of the present invention or a polypeptide of the present invention, having herein-mentioned threonine increasing activity, e.g. of a polypeptide having the activity of a protein as indicated in table II, application no. 2, columns 5 and 7 or its homologs, and/or
[0745] g) increasing the copy number of a gene conferring the increased expression of a nucleic acid molecule encoding a polypeptide encoded by the nucleic acid molecule of the invention or the polypeptide of the invention having herein-mentioned threonine increasing activity, e.g. of a polypeptide having the activity of a protein as indicated in table II, application no. 2, columns 5 and 7 or its homologs; and/or
[0746] h) increasing the expression of the endogenous gene encoding the polypeptide of the invention, e.g. a polypeptide having the activity of a protein as indicated in table II, application no. 2, columns 5 and 7 or its homologs activity, by adding positive expression or removing negative expression elements, e.g. homologous recombination can be used to either introduce positive regulatory elements like for plants the 35S enhancer into the promoter or to remove repressor elements form regulatory regions. Further gene conversion methods can be used to disrupt repressor elements or to enhance to activity of positive elements. Positive elements can be randomly introduced in plants by T-DNA or transposon mutagenesis and lines can be identified in which the positive elements have be integrated near to a gene of the invention, the expression of which is thereby enhanced; and/or
[0747] i) modulating growth conditions of an organism in such a manner, that the expression or activity of the gene encoding the protein of the invention or the protein itself is enhanced for example microorganisms or plants can be grown for example under a higher temperature regime leading to an enhanced expression of heat shock proteins, which can lead an enhanced fine chemical production; and/or
[0748] (j) selecting of organisms with especially high activity of the proteins of the invention from natural or from mutagenized resources and breeding them into the target organisms, eg the elite crops; and/or
[0749] (k) directing a protein encoded by the nucleic acid molecule of the invention or of the polypeptide of the present invention having herein-mentioned threonine increasing activity, e.g. of a polypeptide having the activity of a protein as indicated in table II, application no. 2, columns 5 and 7 or its homologs activity, to the plastids by the addition of a plastidial targeting sequence; and/or
[0750] (l) generating the expression of a protein encoded by the nucleic acid molecule of the invention or of the polypeptide of the present invention having herein-mentioned threonine increasing activity, e.g. of a polypeptide having the activity of a protein as indicated in table II, application no. 2, columns 5 and 7 or its homologs activity in plastids by the stable or transient transformation advantageously stable transformation of organelles preferably plastids with an inventive nucleic acid sequence preferably in form of an expression cassette containing said sequence leading to the plastidial expression of the nucleic acids or polypeptides of the invention; and/or
[0751] (m) generating the expression of a protein encoded by the nucleic acid molecule of the invention or of the polypeptide of the present invention having herein-mentioned threonine increasing activity, e.g. of a polypeptide having the activity of a protein as indicated in table II, application no. 2, columns 5 and 7 or its homologs activity in plastids by integration of a nucleic acid of the invention into the plastidal genome under control of preferable a plastidial promoter.

[0752] Preferably, said mRNA is the nucleic acid molecule of the present invention and/or the protein conferring the increased expression of a protein encoded by the nucleic acid molecule of the present invention alone or link to a transit nucleic acid sequence or transit peptide encoding nucleic acid sequence or the polypeptide having the herein mentioned activity, e.g. conferring the increase of the fine chemical after increasing the expression or activity of the encoded polypeptide preferably in organelles such as plastids or having the activity of a polypeptide having an activity as the protein as shown in table II, application no. 2, column 3 or its homologs. Preferably the increase of the fine chemical takes place in plastids.

[0753] for the disclosure of the paragraphs [0069.0.0.1] to [0079.0.0.1] see paragraphs [0069.0.0.0] to [0079.0.0.0] above.

[0754] The activation of an endogenous polypeptide having above-mentioned activity, e.g. having the activity of a protein as shown in table II, application no. 2, column 3 or of the polypeptide of the invention, e.g. conferring the increase of the fine chemical after increase of expression or activity in the cytsol and/or in an organelle like a plastid, preferentially in the plastid, can also be increased by introducing a synthetic transcription factor, which binds close to the coding region of the gene encoding the protein as shown in table II, application no. 2, column 3 and activates its transcription. A chimeric zinc finger protein can be constructed, which comprises a specific DNA-binding domain and an activation domain as e.g. the VP16 domain of Herpes Simplex virus. The specific binding domain can bind to the regulatory region of the gene encoding the protein as shown in table II, application no. 2, column 3. The expression of the chimeric transcription factor in a organism, in particular in a plant, leads to a specific expression of the protein as shown in table II, application no. 2, column 3, see e.g. in WO01/52620, Oriz, Proc. Natl. Acad. Sci. USA, 2002, Vol. 99, 13290 or Guan, Proc. Natl. Acad. Sci. USA, 2002, Vol. 99, 13296.

[0755] for the disclosure of the paragraphs [0081.0.0.1] to [0084.0.0.1] see paragraphs [0081.0.0.0] to [0084.0.0.0] above.

[0756] Owing to the introduction of a gene or a plurality of genes conferring the expression of the nucleic acid molecule of the invention or the polypeptide of the invention, for example the nucleic acid construct mentioned below, or encoding the protein as shown in table II, application no. 2, column 3 into an organism alone or in combination with other genes, it is possible not only to increase the biosynthetic flux towards the end product, but also to increase, modify or create de novo an advantageous, preferably novel metabolites composition in the organism, e.g. an advantageous amino acid composition comprising a higher content of (from a viewpoint of nutritional physiology limited) amino acids, like methionine, lysine or threonine alone or in combination in free or bound form.

[0757] for the disclosure of this paragraph see paragraph [0086.0.0.0] above.

[0758] By influencing the metabolism thus, it is possible to produce, in the process according to the invention, further advantageous compounds. Examples of such compounds are, in addition to threonine for example compounds like amino acids such as methionine or lycine or other desirable compounds.

[0759] Accordingly, in one embodiment, the process according to the invention relates to a process, which comprises:
[0760] a) providing a non-human organism, preferably a microorganism, a non-human animal, a plant or animal cell, a plant or animal tissue or a plant, more preferably a microorganism, a plant or a plant tissue;
[0761] b) increasing the activity of a protein as shown in table II, application no. 2, column 3 or of a polypeptide being encoded by the nucleic acid molecule of the present invention and described below, e.g. conferring an increase of the fine chemical in the organism, preferably in the microorganism, the non-human animal, the plant or animal cell, the plant or animal tissue or the plant, more preferably a microorganism, a plant or a plant tissue, in the cytsol or in the plastids, preferentially in the plastids,
[0762] c) growing the organism, preferably the microorganism, the non-human animal, the plant or animal cell, the plant or animal tissue or the plant under conditions which permit the production of the fine chemical in the organism, preferably the microorganism, the plant cell, the plant tissue or the plant; and
[0763] d) if desired, recovering, optionally isolating, the free and/or bound the fine chemical and, optionally further free and/or bound amino acids synthesized by the organism, the microorganism, the non-human animal, the plant or animal cell, the plant or animal tissue or the plant.

[0764] The organism, in particular the microorganism, non-human animal, the plant or animal cell, the plant or animal tissue or the plant is advantageously grown in such a way that it is not only possible to recover, if desired isolate the free or bound the fine chemical or the free and bound the fine chemical but as option it is also possible to produce, recover and, if desired isolate, other free or/and bound amino acids, in particular threonine.

[0765] for the disclosure of the paragraphs [0090.0.0.1] to [0097.0.0.1] see paragraphs [0090.0.0.0] to [0097.0.0.0] above.

[0766] With regard to the nucleic acid sequence as depicted a nucleic acid construct which contains a nucleic acid sequence mentioned herein or an organism (=transgenic organism) which is transformed with said nucleic acid sequence or said nucleic acid construct, “transgene” means all those constructs which have been brought about by genetic manipulation methods, preferably in which either
[0767] a) the nucleic acid sequence as shown in table I, application no. 2, columns 5 and 7 or a derivative thereof, or
[0768] b) a genetic regulatory element, for example a promoter, which is functionally linked to the nucleic acid sequence as shown table I, application no. 2, columns 5 and 7 or a derivative thereof, or
[0769] c) (a) and (b)
   is/are not present in its/their natural genetic environment or has/have been modified by means of genetic manipulation methods, it being possible for the modification to be, by way of example, a substitution, addition, deletion, inversion or insertion of one or more nucleotide. “Natural genetic environment” means the natural chromosomal locus in the organism of origin or the presence in a genomic library. In the case of a genomic library, the natural, genetic environment of the nucleic acid sequence is preferably at least partially still preserved. The environment flanks the nucleic acid sequence at least on one side and has a sequence length of at least 50 bp, preferably at least 500 bp, particularly preferably at least 1000 bp, very particularly preferably at least 5000 bp.

[0770] The use of the nucleic acid sequence according to the invention or of the nucleic acid construct according to the invention for the generation of transgenic plants is therefore also subject matter of the invention. As mentioned above the inventive nucleic acid sequence consists advantageously of the nucleic acid sequences as depicted in the sequence protocol and disclosed in table I, application no. 2, columns 5 and 7 joined to a nucleic acid sequence encoding a transit peptide, or a targeting nucleic acid sequence which directs the nucleic acid sequences disclosed in table I, application no. 2, columns 5 and 7 to the organelle preferentially the plastids. Alternatively the inventive nucleic acids sequences consist advantageously of the nucleic acid sequences as depicted in the sequence protocol and disclosed in table I, application no. 2, columns 5 and 7 joined preferably to a nucleic acids sequence mediating the stable integration of nucleic acids into the plastidial genome and optionally sequences mediating the transcription of the sequence in the plastidial compartment. A transient expression is in principal also desirable and possible.

[0771] for the disclosure of this paragraph see paragraph [0100.0.0.0] above.

[0772] In an advantageous embodiment of the invention, the organism takes the form of a plant whose amino acid content is modified advantageously owing to the nucleic acid molecule of the present invention expressed. This is important for plant breeders since, for example, the nutritional value of plants for monogastric animals is limited by a few essential amino acids such as lysine, threonine or methionine. After the activity of the protein as shown in table II, application no. 2, column 3 has been increased or generated in the cytsol or plastids, preferentially in the plastids, or after the expression of nucleic acid molecule or polypeptide according to the invention has been generated or increased, the transgenic plant generated thus is grown on or in a nutrient medium or else in the soil and subsequently harvested.

[0773] for the disclosure of the paragraphs [0102.0.0.1] to [0110.0.0.1] see paragraphs [0102.0.0.0] to [0110.0.0.0] above.

[0774] In a preferred embodiment, the fine chemical (threonine) is produced in accordance with the invention and, if desired, is isolated. The production of further amino acids such as lysine, methionine etc. and of amino acid mixtures by the process according to the invention is advantageous.

[0775] for the disclosure of the paragraphs [0112.0.0.1] to [0115.0.0.1] see paragraphs [0112.0.0.0] to [0115.0.0.0] above.

[0776] In a preferred embodiment, the present invention relates to a process for the production of the fine chemical comprising or generating in an organism or a part thereof, preferably in a cell compartment such as a plastid or mitochondria, the expression of at least one nucleic acid molecule comprising a nucleic acid molecule selected from the group consisting of:
[0777] a) nucleic acid molecule encoding, preferably at least the mature form, of the polypeptide shown in table II, application no. 2, columns 5 and 7 or a fragment thereof, which confers an increase in the amount of the fine chemical in an organism or a part thereof;
[0778] b) nucleic acid molecule comprising, preferably at least the mature form, of the nucleic acid molecule shown in table I, application no. 2, columns 5 and 7;
[0779] c) nucleic acid molecule whose sequence can be deduced from a polypeptide sequence encoded by a nucleic acid molecule of (a) or (b) as result of the degeneracy of the genetic code and conferring an increase in the amount of the fine chemical in an organism or a part thereof;
[0780] d) nucleic acid molecule encoding a polypeptide which has at least 50% identity with the amino acid sequence of the polypeptide encoded by the nucleic acid molecule of (a) to (c) and conferring an increase in the amount of the fine chemical in an organism or a part thereof;
[0781] e) nucleic acid molecule which hybridizes with a nucleic acid molecule of (a) to (c) under stringent hybridisation conditions and conferring an increase in the amount of the fine chemical in an organism or a part thereof;
[0782] f) nucleic acid molecule encoding a polypeptide, the polypeptide being derived by substituting, deleting and/or adding one or more amino acids of the amino acid sequence of the polypeptide encoded by the nucleic acid molecules (a) to (d), preferably to (a) to (c) and conferring an increase in the amount of the fine chemical in an organism or a part thereof;
[0783] g) nucleic acid molecule encoding a fragment or an epitope of a polypeptide which is encoded by one of the nucleic acid molecules of (a) to (e), preferably to (a) to (c) and conferring an increase in the amount of the fine chemical in an organism or a part thereof;
[0784] h) nucleic acid molecule comprising a nucleic acid molecule which is obtained by amplifying nucleic acid molecules from a cDNA library or a genomic library using the primers shown in table III, application no. 2, column 7 and conferring an increase in the amount of the fine chemical in an organism or a part thereof;
[0785] i) nucleic acid molecule encoding a polypeptide which is isolated, e.g. from an expression library, with the aid of monoclonal antibodies against a polypeptide encoded by one of the nucleic acid molecules of (a) to (h), preferably to (a) to (c), and conferring an increase in the amount of the fine chemical in an organism or a part thereof;
[0786] j) nucleic acid molecule which encodes a polypeptide comprising the consensus sequence shown in table IV, application no. 2, column 7 and conferring an increase in the amount of the fine chemical in an organism or a part thereof;
[0787] k) nucleic acid molecule comprising one or more of the nucleic acid molecule encoding the amino acid sequence of a polypeptide encoding a domain of the polypeptide shown in table II, application no. 2, columns 5 and 7 and conferring an increase in the amount of the fine chemical in an organism or a part thereof; and
[0788] l) nucleic acid molecule which is obtainable by screening a suitable library under stringent conditions with a probe comprising one of the sequences of the nucleic acid molecule of (a) to (k), preferably to (a) to (c), or with a fragment of at least 15 nt, preferably 20 nt, 30 nt, 50 nt, 100 nt, 200 nt or 500 nt of the nucleic acid molecule characterized in (a) to (k), preferably to (a) to (c), and conferring an increase in the amount of the fine chemical in an organism or a part thereof;
   or which comprises a sequence which is complementary thereto.

[0789] In one embodiment, the nucleic acid molecule used in the process of the invention distinguishes over the sequence indicated in table I A, application no. 2, columns 5 and 7 by one or more nucleotides. In one embodiment, the nucleic acid molecule used in the process of the invention does not consist of the sequence indicated in table I A, application no. 2, columns 5 and 7. In one embodiment, the nucleic acid molecule used in the process of the invention is less than 100%, 99.999%, 99.99%, 99.9% or 99% identical to a sequence indicated in table I A, application no. 2, columns 5 and 7. In another embodiment, the nucleic acid molecule does not encode a polypeptide of a sequence indicated in table II A, application no. 2, columns 5 and 7.

[0790] In one embodiment, the nucleic acid molecule used in the process of the invention distinguishes over the sequence indicated in table I B, application no. 2, columns 5 and 7, by one or more nucleotides. In one embodiment, the nucleic acid molecule used in the process of the invention does not consist of the sequence indicated in table I B, application no. 2, columns 5 and 7. In one embodiment, the nucleic acid molecule used in the process of the invention is less than 100%, 99.999%, 99.99%, 99.9% or 99% identical to a sequence indicated in table I B, application no. 2, columns 5 and 7. In another embodiment, the nucleic acid molecule does not encode a polypeptide of a sequence indicated in table II B, application no. 2, columns 5 and 7.

[0791] In one embodiment, the nucleic acid molecule used in the process distinguishes over the sequence shown in table I, application no. 2, columns 5 and 7 by one or more nucleotides or does not consist of the sequence shown in table I, application no. 2, columns 5 and 7. In one embodiment, the nucleic acid molecule of the present invention is less than 100%, 99.999%, 99.99%, 99.9% or 99% identical to the sequence shown in table I, application no. 2, columns 5 and 7. In another embodiment, the nucleic acid molecule does not encode a polypeptide of the sequence shown in table II, application no. 2, columns 5 and 7.

[0792] for the disclosure of the paragraphs [0118.0.0.1] to [0120.0.0.1] see paragraphs [0118.0.0.0] to [0120.0.0.0] above.

[0793] Nucleic acid molecules with the sequence shown in table I, application no. 2, columns 5 and 7, nucleic acid molecules which are derived from the amino acid sequences shown in table II, application no. 2, columns 5 and 7 or from polypeptides comprising the consensus sequence shown in table IV, application no. 2, column 7, or their derivatives or homologues encoding polypeptides with the enzymatic or biological activity of a protein as shown in table II, application no. 2, column 3 or conferring the fine chemical increase after increasing its expression or activity are advantageously increased in the process according to the invention by expression either in the cytsol or in an organelle such as a plastid or mitochondria or both, preferably in plastids.

[0794] for the disclosure of this paragraph see paragraph [0122.0.0.0] above.

[0795] Nucleic acid molecules, which are advantageous for the process according to the invention and which encode polypeptides with the activity of a protein as shown in table II, application no. 2, column 3 can be determined from generally accessible databases.

[0796] for the disclosure of this paragraph see paragraph [0124.0.0.0] above.

[0797] The nucleic acid molecules used in the process according to the invention take the form of isolated nucleic acid sequences, which encode polypeptides with the activity of the proteins as shown in table II, application no. 2, column 3 and conferring the fine chemical increase by expression either in the cytsol or in an organelle such as a plastid or mitochondria or both, preferably in plastids.

[0798] for the disclosure of the paragraphs [0126.0.0.1] to [0133.0.0.1] see paragraphs [0126.0.0.0] to [0133.0.0.0] above.

[0799] However, it is also possible to use artificial sequences, which differ in one or more bases from the nucleic acid sequences found in organisms, or in one or more amino acid molecules from polypeptide sequences found in organisms, in particular from the polypeptide sequences shown in table II, application no. 2, columns 5 and 7 or the functional homologues thereof as described herein, preferably conferring above-mentioned activity, i.e. conferring the fine chemical increase after increasing its activity, e.g. after increasing the activity of a protein as shown in table II, column 3 by for example expression either in the cytsol or in an organelle such as a plastid or mitochondria or both, preferably in plastids.

[0800] for the disclosure of the paragraphs [0135.0.0.1] to [0140.0.0.1] see paragraphs [0135.0.0.0] to [0140.0.0.0] above.

[0801] Synthetic oligonucleotide primers for the amplification, e.g. as shown in table III, application no. 2, column 7, by means of polymerase chain reaction can be generated on the basis of a sequence shown herein, for example the sequence shown in table I, application no. 2, columns 5 and 7 or the sequences derived from table II, application no. 2, columns 5 and 7.

[0802] Moreover, it is possible to identify conserved regions from various organisms by carrying out protein sequence alignments with the polypeptide used in the process of the invention, in particular with sequences of the polypeptide of the invention, from which conserved regions, and in turn, degenerate primers can be derived. Conserved regions are those, which show a very little variation in the amino acid in one particular position of several homologs from different origin. The consensus sequence shown in table IV, application no. 2, column 7 is derived from said alignments.

[0803] Degenerated primers can then be utilized by PCR for the amplification of fragments of novel proteins having above-mentioned activity, e.g. conferring the increase of the fine chemical after increasing the expression or activity or having the activity of a protein as shown in table II, application no. 2, column 3 or further functional homologs of the polypeptide of the invention from other organisms.

[0804] for the disclosure of the paragraphs [0144.0.0.1] to [0151.0.0.1] see paragraphs [0144.0.0.0] to [0151.0.0.0] above.

[0805] Polypeptides having above-mentioned activity, i.e. conferring the fine chemical increase, derived from other organisms, can be encoded by other DNA sequences which hybridize to the sequences shown in table I, application no. 2, columns 5 and 7, preferably shown in table I B, application no. 2, columns 5 and 7 under relaxed hybridization conditions and which code on expression for peptides having the threonine increasing activity.

[0806] for the disclosure of the paragraphs [0153.0.0.1] to [0159.0.0.1] see paragraphs [0153.0.0.0] to [0159.0.0.0] above.

[0807] Further, the nucleic acid molecule of the invention comprises a nucleic acid molecule, which is a complement of one of the nucleotide sequences of above mentioned nucleic acid molecules or a portion thereof. A nucleic acid molecule which is complementary to one of the nucleotide sequences shown in table I, application no. 2, columns 5 and 7, preferably shown in table I B, application no. 2, columns 5 and 7 is one which is sufficiently complementary to one of the nucleotide sequences shown in table I, application no. 2, columns 5 and 7, preferably shown in table I B, application no. 2, columns 5 and 7 such that it can hybridize to one of the nucleotide sequences shown in table I, application no. 2, columns 5 and 7, preferably shown in table I B, application no. 2, columns 5 and 7, thereby forming a stable duplex. Preferably, the hybridisation is performed under stringent hybridization conditions. However, a complement of one of the herein disclosed sequences is preferably a sequence complement thereto according to the base pairing of nucleic acid molecules well known to the skilled person. For example, the bases A and G undergo base pairing with the bases T and U or C, resp. and visa versa. Modifications of the bases can influence the base-pairing partner.

[0808] The nucleic acid molecule of the invention comprises a nucleotide sequence which is at least about 30%, 35%, 40% or 45%, preferably at least about 50%, 55%, 60% or 65%, more preferably at least about 70%, 80%, or 90%, and even more preferably at least about 95%, 97%, 98%, 99% or more homologous to a nucleotide sequence shown in table I, application no. 2, columns 5 and 7, preferably shown in table I B, application no. 2, columns 5 and 7, or a portion thereof and preferably has above mentioned activity, in particular having a fine chemical increasing activity after increasing the activity or an activity of a gene product as shown in table II, application no. 2, column 3 by for example expression either in the cytsol or in an organelle such as a plastid or mitochondria or both, preferably in plastids.

[0809] The nucleic acid molecule of the invention comprises a nucleotide sequence which hybridizes, preferably hybridizes under stringent conditions as defined herein, to one of the nucleotide sequences shown in table I, application no. 2, columns 5 and 7, preferably shown in table I B, application no. 2, columns 5 and 7, or a portion thereof and encodes a protein having above-mentioned activity, e.g. conferring of a threonine increase by for example expression either in the cytsol or in an organelle such as a plastid or mitochondria or both, preferably in plastids, and optionally, the activity of a protein as shown in table II, application no. 2, column 3.

[0810] Moreover, the nucleic acid molecule of the invention can comprise only a portion of the coding region of one of the sequences shown in table I, application no. 2, columns 5 and 7, preferably shown in table I B, application no. 2, columns 5 and 7, for example a fragment which can be used as a probe or primer or a fragment encoding a biologically active portion of the polypeptide of the present invention or of a polypeptide used in the process of the present invention, i.e. having above-mentioned activity, e.g. conferring an increase of the fine chemical if its activity is increased by for example expression either in the cytsol or in an organelle such as a plastid or mitochondria or both, preferably in plastids. The nucleotide sequences determined from the cloning of the present protein-according-to-the-invention-encoding gene allows for the generation of probes and primers designed for use in identifying and/or cloning its homologues in other cell types and organisms. The probe/primer typically comprises substantially purified oligonucleotide. The oligonucleotide typically comprises a region of nucleotide sequence that hybridizes under stringent conditions to at least about 12, 15 preferably about 20 or 25, more preferably about 40, 50 or 75 consecutive nucleotides of a sense strand of one of the sequences set forth, e.g., in table I, application no. 2, columns 5 and 7, an anti-sense sequence of one of the sequences, e.g., set forth in table I, application no. 2, columns 5 and 7, preferably shown in table I B, application no. 2, columns 5 and 7, or naturally occurring mutants thereof. Primers based on a nucleotide of invention can be used in PCR reactions to clone homologues of the polypeptide of the invention or of the polypeptide used in the process of the invention, e.g. as the primers described in the examples of the present invention, e.g. as shown in the examples. A PCR with the primers shown in table III, application no. 2, column 7 will result in a fragment of the gene product as shown in table II, column 3.

[0811] for the disclosure of this paragraph see paragraph [0164.0.0.0] above.

[0812] The nucleic acid molecule of the invention encodes a polypeptide or portion thereof which includes an amino acid sequence which is sufficiently homologous to the amino acid sequence shown in table II, application no. 2, columns 5 and 7 such that the protein or portion thereof maintains the ability to participate in the fine chemical production, in particular a threonine increasing the activity as mentioned above or as described in the examples in plants or microorganisms is comprised.

[0813] As used herein, the language “sufficiently homologous” refers to proteins or portions thereof which have amino acid sequences which include a minimum number of identical or equivalent amino acid residues (e.g., an amino acid residue which has a similar side chain as an amino acid residue in one of the sequences of the polypeptide of the present invention) to an amino acid sequence shown in table II, application no. 2, columns 5 and 7 such that the protein or portion thereof is able to participate in the increase of the fine chemical production. For examples having the activity of a protein as shown in table II, column 3 and as described herein.

[0814] In one embodiment, the nucleic acid molecule of the present invention comprises a nucleic acid that encodes a portion of the protein of the present invention. The protein is at least about 30%, 35%, 40%, 45% or 50%, preferably at least about 55%, 60%, 65% or 70%, and more preferably at least about 75%, 80%, 85%, 90%, 91%, 92%, 93% or 94% and most preferably at least about 95%, 97%, 98%, 99% or more homologous to an entire amino acid sequence of table II, application no. 2, columns 5 and 7 and having above-mentioned activity, e.g. conferring preferably the increase of the fine chemical by for example expression either in the cytsol or in an organelle such as a plastid or mitochondria or both, preferably in plastids.

[0815] for the disclosure of the paragraphs [0168.0.0.1] and [0169.0.0.1] see paragraphs [0168.0.0.0] to [0169.0.0.0] above.

[0816] The invention further relates to nucleic acid molecules that differ from one of the nucleotide sequences shown in table I, application no. 2, columns 5 and 7 (and portions thereof) due to degeneracy of the genetic code and thus encode a polypeptide of the present invention, in particular a polypeptide having above mentioned activity, e.g. conferring an increase in the fine chemical in a organism, e.g. as that polypeptides depicted by the sequence shown in table II, application no. 2, columns 5 and 7 or the functional homologues. Advantageously, the nucleic acid molecule of the invention comprises, or in an other embodiment has, a nucleotide sequence encoding a protein comprising, or in an other embodiment having, an amino acid sequence shown in table II, application no. 2, columns 5 and 7 or the functional homologues. In a still further embodiment, the nucleic acid molecule of the invention encodes a full length protein which is substantially homologous to an amino acid sequence shown in table II, application no. 2, columns 5 and 7 or the functional homologues. However, in a preferred embodiment, the nucleic acid molecule of the present invention does not consist of the sequence shown in table I, application no. 2, columns 5 and 7, preferably as indicated in table I A, application no. 2, columns 5 and 7. Preferably the nucleic acid molecule of the invention is a functional homologue or identical to a nucleic acid molecule indicated in table I B, application no. 2, columns 5 and 7.

[0817] for the disclosure of the paragraphs [0171.0.0.1] to [0173.0.0.1] see paragraphs [0171.0.0.0] to [0173.0.0.0] above.

[0818] Accordingly, in another embodiment, a nucleic acid molecule of the invention is at least 15, 20, 25 or 30 nucleotides in length. Preferably, it hybridizes under stringent conditions to a nucleic acid molecule comprising a nucleotide sequence of the nucleic acid molecule of the present invention or used in the process of the present invention, e.g. comprising the sequence shown in table I, application no. 2, columns 5 and 7. The nucleic acid molecule is preferably at least 20, 30, 50, 100, 250 or more nucleotides in length.

[0819] for the disclosure of this paragraph see paragraph [0175.0.0.0] above.

[0820] Preferably, nucleic acid molecule of the invention that hybridizes under stringent conditions to a sequence shown in table I, application no. 2, columns 5 and 7 corresponds to a naturally-occurring nucleic acid molecule of the invention. As used herein, a “naturally-occurring” nucleic acid molecule refers to an RNA or DNA molecule having a nucleotide sequence that occurs in nature (e.g., encodes a natural protein).

[0821] Preferably, the nucleic acid molecule encodes a natural protein having abovementioned activity, e.g. conferring the fine chemical increase after increasing the expression or activity thereof or the activity of a protein of the invention or used in the process of the invention by for example expression the nucleic acid sequence of the gene product in the cytsol and/or in an organelle such as a plastid or mitochondria, preferably in plastids.

[0822] for the disclosure of this paragraph see paragraph [0177.0.0.0] above.

[0823] For example, nucleotide substitutions leading to amino acid substitutions at “non-essential” amino acid residues can be made in a sequence of the nucleic acid molecule of the invention or used in the process of the invention, e.g. shown in table I, application no. 2, columns 5 and 7.

[0824] for the disclosure of the paragraphs [0179.0.0.1] and [0180.0.0.1] see paragraphs [0179.0.0.0] and [0180.0.0.0] above.

[0825] Accordingly, the invention relates to nucleic acid molecules encoding a polypeptide having above-mentioned activity, e.g. conferring an increase in the fine chemical in an organisms or parts thereof by for example expression either in the cytsol or in an organelle such as a plastid or mitochondria or both, preferably in plastids that contain changes in amino acid residues that are not essential for said activity. Such polypeptides differ in amino acid sequence from a sequence contained in the sequences shown in table II, application no. 2, columns 5 and 7, preferably shown in table II A, application no. 2, columns 5 and 7 yet retain said activity described herein. The nucleic acid molecule can comprise a nucleotide sequence encoding a polypeptide, wherein the polypeptide comprises an amino acid sequence at least about 50% identical to an amino acid sequence shown in table II, application no. 2, columns 5 and 7, preferably shown in table II A, application no. 2, columns 5 and 7 and is capable of participation in the increase of production of the fine chemical after increasing its activity, e.g. its expression by for example expression either in the cytsol or in an organelle such as a plastid or mitochondria or both, preferably in plastids. Preferably, the protein encoded by the nucleic acid molecule is at least about 60% identical to the sequence shown in table II, application no. 2, columns 5 and 7, preferably shown in table II A, application no. 2, columns 5 and 7, more preferably at least about 70% identical to one of the sequences shown in table II, application no. 2, columns 5 and 7, preferably shown in table II A, application no. 2, columns 5 and 7, even more preferably at least about 80%, 90%, 95% homologous to the sequence shown in table II, application no. 2, columns 5 and 7, and most preferably at least about 96%, 97%, 98%, or 99% identical to the sequence shown in table II, application no. 2, columns 5 and 7, preferably shown in table II A, application no. 2, columns 5 and 7.

[0826] for the disclosure of the paragraphs [0182.0.0.1] to [0188.0.0.1] see paragraphs [0182.0.0.0] to [0188.0.0.0] above.

[0827] Functional equivalents derived from one of the polypeptides as shown in table II, application no. 2, columns 5 and 7, preferably shown in table II B, application no. 2, columns 5 and 7 resp., according to the invention by substitution, insertion or deletion have at least 30%, 35%, 40%, 45% or 50%, preferably at least 55%, 60%, 65% or 70% by preference at least 80%, especially preferably at least 85% or 90%, 91%, 92%, 93% or 94%, very especially preferably at least 95%, 97%, 98% or 99% homology with one of the polypeptides as shown in table II, application no. 2, columns 5 and 7, preferably shown in table II B, application no. 2, columns 5 and 7 resp., according to the invention and are distinguished by essentially the same properties as the polypeptide as shown in table II, application no. 2, columns 5 and 7, preferably shown in table II B, application no. 2, columns 5 and 7.

[0828] Functional equivalents derived from the nucleic acid sequence as shown in table I, application no. 2, columns 5 and 7, preferably shown in table I B, application no. 2, columns 5 and 7 resp., according to the invention by substitution, insertion or deletion have at least 30%, 35%, 40%, 45% or 50%, preferably at least 55%, 60%, 65% or 70% by preference at least 80%, especially preferably at least 85% or 90%, 91%, 92%, 93% or 94%, very especially preferably at least 95%, 97%, 98% or 99% homology with one of the polypeptides as shown in table II, application no. 2, columns 5 and 7, preferably shown in table II B, application no. 2, columns 5 and 7 resp., according to the invention and encode polypeptides having essentially the same properties as the polypeptide as shown in table II, application no. 2, columns 5 and 7, preferably shown in table II B, application no. 2, columns 5 and 7.

[0829] for the disclosure of this paragraph see paragraph [0191.0.0.0] above.

[0830] A nucleic acid molecule encoding an homologous to a protein sequence of table II, application no. 2, columns 5 and 7, preferably shown in table II B, application no. 2, columns 5 and 7 resp., can be created by introducing one or more nucleotide substitutions, additions or deletions into a nucleotide sequence of the nucleic acid molecule of the present invention, in particular of table I, application no. 2, columns 5 and 7, preferably shown in table I B, application no. 2, columns 5 and 7 resp., such that one or more amino acid substitutions, additions or deletions are introduced into the encoded protein. Mutations can be introduced into the encoding sequences of table I, application no. 2, columns 5 and 7, preferably shown in table I B, application no. 2, columns 5 and 7 resp., by standard techniques, such as site-directed mutagenesis and PCR-mediated mutagenesis.

[0831] for the disclosure of the paragraphs [0193.0.0.1] to [0196.0.0.1] see paragraphs [0193.0.0.0] to [0196.0.0.0] above.

[0832] Homologues of the nucleic acid sequences used, with the sequence shown in table I, application no. 2, columns 5 and 7, preferably shown in table I B, application no. 2, columns 5 and 7, comprise also allelic variants with at least approximately 30%, 35%, 40% or 45% homology, by preference at least approximately 50%, 60% or 70%, more preferably at least approximately 90%, 91%, 92%, 93%, 94% or 95% and even more preferably at least approximately 96%, 97%, 98%, 99% or more homology with one of the nucleotide sequences shown or the abovementioned derived nucleic acid sequences or their homologues, derivatives or analogues or parts of these. Allelic variants encompass in particular functional variants which can be obtained by deletion, insertion or substitution of nucleotides from the sequences shown, preferably from table I, application no. 2, columns 5 and 7, preferably shown in table I B, application no. 2, columns 5 and 7, or from the derived nucleic acid sequences, the intention being, however, that the enzyme activity or the biological activity of the resulting proteins synthesized is advantageously retained or increased.

[0833] In one embodiment of the present invention, the nucleic acid molecule of the invention or used in the process of the invention comprises the sequences shown in any of the table I, application no. 2, columns 5 and 7, preferably shown in table I B, application no. 2, columns 5 and 7. It is preferred that the nucleic acid molecule comprises as little as possible other nucleotides not shown in any one of table I, application no. 2, columns 5 and 7, preferably shown in table I B, application no. 2, columns 5 and 7. In one embodiment, the nucleic acid molecule comprises less than 500, 400, 300, 200, 100, 90, 80, 70, 60, 50 or 40 further nucleotides. In a further embodiment, the nucleic acid molecule comprises less than 30, 20 or 10 further nucleotides. In one embodiment, the nucleic acid molecule use in the process of the invention is identical to the sequences shown in table I, application no. 2, columns 5 and 7, preferably shown in table I B, application no. 2, columns 5 and 7.

[0834] Also preferred is that the nucleic acid molecule used in the process of the invention encodes a polypeptide comprising the sequence shown in table II, application no. 2, columns 5 and 7, preferably shown in table II B, application no. 2, columns 5 and 7. In one embodiment, the nucleic acid molecule encodes less than 150, 130, 100, 80, 60, 50, 40 or 30 further amino acids. In a further embodiment, the encoded polypeptide comprises less than 20, 15, 10, 9, 8, 7, 6 or 5 further amino acids. In one embodiment used in the inventive process, the encoded polypeptide is identical to the sequences shown in table II, application no. 2, columns 5 and 7, preferably shown in table II B, application no. 2, columns 5 and 7.

[0835] In one embodiment, the nucleic acid molecule of the invention or used in the process encodes a polypeptide comprising the sequence shown in table II, application no. 2, columns 5 and 7, preferably shown in table II B, application no. 2, columns 5 and 7 comprises less than 100 further nucleotides. In a further embodiment, said nucleic acid molecule comprises less than 30 further nucleotides. In one embodiment, the nucleic acid molecule used in the process is identical to a coding sequence of the sequences shown in table I, application no. 2, columns 5 and 7, preferably shown in table I B, application no. 2, columns 5 and 7.

[0836] Polypeptides (=proteins), which still have the essential biological or enzymatic activity of the polypeptide of the present invention conferring an increase of the fine chemical i.e. whose activity is essentially not reduced, are polypeptides with at least 10% or 20%, by preference 30% or 40%, especially preferably 50% or 60%, very especially preferably 80% or 90 or more of the wild type biological activity or enzyme activity, advantageously, the activity is essentially not reduced in comparison with the activity of a polypeptide shown in table II, application no. 2, columns 5 and 7 expressed under identical conditions.

[0837] Homologues of table I, application no. 2, columns 5 and 7 or of the derived sequences of table II, application no. 2, columns 5 and 7 also mean truncated sequences, cDNA, single-stranded DNA or RNA of the coding and noncoding DNA sequence. Homologues of said sequences are also understood as meaning derivatives, which comprise noncoding regions such as, for example, UTRs, terminators, enhancers or promoter variants. The promoters upstream of the nucleotide sequences stated can be modified by one or more nucleotide substitution(s), insertion(s) and/or deletion(s) without, however, interfering with the functionality or activity either of the promoters, the open reading frame (=ORF) or with the 3′-regulatory region such as terminators or other 3′ regulatory regions, which are far away from the ORF. It is furthermore possible that the activity of the promoters is increased by modification of their sequence, or that they are replaced completely by more active promoters, even promoters from heterologous organisms. Appropriate promoters are known to the person skilled in the art and are mentioned herein below.

[0838] for the disclosure of the paragraphs [0203.0.0.1] to [0215.0.0.1] see paragraphs [0203.0.0.0] to [0215.0.0.0] above.

[0839] Accordingly, in one embodiment, the invention relates to a nucleic acid molecule, which comprises a nucleic acid molecule selected from the group consisting of:
[0840] a) nucleic acid molecule encoding, preferably at least the mature form, of the polypeptide shown in table II, application no. 2, columns 5 and 7; preferably shown in Table II B application no. 2, columns 5 and 7, or a fragment thereof conferring an increase in the amount of the fine chemical in an organism or a part thereof
[0841] b) nucleic acid molecule comprising, preferably at least the mature form, of the nucleic acid molecule shown in table I, application no. 2, columns 5 and 7 preferably shown in Table I B application no. 2, columns 5 and 7, or a fragment thereof conferring an increase in the amount of the fine chemical in an organism or a part thereof;
[0842] c) nucleic acid molecule whose sequence can be deduced from a polypeptide sequence encoded by a nucleic acid molecule of (a) or (b) as result of the degeneracy of the genetic code and conferring an increase in the amount of the fine chemical in an organism or a part thereof;
[0843] d) nucleic acid molecule encoding a polypeptide whose sequence has at least 50% identity with the amino acid sequence of the polypeptide encoded by the nucleic acid molecule of (a) to (c) and conferring an increase in the amount of the fine chemical in an organism or a part thereof;
[0844] e) nucleic acid molecule which hybridizes with a nucleic acid molecule of (a) to (c) under stringent hybridisation conditions and conferring an increase in the amount of the fine chemical in an organism or a part thereof;
[0845] f) nucleic acid molecule encoding a polypeptide, the polypeptide being derived by substituting, deleting and/or adding one or more amino acids of the amino acid sequence of the polypeptide encoded by the nucleic acid molecules (a) to (d), preferably to (a) to (c), and conferring an increase in the amount of the fine chemical in an organism or a part thereof;
[0846] g) nucleic acid molecule encoding a fragment or an epitope of a polypeptide which is encoded by one of the nucleic acid molecules of (a) to (e), preferably to (a) to (c) and conferring an increase in the amount of the fine chemical in an organism or a part thereof;
[0847] h) nucleic acid molecule comprising a nucleic acid molecule which is obtained by amplifying a cDNA library or a genomic library using the primers in table application no. 2, column 7 and conferring an increase in the amount of the fine chemical in an organism or a part thereof;
[0848] i) nucleic acid molecule encoding a polypeptide which is isolated, e.g. from a expression library, with the aid of monoclonal antibodies against a polypeptide encoded by one of the nucleic acid molecules of (a) to (g), preferably to (a) to (c) and conferring an increase in the amount of the fine chemical in an organism or a part thereof;
[0849] j) nucleic acid molecule which encodes a polypeptide comprising the consensus sequence shown in table IV, application no. 2, columns 7 and conferring an increase in the amount of the fine chemical in an organism or a part thereof;
[0850] k) nucleic acid molecule encoding the amino acid sequence of a polypeptide encoding a domain of the polypeptide shown in table II, application no. 2, columns 5 and 7 and conferring an increase in the amount of the fine chemical in an organism or a part thereof; and
[0851] l) nucleic acid molecule which is obtainable by screening a suitable nucleic acid library under stringent hybridization conditions with a probe comprising one of the sequences of the nucleic acid molecule of (a) to (k) or with a fragment of at least 15 nt, preferably 20 nt, 30 nt, 50 nt, 100 nt, 200 nt or 500 nt of the nucleic acid molecule characterized in (a) to (h) or of the nucleic acid molecule shown in table I, application no. 2, columns 5 and 7 or a nucleic acid molecule encoding, preferably at least the mature form of, the polypeptide shown in table II, application no. 2, columns 5 and 7, and conferring an increase in the amount of the fine chemical in an organism or a part thereof; or which encompasses a sequence which is complementary thereto;
   whereby, preferably, the nucleic acid molecule according to (a) to (l) distinguishes over the sequence depicted in table I A and/or I B, application no. 2, columns 5 and 7 by one or more nucleotides. In one embodiment, the nucleic acid molecule of the invention does not consist of the sequence shown in table I A and/or I B, application no. 2, columns 5 and 7. In an other embodiment, the nucleic acid molecule of the present invention is at least 30% identical and less than 100%, 99.999%, 99.99%, 99.9% or 99% identical to the sequence shown in table I A and/or I B, application no. 2, columns 5 and 7. In a further embodiment the nucleic acid molecule does not encode the polypeptide sequence shown in table II A and/or II B, application no. 2, columns 5 and 7. Accordingly, in one embodiment, the nucleic acid molecule of the present invention encodes in one embodiment a polypeptide which differs at least in one or more amino acids from the polypeptide shown in table II A and/or II B, application no. 2, columns 5 and 7 does not encode a protein of the sequence shown in table II A and/or II B, application no. 2, columns 5 and 7. Accordingly, in one embodiment, the protein encoded by a sequence of a nucleic acid according to (a) to (l) does not consist of the sequence shown in table I A and/or I B, application no. 2, columns 5 and 7. In a further embodiment, the protein of the present invention is at least 30% identical to protein sequence depicted in table II A and/or II B, application no. 2, columns 5 and 7 and less than 100%, preferably less than 99.999%, 99.99% or 99.9%, more preferably less than 99%, 985, 97%, 96% or 95% identical to the sequence shown in table II A and/or II B, application no. 2, columns 5 and 7.

[0852] for the disclosure of the paragraphs [0217.0.0.1] to [0226.0.0.1] see paragraphs [0217.0.0.0] to [0226.0.0.0] above.

[0853] In general, vector systems preferably also comprise further cis-regulatory regions such as promoters and terminators and/or selection markers by means of which suitably transformed organisms can be identified. While vir genes and

[0854] T-DNA sequences are located on the same vector in the case of cointegrated vector systems, binary systems are based on at least two vectors, one of which bears vir genes, but no T-DNA, while a second one bears T-DNA, but no vir gene. Owing to this fact, the last-mentioned vectors are relatively small, easy to manipulate and capable of replication in E. coli and in Agrobacterium. These binary vectors include vectors from the series pBIB-HYG, pPZP, pBecks, pGreen. Those which are preferably used in accordance with the invention are Bin19, pBI101, pBinAR, pGPTV and pCAMBIA. An overview of binary vectors and their use is given by Hellens et al, Trends in Plant Science (2000) 5, 446-451. The vectors are preferably modified in such a manner, that they already contain the nucleic acid coding for the transitpeptide and that the nucleic acids of the invention, preferentially the nucleic acid sequences encoding the polypeptides shown in table II, application no. 2, columns 5 and 7 can be cloned 3″ prime to the transitpeptide encoding sequence, leading to a functional preprotein, which is directed to the plastids and which means that the mature protein fulfills its biological activity.

[0855] for the disclosure of the paragraphs [0228.0.0.1] to [0239.0.0.1] see paragraphs [0228.0.0.0] to [0239.0.0.0] above.

[0856] In addition to the sequence mentioned in table I, application no. 2, columns 5 and 7 or its derivatives, it is advantageous additionally to express and/or mutate further genes in the organisms. Especially advantageously, additionally at least one further gene of the amino acid biosynthetic pathway such as for L-lysine, L-threonine and/or L-methionine is expressed in the organisms such as plants or microorganisms. It is also possible that the regulation of the natural genes has been modified advantageously so that the gene and/or its gene product is no longer subject to the regulatory mechanisms which exist in the organisms. This leads to an increased synthesis of the amino acids desired since, for example, feedback regulations no longer exist to the same extent or not at all. In addition it might be advantageously to combine the nucleic acids sequences of the invention containing the sequences shown in table I, application no. 2, columns 5 and 7 with genes which generally support or enhances to growth or yield of the target organism, for example genes which lead to faster growth rate of microorganisms or genes which produces stress-, pathogen, or herbicide resistant plants.

[0857] for the disclosure of the paragraphs [0241.0.0.1] to [0264.0.0.1] see paragraphs [0241.0.0.0] to [0264.0.0.0] above.

[0858] Other preferred sequences for use in operable linkage in gene expression constructs are targeting sequences, which are required for targeting the gene product into specific cell compartments (for a review, see Kermode, Crit. Rev. Plant Sci. 15, 4 (1996) 285-423 and references cited therein), for example into the vacuole, the nucleus, all types of plastids, such as amyloplasts, chloroplasts, chromoplasts, the extracellular space, the mitochondria, the endoplasmic reticulum, elaioplasts, peroxisomes, glycosomes, and other compartments of cells or extracellular preferred are sequences, which are involved in targeting to plastids as mentioned above. Sequences, which must be mentioned in this context are, in particular, the signal-peptide- or transit-peptide-encoding sequences which are known per se. For example, plastid-transit-peptide-encoding sequences enable the targeting of the expression product into the plastids of a plant cell. Targeting sequences are also known for eukaryotic and to a lower extent for prokaryotic organisms and can advantageously be operable linked with the nucleic acid molecule of the present invention as shown in table I, application no. 2, columns 5 and 7 and described herein to achieve an expression in one of said compartments or extracellular.

[0859] for the disclosure of the paragraphs [0266.0.0.1] to [0287.0.0.1] see paragraphs [0266.0.0.0] to [0287.0.0.0] above.

[0860] Accordingly, one embodiment of the invention relates to a vector where the nucleic acid molecule according to the invention is linked operably to regulatory sequences which permit the expression in a prokaryotic or eukaryotic or in a prokaryotic and eukaryotic host. A further preferred embodiment of the invention relates to a vector in which a nucleic acid sequence encoding one of the polypeptides shown in table II, application no. 2, columns 5 and 7 or their homologs is functionally linked to a plastidial targeting sequence. A further preferred embodiment of the invention relates to a vector in which a nucleic acid sequence encoding one of the polypeptides shown in table II, application no. 2, columns 5 and 7 or their homologs is functionally linked to a regulatory sequences which permit the expression in plastids.

[0861] for the disclosure of the paragraphs [0289.0.0.1] to [0296.0.0.1] see paragraphs [0289.0.0.0] to [0296.0.0.0] above.

[0862] Moreover, native polypeptide conferring the increase of the fine chemical in an organism or part thereof can be isolated from cells (e.g., endothelial cells), for example using the antibody of the present invention as described below, in particular, an anti-b0760, anti-b1062, anti-b1277, anti-b2040, anti-b2388, anti-b3443, anti-b4039, anti-b1131, anti-b1264, anti-b2066, anti-b2779, anti-b3213, anti-b3429, anti-YDR430C, anti-YMR262W, anti-YOR350C, anti-YBL082C, anti-YDR204W, anti-YKR043C, anti-YLR153C, anti-YLR174W and/or anti-YNL241C protein antibody or an antibody against polypeptides as shown in table II, application no. 2, columns 5 and 7, which can be produced by standard techniques utilizing the polypeptide of the present invention or fragment thereof, i.e., the polypeptide of this invention. Preferred are monoclonal antibodies.

[0863] for the disclosure of this paragraph see paragraph [0298.0.0.0] above.

[0864] In one embodiment, the present invention relates to a polypeptide having the sequence shown in table II, application no. 2, columns 5 and 7 or as coded by the nucleic acid molecule shown in table I, application no. 2, columns 5 and 7 or functional homologues thereof.

[0865] In one advantageous embodiment, in the method of the present invention the activity of a polypeptide is increased comprising or consisting of the consensus sequence shown in table IV, application no. 2, columns 7 and in one another embodiment, the present invention relates to a polypeptide comprising or consisting of the consensus sequence shown in table IV, application no. 2, columns 7 whereby 20 or less, preferably 15 or 10, preferably 9, 8, 7, or 6, more preferred 5 or 4, even more preferred 3, even more preferred 2, even more preferred 1, most preferred 0 of the amino acids positions indicated can be replaced by any amino acid.

[0866] for the disclosure of the paragraphs [0301.0.0.1] to [0304.0.0.1] see paragraphs [0301.0.0.0] to [0304.0.0.0] above.

[0867] In one advantageous embodiment, the method of the present invention comprises the increasing of a polypeptide comprising or consisting of plant or microorganism specific consensus sequences.

In one embodiment, said polypeptide of the invention distinguishes over the sequence shown in table II A and/or II B, application no. 2, columns 5 and 7 by one or more amino acids. In one embodiment, polypeptide distinguishes form the sequence shown in table II A and/or II B, application no. 2, columns 5 and 7 by more than 5, 6, 7, 8 or 9 amino acids, preferably by more than 10, 15, 20, 25 or 30 amino acids, even more preferred are more than 40, 50, or 60 amino acids and, preferably, the sequence of the polypeptide of the invention distinguishes from the sequence shown in table II, application no. 2, columns 5 and 7 by not more than 80% or 70% of the amino acids, preferably not more than 60% or 50%, more preferred not more than 40% or 30%, even more preferred not more than 20% or 10%. In an other embodiment, said polypeptide of the invention does not consist of the sequence shown in table II, application no. 2, columns 5 and 7.

[0868] for the disclosure of this paragraph see paragraph [0306.0.0.0] above.

[0869] In one embodiment, the invention relates to polypeptide conferring an increase in the fine chemical in an organism or part being encoded by the nucleic acid molecule of the invention or used in the process of the invention and having a sequence which distinguishes from the sequence as shown in table II A and/or II B, application no. 2, columns 5 and 7 by one or more amino acids. In another embodiment, said polypeptide of the invention does not consist of the sequence shown in table II A and/or II B, application no. 2, columns 5 and 7. In a further embodiment, said polypeptide of the present invention is less than 100%, 99.999%, 99.99%, 99.9% or 99% identical. In one embodiment, said polypeptide does not consist of the sequence encoded by the nucleic acid molecules shown in table I A and/or I B, application no. 2, columns 5 and 7.

[0870] In one embodiment, the present invention relates to a polypeptide having the activity of the protein as shown in table II A and/or II B, application no. 2, column 3, which distinguishes over the sequence depicted in table II A and/or II B, application no. 2, columns 5 and 7 by one or more amino acids, preferably by more than 5, 6, 7, 8 or 9 amino acids, preferably by more than 10, 15, 20, 25 or 30 amino acids, even more preferred are more than 40, 50, or 60 amino acids but even more preferred by less than 70% of the amino acids, more preferred by less than 50%, even more preferred my less than 30% or 25%, more preferred are 20% or 15%, even more preferred are less than 10%. In a further preferred embodiment the polypeptide of the invention takes the form of a preprotein consisting of a plastidial transitpeptide joint to a polypeptide having the activity of the protein as shown in table II A and/or II B, column 3, from which the transitpeptide is preferably cleaved off upon transport of the preprotein into the organelle for example into the plastid or mitochondria.

[0871] for the disclosure of the paragraphs [0309.0.0.1] to [0311.0.0.1] see paragraphs [0309.0.0.0] to [0311.0.0.0] above.

[0872] A polypeptide of the invention can participate in the process of the present invention. The polypeptide or a portion thereof comprises preferably an amino acid sequence, which is sufficiently homologous to an amino acid sequence shown in table II A and/or II B, application no. 2, columns 5 and 7.

[0873] Further, the polypeptide can have an amino acid sequence which is encoded by a nucleotide sequence which hybridizes, preferably hybridizes under stringent conditions as described above, to a nucleotide sequence of the nucleic acid molecule of the present invention. Accordingly, the polypeptide has an amino acid sequence which is encoded by a nucleotide sequence that is at least about 35%, 40%, 45%, 50%, 55%, 60%, 65% or 70%, preferably at least about 75%, 80%, 85% or 90, and more preferably at least about 91%, 92%, 93%, 94% or 95%, and even more preferably at least about 96%, 97%, 98%, 99% or more homologous to one of the amino acid sequences as shown in table II A and/or II B, application no. 2, columns 5 and 7. The preferred polypeptide of the present invention preferably possesses at least one of the activities according to the invention and described herein. A preferred polypeptide of the present invention includes an amino acid sequence encoded by a nucleotide sequence which hybridizes, preferably hybridizes under stringent conditions, to a nucleotide sequence of table I A and/or I B, application no. 2, columns 5 and 7 or which is homologous thereto, as defined above.

[0874] Accordingly the polypeptide of the present invention can vary from the sequences shown in table II A and/or II B, application no. 2, columns 5 and 7 in amino acid sequence due to natural variation or mutagenesis, as described in detail herein. Accordingly, the polypeptide comprise an amino acid sequence which is at least about 35%, 40%, 45%, 50%, 55%, 60%, 65% or 70%, preferably at least about 75%, 80%, 85% or 90, and more preferably at least about 91%, 92%, 93%, 94% or 95%, and most preferably at least about 96%, 97%, 98%, 99% or more homologous to an entire amino acid sequence shown in table II A and/or II B, application no. 2, columns 5 and 7.

[0875] for the disclosure of this paragraph see paragraph [0315.0.0.0] above.

[0876] Biologically active portions of an polypeptide of the present invention include peptides comprising amino acid sequences derived from the amino acid sequence of the polypeptide of the present invention or used in the process of the present invention, e.g., the amino acid sequence shown in table II, application no. 2, columns 5 and 7 or the amino acid sequence of a protein homologous thereto, which include fewer amino acids than a full length polypeptide of the present invention or used in the process of the present invention or the full length protein which is homologous to an polypeptide of the present invention or used in the process of the present invention depicted herein, and exhibit at least one activity of polypeptide of the present invention or used in the process of the present invention.

[0877] for the disclosure of this paragraph see paragraph [0317.0.0.0] above.

[0878] Manipulation of the nucleic acid molecule of the invention may result in the production of a protein having differences from the wild-type protein as shown in table II, application no. 2, column 3. Differences shall mean at least one amino acid different from the sequences as shown in table II, application no. 2, column 3, preferably at least 2, 3, 4, 5, 6, 7, 8, 9 or 10 amino acids, more preferably at least 15, 20, 25, 30, 35, 40, 45 or 50 amino acids different from the sequences as shown in table II, application no. 2, column 3. These proteins may be improved in efficiency or activity, may be present in greater numbers in the cell than is usual, or may be decreased in efficiency or activity in relation to the wild type protein.

[0879] Any mutagenesis strategies for the polypeptide of the present invention or the polypeptide used in the process of the present invention to result in increasing said activity are not meant to be limiting; variations on these strategies will be readily apparent to one skilled in the art. Using such strategies, and incorporating the mechanisms disclosed herein, the nucleic acid molecule and polypeptide of the invention may be utilized to generate plants or parts thereof, expressing wildtype proteins or mutated proteins of the proteins as shown in table II, application no. 2, column 3. The nucleic acid molecules and polypeptide molecules of the invention are expressed such that the yield, production, and/or efficiency of production of a desired compound is improved.

[0880] for the disclosure of the paragraphs [0320.0.0.1] to [0322.0.0.1] see paragraphs [0320.0.0.0] to [0322.0.0.0] above.

[0881] In one embodiment, a protein (=polypeptide) as shown in table II, application no. 2, column 3 refers to a polypeptide having an amino acid sequence corresponding to the polypeptide of the invention or used in the process of the invention, whereas a “non-inventive protein or polypeptide” or “other polypeptide” refers to a polypeptide having an amino acid sequence corresponding to a protein which is not substantially homologous to a polypeptide of the invention, preferably which is not substantially homologous to a polypeptide or protein as shown in table II, application no. 2, column 3, e.g., a protein which does not confer the activity described herein and which is derived from the same or a different organism.

[0882] for the disclosure of the paragraphs [0324.0.0.1] to [0329.0.0.1] see paragraphs [0324.0.0.0] to [0329.0.0.0] above.

[0883] In an especially preferred embodiment, the polypeptide according to the invention furthermore also does not have the sequences of those proteins which are encoded by the sequences shown in table II, application no. 2, columns 5 and 7.

[0884] for the disclosure of the paragraphs [0331.0.0.1] to [0346.0.0.1] see paragraphs [0331.0.0.0] to [0346.0.0.0] above.

[0885] Accordingly the present invention relates to any cell transgenic for any nucleic acid characterized as part of the invention, e.g. conferring the increase of the fine chemical in a cell or an organism or a part thereof, e.g. the nucleic acid molecule of the invention, the nucleic acid construct of the invention, the antisense molecule of the invention, the vector of the invention or a nucleic acid molecule encoding the polypeptide of the invention, e.g. encoding a polypeptide having an activity as the protein as shown in table II, application no. 2, column 3. Due to the above mentioned activity the fine chemical content in a cell or an organism is increased. For example, due to modulation or manipulation, the cellular activity is increased preferably in organelles such as plastids or mitochondria, e.g. due to an increased expression or specific activity or specific targeting of the subject matters of the invention in a cell or an organism or a part thereof especially in organelles such as plastids or mitochondria. Transgenic for a polypeptide having a protein or activity means herein that due to modulation or manipulation of the genome, the activity of protein as shown in table II, application no. 2, column 3 or a protein as shown in table II, application no. 2, column 3-like activity is increased in the cell or organism or part thereof especially in organelles such as plastids or mitochondria. Examples are described above in context with the process of the invention.

[0886] for the disclosure of this paragraph see paragraph [0348.0.0.0] above.

[0887] A naturally occurring expression cassette—for example the naturally occurring combination of the promoter of the gene encoding a protein as shown in table II, application no. 2, column 3 with the corresponding encoding gene—becomes a transgenic expression cassette when it is modified by non-natural, synthetic “artificial” methods such as, for example, mutagenization. Such methods have been described (U.S. Pat. No. 5,565,350; WO 00/15815; also see above).

[0888] for the disclosure of the paragraphs [0350.0.0.1] to [0369.0.0.1] see paragraphs [0350.0.0.0] to [0369.0.0.0] above.

[0889] The fermentation broths obtained in this way, containing in particular L-methionine, L-threonine and/or L-lysine preferably L-threonine, normally have a dry matter content of from 7.5 to 25% by weight. The fermentation broth can be processed further. Depending on requirements, the biomass can be removed entirely or partly by separation methods, such as, for example, centrifugation, filtration, decantation or a combination of these methods, from the fermentation broth or left completely in it. The fermentation broth can then be thickened or concentrated by known methods, such as, for example, with the aid of a rotary evaporator, thin-film evaporator, falling film evaporator, by reverse osmosis or by nanofiltration. This concentrated fermentation broth can then be worked up by freeze-drying, spray drying, spray granulation or by other processes. for the disclosure of the paragraphs [0371.0.0.1] to [0376.0.0.1], [0376.1.0.1] and [0377.0.0.1] see paragraphs [0371.0.0.0] to [0376.0.0.0], [0376.1.0.0] and [0377.0.0.0] above.

[0890] In one embodiment, the present invention relates to a method for the identification of a gene product conferring an increase in the fine chemical production in a cell, comprising the following steps:
[0891] (a) contacting-, e.g. hybridising, the nucleic acid molecules of a sample, e.g. cells, tissues, plants or microorganisms or a nucleic acid library, which can contain a candidate gene encoding a gene product conferring an increase in the fine chemical after expression, with the nucleic acid molecule of the present invention;
[0892] (b) identifying the nucleic acid molecules, which hybridize under relaxed stringent conditions with the nucleic acid molecule of the present invention in particular to the nucleic acid molecule sequence shown in table I, application no. 2, columns 5 and 7, preferably in table I B, application no. 2, columns 5 and 7, and, optionally, isolating the full length cDNA clone or complete genomic clone;
[0893] (c) introducing the candidate nucleic acid molecules in host cells, preferably in a plant cell or a microorganism, appropriate for producing the fine chemical;
[0894] (d) expressing the identified nucleic acid molecules in the host cells;
[0895] (e) assaying the fine chemical level in the host cells; and
[0896] (f) identifying the nucleic acid molecule and its gene product which expression confers an increase in the fine chemical level in the host cell after expression compared to the wild type.

[0897] for the disclosure of the paragraphs [0379.0.0.1] to [0383.0.0.1] see paragraphs [0379.0.0.0] to [0383.0.0.0] above.

[0898] The screen for a gene product or an agonist conferring an increase in the fine chemical production can be performed by growth of an organism for example a microorganism in the presence of growth reducing amounts of an inhibitor of the synthesis of the fine chemical. Better growth, eg higher dividing rate or high dry mass in comparison to the control under such conditions would identify a gene or gene product or an agonist conferring an increase in fine chemical production.

One can think to screen for increased fine chemical production by for example resistance to drugs blocking fine chemical synthesis and looking whether this effect is dependent on the proteins as shown in table II, application no. 2, column 3, eg comparing near identical organisms with low and high activity of the proteins as shown in table II, application no. 2, column 3.

[0899] for the disclosure of the paragraphs [0385.0.0.1] to [0435.0.0.1] see paragraphs [0385.0.0:0] to [0435.0.0.0] above.

[0900] Threonine Production in Chlamydomonas reinhardtii

The amino acid production can be analysed as mentioned above. The proteins and nucleic acids can be analysed as mentioned below.

[0901] for the disclosure of the paragraphs [0437.0.0.1] to [0497.0.0.1] see paragraphs [0437.0.0.0] to [0497.0.0.0] above.
[0902] The results of the different plant analyses can be seen from the table, which follows:

TABLE VI

| ORF | Metabolite | Method | Min | Max |
|---|---|---|---|---|
| YBL082C | Threonine | GC | 1.16 | 1.55 |
| YDR204W | Threonine | GC | 1.21 | 1.36 |
| YKR043C | Threonine | GC | 1.25 | 4.35 |
| YLR153C | Threonine | GC | 1.23 | 1.32 |
| YLR174W | Threonine | GC | 1.23 | 1.31 |
| YNL241C | Threonine | GC | 1.17 | 1.56 |
| b2066 | Threonine | GC | 1.25 | 1.93 |
| b2779 | Threonine | GC | 1.18 | 1.33 |
| b3429 | Threonine | GC | 1.18 | 1.55 |
| b1131 | Threonine | GC | 1.17 | 1.41 |
| B1264 | Threonine | GC | 1.17 | 1.55 |
| B3213 | Threonine | GC | 1.24 | 1.77 |
| B0760 | Threonine | GC | 1.18 | 1.33 |
| B1062 | Threonine | GC | 1.23 | 1.42 |
| B1277 | Threonine | GC | 1.17 | 1.28 |
| B2040 | Threonine | GC | 1.19 | 1.67 |
| B2388 | Threonine | GC | 1.24 | 1.56 |
| B3443 | Threonine | LC | 1.41 | 1.45 |
| B4039 | Threonine | GC | 1.18 | 1.38 |
| YDR430C | Threonine | LC | 1.67 | 2.55 |
| YMR262W | Threonine | LC | 1.26 | 1.51 |
| YOR350C | Threonine | GC | 1.17 | 1.70 |

[0903] for the disclosure of the paragraphs [0499.0.0.1] and [0500.0.0.1] see paragraphs [0499.0.0.0] and [0500.0.0.0] above.

### Example 15a

### Engineering Ryegrass Plants by Over-Expressing YBL082C from Saccharomyces cerevisiae or Homologs of YBL082C from Other Organisms

[0904] for the disclosure of the paragraphs [0502.0.0.1] to [0508.0.0.1] see paragraphs [0502.0.0.0] to [0508.0.0.0] above.

### Example 15b

### Engineering Soybean Plants by Over-Expressing YBL082C from Saccharomyces cerevisiae or Homologs of YBL082C from Other Organisms

[0905] for the disclosure of the paragraphs [0510.0.0.1] to [0513.0.0.1] see paragraphs [0510.0.0.0] to [0513.0.0.0] above.

### Example 15c

### Engineering Corn Plants by Over-Expressing YBL082C from Saccharomyces cerevisiae or Homologs of YBL082C from Other Organisms

[0906] for the disclosure of the paragraphs [0515.0.0.1] to [0540.0.0.1] see paragraphs [0515.0.0.0] to [0540.0.0.0] above.

### Example 15d

### Engineering Wheat Plants by Over-Expressing YBL082C from Saccharomyces cerevisiae or Homologs of YBL082C from Other Organisms

[0907] for the disclosure of the paragraphs [0542.0.0.1] to [0544.0.0.1] see paragraphs [0542.0.0.0] to [0544.0.0.0] above.

### Example 15e

### Engineering Rapeseed/Canola Plants by Over-Expressing YBL082C from Saccharomyces cerevisiae or Homologs of YBL082C from Other Organisms

[0908] for the disclosure of the paragraphs [0546.0.0.1] to [0549.0.0.1] see paragraphs [0544.0.0.0] to [0549.0.0.0] above.

### Example 15f

### Engineering Alfalfa Plants by Over-Expressing YBL082C from Saccharomyces cerevisiae or Homologs of YBL082C from Other Organisms

[0909] for the disclosure of the paragraphs [0551.0.0.1] to [0554.0.0.1] see paragraphs [0551.0.0.0] to [0554.0.0.0] above.

### Example 16

### Metabolite Profiling Info from Zea mays

[0910] Zea mays plants were engineered as described in Example 15c.
Metabolic results were either obtained from regenerated primary transformants (T0) or from the following progeny generation (T1) in comparison to appropriate control plants. The results are shown in table VII

TABLE VII

| ORF_NAME | Metabolite | MIN | MAX |
|---|---|---|---|
| b2066 | Threonine | 1.55 | 2.33 |
| b3429 | Threonine | 1.43 | 1.82 |
| YKR043C | Threonine | 1.44 | 10.55 |

Table VII shows the increase in methionine in genetically modified corn plants expressing the Escherichia coli nucleic acid sequences b2066 and b3429 or the Saccharomyces cerevisiae nucleic acid sequence YKR043C.
In one embodiment, in case the activity of the Escherichia coli protein b2066 or its homologs, e.g. a “uridine/cytidine kinase”, is increased in corn plants, preferably, an increase of the fine chemical threonine between 55% and 133% or more is conferred.
In one embodiment, in case the activity of the Escherichia coli protein b3429 or its homologs, e.g. a “glycogen synthase”, is increased in corn plants, preferably, an increase of the fine chemical threonine between 43% and 82% or more is conferred.
In one embodiment, in case the activity of the Saccharomyces cerevisiae protein YKR043C or its homologs, e.g. a “unknown ORF”, is increased in corn plants, preferably, an increase of the fine chemicals threonine between 44% and 955% or more is conferred.

[0911] for the disclosure of this paragraph see [0554.2.0.0] above.

[0912] for the disclosure of this paragraph see [0555.0.0.0] above.

[0913] for the disclosure of the paragraphs [0001.0.0.2] to [0007.0.0.2] see paragraphs [0001.0.0.0] to [0007.0.0.0] above.

[0914] for the disclosure of the paragraphs [0007.1.0.2] and [0008.0.0.2] see paragraphs [0007.1.0.0] and [0008.0.0.0] above.

[0915] As described above, the essential amino acids are necessary for humans and many mammals, for example for livestock. Tryptophane (L-tryptophane) is one of the most reactive amino acids. At pH 4.0-6.0 tryptophane's amino group reacts with aldehydes producing Schiff-bases. On the other hand if the amino group is blocked by acetylation, tryptophane reacts with aldehydes yielding carboline derivatives (carboline 1,2,3,4-tetrahydro-carboline-3-carboxylic acid). Tryptophane plays a unique role in defense against infection because of its relative scarcity compared to other amino acids. During infection, the body induces tryptophane-catabolizing enzymes, which increase tryptophane's scarcity in an attempt to starve the infecting organisms [R. R. Brown, Y. Ozaki, S. P. Datta, et al., Implications of interferon-induced tryptophane catabolism in cancer, autoimmune diseases and AIDS. In: Kynurenine and Serotonin Pathways, R. Schwarcz, et al., (Eds.), Plenum Press, New York, 1991]. In most proteins, tryptophane is the least abundant essential amino acid, comprising approximately 1% of plant proteins and 1.5% of animal proteins. Although the minimum daily requirement for tryptophane is 160 mg for women and 250 mg for men, 500-700 mg are recommended to ensure high-quality protein intake. Actual tryptophane utilization is substantially higher. Men use approximately 3.5 grams of tryptophane to make one days's worth of protein [J. C. Peters, Tryptophane Nutrition and Metabolism: an Overview. In: Kynurenine and Serotonin Pathways, R. Schwarcz, et al., (Eds.), Plenum Press, New York, 1991]. The balance is obtained by hepatic recycling of tryptophane from used (catabolized) proteins.

Dietary tryptophane is well absorbed intestinally. About 10% of the tryptophane circulating in the bloodstream is free, and 90% is bound to the protein albumin. The tryptophane binding site on albumin also has affinity for free fatty acids (FFAs), so tryptophane is displaced when FFAs rise, as when fasting.
Although tryptophane is not usually the limiting amino acid in protein synthesis, tryptophane may become insufficient for the normal functioning of other tryptophane-dependent pathways. Numerous lines of research point to tryptophane's central role in regulation of feeding and other behaviors. Tryptophane is not only typically the least abundant amino acid in the liver's free amino acid pool, but liver tryptophane-tRNA levels fall faster during food deprivation than other indispensable amino acids [Q. R. Rogers, The nutritional and metabolic effects of amino acid imbalances. In: Protein Metabolism and Nutrition, D. J. A. Cole (Ed.), Butterworths, London, 1976]. Under fasting conditions, and possibly in wasting syndromes, tryptophane may become the rate-limiting amino acid for protein synthesis [Peters, 1991].

[0916] for the disclosure of the paragraphs [0010.0.0.2] and [0011.0.0.2] see paragraphs [0010.0.0.0] and [0011.0.0.0] above.

[0917] It is an object of the present invention to develop an inexpensive process for the synthesis of tryptophane, preferably L-tryptophane. Tryptophane is together with methionine, lysine and threonine (depending on the organism) one of the amino acids, which are most frequently limiting.

[0918] for the disclosure of this paragraph see [0013.0.0.0] above.

[0919] Accordingly, in a first embodiment, the invention relates to a process for the production of a fine chemical, whereby the fine chemical is tryptophane, preferably L-tryptophane. Accordingly, in the present invention, the term “the fine chemical” as used herein relates to “tryptophane”. Further, the term “the fine chemicals” as used herein also relates to fine chemicals comprising tryptophane.

[0920] In one embodiment, the term “the fine chemical” means tryptophane, preferably L-tryptophane. Throughout the specification the term “the fine chemical” means tryptophane, preferably L-tryptophane, its salts, ester or amids in free form or bound to proteins. In a preferred embodiment, the term “the fine chemical” means tryptophane, preferably L-tryptophane in free form or its salts or bound to proteins.

[0921] Accordingly, the present invention relates to a process for the production of tryptophane, which comprises
[0922] (a) increasing or generating the activity of a protein as shown in table II, application no. 3, column 3 encoded by the nucleic acid sequences as shown in table I, application no. 3, column 5, in an organelle of a microorganism or plant, or
[0923] (b) increasing or generating the activity of a protein as shown in table II, application no. 3, column 3 encoded by the nucleic acid sequences as shown in table I, application no. 3, column 5 in the plastid of a microorganism or plant, or in one or more parts thereof; and
[0924] (c) growing the organism under conditions which permit the production of the fine chemical, thus, tryptophane or fine chemicals comprising tryptophane, in said organism or in the culture medium surrounding the organism.

[0925] In another embodiment the present invention is related to a process for the production of tryptophane, which comprises
[0926] (a) increasing or generating the activity of a protein as shown in table II, application no. 3, column 3 encoded by the nucleic acid sequences as shown in table I, application no. 3, column 5, in an organelle of a non-human organism, or
[0927] (b) increasing or generating the activity of a protein as shown in table II, application no. 3, column 3 encoded by the nucleic acid sequences as shown in table I, application no. 3, column 5, which are joined to a nucleic acid sequence encoding a transit peptide in a non-human organism, or in one or more parts thereof; or
[0928] (c) increasing or generating the activity of a protein as shown in table II, application no. 3, column 3 encoded by the nucleic acid sequences as shown in table I, application no. 3, column 5, which are joined to a nucleic acid sequence encoding chloroplast localization sequence, in a non-human organism, or in one or more parts thereof, and
[0929] (d) growing the organism under conditions which permit the production of tryptophane in said organism.

[0930] In another embodiment, the present invention relates to a process for the production of tryptophane, which comprises
[0931] (a) increasing or generating the activity of a protein as shown in table II, application no. 3, column 3 encoded by the nucleic acid sequences as shown in table I, application no. 3, column 5, in an organelle of a microorganism or plant through the transformation of the organelle, or
[0932] (b) increasing or generating the activity of a protein as shown in table II, application no. 3, column 3 encoded by the nucleic acid sequences as shown in table I, application no. 3, column 5 in the plastid of a microorganism or plant, or in one or more parts thereof through the transformation of the plastids; and
[0933] (c) growing the organism under conditions which permit the production of the fine chemical, thus, tryptophane or fine chemicals comprising tryptophane, in said organism or in the culture medium surrounding the organism.

[0934] Advantageously the activity of the protein as shown in table II, application no. 3, column 3 encoded by the nucleic acid sequences as shown in table I, application no. 3, column 5 is increased or generated in the abovementioned process in the plastid of a microorganism or plant.

[0935] for the disclosure of the paragraphs [0019.0.0.2] to [0024.0.0.2] see paragraphs [0019.0.0.0] and [0024.0.0.0] above.

[0936] Even more preferred nucleic acid sequences are encoding transit peptides as disclosed by von Heijne et al. [Plant Molecular Biology Reporter, Vol. 9 (2), 1991: 104-126], which are hereby incorporated by reference. Table V shows some examples of the transit peptide sequences disclosed by von Heijne et al. According to the disclosure of the invention especially in the examples the skilled worker is able to link other nucleic acid sequences disclosed by von Heijne et al. to the nucleic acid sequences shown in table I, application no. 3, columns 5 and 7. Most preferred nucleic acid sequences encoding transit peptides are derived from the genus Spinacia such as chloroplast 30S ribosomal protein PSrp-1, root acyl carrier protein II, acyl carrier protein, ATP synthase: γ subunit, ATP synthase: δ subunit, cytochrom f, ferredoxin I, ferredoxin NADP oxidoreductase (=FNR), nitrite reductase, phosphoribulokinase, plastocyanin or carbonic anhydrase. The skilled worker will recognize that various other nucleic acid sequences encoding transit peptides can easily isolated from plastid-localized proteins, which are expressed from nuclear genes as precursors and are then targeted to plastids. Such transit peptides encoding sequences can be used for the construction of other expression constructs. The transit peptides advantageously used in the inventive process and which are part of the inventive nucleic acid sequences and proteins are typically 20 to 120 amino acids, preferably 25 to 110, 30 to 100 or 35 to 90 amino acids, more preferably 40 to 85 amino acids and most preferably 45 to 80 amino acids in length and functions post-translationally to direct the protein to the plastid preferably to the chloroplast. The nucleic acid sequences encoding such transit peptides are localized upstream of nucleic acid sequence encoding the mature protein. For the correct molecular joining of the transit peptide encoding nucleic acid and the nucleic acid encoding the protein to be targeted it is sometimes necessary to introduce additional base pairs at the joining position, which forms restriction enzyme recognition sequences useful for the molecular joining of the different nucleic acid molecules. This procedure might lead to very few additional amino acids at the N-terminal of the mature imported protein, which usually and preferably do not interfere with the protein function. In any case, the additional base pairs at the joining position which forms restriction enzyme recognition sequences have to be chosen with care, in order to avoid the formation of stop codons or codons which encode amino acids with a strong influence on protein folding, like e.g. proline. It is preferred that such additional codons encode small n.d. structural flexible amino acids such as glycine or alanine.

[0937] As mentioned above the nucleic acid sequences coding for the proteins as shown in table II, application no. 3, column 3 and its homologs as disclosed in table I, application no. 3, columns 5 and 7 are joined to a nucleic acid sequence encoding a transit peptide, This nucleic acid sequence encoding a transit peptide ensures transport of the protein to the plastid. The nucleic acid sequence of the gene to be expressed and the nucleic acid sequence encoding the transit peptide are operably linked. Therefore the transit peptide is fused in frame to the nucleic acid sequence coding for proteins as shown in table II, application no. 3, column 3 and its homologs as disclosed in table I, application no. 3, columns 5 and 7.

[0938] for the disclosure of the paragraphs [0027.0.0.2] to [0029.0.0.2] see paragraphs [0027.0.0.0] and [0029.0.0.0] above.

[0939] Alternatively, nucleic acid sequences coding for the transit peptides may be chemically synthesized either in part or wholly according to structure of transit peptide sequences disclosed in the prior art. Said natural or chemically synthesized sequences can be directly linked to the sequences encoding the mature protein or via a linker nucleic acid sequence, which may be typically less than 500 base pairs, preferably less than 450, 400, 350, 300, 250 or 200 base pairs, more preferably less than 150, 100, 90, 80, 70, 60, 50, 40 or 30 base pairs and most preferably less than 25, 20, 15, 12, 9, 6 or 3 base pairs in length and are in frame to the coding sequence. Furthermore favorable nucleic acid sequences encoding transit peptides may comprise sequences derived from more than one biological and/or chemical source and may include a nucleic acid sequence derived from the amino-terminal region of the mature protein, which in its native state is linked to the transit peptide. In a preferred embodiment of the invention said amino-terminal region of the mature protein is typically less than 150 amino acids, preferably less than 140, 130, 120, 110, 100 or 90 amino acids, more preferably less than 80, 70, 60, 50, 40, 35, 30, 25 or 20 amino acids and most preferably less than 19, 18, 17, 16, 15, 14, 13, 12, 11 or 10 amino acids in length. But even shorter or longer stretches are also possible. In addition target sequences, which facilitate the transport of proteins to other cell compartments such as the vacuole, endoplasmic reticulum, golgi complex, glyoxysomes, peroxisomes or mitochondria may be also part of the inventive nucleic acid sequence. The proteins translated from said inventive nucleic acid sequences are a kind of fusion proteins that means the nucleic acid sequences encoding the transit peptide for example the ones shown in table V, preferably the last one of the table are joint to the nucleic acid sequences shown in table I, application no. 3, columns 5 and 7. The person skilled in the art is able to join said sequences in a functional manner. Advantageously the transit peptide part is cleaved off from the protein part shown in table II, application no. 3, columns 5 and 7 during the transport preferably into the plastids. All products of the cleavage of the preferred transit peptide shown in the last line of table V have preferably the N-terminal amino acid sequences QIA CSS or QIA EFQLTT in front of the start methionine of the protein mentioned in table II, application no. 3, columns 5 and 7. Other short amino acid sequences of an range of 1 to 20 amino acids preferable 2 to 15 amino acids, more preferable 3 to 10 amino acids most preferably 4 to 8 amino acids are also possible in front of the start methionine of the protein mentioned in table II, application no. 3, columns 5 and 7. In case of the amino acid sequence QIA CSS the three amino acids in front of the start methionine are stemming from the LIC (=ligatation independent cloning) cassette. Said short amino acid sequence is preferred in the case of the expression of E. coli genes. In case of the amino acid sequence QIA EFQLTT the six amino acids in front of the start methionine are stemming from the LIC cassette. Said short amino acid sequence is preferred in the case of the expression of S. cerevisiae genes. The skilled worker knows that other short sequences are also useful in the expression of the genes mentioned in table I, application no. 3, columns 5 and 7. Furthermore the skilled worker is aware of the fact that there is not a need for such short sequences in the expression of the genes.

[0940] Table V: Examples of transit peptides disclosed by von Heijne et al. for the disclosure of Table V see paragraph [0030.2.0.0] above.

[0941] Alternatively to the targeting of the sequences shown in table II, application no. 3, columns 5 and 7 preferably of sequences in general encoded in the nucleus with the aid of the targeting sequences mentioned for example in table V alone or in combination with other targeting sequences preferably into the plastids, the nucleic acids of the invention can directly introduced into the plastidal genome. Therefore in a preferred embodiment the nucleic acid sequences shown in table I, application no. 3, columns 5 and 7 are directly introduced and expressed in plastids.

The term “introduced” in the context of this specification shall mean the insertion of a nucleic acid sequence into the organism by means of a “transfection”, “transduction” or preferably by “transformation”.
A plastid, such as a chloroplast, has been “transformed” by an exogenous (preferably foreign) nucleic acid sequence if nucleic acid sequence has been introduced into the plastid that means that this sequence has crossed the membrane or the membranes of the plastid. The foreign DNA may be integrated (covalently linked) into plastid DNA making up the genome of the plastid, or it may remain unintegrated (e.g., by including a chloroplast origin of replication). “Stably” integrated DNA sequences are those, which are inherited through plastid replication, thereby transferring new plastids, with the features of the integrated DNA sequence to the progeny.

[0942] for the disclosure of the paragraphs [0030.2.0.2] and [0030.3.0.2] see paragraphs [0030.2.0.0] and [0030.3.0.0] above.

[0943] For the inventive process it is of great advantage that by transforming the plastids the intraspecies specific transgene flow is blocked, because a lot of species such as corn, cotton and rice have a strict maternal inheritance of plastids. By placing the genes specified in table I, application no. 3, columns 5 and 7 or active fragments thereof in the plastids of plants, these genes will not be present in the pollen of said plants.

A further preferred embodiment of the invention relates to the use of so called “chloroplast localization sequences”, in which a first RNA sequence or molecule is capable of transporting or “chaperoning” a second RNA sequence, such as a RNA sequence transcribed from the sequences depicted in table I, application no. 3, columns 5 and 7 or a sequence encoding a protein, as depicted in table II, application no. 3, columns 5 and 7, from an external environment inside a cell or outside a plastid into a chloroplast. In one embodiment the chloroplast localization signal is substantially similar or complementary to a complete or intact viroid sequence. The chloroplast localization signal may be encoded by a DNA sequence, which is transcribed into the chloroplast localization RNA. The term “viroid” refers to a naturally occurring single stranded RNA molecule (Flores, C R Acad Sci III. 2001 October; 324(10): 943-52). Viroids usually contain about 200-500 nucleotides and generally exist as circular molecules. Examples of viroids that contain chloroplast localization signals include but are not limited to ASBVd, PLMVd, CChMVd and ELVd. The viroid sequence or a functional part of it can be fused to the sequences depicted in table I, application no. 3, columns 5 and 7 or a sequence encoding a protein, as depicted in table II, application no. 3, columns 5 and 7 in such a manner that the viroid sequence transports a sequence transcribed from a sequence as depicted in table I, application no. 3 columns 5 and 7 or a sequence encoding a protein as depicted in table II, application no. 3 columns 5 and 7 into the chloroplasts. A preferred embodiment uses a modified ASBVd (Navarro et al., Virology. 2000 Mar. 1; 268(1): 218-25).
In a further specific embodiment the protein to be expressed in the plastids such as the proteins depicted in table II, application no. 3, columns 5 and 7 are encoded by different nucleic acids. Such a method is disclosed in WO 2004/040973, which shall be incorporated by reference. WO 2004/040973 teaches a method, which relates to the translocation of an RNA corresponding to a gene or gene fragment into the chloroplast by means of a chloroplast localization sequence. The genes, which should be expressed in the plant or plants cells, are split into nucleic acid fragments, which are introduced into different compartments in the plant e.g. the nucleus, the plastids and/or mitochondria. Additionally plant cells are described in which the chloroplast contains a ribozyme fused at one end to an RNA encoding a fragment of a protein used in the inventive process such that the ribozyme can trans-splice the translocated fusion RNA to the RNA encoding the gene fragment to form and as the case may be reunite the nucleic acid fragments to an intact mRNA encoding a functional protein for example as disclosed in table II, application no. 3, columns 5 and 7.

[0944] In a preferred embodiment of the invention the nucleic acid sequences as shown in table I, application no. 3, columns 5 and 7 used in the inventive process are transformed into plastids, which are metabolical active. Those plastids should preferably maintain at a high copy number in the plant or plant tissue of interest, most preferably the chloroplasts found in green plant tissues, such as leaves or cotyledons or in seeds.

[0945] For a good expression in the plastids the nucleic acid sequences as shown in table I, application no. 3, columns 5 and 7 are introduced into an expression cassette using a preferably a promoter and terminator, which are active in plastids preferably a chloroplast promoter. Examples of such promoters include the psbA promoter from the gene from spinach or pea, the rbcL promoter, and the atpB promoter from corn.

[0946] for the disclosure of the paragraphs [0031.0.0.2] and [0032.0.0.2] see paragraphs [0031.0.0.0] and [0032.0.0.0] above.

[0947] Advantageously the process for the production of the fine chemical leads to an enhanced production of the fine chemical. The terms “enhanced” or “increase” mean at least a 10%, 20%, 30%, 40% or 50%, preferably at least 60%, 70%, 80%, 90% or 100%, more preferably 150%, 200%, 300%, 400% or 500% higher production of the fine chemical in comparison to the reference as defined below, e.g. that means in comparison to an organism without the aforementioned modification of the activity of a protein as shown in table II, application no. 3, column 3. Preferably the modification of the activity of a protein as shown in table II, application no. 3, column 3 or their combination can be achieved by joining the protein to a transit peptide.

[0948] Surprisingly it was found, that the transgenic expression of the Saccharomyces cerevisiae protein as shown in table II, application no. 3, column 3 in plastids of a plant such as Arabidopsis thaliana for example through the linkage to at least one targeting sequence for example as mentioned in table V conferred an increase in the fine chemical content of the transformed plants.

[0949] for the disclosure of this paragraph see paragraph [0035.0.0.0] above.

[0950] The sequence of b1223 (Accession number NP 415741) from Escherichia coli has been published in Blattner et al., Science 277 (5331), 1453-1474 (1997), and its activity is being defined as “nitrite extrusion protein”. Accordingly, in one embodiment, the process of the present invention comprises the use of a “nitrite extrusion protein” or its homolog, e.g. as shown herein, for the production of the fine chemical, meaning of tryptophane, in particular for increasing the amount of tryptophane in free or bound form in an organism or a part thereof, as mentioned. In one embodiment, in the process of the present invention the activity of a b1223 protein is increased or generated, e.g. from Escherichia coli or a homolog thereof, preferably linked at least to one transit peptide as mentioned for example in table V.

In another embodiment, in the process of the present invention the activity of a b1223 protein is increased or generated in a subcellular compartment of the organism or organism cell such as in an organelle like a plastid or mitochondria.
The sequence of b1704 (Accession number NP 416219) from Escherichia coli has been published in Blattner et al., Science 277 (5331), 1453-1474 (1997), and its activity is being defined as a “3-deoxy-D-arabinoheptulosonate-7-phosphate synthase (DAHP synthetase, tryptophan repressible)”. Accordingly, in one embodiment, the process of the present invention comprises the use of a “3-deoxy-D-arabinoheptulosonate-7-phosphate synthase” or its homolog, e.g. as shown herein, for the production of the fine chemical, meaning of tryptophane, in particular for increasing the amount of tryptophane in free or bound form in an organism or a part thereof, as mentioned. In one embodiment, in the process of the present invention the activity of a b1704 protein is increased or generated, e.g. from Escherichia coli or a homolog thereof, preferably linked at least to one transit peptide as mentioned for example in table V.
In another embodiment, in the process of the present invention the activity of a b1704 protein is increased or generated in a subcellular compartment of the organism or organism cell such as in an organelle like a plastid or mitochondria.
The sequence of b2601 (Accession number NP_{—}417092) from Escherichia coli has been published in Blattner et al., Science 277 (5331), 1453-1474 (1997), and its activity is being defined as a “3-deoxy-D-arabinoheptulosonate-7-phosphate synthase (DAHP synthetase, tyrosine-repressible)”. Accordingly, in one embodiment, the process of the present invention comprises the use of a “-deoxy-D-arabinoheptulosonate-7-phosphate synthase” or its homolog, e.g. as shown herein, for the production of the fine chemical, meaning of tryptophane, in particular for increasing the amount of tryptophane in free or bound form in an organism or a part thereof, as mentioned. In one embodiment, in the process of the present invention the activity of a b2601 protein is increased or generated, e.g. from Escherichia coli or a homolog thereof, preferably linked at least to one transit peptide as mentioned for example in table V.
In another embodiment, in the process of the present invention the activity of a b2601 protein is increased or generated in a subcellular compartment of the organism or organism cell such as in an organelle like a plastid or mitochondria.
The sequence of b2965 (Accession number NP_{—}417440) from Escherichia coli has been published in Blattner et al., Science 277 (5331), 1453-1474 (1997), and its activity is being defined as “ornithine decarboxylase”. Accordingly, in one embodiment, the process of the present invention comprises the use of a “ornithine decarboxylase isozyme” or its homolog, e.g. as shown herein, for the production of the fine chemical, meaning of tryptophane, in particular for increasing the amount of tryptophane in free or bound form in an organism or a part thereof, as mentioned. In one embodiment, in the process of the present invention the activity of a b2965 protein is increased or generated, e.g. from Escherichia coli or a homolog thereof, preferably linked at least to one transit peptide as mentioned for example in table V.
In another embodiment, in the process of the present invention the activity of a b2965 protein is increased or generated in a subcellular compartment of the organism or organism cell such as in an organelle like a plastid or mitochondria.
The sequence of b3390 (Accession number YP_{—}026215) from Escherichia coli has been published in Blattner et al., Science 277 (5331), 1453-1474 (1997), and its activity is being defined as a “shikimate kinase I”. Accordingly, in one embodiment, the process of the present invention comprises the use of a “shikimate kinase I” or its homolog, e.g. as shown herein, for the production of the fine chemical, meaning of tryptophane, in particular for increasing the amount of tryptophane in free or bound form in an organism or a part thereof, as mentioned. In one embodiment, in the process of the present invention the activity of a b3390 protein is increased or generated, e.g. from Escherichia coli or a homolog thereof, preferably linked at least to one transit peptide as mentioned for example in table V.
In another embodiment, in the process of the present invention the activity of a b3390 protein is increased or generated in a subcellular compartment of the organism or organism cell such as in an organelle like a plastid or mitochondria.
The sequence of YOR353C (Accession number NP_{—}014998) from Saccharomyces cerevisiae has been published in Goffeau et al., Science 274 (5287), 546-547, 1996 and Dujon et al., Nature 387 (6632 Suppl), 98-102 (1997), and its activity is being defined as a “protein required for cell morphogenesis and cell separation after mitosis; Sog2p”. Accordingly, in one embodiment, the process of the present invention comprises the use of a “protein required for cell morphogenesis and cell separation after mitosis; Sog2p” or its homolog, e.g. as shown herein, for the production of the fine chemical, meaning of tryptophane in free or bound form, in particular for increasing the amount of tryptophane in free or bound form in an organism or a part thereof, as mentioned. In one embodiment, in the process of the present invention the activity of a YOR353C protein is increased or generated, e.g. from Saccharomyces cerevisiae or a homolog thereof, preferably linked at least to one transit peptide as mentioned for example in table V.
In another embodiment, in the process of the present invention the activity of an YOR353C protein is increased or generated in a subcellular compartment of the organism or organism cell such as in an organelle like a plastid or mitochondria.
The sequence of YDR035W (Accession number NP_{—}010320) from Saccharomyces cerevisiae has been published in Goffeau et al., Science 274 (5287), 546-547, 1996 and Jacq et al., Nature 387 (6632 Suppl), 75-78 (1997), and its activity is being defined as a “3-deoxy-D-arabino-heptulosonate-7-phosphate (DAHP) synthase” which catalyzes the first step in aromatic amino acid biosynthesis and is feedback-inhibited by phenylalanine (Aro3p). Accordingly, in one embodiment, the process of the present invention comprises the use of a “3-deoxy-D-arabino-heptulosonate-7-phosphate synthase” or its homolog, e.g. as shown herein, for the production of the fine chemical, meaning of tryptophane, in particular for increasing the amount of tryptophane in free or bound form in an organism or a part thereof, as mentioned. In one embodiment, in the process of the present invention the activity of a YDR035W protein is increased or generated, e.g. from Saccharomyces cerevisiae or a homolog thereof, preferably linked at least to one transit peptide as mentioned for example in table V.
In another embodiment, in the process of the present invention the activity of an YDR035W protein is increased or generated in a subcellular compartment of the organism or organism cell such as in an organelle like a plastid or mitochondria.
The sequence of YER024W (Accession number NP_{—}010941) from Saccharomyces cerevisiae has been published in Goffeau et al., Science 274 (5287), 546-547, 1996 and Dietrich et al., Nature 387 (6632 Suppl), 78-81 (1997) and its activity is being defined as carnithine actyltransferase. Accordingly, in one embodiment, the process of the present invention comprises the use of a carnithine actyltransferase or its homolog, e.g. as shown herein, for the production of the fine chemical, meaning of tryptophane, in particular for increasing the amount of tryptophane in free or bound form in an organism or a part thereof, as mentioned. In one embodiment, in the process of the present invention the activity of a YER024W protein is increased or generated, e.g. from Saccharomyces cerevisiae or a homolog thereof, preferably linked at least to one transit peptide as mentioned for example in table V.
In another embodiment, in the process of the present invention the activity of a YER024W protein is increased or generated in a subcellular compartment of the organism or organism cell such as in an organelle like a plastid or mitochondria.
The sequence of YNL241C (Accession number NP_{—}014158) from Saccharomyces cerevisiae has been published in Goffeau et al., Science 274 (5287), 546-547, 1996 and Philippsen et al., Nature 387 (6632 Suppl), 93-98 (1997), and its activity is being defined as a “glucose-6-phosphate dehydrogenase”. Accordingly, in one embodiment, the process of the present invention comprises the use of a “glucose-6-phosphate dehydrogenase” or its homolog, e.g. as shown herein, for the production of the fine chemical, meaning of tryptophane, in particular for increasing the amount of tryptophane in free or bound form in an organism or a part thereof, as mentioned. In one embodiment, in the process of the present invention the activity of a YNL241C protein is increased or generated, e.g. from Saccharomyces cerevisiae or a homolog thereof, preferably linked at least to one transit peptide as mentioned for example in table V.
In another embodiment, in the process of the present invention the activity of an YNL241C protein is increased or generated in a subcellular compartment of the organism or organism cell such as in an organelle like a plastid or mitochondria.

[0951] In one embodiment, the homolog of the YOR353C, YDR035W, YER024W and/or YNL241C, is a homolog having said activity and being derived from Eukaryot. In one embodiment, the homolog of the b1223, b1704, b2601, b2965 and/or b3390 is a homolog having said activity and being derived from bacteria. In one embodiment, the homolog of the YOR353C, YDR035W, YER024W and/or YNL241C_is a homolog having said activity and being derived from Fungi. In one embodiment, the homolog of the b1223, b1704, b2601, b2965 and/or b3390 is a homolog having said activity and being derived from Proteobacteria. In one embodiment, the homolog of the YOR353C, YDR035W, YER024W and/or YNL241C is a homolog having said activity and being derived from Ascomycota. In one embodiment, the homolog of the b1223, b1704, b2601, b2965 and/or b3390 is a homolog having said activity and being derived from Gammaproteobacteria. In one embodiment, the homolog of the YOR353C, YDR035W, YER024W and/or YNL241C is a homolog having said activity and being derived from Saccharomycotina. In one embodiment, the homolog of the b1223, b1704, b2601, b2965 and/or b3390 is a homolog having said activity and being derived from Enterobacteriales. In one embodiment, the homolog of the YOR353C, YDR035W, YER024W and/or YNL241C is a homolog having said activity and being derived from Saccharomycetes. In one embodiment, the homolog of the b1223, b1704, b2601, b2965 and/or b3390 is a homolog having said activity and being derived from Enterobacteriaceae. In one embodiment, the homolog of the YOR353C, YDR035W, YER024W and/or YNL241C is a homolog having said activity and being derived from Saccharomycetales. In one embodiment, the homolog of the b1223, b1704, b2601, b2965 and/or b3390 is a homolog having said activity and being derived from Escherichia, preferably from Escherichia coli. In one embodiment, the homolog of the YOR353C, YDR035W, YER024W and/or YNL241C is a homolog having said activity and being derived from Saccharomycetaceae. In one embodiment, the homolog of the YOR353C, YDR035W, YER024W and/or YNL241C is a homolog having said activity and being derived from Saccharomycetes, preferably from Saccharomyces cerevisiae.

[0952] for the disclosure of this paragraph see paragraph [0038.0.0.0] above.

[0953] In accordance with the invention, a protein or polypeptide has the “activity of an protein as shown in table II, application no. 3, column 3” if its de novo activity, or its increased expression directly or indirectly leads to an increased in the fine chemical level in the organism or a part thereof, preferably in a cell of said organism, more preferably in an organelle such as a plastid or mitochondria of said organism and the protein has the above mentioned activities of a protein as shown in table II, application no. 3, column 3, preferably in the event the nucleic acid sequences encoding said proteins is functionally joined to the nucleic acid sequence of a transit peptide. Throughout the specification the activity or preferably the biological activity of such a protein or polypeptide or an nucleic acid molecule or sequence encoding such protein or polypeptide is identical or similar if it still has the biological or enzymatic activity of a protein as shown in table II, application no. 3, column 3, or which has at least 10% of the original enzymatic activity, preferably 20%, particularly preferably 30%, most particularly preferably 40% in comparison to a protein as shown in table II, application no. 3, column 3 of Saccharomyces cerevisiae.

[0954] for the disclosure of the paragraphs [0040.0.0.2] to [047.0.0.1] see paragraphs [0040.0.0.0] to [0047.0.0.0] above.

[0955] Preferably, the reference, control or wild type differs form the subject of the present invention only in the cellular activity, preferably of the plastidial activity of the polypeptide of the invention, e.g. as result of an increase in the level of the nucleic acid molecule of the present invention or an increase of the specific activity of the polypeptide of the invention, e.g. by or in the expression level or activity of an protein having the activity of a protein as shown in table II, application no. 3, column 3 its biochemical or genetical causes and the increased amount of the fine chemical.

[0956] for the disclosure of the paragraphs [0049.0.0.2] to [0051.0.0.1] see paragraphs [0049.0.0.0] to [0051.0.0.0] above.

[0957] For example, the molecule number or the specific activity of the polypeptide or the nucleic acid molecule may be increased. Larger amounts of the fine chemical can be produced if the polypeptide or the nucleic acid of the invention is expressed de novo in an organism lacking the activity of said protein, preferably the nucleic acid molecules as mentioned in table I, application no. 3, columns 5 and 7 alone or preferably in combination with a transit peptide for example as mentioned in table V or in another embodiment by introducing said nucleic acid molecules into an organelle such as an plastid or mitochondria in the transgenic organism. However, it is also possible to modify the expression of the gene which is naturally present in the organisms, for example by integrating a nucleic acid sequence, encoding a plastidic targeting sequence in front (5 prime) of the coding sequence, leading to a functional preprotein, which is directed for example to the plastids.

[0958] for the disclosure of the paragraphs [0053.0.0.2] to [0058.0.0.1] see paragraphs [0053.0.0.0] to [0058.0.0.0] above.

[0959] In case the activity of the Escherichia coli protein b1223 or its homologs, e.g. a “nitrite extrusion protein” is increased advantageously in an organelle such as a plastid or mitochondria, preferably, in one embodiment an increase of the fine chemical, preferably of tryptophane between 40% and 147% or more is conferred.

In case the activity of the Escherichia coli protein b1704 or its homologs, e.g. a “3-deoxy-D-arabinoheptulosonate-7-phosphate synthase” is increased advantageously in an organelle such as a plastid or mitochondria, preferably, in one embodiment an increase of the fine chemical, preferably of tryptophane between 305% and 1711% or more is conferred.
In case the activity of the Escherichia coli protein b2601 or its homologs, e.g. an “3-deoxy-D-arabinoheptulosonate-7-phosphate synthase” is increased advantageously in an organelle such as a plastid or mitochondria, preferably, in one embodiment an increase of the fine chemical, preferably of tryptophane between 54% and 292% or more is conferred.
In case the activity of the Escherichia coli protein b2965 or its homologs, e.g. an “ornithine decarboxylase isozyme” is increased advantageously in an organelle such as a plastid or mitochondria, preferably, in one embodiment an increase of the fine chemical, preferably of tryptophane between 33% and 357% or more is conferred.
In case the activity of the Escherichia coli protein b3390 or its homologs, e.g. an “shikimate kinase I” is increased advantageously in an organelle such as a plastid or mitochondria, preferably, in one embodiment an increase of the fine chemical, preferably of tryptophane between 31% and 356% or more is conferred.
In case the activity of the Saccharomyces cerevisiae protein YOR353C or its homologs, e.g. a “protein required for cell morphogenesis and cell separation after mitosis; Sog2p” is increased advantageously in an organelle such as a plastid or mitochondria, preferably, in one embodiment an increase of the fine chemical, preferably of tryptophane between 30% and 129% or more is conferred.
In case the activity of the Saccharomyces cerevisiae protein YDR035W or its homologs, e.g. a “3-deoxy-D-arabinoheptulosonate-7-phosphate synthase” is increased advantageously in an organelle such as a plastid or mitochondria, preferably, in one embodiment an increase of the fine chemical, preferably of tryptophane between 39% and 144% or more is conferred.
In case the activity of the Saccharomyces cerevisiae protein YER024W or its homologs, e.g. a “putative homolog of the carnitine acetyltransferase” with a role in ubiquinone is increased advantageously in an organelle such as a plastid or mitochondria, preferably, in one embodiment an increase of the fine chemical, preferably of tryptophane between 27% and 38% or more is conferred.
In case the activity of the Saccharomyces cerevisiae protein YNL241C or its homologs, e.g. an “glucose-6-phosphate dehydrogenase” is increased advantageously in an organelle such as a plastid or mitochondria, preferably, in one embodiment an increase of the fine chemical, preferably of tryptophane between 30% and 43% or more is conferred.

[0960] In case the activity of the Escherichia coli protein b1223 or its homologs, e.g. a “nitrite extrusion protein” is increased advantageously in an organelle such as a plastid or mitochondria, preferably an increase of the fine chemical and of proteins containing tryptophane is conferred.

In case the activity of the Escherichia coli protein b1704 or its homologs, e.g. a “3-deoxy-D-arabinoheptulosonate-7-phosphate synthase” is increased advantageously in an organelle such as a plastid or mitochondria, preferably an increase of the fine chemical and of proteins containing tryptophane is conferred.
In case the activity of the Escherichia coli protein b2601 or its homologs, e.g. an “3-deoxy-D-arabinoheptulosonate-7-phosphate synthase” is increased advantageously in an organelle such as a plastid or mitochondria, preferably an increase of the fine chemical and of proteins containing tryptophane is conferred.
In case the activity of the Escherichia coli protein b2965 or its homologs, e.g. an “ornithine decarboxylase isozyme” is increased advantageously in an organelle such as a plastid or mitochondria, preferably an increase of the fine chemical and of proteins containing tryptophane is conferred.
In case the activity of the Escherichia coli protein b3390 or its homologs, e.g. an “shikimate kinase I” is increased advantageously in an organelle such as a plastid or mitochondria, preferably an increase of the fine chemical and of proteins containing tryptophane is conferred.
In case the activity of the Saccharomyces cerevisiae protein YOR353C or its homologs, e.g. a “protein required for cell morphogenesis and cell separation after mitosis; Sog2p” is increased advantageously in an organelle such as a plastid or mitochondria, preferably an increase of the fine chemical and of proteins containing tryptophane is conferred.
In case the activity of the Saccharomyces cerevisiae protein YDR035W or its homologs, e.g. a “3-deoxy-D-arabinoheptulosonate-7-phosphate synthase” is increased advantageously in an organelle such as a plastid or mitochondria, preferably an increase of the fine chemical and of proteins containing tryptophane is conferred.
In case the activity of the Saccharomyces cerevisiae protein YER024W or its homologs, e.g. a “putative homolog of the carnitine acetyltransferase” is increased advantageously in an organelle such as a plastid or mitochondria, preferably an increase of the fine chemical and of proteins containing tryptophane is conferred.
In case the activity of the Saccharomyces cerevisiae protein YNL241C or its homologs, e.g. an “glucose-6-phosphate dehydrogenase” is increased advantageously in an organelle such as a plastid or mitochondria, preferably an increase of the fine chemical and of proteins containing tryptophane is conferred.

[0961] for the disclosure of the paragraphs [0061.0.0.2] and [0062.0.0.2] see paragraphs [0061.0.0.0] and [0062.0.0.0] above.

[0962] A protein having an activity conferring an increase in the amount or level of the fine chemical, preferably upon targeting to the plastids preferably has the structure of the polypeptide described herein, in particular of the polypeptides comprising the consensus sequence shown in table IV, application no. 3, column 7 or of the polypeptide as shown in the amino acid sequences as disclosed in table II, application no. 3, columns 5 and 7 or the functional homologues thereof as described herein, or is encoded by the nucleic acid molecule characterized herein or the nucleic acid molecule according to the invention, for example by the nucleic acid molecule as shown in table I, application no. 3, columns 5 and 7 or its herein described functional homologues and has the herein mentioned activity.

[0963] For the purposes of the present invention, the terms “L-tryptophane” and “tryptophane” also encompass the corresponding salts, such as, for example, tryptophane hydrochloride or tryptophane sulfate. Preferably the terms tryptophane is intended to encompass the term L-tryptophane.

[0964] for the disclosure of the paragraphs [0065.0.0.2] and [0066.0.0.2] see paragraphs [0065.0.0.0] and [0066.0.0.0] above.

[0965] In one embodiment, the process of the present invention comprises one or more of the following steps
[0966] a) stabilizing a protein conferring the increased expression of a protein encoded by the nucleic acid molecule of the invention or of the polypeptide of the invention, e.g. of a polypeptide having a Table II, application no. 3, columns 5 and 7 protein activity or its homologs activity having herein-mentioned tryptophane increasing activity; and/or
[0967] b) stabilizing a mRNA conferring the increased expression of a protein encoded by the nucleic acid molecule of the invention, which is in the sense of the invention a fusion of a nucleic acid sequence encoding a transit peptide and of a nucleic acid sequence as shown in table I, application no. 3, columns 5 and 7, e.g. a nucleic acid sequence encoding a polypeptide having a Table II, application no. 3, columns 5 and 7 protein activity or its homologs or of a mRNA encoding the polypeptide of the present invention having herein-mentioned tryptophane increasing activity; and/or
[0968] c) increasing the specific activity of a protein conferring the increased expression of a protein encoded by the nucleic acid molecule of the invention or of the polypeptide of the present invention having herein-mentioned tryptophane increasing activity, e.g. of a polypeptide having a Table II, application no. 3, columns 5 and 7 protein or its homologs activity, or decreasing the inhibitory regulation of the polypeptide of the invention; and/or
[0969] d) generating or increasing the expression of an endogenous or artificial transcription factor mediating the expression of a protein conferring the increased expression of a protein encoded by the nucleic acid molecule of the invention or of the polypeptide of the invention having herein-mentioned tryptophane increasing activity, e.g. of a polypeptide having the Table II, application no. 3, columns 5 and 7 protein or its homologs activity; and/or
[0970] e) stimulating activity of a protein conferring the increased expression of a protein encoded by the nucleic acid molecule of the present invention or a polypeptide of the present invention having herein-mentioned tryptophane increasing activity, e.g. of a polypeptide having the Table II, application no. 3, columns 5 and 7 protein or its homologs activity, by adding one or more exogenous inducing factors to the organisms or parts thereof; and/or
[0971] f) expressing a transgenic gene encoding a protein conferring the increased expression of a polypeptide encoded by the nucleic acid molecule of the present invention or a polypeptide of the present invention, having herein-mentioned tryptophane increasing activity, e.g. of a polypeptide having the Table II, application no. 3, columns 5 and 7 protein or its homologs, and/or
[0972] g) increasing the copy number of a gene conferring the increased expression of a nucleic acid molecule encoding a polypeptide encoded by the nucleic acid molecule of the invention or the polypeptide of the invention having herein-mentioned tryptophane increasing activity, e.g. of a polypeptide having the Table II, application no. 3, columns 5 and 7 protein or its homologs; and/or
[0973] h) increasing the expression of the endogenous gene encoding the polypeptide of the invention, e.g. a polypeptide having the Table II, application no. 3, columns 5 and 7 protein or its homologs activity, by adding positive expression or removing negative expression elements, e.g. homologous recombination can be used to either introduce positive regulatory elements like for plants the 35S enhancer into the promoter or to remove repressor elements form regulatory regions. Further gene conversion methods can be used to disrupt repressor elements or to enhance to activity of positive elements. Positive elements can be randomly introduced in plants by T-DNA or transposon mutagenesis and lines can be identified in which the positive elements have be integrated near to a gene of the invention, the expression of which is thereby enhanced; and/or
[0974] i) modulating growth conditions of an organism in such a manner, that the expression or activity of the gene encoding the protein of the invention or the protein itself is enhanced for example microorganisms or plants can be grown for example under a higher temperature regime leading to an enhanced expression of heat shock proteins, which can lead an enhanced fine chemical production; and/or
[0975] j) selecting of organisms with especially high activity of the proteins of the invention from natural or from mutagenized resources and breeding them into the target organisms, eg the elite crops; and/or
[0976] k) directing a protein encoded by the nucleic acid molecule of the invention or of the polypeptide of the present invention having herein-mentioned tryptophane increasing activity, e.g. of a polypeptide having a Table II, application no. 3, columns 5 and 7 protein or its homologs activity, to the plastids by the addition of a plastidial targeting sequence; and/or
[0977] l) generating the expression of a protein encoded by the nucleic acid molecule of the invention or of the polypeptide of the present invention having herein-mentioned tryptophane increasing activity, e.g. of a polypeptide having a Table II, application no. 3, columns 5 and 7 protein or its homologs activity in plastids by the stable or transient transformation advantageously stable transformation of organelles preferably plastids with an inventive nucleic acid sequence preferably in form of an expression cassette containing said sequence leading to the plastidial expression of the nucleic acids or polypeptides of the invention; and/or
[0978] m) generating the expression of a protein encoded by the nucleic acid molecule of the invention or of the polypeptide of the present invention having herein-mentioned tryptophane increasing activity, e.g. of a polypeptide having a Table II, application no. 3, columns 5 and 7 protein or its homologs activity in plastids by integration of a nucleic acid of the invention into the plastidal genome under control of preferable a plastidial promoter.

[0979] Preferably, said mRNA is the nucleic acid molecule of the present invention and/or the protein conferring the increased expression of a protein encoded by the nucleic acid molecule of the present invention alone or link to a transit nucleic acid sequence or transit peptide encoding nucleic acid sequence or the polypeptide having the herein mentioned activity, e.g. conferring the increase of the fine chemical after increasing the expression or activity of the encoded polypeptide preferably in organelles such as plastids or having the activity of a polypeptide having an activity as the protein as shown in table II, application no. 3, column 3 or its homologs. Preferably the increase of the fine chemical takes place in plastids.

[0980] for the disclosure of the paragraphs [0069.0.0.2] to [0079.0.0.2] see paragraphs [0069.0.0.0] to [0079.0.0.0] above.

[0981] The activation of an endogenous polypeptide having above-mentioned activity, e.g. having the activity of a protein as shown in table II, application no. 3, column 3 or of the polypeptide of the invention, e.g. conferring the increase of the fine chemical after increase of expression or activity in the cytsol and/or in an organelle like a plastid, preferentially in the plastid, can also be increased by introducing a synthetic transcription factor, which binds close to the coding region of the gene encoding the protein as shown in table II, application no. 3, column 3 and activates its transcription. A chimeric zinc finger protein can be constructed, which comprises a specific DNA-binding domain and an activation domain as e.g. the VP16 domain of Herpes Simplex virus. The specific binding domain can bind to the regulatory region of the gene encoding the protein as shown in table II, application no. 3, column 3. The expression of the chimeric transcription factor in a organism, in particular in a plant, leads to a specific expression of the protein as shown in table II, application no. 3, column 3, see e.g. in WO01/52620, Oriz, Proc. Natl. Acad. Sci. USA, 2002, Vol. 99, 13290 or Guan, Proc. Natl. Acad. Sci. USA, 2002, Vol. 99, 13296.

[0982] for the disclosure of the paragraphs [0081.0.0.2] to [0084.0.0.2] see paragraphs [0081.0.0.0] to [0084.0.0.0] above.

[0983] Owing to the introduction of a gene or a plurality of genes conferring the expression of the nucleic acid molecule of the invention or the polypeptide of the invention, for example the nucleic acid construct mentioned below, or encoding the protein as shown in table II, application no. 3, column 3 into an organism alone or in combination with other genes, it is possible not only to increase the biosynthetic flux towards the end product, but also to increase, modify or create de novo an advantageous, preferably novel metabolites composition in the organism, e.g. an advantageous amino acid composition comprising a higher content of (from a viewpoint of nutritional physiology limited) amino acids, like methionine, lysine or threonine alone or in combination in free or bound form.

[0984] for the disclosure of this paragraph see paragraph [0086.0.0.0] above.

[0985] By influencing the metabolism thus, it is possible to produce, in the process according to the invention, further advantageous compounds. Examples of such compounds are, in addition to tryptophane for example compounds like amino acids such as methionine, threonine or lysine or other desirable compounds.

[0986] Accordingly, in one embodiment, the process according to the invention relates to a process, which comprises:
[0987] a) providing a non-human organism, preferably a microorganism, a non-human animal, a plant or animal cell, a plant or animal tissue or a plant, more preferably a microorganism, a plant or a plant tissue;
[0988] b) increasing the activity of a protein as shown in table II, application no. 3, column 3 or of a polypeptide being encoded by the nucleic acid molecule of the present invention and described below, e.g. conferring an increase of the fine chemical in the organism, preferably in the microorganism, the non-human animal, the plant or animal cell, the plant or animal tissue or the plant, more preferably a microorganism, a plant or a plant tissue, in the cytsol or in the plastids, preferentially in the plastids,
[0989] c) growing the organism, preferably the microorganism, the non-human animal, the plant or animal cell, the plant or animal tissue or the plant under conditions which permit the production of the fine chemical in the organism, preferably the microorganism, the plant cell, the plant tissue or the plant; and
[0990] d) if desired, recovering, optionally isolating, the free and/or bound the fine chemical and, optionally further free and/or bound amino acids synthesized by the organism, the microorganism, the non-human animal, the plant or animal cell, the plant or animal tissue or the plant.

[0991] The organism, in particular the microorganism, non-human animal, the plant or animal cell, the plant or animal tissue or the plant is advantageously grown in such a way that it is not only possible to recover, if desired isolate the free or bound the fine chemical or the free and bound the fine chemical but as option it is also possible to produce, recover and, if desired isolate, other free or/and bound amino acids, in particular tryptophane.

[0992] for the disclosure of the paragraphs [0090.0.0.2] to [0097.0.0.2] see paragraphs [0090.0.0.0] to [0097.0.0.0] above.

[0993] With regard to the nucleic acid sequence as depicted a nucleic acid construct which contains a nucleic acid sequence mentioned herein or an organism (=transgenic organism) which is transformed with said nucleic acid sequence or said nucleic acid construct, “transgene” means all those constructs which have been brought about by genetic manipulation methods, preferably in which either
[0994] a) the nucleic acid sequence as shown in table I, application no. 3, columns 5 and 7 or a derivative thereof, or
[0995] b) a genetic regulatory element, for example a promoter, which is functionally linked to the nucleic acid sequence as shown table I, application no. 3, columns 5 and 7 or a derivative thereof, or
[0996] c) (a) and (b)
   is/are not present in its/their natural genetic environment or has/have been modified by means of genetic manipulation methods, it being possible for the modification to be, by way of example, a substitution, addition, deletion, inversion or insertion of one or more nucleotide. “Natural genetic environment” means the natural chromosomal locus in the organism of origin or the presence in a genomic library. In the case of a genomic library, the natural, genetic environment of the nucleic acid sequence is preferably at least partially still preserved. The environment flanks the nucleic acid sequence at least on one side and has a sequence length of at least 50 bp, preferably at least 500 bp, particularly preferably at least 1000 bp, very particularly preferably at least 5000 bp.

[0997] The use of the nucleic acid sequence according to the invention or of the nucleic acid construct according to the invention for the generation of transgenic plants is therefore also subject matter of the invention. As mentioned above the inventive nucleic acid sequence consists advantageously of the nucleic acid sequences as depicted in the sequence protocol and disclosed in table I, application no. 3, columns 5 and 7 joined to a nucleic acid sequence encoding a transit peptide, or a targeting nucleic acid sequence which directs the nucleic acid sequences disclosed in table I, application no. 3, columns 5 and 7 to the organelle preferentially the plastids. Alternatively the inventive nucleic acids sequences consist advantageously of the nucleic acid sequences as depicted in the sequence protocol and disclosed in table I, application no. 3, columns 5 and 7 joined preferably to a nucleic acids sequence mediating the stable integration of nucleic acids into the plastidial genome and optionally sequences mediating the transcription of the sequence in the plastidial compartment. A transient expression is in principal also desirable and possible.

[0998] for the disclosure of this paragraph see paragraph [0100.0.0.0] above.

[0999] In an advantageous embodiment of the invention, the organism takes the form of a plant whose amino acid content is modified advantageously owing to the nucleic acid molecule of the present invention expressed. This is important for plant breeders since, for example, the nutritional value of plants for monogastric animals is limited by a few essential amino acids such as lysine, threonine or methionine. After the activity of the protein as shown in table II, application no. 3, column 3 has been increased or generated in the cytsol or plastids, preferentially in the plastids, or after the expression of nucleic acid molecule or polypeptide according to the invention has been generated or increased, the transgenic plant generated thus is grown on or in a nutrient medium or else in the soil and subsequently harvested.

[1000] for the disclosure of the paragraphs [0102.0.0.2] to [0110.0.0.2] see paragraphs [0102.0.0.0] to [0110.0.0.0] above.

[1001] In a preferred embodiment, the fine chemical (tryptophane) is produced in accordance with the invention and, if desired, is isolated. The production of further amino acids such as lysine, tryptophane etc. and of amino acid mixtures by the process according to the invention is advantageous.

[1002] for the disclosure of the paragraphs [0112.0.0.2] to [0115.0.0.2] see paragraphs [0112.0.0.0] to [0115.0.0.0] above.

[1003] In a preferred embodiment, the present invention relates to a process for the production of the fine chemical comprising or generating in an organism or a part thereof, preferably in a cell compartment such as a plastid or mitochondria, the expression of at least one nucleic acid molecule comprising a nucleic acid molecule selected from the group consisting of:
[1004] a) nucleic acid molecule encoding, preferably at least the mature form, of the polypeptide shown in table II, application no. 3, columns 5 and 7 or a fragment thereof, which confers an increase in the amount of the fine chemical in an organism or a part thereof;
[1005] b) nucleic acid molecule comprising, preferably at least the mature form, of the nucleic acid molecule shown in table I, application no. 3, columns 5 and 7;
[1006] c) nucleic acid molecule whose sequence can be deduced from a polypeptide sequence encoded by a nucleic acid molecule of (a) or (b) as result of the degeneracy of the genetic code and conferring an increase in the amount of the fine chemical in an organism or a part thereof;
[1007] d) nucleic acid molecule encoding a polypeptide which has at least 50% identity with the amino acid sequence of the polypeptide encoded by the nucleic acid molecule of (a) to (c) and conferring an increase in the amount of the fine chemical in an organism or a part thereof;
[1008] e) nucleic acid molecule which hybridizes with a nucleic acid molecule of (a) to (c) under stringent hybridisation conditions and conferring an increase in the amount of the fine chemical in an organism or a part thereof;
[1009] f) nucleic acid molecule encoding a polypeptide, the polypeptide being derived by substituting, deleting and/or adding one or more amino acids of the amino acid sequence of the polypeptide encoded by the nucleic acid molecules (a) to (d), preferably to (a) to (c) and conferring an increase in the amount of the fine chemical in an organism or a part thereof;
[1010] g) nucleic acid molecule encoding a fragment or an epitope of a polypeptide which is encoded by one of the nucleic acid molecules of (a) to (e), preferably to (a) to (c) and conferring an increase in the amount of the fine chemical in an organism or a part thereof;
[1011] h) nucleic acid molecule comprising a nucleic acid molecule which is obtained by amplifying nucleic acid molecules from a cDNA library or a genomic library using the primers shown in table III, application no. 3, column 7 and conferring an increase in the amount of the fine chemical in an organism or a part thereof;
[1012] i) nucleic acid molecule encoding a polypeptide which is isolated, e.g. from an expression library, with the aid of monoclonal antibodies against a polypeptide encoded by one of the nucleic acid molecules of (a) to (h), preferably to (a) to (c), and conferring an increase in the amount of the fine chemical in an organism or a part thereof;
[1013] j) nucleic acid molecule which encodes a polypeptide comprising the consensus sequence shown in table IV, application no. 3, column 7 and conferring an increase in the amount of the fine chemical in an organism or a part thereof;
[1014] k) nucleic acid molecule comprising one or more of the nucleic acid molecule encoding the amino acid sequence of a polypeptide encoding a domain of the polypeptide shown in table II, application no. 3, columns 5 and 7 and conferring an increase in the amount of the fine chemical in an organism or a part thereof; and
[1015] l) nucleic acid molecule which is obtainable by screening a suitable library under stringent conditions with a probe comprising one of the sequences of the nucleic acid molecule of (a) to (k), preferably to (a) to (c), or with a fragment of at least 15 nt, preferably 20 nt, 30 nt, 50 nt, 100 nt, 200 nt or 500 nt of the nucleic acid molecule characterized in (a) to (k), preferably to (a) to (c), and conferring an increase in the amount of the fine chemical in an organism or a part thereof;
   or which comprises a sequence which is complementary thereto.

[1016] In one embodiment, the nucleic acid molecule used in the process of the invention distinguishes over the sequence indicated in table I A, application no. 3, columns 5 and 7 by one or more nucleotides. In one embodiment, the nucleic acid molecule used in the process of the invention does not consist of the sequence indicated in table I A, application no. 3, columns 5 and 7. In one embodiment, the nucleic acid molecule used in the process of the invention is less than 100%, 99.999%, 99.99%, 99.9% or 99% identical to a sequence indicated in table I A, application no. 3, columns 5 and 7. In another embodiment, the nucleic acid molecule does not encode a polypeptide of a sequence indicated in table II A, application no. 3, columns 5 and 7.

[1017] In one embodiment, the nucleic acid molecule used in the process of the invention distinguishes over the sequence indicated in table I B, application no. 3, columns 5 and 7, by one or more nucleotides. In one embodiment, the nucleic acid molecule used in the process of the invention does not consist of the sequence indicated in table I B, application no. 3, columns 5 and 7. In one embodiment, the nucleic acid molecule used in the process of the invention is less than 100%, 99.999%, 99.99%, 99.9% or 99% identical to a sequence indicated in table I B, application no. 3, columns 5 and 7. In another embodiment, the nucleic acid molecule does not encode a polypeptide of a sequence indicated in table II B, application no. 3, columns 5 and 7.

[1018] In one embodiment, the nucleic acid molecule used in the process distinguishes over the sequence shown in table I, application no. 3, columns 5 and 7 by one or more nucleotides or does not consist of the sequence shown in table I, application no. 3, columns 5 and 7. In one embodiment, the nucleic acid molecule of the present invention is less than 100%, 99.999%, 99.99%, 99.9% or 99% identical to the sequence shown in table I, application no. 3, columns 5 and 7. In another embodiment, the nucleic acid molecule does not encode a polypeptide of the sequence shown in table II, application no. 3, columns 5 and 7.

[1019] for the disclosure of the paragraphs [0118.0.0.2] to [0120.0.0.2] see paragraphs [0118.0.0.0] to [0120.0.0.0] above.

[1020] Nucleic acid molecules with the sequence shown in table I, application no. 3, columns 5 and 7, nucleic acid molecules which are derived from the amino acid sequences shown in table II, application no. 3, columns 5 and 7 or from polypeptides comprising the consensus sequence shown in table IV, application no. 3, column 7, or their derivatives or homologues encoding polypeptides with the enzymatic or biological activity of a protein as shown in table II, application no. 3, column 3 or conferring the fine chemical increase after increasing its expression or activity are advantageously increased in the process according to the invention by expression either in the cytsol or in an organelle such as a plastid or mitochondria or both, preferably in plastids.

[1021] for the disclosure of this paragraph see paragraph [0122.0.0.0] above.

[1022] Nucleic acid molecules, which are advantageous for the process according to the invention and which encode polypeptides with the activity of a protein as shown in table II, application no. 3, column 3 can be determined from generally accessible databases.

[1023] for the disclosure of this paragraph see paragraph [0124.0.0.0] above.

[1024] The nucleic acid molecules used in the process according to the invention take the form of isolated nucleic acid sequences, which encode polypeptides with the activity of the proteins as shown in table II, application no. 3, column 3 and conferring the fine chemical increase by expression either in the cytsol or in an organelle such as a plastid or mitochondria or both, preferably in plastids.

[1025] for the disclosure of the paragraphs [0126.0.0.2] to [0133.0.0.2] see paragraphs [0126.0.0.0] to [0133.0.0.0] above.

[1026] However, it is also possible to use artificial sequences, which differ in one or more bases from the nucleic acid sequences found in organisms, or in one or more amino acid molecules from polypeptide sequences found in organisms, in particular from the polypeptide sequences shown in table II, application no. 3, columns 5 and 7 or the functional homologues thereof as described herein, preferably conferring above-mentioned activity, i.e. conferring the fine chemical increase after increasing its activity, e.g. after increasing the activity of a protein as shown in table II, column 3 by for example expression either in the cytsol or in an organelle such as a plastid or mitochondria or both, preferably in plastids.

[1027] for the disclosure of the paragraphs [0135.0.0.2] to [0140.0.0.2] see paragraphs [0135.0.0.0] to [0140.0.0.0] above.

[1028] Synthetic oligonucleotide primers for the amplification, e.g. as shown in table III, application no. 3, column 7, by means of polymerase chain reaction can be generated on the basis of a sequence shown herein, for example the sequence shown in table I, application no. 3, columns 5 and 7 or the sequences derived from table II, application no. 3, columns 5 and 7.

[1029] Moreover, it is possible to identify conserved regions from various organisms by carrying out protein sequence alignments with the polypeptide used in the process of the invention, in particular with sequences of the polypeptide of the invention, from which conserved regions, and in turn, degenerate primers can be derived. Conserved regions are those, which show a very little variation in the amino acid in one particular position of several homologs from different origin. The consensus sequence shown in table IV, application no. 3, column 7 is derived from said alignments.

[1030] Degenerated primers can then be utilized by PCR for the amplification of fragments of novel proteins having above-mentioned activity, e.g. conferring the increase of the fine chemical after increasing the expression or activity or having the activity of a protein as shown in table II, application no. 3, column 3 or further functional homologs of the polypeptide of the invention from other organisms.

[1031] for the disclosure of the paragraphs [0144.0.0.2] to [0151.0.0.2] see paragraphs [0144.0.0.0] to [0151.0.0.0] above.

[1032] Polypeptides having above-mentioned activity, i.e. conferring the fine chemical increase, derived from other organisms, can be encoded by other DNA sequences which hybridize to the sequences shown in table I, application no. 3, columns 5 and 7, preferably shown in table I B, application no. 3, columns 5 and 7 under relaxed hybridization conditions and which code on expression for peptides having the methionine increasing activity.

[1033] for the disclosure of the paragraphs [0153.0.0.2] to [0159.0.0.2] see paragraphs [0153.0.0.0] to [0159.0.0.0] above.

[1034] Further, the nucleic acid molecule of the invention comprises a nucleic acid molecule, which is a complement of one of the nucleotide sequences of above mentioned nucleic acid molecules or a portion thereof. A nucleic acid molecule which is complementary to one of the nucleotide sequences shown in table I, application no. 3, columns 5 and 7, preferably shown in table I B, application no. 3, columns 5 and 7 is one which is sufficiently complementary to one of the nucleotide sequences shown in table I, application no. 3, columns 5 and 7, preferably shown in table I B, application no 3, columns 5 and 7 such that it can hybridize to one of the nucleotide sequences shown in table I, application no. 3, columns 5 and 7, preferably shown in table I B, application no. 3, columns 5 and 7, thereby forming a stable duplex. Preferably, the hybridisation is performed under stringent hybridization conditions. However, a complement of one of the herein disclosed sequences is preferably a sequence complement thereto according to the base pairing of nucleic acid molecules well known to the skilled person. For example, the bases A and G undergo base pairing with the bases T and U or C, resp. and visa versa. Modifications of the bases can influence the base-pairing partner.

[1035] The nucleic acid molecule of the invention comprises a nucleotide sequence which is at least about 30%, 35%, 40% or 45%, preferably at least about 50%, 55%, 60% or 65%, more preferably at least about 70%, 80%, or 90%, and even more preferably at least about 95%, 97%, 98%, 99% or more homologous to a nucleotide sequence shown in table I, application no. 3, columns 5 and 7, preferably shown in table I B, application no. 3, columns 5 and 7, or a portion thereof and preferably has above mentioned activity, in particular having a fine chemical increasing activity after increasing the activity or an activity of a gene product as shown in table II, application no. 3, column 3 by for example expression either in the cytsol or in an organelle such as a plastid or mitochondria or both, preferably in plastids.

[1036] The nucleic acid molecule of the invention comprises a nucleotide sequence which hybridizes, preferably hybridizes under stringent conditions as defined herein, to one of the nucleotide sequences shown in table I, application no. 3, columns 5 and 7, preferably shown in table I B, application no. 3, columns 5 and 7, or a portion thereof and encodes a protein having above-mentioned activity, e.g. conferring of a tryptophane increase by for example expression either in the cytsol or in an organelle such as a plastid or mitochondria or both, preferably in plastids, and optionally, the activity of a protein as shown in table II, application no. 3, column 3.

[1037] Moreover, the nucleic acid molecule of the invention can comprise only a portion of the coding region of one of the sequences shown in table I, application no. 3, columns 5 and 7, preferably shown in table I B, application no. 3, columns 5 and 7, for example a fragment which can be used as a probe or primer or a fragment encoding a biologically active portion of the polypeptide of the present invention or of a polypeptide used in the process of the present invention, i.e. having above-mentioned activity, e.g. conferring an increase of the fine chemical if its activity is increased by for example expression either in the cytsol or in an organelle such as a plastid or mitochondria or both, preferably in plastids. The nucleotide sequences determined from the cloning of the present protein-according-to-the-invention-encoding gene allows for the generation of probes and primers designed for use in identifying and/or cloning its homologues in other cell types and organisms. The probe/primer typically comprises substantially purified oligonucleotide. The oligonucleotide typically comprises a region of nucleotide sequence that hybridizes under stringent conditions to at least about 12, 15 preferably about 20 or 25, more preferably about 40, 50 or 75 consecutive nucleotides of a sense strand of one of the sequences set forth, e.g., in table I, application no. 3, columns 5 and 7, preferably shown in table I B, application no. 3, columns 5 and 7, an anti-sense sequence of one of the sequences, e.g., set forth in table I, application no. 3, columns 5 and 7, or naturally occurring mutants thereof. Primers based on a nucleotide of invention can be used in PCR reactions to clone homologues of the polypeptide of the invention or of the polypeptide used in the process of the invention, e.g. as the primers described in the examples of the present invention, e.g. as shown in the examples. A PCR with the primers shown in table III, application no. 3, column 7 will result in a fragment of the gene product as shown in table II, column 3.

[1038] for the disclosure of this paragraph see paragraph [0164.0.0.0] above.

[1039] The nucleic acid molecule of the invention encodes a polypeptide or portion thereof which includes an amino acid sequence which is sufficiently homologous to the amino acid sequence shown in table II, application no. 3, columns 5 and 7 such that the protein or portion thereof maintains the ability to participate in the fine chemical production, in particular a tryptophane increasing the activity as mentioned above or as described in the examples in plants or microorganisms is comprised.

[1040] As used herein, the language “sufficiently homologous” refers to proteins or portions thereof which have amino acid sequences which include a minimum number of identical or equivalent amino acid residues (e.g., an amino acid residue which has a similar side chain as an amino acid residue in one of the sequences of the polypeptide of the present invention) to an amino acid sequence shown in table II, application no. 3, columns 5 and 7 such that the protein or portion thereof is able to participate in the increase of the fine chemical production. For examples having the activity of a protein as shown in table II, column 3 and as described herein.

[1041] In one embodiment, the nucleic acid molecule of the present invention comprises a nucleic acid that encodes a portion of the protein of the present invention. The protein is at least about 30%, 35%, 40%, 45% or 50%, preferably at least about 55%, 60%, 65% or 70%, and more preferably at least about 75%, 80%, 85%, 90%, 91%, 92%, 93% or 94% and most preferably at least about 95%, 97%, 98%, 99% or more homologous to an entire amino acid sequence of table II, application no. 3, columns 5 and 7 and having above-mentioned activity, e.g. conferring preferably the increase of the fine chemical by for example expression either in the cytsol or in an organelle such as a plastid or mitochondria or both, preferably in plastids.

[1042] for the disclosure of the paragraphs [0168.0.0.2] and [0169.0.0.2] see paragraphs [0168.0.0.0] to [0169.0.0.0] above.

[1043] The invention further relates to nucleic acid molecules that differ from one of the nucleotide sequences shown in table I, application no. 3, columns 5 and 7 (and portions thereof) due to degeneracy of the genetic code and thus encode a polypeptide of the present invention, in particular a polypeptide having above mentioned activity, e.g. conferring an increase in the fine chemical in a organism, e.g. as that polypeptides depicted by the sequence shown in table II, application no. 3, columns 5 and 7 or the functional homologues. Advantageously, the nucleic acid molecule of the invention comprises, or in an other embodiment has, a nucleotide sequence encoding a protein comprising, or in an other embodiment having, an amino acid sequence shown in table II, application no. 3, columns 5 and 7 or the functional homologues. In a still further embodiment, the nucleic acid molecule of the invention encodes a full length protein which is substantially homologous to an amino acid sequence shown in table II, application no. 3, columns 5 and 7 or the functional homologues. However, in a preferred embodiment, the nucleic acid molecule of the present invention does not consist of the sequence shown in table I, application no. 3, columns 5 and 7, preferably as indicated in table I A, application no. 3, columns 5 and 7. Preferably the nucleic acid molecule of the invention is a functional homologue or identical to a nucleic acid molecule indicated in table I B, application no. 3, columns 5 and 7.

[1044] for the disclosure of the paragraphs [0171.0.0.2] to [0173.0.0.2] see paragraphs [0171.0.0.0] to [0173.0.0.0] above.

[1045] Accordingly, in another embodiment, a nucleic acid molecule of the invention is at least 15, 20, 25 or 30 nucleotides in length. Preferably, it hybridizes under stringent conditions to a nucleic acid molecule comprising a nucleotide sequence of the nucleic acid molecule of the present invention or used in the process of the present invention, e.g. comprising the sequence shown in table I, application no. 3, columns 5 and 7. The nucleic acid molecule is preferably at least 20, 30, 50, 100, 250 or more nucleotides in length.

[1046] for the disclosure of this paragraph see paragraph [0175.0.0.0] above.

[1047] Preferably, nucleic acid molecule of the invention that hybridizes under stringent conditions to a sequence shown in table I, application no. 3, columns 5 and 7 corresponds to a naturally-occurring nucleic acid molecule of the invention. As used herein, a “naturally-occurring” nucleic acid molecule refers to an RNA or DNA molecule having a nucleotide sequence that occurs in nature (e.g., encodes a natural protein). Preferably, the nucleic acid molecule encodes a natural protein having abovementioned activity, e.g. conferring the fine chemical increase after increasing the expression or activity thereof or the activity of a protein of the invention or used in the process of the invention by for example expression the nucleic acid sequence of the gene product in the cytsol and/or in an organelle such as a plastid or mitochondria, preferably in plastids.

[1048] for the disclosure of this paragraph see paragraph [0177.0.0.0] above.

[1049] For example, nucleotide substitutions leading to amino acid substitutions at “non-essential” amino acid residues can be made in a sequence of the nucleic acid molecule of the invention or used in the process of the invention, e.g. shown in table I, application no. 3, columns 5 and 7.

[1050] for the disclosure of the paragraphs [0179.0.0.2] and [0180.0.0.2] see paragraphs [0179.0.0.0] and [0180.0.0.0] above.

[1051] Accordingly, the invention relates to nucleic acid molecules encoding a polypeptide having above-mentioned activity, e.g. conferring an increase in the fine chemical in an organisms or parts thereof by for example expression either in the cytsol or in an organelle such as a plastid or mitochondria or both, preferably in plastids that contain changes in amino acid residues that are not essential for said activity. Such polypeptides differ in amino acid sequence from a sequence contained in the sequences shown in table II, application no. 3, columns 5 and 7, preferably shown in table II A, application no. 3, columns 5 and 7 yet retain said activity described herein. The nucleic acid molecule can comprise a nucleotide sequence encoding a polypeptide, wherein the polypeptide comprises an amino acid sequence at least about 50% identical to an amino acid sequence shown in table II, application no. 3, columns 5 and 7, preferably shown in table II A, application no. 3, columns 5 and 7 and is capable of participation in the increase of production of the fine chemical after increasing its activity, e.g. its expression by for example expression either in the cytsol or in an organelle such as a plastid or mitochondria or both, preferably in plastids. Preferably, the protein encoded by the nucleic acid molecule is at least about 60% identical to the sequence shown in table II, application no. 3, columns 5 and 7, preferably shown in table II A, application no. 3, columns 5 and 7, more preferably at least about 70% identical to one of the sequences shown in table II, application no. 3, columns 5 and 7, preferably shown in table II A, application no. 3, columns 5 and 7, even more preferably at least about 80%, 90%, 95% homologous to the sequence shown in table II, application no. 3, columns 5 and 7, preferably shown in table II A, application no. 3, columns 5 and 7, and most preferably at least about 96%, 97%, 98%, or 99% identical to the sequence shown in table II, application no. 3, columns 5 and 7, preferably shown in table II A, application no. 3, columns 5 and 7.

[1052] for the disclosure of the paragraphs [0182.0.0.2] to [0188.0.0.2] see paragraphs [0182.0.0.0] to [0188.0.0.0] above.

[1053] Functional equivalents derived from one of the polypeptides as shown in table II, application no. 3, columns 5 and 7, preferably shown in table II B, application no. 3, columns 5 and 7 resp., according to the invention by substitution, insertion or deletion have at least 30%, 35%, 40%, 45% or 50%, preferably at least 55%, 60%, 65% or 70% by preference at least 80%, especially preferably at least 85% or 90%, 91%, 92%, 93% or 94%, very especially preferably at least 95%, 97%, 98% or 99% homology with one of the polypeptides as shown in table II, application no. 3, columns 5 and 7, preferably shown in table II B, application no. 3, columns 5 and 7 resp., according to the invention and are distinguished by essentially the same properties as the polypeptide as shown in table II, application no. 3, columns 5 and 7, preferably shown in table II B, application no. 3, columns 5 and 7.

[1054] Functional equivalents derived from the nucleic acid sequence as shown in table I, application no. 3, columns 5 and 7, preferably shown in table I B, application no. 3, columns 5 and 7 resp., according to the invention by substitution, insertion or deletion have at least 30%, 35%, 40%, 45% or 50%, preferably at least 55%, 60%, 65% or 70% by preference at least 80%, especially preferably at least 85% or 90%, 91%, 92%, 93% or 94%, very especially preferably at least 95%, 97%, 98% or 99% homology with one of the polypeptides as shown in table II, application no. 3, columns 5 and 7, preferably shown in table II B, application no. 3, columns 5 and 7 resp., according to the invention and encode polypeptides having essentially the same properties as the polypeptide as shown in table II, application no. 3, columns 5 and 7, preferably shown in table II B, application no. 3, columns 5 and 7.

[1055] for the disclosure of this paragraph see paragraph [0191.0.0.0] above.

[1056] A nucleic acid molecule encoding an homologous to a protein sequence of table II, application no. 3, columns 5 and 7, preferably shown in table II B, application no. 3, columns 5 and 7 resp., can be created by introducing one or more nucleotide substitutions, additions or deletions into a nucleotide sequence of the nucleic acid molecule of the present invention, in particular of table I, application no. 3, columns 5 and 7, preferably shown in table I B, application no. 3, columns 5 and 7 resp., such that one or more amino acid substitutions, additions or deletions are introduced into the encoded protein. Mutations can be introduced into the encoding sequences of table I, application no. 3, columns 5 and 7, preferably shown in table I B, application no. 3, columns 5 and 7 resp., by standard techniques, such as site-directed mutagenesis and PCR-mediated mutagenesis.

[1057] for the disclosure of the paragraphs [0193.0.0.2] to [0196.0.0.2] see paragraphs [0193.0.0.0] to [0196.0.0.0] above.

[1058] Homologues of the nucleic acid sequences used, with the sequence shown in table I, application no. 3, columns 5 and 7, preferably shown in table I B, application no. 3, columns 5 and 7, comprise also allelic variants with at least approximately 30%, 35%, 40% or 45% homology, by preference at least approximately 50%, 60% or 70%, more preferably at least approximately 90%, 91%, 92%, 93%, 94% or 95% and even more preferably at least approximately 96%, 97%, 98%, 99% or more homology with one of the nucleotide sequences shown or the abovementioned derived nucleic acid sequences or their homologues, derivatives or analogues or parts of these. Allelic variants encompass in particular functional variants which can be obtained by deletion, insertion or substitution of nucleotides from the sequences shown, preferably from table I, application no. 3, columns 5 and 7, preferably shown in table I B, application no. 3, columns 5 and 7, or from the derived nucleic acid sequences, the intention being, however, that the enzyme activity or the biological activity of the resulting proteins synthesized is advantageously retained or increased.

[1059] In one embodiment of the present invention, the nucleic acid molecule of the invention or used in the process of the invention comprises the sequences shown in any of the table I, application no. 3, columns 5 and 7, preferably shown in table I B, application no. 3, columns 5 and 7. It is preferred that the nucleic acid molecule comprises as little as possible other nucleotides not shown in any one of table I, application no. 3, columns 5 and 7, preferably shown in table I B, application no. 3, columns 5 and 7. In one embodiment, the nucleic acid molecule comprises less than 500, 400, 300, 200, 100, 90, 80, 70, 60, 50 or 40 further nucleotides. In a further embodiment, the nucleic acid molecule comprises less than 30, 20 or 10 further nucleotides. In one embodiment, the nucleic acid molecule use in the process of the invention is identical to the sequences shown in table I, application no. 3, columns 5 and 7, preferably shown in table I B, application no. 3, columns 5 and 7.

[1060] Also preferred is that the nucleic acid molecule used in the process of the invention encodes a polypeptide comprising the sequence shown in table II, application no. 3, columns 5 and 7, preferably shown in table II B, application no. 3, columns 5 and 7. In one embodiment, the nucleic acid molecule encodes less than 150, 130, 100, 80, 60, 50, 40 or 30 further amino acids. In a further embodiment, the encoded polypeptide comprises less than 20, 15, 10, 9, 8, 7, 6 or 5 further amino acids. In one embodiment used in the inventive process, the encoded polypeptide is identical to the sequences shown in table II, application no. 3, columns 5 and 7, preferably shown in table II B, application no. 3, columns 5 and 7.

[1061] In one embodiment, the nucleic acid molecule of the invention or used in the process encodes a polypeptide comprising the sequence shown in table II, application no. 3, columns 5 and 7, preferably shown in table II B, application no. 3, columns 5 and 7 comprises less than 100 further nucleotides. In a further embodiment, said nucleic acid molecule comprises less than 30 further nucleotides. In one embodiment, the nucleic acid molecule used in the process is identical to a coding sequence of the sequences shown in table I, application no. 3, columns 5 and 7, preferably shown in table I B, application no. 3, columns 5 and 7.

[1062] Polypeptides (=proteins), which still have the essential biological or enzymatic activity of the polypeptide of the present invention conferring an increase of the fine chemical i.e. whose activity is essentially not reduced, are polypeptides with at least 10% or 20%, by preference 30% or 40%, especially preferably 50% or 60%, very especially preferably 80% or 90 or more of the wild type biological activity or enzyme activity, advantageously, the activity is essentially not reduced in comparison with the activity of a polypeptide shown in table II, application no. 3, columns 5 and 7 expressed under identical conditions.

[1063] Homologues of table I, application no. 3, columns 5 and 7 or of the derived sequences of table II, application no. 3, columns 5 and 7 also mean truncated sequences, cDNA, single-stranded DNA or RNA of the coding and noncoding DNA sequence. Homologues of said sequences are also understood as meaning derivatives, which comprise noncoding regions such as, for example, UTRs, terminators, enhancers or promoter variants. The promoters upstream of the nucleotide sequences stated can be modified by one or more nucleotide substitution(s), insertion(s) and/or deletion(s) without, however, interfering with the functionality or activity either of the promoters, the open reading frame (=ORF) or with the 3′-regulatory region such as terminators or other 3′ regulatory regions, which are far away from the ORF. It is furthermore possible that the activity of the promoters is increased by modification of their sequence, or that they are replaced completely by more active promoters, even promoters from heterologous organisms. Appropriate promoters are known to the person skilled in the art and are mentioned herein below.

[1064] for the disclosure of the paragraphs [0203.0.0.2] to [0215.0.0.2] see paragraphs [0203.0.0.0] to [0215.0.0.0] above.

[1065] Accordingly, in one embodiment, the invention relates to a nucleic acid molecule, which comprises a nucleic acid molecule selected from the group consisting of:
[1066] a) nucleic acid molecule encoding, preferably at least the mature form, of the polypeptide shown in table II, application no. 3, columns 5 and 7, preferably in Table II B, application no. 3, columns 5 and 7; or a fragment thereof conferring an increase in the amount of the fine chemical in an organism or a part thereof
[1067] b) nucleic acid molecule comprising, preferably at least the mature form, of the nucleic acid molecule shown in table I, application no. 3, columns 5 and 7, preferably in Table I B, application no. 3, columns 5 and 7 or a fragment thereof conferring an increase in the amount of the fine chemical in an organism or a part thereof;
[1068] c) nucleic acid molecule whose sequence can be deduced from a polypeptide sequence encoded by a nucleic acid molecule of (a) or (b) as result of the degeneracy of the genetic code and conferring an increase in the amount of the fine chemical in an organism or a part thereof;
[1069] d) nucleic acid molecule encoding a polypeptide whose sequence has at least 50% identity with the amino acid sequence of the polypeptide encoded by the nucleic acid molecule of (a) to (c) and conferring an increase in the amount of the fine chemical in an organism or a part thereof;
[1070] e) nucleic acid molecule which hybridizes with a nucleic acid molecule of (a) to (c) under stringent hybridisation conditions and conferring an increase in the amount of the fine chemical in an organism or a part thereof;
[1071] f) nucleic acid molecule encoding a polypeptide, the polypeptide being derived by substituting, deleting and/or adding one or more amino acids of the amino acid sequence of the polypeptide encoded by the nucleic acid molecules (a) to (d), preferably to (a) to (c), and conferring an increase in the amount of the fine chemical in an organism or a part thereof;
[1072] g) nucleic acid molecule encoding a fragment or an epitope of a polypeptide which is encoded by one of the nucleic acid molecules of (a) to (e), preferably to (a) to (c) and conferring an increase in the amount of the fine chemical in an organism or a part thereof;
[1073] h) nucleic acid molecule comprising a nucleic acid molecule which is obtained by amplifying a cDNA library or a genomic library using the primers in table III, application no. 3, column 7 and conferring an increase in the amount of the fine chemical in an organism or a part thereof;
[1074] i) nucleic acid molecule encoding a polypeptide which is isolated, e.g. from a expression library, with the aid of monoclonal antibodies against a polypeptide encoded by one of the nucleic acid molecules of (a) to (g), preferably to (a) to (c) and conferring an increase in the amount of the fine chemical in an organism or a part thereof;
[1075] j) nucleic acid molecule which encodes a polypeptide comprising the consensus sequence shown in table IV, application no. 3, columns 7 and conferring an increase in the amount of the fine chemical in an organism or a part thereof;
[1076] k) nucleic acid molecule encoding the amino acid sequence of a polypeptide encoding a domain of the polypeptide shown in table II, application no. 3, columns 5 and 7 and conferring an increase in the amount of the fine chemical in an organism or a part thereof; and
[1077] l) nucleic acid molecule which is obtainable by screening a suitable nucleic acid library under stringent hybridization conditions with a probe comprising one of the sequences of the nucleic acid molecule of (a) to (k) or with a fragment of at least 15 nt, preferably 20 nt, 30 nt, 50 nt, 100 nt, 200 nt or 500 nt of the nucleic acid molecule characterized in (a) to (h) or of the nucleic acid molecule shown in table I, application no. 3, columns 5 and 7 or a nucleic acid molecule encoding, preferably at least the mature form of, the polypeptide shown in table II, application no. 3, columns 5 and 7, and conferring an increase in the amount of the fine chemical in an organism or a part thereof; or which encompasses a sequence which is complementary thereto;
   whereby, preferably, the nucleic acid molecule according to (a) to (l) distinguishes over the sequence depicted in table IA and/or I B, application no. 3, columns 5 and 7 by one or more nucleotides. In one embodiment, the nucleic acid molecule of the invention does not consist of the sequence shown in table IA and/or I B, application no. 3, columns 5 and 7. In an other embodiment, the nucleic acid molecule of the present invention is at least 30% identical and less than 100%, 99.999%, 99.99%, 99.9% or 99% identical to the sequence shown in table IA and/or I B, application no. 3, columns 5 and 7. In a further embodiment the nucleic acid molecule does not encode the polypeptide sequence shown in table II A and/or II B, application no. 3, columns 5 and 7. Accordingly, in one embodiment, the nucleic acid molecule of the present invention encodes in one embodiment a polypeptide which differs at least in one or more amino acids from the polypeptide shown in table II A and/or II B, application no. 3, columns 5 and 7 does not encode a protein of the sequence shown in table II A and/or II B, application no. 3, columns 5 and 7. Accordingly, in one embodiment, the protein encoded by a sequence of a nucleic acid according to (a) to (l) does not consist of the sequence shown in table IA and/or I B, application no. 3, columns 5 and 7. In a further embodiment, the protein of the present invention is at least 30% identical to protein sequence depicted in table II A and/or II B, application no. 3, columns 5 and 7 and less than 100%, preferably less than 99.999%, 99.99% or 99.9%, more preferably less than 99%, 985, 97%, 96% or 95% identical to the sequence shown in table II A and/or II B, application no. 3, columns 5 and 7.

[1078] for the disclosure of the paragraphs [0217.0.0.2] to [0226.0.0.2] see paragraphs [0217.0.0.0] to [0226.0.0.0] above.

[1079] In general, vector systems preferably also comprise further cis-regulatory regions such as promoters and terminators and/or selection markers by means of which suitably transformed organisms can be identified. While vir genes and T-DNA sequences are located on the same vector in the case of cointegrated vector systems, binary systems are based on at least two vectors, one of which bears vir genes, but no T-DNA, while a second one bears T-DNA, but no vir gene. Owing to this fact, the last-mentioned vectors are relatively small, easy to manipulate and capable of replication in E. coli and in Agrobacterium. These binary vectors include vectors from the series pBIB-HYG, pPZP, pBecks, pGreen. Those which are preferably used in accordance with the invention are Bin19, pBI101, pBinAR, pGPTV and pCAMBIA. An overview of binary vectors and their use is given by Hellens et al, Trends in Plant Science (2000) 5, 446-451. The vectors are preferably modified in such a manner, that they already contain the nucleic acid coding for the transitpeptide and that the nucleic acids of the invention, preferentially the nucleic acid sequences encoding the polypeptides shown in table II, application no. 3, columns 5 and 7 can be cloned 3″ prime to the transitpeptide encoding sequence, leading to a functional preprotein, which is directed to the plastids and which means that the mature protein fulfills its biological activity.

[1080] for the disclosure of the paragraphs [0228.0.0.2] to [0239.0.0.2] see paragraphs [0228.0.0.0] to [0239.0.0.0] above.

[1081] In addition to the sequence mentioned in table I, application no. 3, columns 5 and 7 or its derivatives, it is advantageous additionally to express and/or mutate further genes in the organisms. Especially advantageously, additionally at least one further gene of the amino acid biosynthetic pathway such as for L-lysine, L-threonine, L-tryptophane and/or L-methionine is expressed in the organisms such as plants or microorganisms. It is also possible that the regulation of the natural genes has been modified advantageously so that the gene and/or its gene product is no longer subject to the regulatory mechanisms which exist in the organisms. This leads to an increased synthesis of the amino acids desired since, for example, feedback regulations no longer exist to the same extent or not at all. In addition it might be advantageously to combine the nucleic acids sequences of the invention containing the sequences shown in table I, application no. 3, columns 5 and 7 with genes which generally support or enhances to growth or yield of the target organism, for example genes which lead to faster growth rate of microorganisms or genes which produces stress-, pathogen, or herbicide resistant plants.

[1082] for the disclosure of the paragraphs [0241.0.0.2] to [0264.0.0.2] see paragraphs [0241.0.0.0] to [0264.0.0.0] above.

[1083] Other preferred sequences for use in operable linkage in gene expression constructs are targeting sequences, which are required for targeting the gene product into specific cell compartments (for a review, see Kermode, Crit. Rev. Plant Sci. 15, 4 (1996) 285-423 and references cited therein), for example into the vacuole, the nucleus, all types of plastids, such as amyloplasts, chloroplasts, chromoplasts, the extracellular space, the mitochondria, the endoplasmic reticulum, elaioplasts, peroxisomes, glycosomes, and other compartments of cells or extracellular preferred are sequences, which are involved in targeting to plastids as mentioned above. Sequences, which must be mentioned in this context are, in particular, the signal-peptide- or transit-peptide-encoding sequences which are known per se. For example, plastid-transit-peptide-encoding sequences enable the targeting of the expression product into the plastids of a plant cell. Targeting sequences are also known for eukaryotic and to a lower extent for prokaryotic organisms and can advantageously be operable linked with the nucleic acid molecule of the present invention as shown in table I, application no. 3, columns 5 and 7 and described herein to achieve an expression in one of said compartments or extracellular.

[1084] for the disclosure of the paragraphs [0266.0.0.2] to [0287.0.0.2] see paragraphs [0266.0.0.0] to [0287.0.0.0] above.

[1085] Accordingly, one embodiment of the invention relates to a vector where the nucleic acid molecule according to the invention is linked operably to regulatory sequences which permit the expression in a prokaryotic or eukaryotic or in a prokaryotic and eukaryotic host. A further preferred embodiment of the invention relates to a vector in which a nucleic acid sequence encoding one of the polypeptides shown in table II, application no. 3, columns 5 and 7 or their homologs is functionally linked to a plastidial targeting sequence. A further preferred embodiment of the invention relates to a vector in which a nucleic acid sequence encoding one of the polypeptides shown in table II, application no. 3, columns 5 and 7 or their homologs is functionally linked to a regulatory sequences which permit the expression in plastids.

[1086] for the disclosure of the paragraphs [0289.0.0.2] to [0296.0.0.2] see paragraphs [0289.0.0.0] to [0296.0.0.0] above.

[1087] Moreover, native polypeptide conferring the increase of the fine chemical in an organism or part thereof can be isolated from cells (e.g., endothelial cells), for example using the antibody of the present invention as described below, in particular, an anti-b1223, anti-b1704, anti-b2601, anti-b2965, anti-b3390, anti-YOR353C, anti-YDR035W, anti-YER024 and/or anti-YNL241C protein antibody or an antibody against polypeptides as shown in table II, application no. 3, columns 5 and 7, which can be produced by standard techniques utilizing the polypeptide of the present invention or fragment thereof, i.e., the polypeptide of this invention. Preferred are monoclonal antibodies.

[1088] for the disclosure of this paragraph see paragraph [0298.0.0.0] above.

[1089] In one embodiment, the present invention relates to a polypeptide having the sequence shown in table II, application no. 3, columns 5 and 7 or as coded by the nucleic acid molecule shown in table I, application no. 3, columns 5 and 7 or functional homologues thereof.

[1090] In one advantageous embodiment, in the method of the present invention the activity of a polypeptide is increased comprising or consisting of the consensus sequence shown in table IV, application no. 3, columns 7 and in one another embodiment, the present invention relates to a polypeptide comprising or consisting of the consensus sequence shown in table IV, application no. 3, columns 7 whereby 20 or less, preferably 15 or 10, preferably 9, 8, 7, or 6, more preferred 5 or 4, even more preferred 3, even more preferred 2, even more preferred 1, most preferred 0 of the amino acids positions indicated can be replaced by any amino acid.

[1091] for the disclosure of the paragraphs [0301.0.0.2] to [0304.0.0.2] see paragraphs [0301.0.0.0] to [0304.0.0.0] above.

[1092] In one advantageous embodiment, the method of the present invention comprises the increasing of a polypeptide comprising or consisting of plant or microorganism specific consensus sequences.

In one embodiment, said polypeptide of the invention distinguishes over the sequence shown in table II A and/or II B, application no. 3, columns 5 and 7 by one or more amino acids. In one embodiment, polypeptide distinguishes form the sequence shown in table II A and/or II B, application no. 3, columns 5 and 7 by more than 5, 6, 7, 8 or 9 amino acids, preferably by more than 10, 15, 20, 25 or 30 amino acids, even more preferred are more than 40, 50, or 60 amino acids and, preferably, the sequence of the polypeptide of the invention distinguishes from the sequence shown in table II A and/or II B, application no. 3, columns 5 and 7 by not more than 80% or 70% of the amino acids, preferably not more than 60% or 50%, more preferred not more than 40% or 30%, even more preferred not more than 20% or 10%. In an other embodiment, said polypeptide of the invention does not consist of the sequence shown in table II A and/or II B, application no. 3, columns 5 and 7.

[1093] for the disclosure of this paragraph see paragraph [0306.0.0.0] above.

[1094] In one embodiment, the invention relates to polypeptide conferring an increase in the fine chemical in an organism or part being encoded by the nucleic acid molecule of the invention or used in the process of the invention and having a sequence which distinguishes from the sequence as shown in table II A and/or II B, application no. 3, columns 5 and 7 by one or more amino acids. In another embodiment, said polypeptide of the invention does not consist of the sequence shown in table II A and/or II B, application no. 3, columns 5 and 7. In a further embodiment, said polypeptide of the present invention is less than 100%, 99.999%, 99.99%, 99.9% or 99% identical. In one embodiment, said polypeptide does not consist of the sequence encoded by the nucleic acid molecules shown in table I A and/or I B, application no. 3, columns 5 and 7.

[1095] In one embodiment, the present invention relates to a polypeptide having the activity of the protein as shown in table II A and/or II B, application no. 3, column 3, which distinguishes over the sequence depicted in table II A and/or II B, application no. 3, columns 5 and 7 by one or more amino acids, preferably by more than 5, 6, 7, 8 or 9 amino acids, preferably by more than 10, 15, 20, 25 or 30 amino acids, even more preferred are more than 40, 50, or 60 amino acids but even more preferred by less than 70% of the amino acids, more preferred by less than 50%, even more preferred my less than 30% or 25%, more preferred are 20% or 15%, even more preferred are less than 10%. In a further preferred embodiment the polypeptide of the invention takes the form of a preprotein consisting of a plastidial transitpeptide joint to a polypeptide having the activity of the protein as shown in table II A and/or II B, column 3, from which the transitpeptide is preferably cleaved off upon transport of the preprotein into the organelle for example into the plastid or mitochondria.

[1096] for the disclosure of the paragraphs [0309.0.0.2] to [0311.0.0.2] see paragraphs [0309.0.0.0] to [0311.0.0.0] above.

[1097] A polypeptide of the invention can participate in the process of the present invention. The polypeptide or a portion thereof comprises preferably an amino acid sequence, which is sufficiently homologous to an amino acid sequence shown in table II A and/or II B, application no. 3, columns 5 and 7.

[1098] Further, the polypeptide can have an amino acid sequence which is encoded by a nucleotide sequence which hybridizes, preferably hybridizes under stringent conditions as described above, to a nucleotide sequence of the nucleic acid molecule of the present invention. Accordingly, the polypeptide has an amino acid sequence which is encoded by a nucleotide sequence that is at least about 35%, 40%, 45%, 50%, 55%, 60%, 65% or 70%, preferably at least about 75%, 80%, 85% or 90, and more preferably at least about 91%, 92%, 93%, 94% or 95%, and even more preferably at least about 96%, 97%, 98%, 99% or more homologous to one of the amino acid sequences as shown in table II A and/or II B, application no. 3, columns 5 and 7. The preferred polypeptide of the present invention preferably possesses at least one of the activities according to the invention and described herein. A preferred polypeptide of the present invention includes an amino acid sequence encoded by a nucleotide sequence which hybridizes, preferably hybridizes under stringent conditions, to a nucleotide sequence of table I A and/or I B, application no. 3, columns 5 and 7 or which is homologous thereto, as defined above.

[1099] Accordingly the polypeptide of the present invention can vary from the sequences shown in table II A and/or II B, application no. 3, columns 5 and 7 in amino acid sequence due to natural variation or mutagenesis, as described in detail herein. Accordingly, the polypeptide comprise an amino acid sequence which is at least about 35%, 40%, 45%, 50%, 55%, 60%, 65% or 70%, preferably at least about 75%, 80%, 85% or 90, and more preferably at least about 91%, 92%, 93%, 94% or 95%, and most preferably at least about 96%, 97%, 98%, 99% or more homologous to an entire amino acid sequence shown in table II A and/or II B, application no. 3, columns 5 and 7.

[1100] for the disclosure of this paragraph see paragraph [0315.0.0.0] above.

[1101] Biologically active portions of an polypeptide of the present invention include peptides comprising amino acid sequences derived from the amino acid sequence of the polypeptide of the present invention or used in the process of the present invention, e.g., the amino acid sequence shown in table II, application no. 3, columns 5 and 7 or the amino acid sequence of a protein homologous thereto, which include fewer amino acids than a full length polypeptide of the present invention or used in the process of the present invention or the full length protein which is homologous to an polypeptide of the present invention or used in the process of the present invention depicted herein, and exhibit at least one activity of polypeptide of the present invention or used in the process of the present invention.

[1102] for the disclosure of this paragraph see paragraph [0317.0.0.0] above.

[1103] Manipulation of the nucleic acid molecule of the invention may result in the production of a protein having differences from the wild-type protein as shown in table II, application no. 3, column 3. Differences shall mean at least one amino acid different from the sequences as shown in table II, application no. 3, column 3, preferably at least 2, 3, 4, 5, 6, 7, 8, 9 or 10 amino acids, more preferably at least 15, 20, 25, 30, 35, 40, 45 or 50 amino acids different from the sequences as shown in table II, application no. 3, column 3. These proteins may be improved in efficiency or activity, may be present in greater numbers in the cell than is usual, or may be decreased in efficiency or activity in relation to the wild type protein.

[1104] Any mutagenesis strategies for the polypeptide of the present invention or the polypeptide used in the process of the present invention to result in increasing said activity are not meant to be limiting; variations on these strategies will be readily apparent to one skilled in the art. Using such strategies, and incorporating the mechanisms disclosed herein, the nucleic acid molecule and polypeptide of the invention may be utilized to generate plants or parts thereof, expressing wildtype proteins or mutated proteins of the proteins as shown in table II, application no. 3, column 3. The nucleic acid molecules and polypeptide molecules of the invention are expressed such that the yield, production, and/or efficiency of production of a desired compound is improved.

[1105] for the disclosure of the paragraphs [0320.0.0.2] to [0322.0.0.2] see paragraphs [0320.0.0.0] to [0322.0.0.0] above.

[1106] In one embodiment, a protein (=polypeptide) as shown in table II, application no. 3, column 3 refers to a polypeptide having an amino acid sequence corresponding to the polypeptide of the invention or used in the process of the invention, whereas a “non-inventive protein or polypeptide” or “other polypeptide” refers to a polypeptide having an amino acid sequence corresponding to a protein which is not substantially homologous to a polypeptide of the invention, preferably which is not substantially homologous to a polypeptide or protein as shown in table II, application no. 3, column 3, e.g., a protein which does not confer the activity described herein and which is derived from the same or a different organism.

[1107] for the disclosure of the paragraphs [0324.0.0.2] to [0329.0.0.2] see paragraphs [0324.0.0.0] to [0329.0.0.0] above.

[1108] In an especially preferred embodiment, the polypeptide according to the invention furthermore also does not have the sequences of those proteins which are encoded by the sequences shown in table II, application no. 3, columns 5 and 7.

[1109] for the disclosure of the paragraphs [0331.0.0.2] to [0346.0.0.2] see paragraphs [0331.0.0.0] to [0346.0.0.0] above.

[1110] Accordingly the present invention relates to any cell transgenic for any nucleic acid characterized as part of the invention, e.g. conferring the increase of the fine chemical in a cell or an organism or a part thereof, e.g. the nucleic acid molecule of the invention, the nucleic acid construct of the invention, the antisense molecule of the invention, the vector of the invention or a nucleic acid molecule encoding the polypeptide of the invention, e.g. encoding a polypeptide having an activity as the protein as shown in table II, application no. 3, column 3. Due to the above mentioned activity the fine chemical content in a cell or an organism is increased. For example, due to modulation or manipulation, the cellular activity is increased preferably in organelles such as plastids or mitochondria, e.g. due to an increased expression or specific activity or specific targeting of the subject matters of the invention in a cell or an organism or a part thereof especially in organelles such as plastids or mitochondria. Transgenic for a polypeptide having a protein or activity means herein that due to modulation or manipulation of the genome, the activity of protein as shown in table II, application no. 3, column 3 or a protein as shown in table II, application no. 3, column 3-like activity is increased in the cell or organism or part thereof especially in organelles such as plastids or mitochondria. Examples are described above in context with the process of the invention.

[1111] for the disclosure of this paragraph see paragraph [0348.0.0.0] above.

[1112] A naturally occurring expression cassette—for example the naturally occurring combination of the promoter of the gene encoding a protein as shown in table II, application no. 3, column 3 with the corresponding encoding gene—becomes a transgenic expression cassette when it is modified by non-natural, synthetic “artificial” methods such as, for example, mutagenization. Such methods have been described (U.S. Pat. No. 5,565,350; WO 00/15815; also see above).

[1113] for the disclosure of the paragraphs [0350.0.0.2] to [0369.0.0.2] see paragraphs [0350.0.0.0] to [0369.0.0.0] above.

[1114] The fermentation broths obtained in this way, containing in particular L-phenylalanine, L-tyrosine and/or L-tryptophane preferably L-tryptophane, normally have a dry matter content of from 7.5 to 25% by weight. The fermentation broth can be processed further. Depending on requirements, the biomass can be removed entirely or partly by separation methods, such as, for example, centrifugation, filtration, decantation or a combination of these methods, from the fermentation broth or left completely in it. The fermentation broth can then be thickened or concentrated by known methods, such as, for example, with the aid of a rotary evaporator, thin-film evaporator, falling film evaporator, by reverse osmosis or by nanofiltration. This concentrated fermentation broth can then be worked up by freeze-drying, spray drying, spray granulation or by other processes.

[1115] for the disclosure of the paragraphs [0371.0.0.2] to [0376.0.0.2], [0376.1.0.2] and [0377.0.0.2] see paragraphs [0371.0.0.0] to [0376.0.0.0], [0376.1.0.0] and [0377.0.0.0] above.

[1116] In one embodiment, the present invention relates to a method for the identification of a gene product conferring an increase in the fine chemical production in a cell, comprising the following steps:
[1117] (a) contacting e.g. hybridising, the nucleic acid molecules of a sample, e.g. cells, tissues, plants or microorganisms or a nucleic acid library, which can contain a candidate gene encoding a gene product conferring an increase in the fine chemical after expression, with the nucleic acid molecule of the present invention;
[1118] (b) identifying the nucleic acid molecules, which hybridize under relaxed stringent conditions with the nucleic acid molecule of the present invention in particular to the nucleic acid molecule sequence shown in table I, application no. 3, columns 5 and 7, preferably in table I B, application no. 3, columns 5 and 7, and, optionally, isolating the full length cDNA clone or complete genomic clone;
[1119] (c) introducing the candidate nucleic acid molecules in host cells, preferably in a plant cell or a microorganism, appropriate for producing the fine chemical;
[1120] (d) expressing the identified nucleic acid molecules in the host cells;
[1121] (e) assaying the fine chemical level in the host cells; and
[1122] (f) identifying the nucleic acid molecule and its gene product which expression confers an increase in the fine chemical level in the host cell after expression compared to the wild type.

[1123] for the disclosure of the paragraphs [0379.0.0.2] to [0383.0.0.2] see paragraphs [0379.0.0.0] to [0383.0.0.0] above.

[1124] The screen for a gene product or an agonist conferring an increase in the fine chemical production can be performed by growth of an organism for example a microorganism in the presence of growth reducing amounts of an inhibitor of the synthesis of the fine chemical. Better growth, eg higher dividing rate or high dry mass in comparison to the control under such conditions would identify a gene or gene product or an agonist conferring an increase in fine chemical production.

One can think to screen for increased fine chemical production by for example resistance to drugs blocking fine chemical synthesis and looking whether this effect is dependent on the proteins as shown in table II, application no. 3, column 3, eg comparing near identical organisms with low and high activity of the proteins as shown in table II, application no. 3, column 3.

[1125] for the disclosure of the paragraphs [0385.0.0.2] to [0435.0.0.2] see paragraphs [0385.0.0.0] to [0435.0.0.0] above.

[1126] Trytophane Production in Chlamydomonas reinhardtii

The amino acid production can be analysed as mentioned above. The proteins and nucleic acids can be analysed as mentioned below.

[1127] for the disclosure of the paragraphs [0437.0.0.2] to [0497.0.0.2] see paragraphs [0437.0.0.0] to [0497.0.0.0] above.
[1128] The results of the different plant analyses can be seen from the table, which follows:

TABLE VI

| ORF | Metabolite | Method | Min | Max |
|---|---|---|---|---|
| YOR353C | Tryptophane | LC | 1.30 | 2.29 |
| YDR035W | Tryptophane | LC | 1.39 | 2.44 |
| YER024W | Tryptophane | LC | 1.27 | 1.38 |
| YNL241C | Tryptophane | LC | 1.30 | 1.43 |
| b1223 | Tryptophane | LC | 1.40 | 2.47 |
| b3390 | Tryptophane | LC + GC | 1.31 | 4.56 |
| b1704 | Tryptophane | LC | 4.05 | 18.11 |
| b2601 | Tryptophane | LC | 1.54 | 3.92 |
| b2965 | Tryptophane | LC | 1.33 | 4.57 |

[1129] for the disclosure of the paragraphs [0499.0.0.2] and [0500.0.0.2] see paragraphs [0499.0.0.0] and [0500.0.0.0] above.

### Example 15a

### Engineering Ryegrass Plants by Over-Expressing YDR03W from Saccharomyces cerevisiae or Homologs of YDR03W from Other Organisms

[1130] for the disclosure of the paragraphs [0502.0.0.2] to [0508.0.0.2] see paragraphs [0502.0.0.0] to [0508.0.0.0] above.

### Example 15b

### Engineering Soybean Plants by Over-Expressing YDR03W from Saccharomyces cerevisiae or Homologs of YDR03W from Other Organisms

[1131] for the disclosure of the paragraphs [0510.0.0.2] to [0513.0.0.2] see paragraphs [0510.0.0.0] to [0513.0.0.0] above.

### Example 15c

### Engineering Corn Plants by Over-Expressing YDR03W from Saccharomyces cerevisiae or Homologs of YDR03W from Other Organisms

[1132] for the disclosure of the paragraphs [0515.0.0.2] to [0540.0.0.2] see paragraphs [0515.0.0.0] to [0540.0.0.0] above.

### Example 15d

### Engineering Wheat Plants by Over-Expressing YDR03W from Saccharomyces cerevisiae or Homologs of YDR03W from Other Organisms

[1133] for the disclosure of the paragraphs [0542.0.0.2] to [0544.0.0.2] see paragraphs [0542.0.0.0] to [0544.0.0.0] above.

### Example 15e

### Engineering Rapeseed/Canola Plants by Over-Expressing YDR03W from Saccharomyces cerevisiae or Homologs of YDR03W from Other Organisms

[1134] for the disclosure of the paragraphs [0546.0.0.2] to [0549.0.0.2] see paragraphs [0544.0.0.0] to [0549.0.0.0] above.

### Example 15f

### Engineering Alfalfa Plants by Over-Expressing YDR03W from Saccharomyces cerevisiae or Homologs of YDR03W from Other Organisms

[1135] for the disclosure of the paragraphs [0551.0.0.2] to [0554.0.0.2] see paragraphs [0551.0.0.0] to [0554.0.0.0] above.

### Example 16

### Metabolite Profiling Info from Zea mays

[1136] Zea mays plants were engineered as described in Example 15c.
Metabolic results were either obtained from regenerated primary transformants (T0) or from the following progeny generation (T1) in comparison to appropriate control plants. The results are shown in table VII

TABLE VII

| ORF_NAME | Metabolite | MIN | MAX |
|---|---|---|---|
| b2601 | Tryptophane | 1.67 | 8.26 |
| YDR035W | Tryptophane | 1.39 | 3.19 |

Table VII shows the increase in methionine in genetically modified corn plants expressing the Escherichia coli nucleic acid sequence b2601 or the Saccharomyces cerevisiae nucleic acid sequence YDR035W.
In one embodiment, in case the activity of the Escherichia coli protein b2601 or its homologs, e.g. a “3-deoxy-D-arabinoheptulosonate-7-phosphate synthase (DAHP synthetase, tyrosine-repressible)”, is increased in corn plants, preferably, an increase of the fine chemical tryptophane between 67% and 726% or more is conferred.
In one embodiment, in case the activity of the Saccharomyces cerevisiae protein YDR035W or its homologs, e.g. a “3-deoxy-D-arabino-heptulosonate-7-phosphate (DAHP) synthase”, is increased in corn plants, preferably, an increase of the fine chemical tryptophane between 39% and 219% or more is conferred.

[1137] for the disclosure of this paragraph see [0554.2.0.0] above.

[1138] for the disclosure of this paragraph see [0555.0.0.0] above.

[1139] for the disclosure of the paragraphs [0001.0.0.3] to [0007.0.0.3] see paragraphs [0001.0.0.0] to [0007.0.0.0] above.

[1140] for the disclosure of the paragraphs [0007.1.0.3] and [0008.0.0.3] see paragraphs [0007.1.0.0] and [0008.0.0.0] above.

[1141] As described above, the essential amino acids are necessary for humans and many mammals, for example for livestock. The branched-chain amino acids (BCAA) leucine, isoleucine and valine are among the nine dietary indispensable amino acids for humans. BCAA accounts for 35-40% of the dietary indispensable amino acids in body protein and 14% of the total amino acids in skeletal muscle (Ferrando et al., (1995) Oral branched chain amino acids decrease whole-body proteolysis. J. Parenter. Enteral Nutr. 19: 47-54.13). They share a common membrane transport system and enzymes for their transamination and irreversible oxidation (Block, K. P. (1989) Interactions among leucine, isoleucine, and valine with special reference to the branched chain amino acid antagonism. In: Absorption and Utilization of Amino Acids (Friedman, M., ed.), pp. 229-244, CRC Press, Boca Raton, Fla. and Champe, P. C. & Harvey, R. A. (1987) Amino acids: metabolism of carbon atoms. In: Biochemistry (Champ, P. C. & Harvery, P. A., eds.), pp. 242-252, J. B. Lippincott, Philadelphia, Pa.). Further, for patient suffering from Maple Syrup Urine Disease (MSUD) a reduced uptake of those branched-chain amino acids is essential.

Dietary sources of the branched-chain amino acids are principally derived from animal and vegetable proteins. The branched-chain amino acids (BCAA) leucine, isoleucine and valine are marginal or limiting for many mammals. Furthermore the adverse balance of leucine to isoleucine and valine for the production of proteins in mammals. Therefor the branched-chain amino acids are supplemented in broiler, leg hens, turkey, swine or cattle diets.

[1142] for the disclosure of the paragraphs [0010.0.0.3] and [0011.0.0.3] see paragraphs [0010.0.0.0] and [0011.0.0.0] above.

[1143] It is an object of the present invention to develop an inexpensive process for the synthesis of leucine, isoleucine and/or valine, preferably L-Ieucine, L-isoleucine and/or L-valine.

[1144] for the disclosure of this paragraph see [0013.0.0.0] above.

[1145] Accordingly, in a first embodiment, the invention relates to a process for the production of a fine chemical, whereby the fine chemical is leucine, isoleucine and/or valine, preferably L-leucine, L-isoleucine and/or L-valine. Accordingly, in the present invention, the term “the fine chemical” as used herein relates to “leucine, isoleucine and/or valine”. Further, the term “the fine chemicals” as used herein also relates to fine chemicals comprising leucine, isoleucine and/or valine.

[1146] In one embodiment, the term “the fine chemical” means leucine, isoleucine and/or valine. Throughout the specification the term “the fine chemical” means leucine, isoleucine and/or valine, preferably L-leucine, L-isoleucine and/or L-valine, its salts, ester or amids in free form or bound to proteins. In a preferred embodiment, the term “the fine chemical” means leucine, isoleucine and/or valine, preferably L-leucine, L-isoleucine and/or L-valine in free form or its salts or bound to proteins.

[1147] Accordingly, the present invention relates to a process for the production of leucine, isoleucine and/or valine, which comprises
[1148] (a) increasing or generating the activity of a protein as shown in table II, application no. 4, column 3 encoded by the nucleic acid sequences as shown in table I, application no. 4, column 5, in an organelle of a microorganism or plant, or
[1149] (b) increasing or generating the activity of a protein as shown in table II, application no. 4, column 3 encoded by the nucleic acid sequences as shown in table I, application no. 4, column 5 in the plastid of a microorganism or plant, or in one or more parts thereof; and
[1150] (b) growing the organism under conditions which permit the production of the fine chemical, thus, leucine, isoleucine and/or valine or fine chemicals comprising leucine, isoleucine and/or valine, in said organism or in the culture medium surrounding the organism.

[1151] In another embodiment the present invention is related to a process for the production of leucine, isoleucine and/or valine, which comprises
[1152] (a) increasing or generating the activity of a protein as shown in table II, application no. 4, column 3 encoded by the nucleic acid sequences as shown in table I, application no. 4, column 5, in an organelle of a non-human organism, or
[1153] (b) increasing or generating the activity of a protein as shown in table II, application no. 4, column 3 encoded by the nucleic acid sequences as shown in table I, application no. 4, column 5, which are joined to a nucleic acid sequence encoding a transit peptide in a non-human organism, or in one or more parts thereof; or
[1154] (c) increasing or generating the activity of a protein as shown in table II, application no. 4, column 3 encoded by the nucleic acid sequences as shown in table I, application no. 4, column 5, which are joined to a nucleic acid sequence encoding chloroplast localization sequence, in a non-human organism, or in one or more parts thereof, and
[1155] (d) growing the organism under conditions which permit the production of leucine, isoleucine and/or valine in said organism.

[1156] In another embodiment, the present invention relates to a process for the production of leucine, isoleucine and/or valine, which comprises
[1157] (a) increasing or generating the activity of a protein as shown in table II, application no. 4, column 3 encoded by the nucleic acid sequences as shown in table I, application no. 4, column 5, in an organelle of a microorganism or plant through the transformation of the organelle, or
[1158] (b) increasing or generating the activity of a protein as shown in table II, application no. 4, column 3 encoded by the nucleic acid sequences as shown in table I, application no. 4, column 5 in the plastid of a microorganism or plant, or in one or more parts thereof through the transformation of the plastids; and
[1159] (c) growing the organism under conditions which permit the production of the fine chemical, thus, leucine, isoleucine and/or valine or fine chemicals comprising leucine, isoleucine and/or valine, in said organism or in the culture medium surrounding the organism.

[1160] Advantageously the activity of the protein as shown in table II, application no. 4, column 3 encoded by the nucleic acid sequences as shown in table I, application no. 4, column 5 is increased or generated in the abovementioned process in the plastid of a microorganism or plant.

[1161] for the disclosure of the paragraphs [0019.0.0.3] to [0024.0.0.3] see paragraphs [0019.0.0.0] and [0024.0.0.0] above.

[1162] Even more preferred nucleic acid sequences are encoding transit peptides as disclosed by von Heijne et al. [Plant Molecular Biology Reporter, Vol. 9 (2), 1991: 104-126], which are hereby incorporated by reference. Table V shows some examples of the transit peptide sequences disclosed by von Heijne et al. According to the disclosure of the invention especially in the examples the skilled worker is able to link other nucleic acid sequences disclosed by von Heijne et al. to the nucleic acid sequences shown in table I, application no. 4, columns 5 and 7. Most preferred nucleic acid sequences encoding transit peptides are derived from the genus Spinacia such as chloroplast 30S ribosomal protein PSrp-1, root acyl carrier protein II, acyl carrier protein, ATP synthase: γ subunit, ATP synthase: δ subunit, cytochrom f, ferredoxin I, ferredoxin NADP oxidoreductase (=FNR), nitrite reductase, phosphoribulokinase, plastocyanin or carbonic anhydrase. The skilled worker will recognize that various other nucleic acid sequences encoding transit peptides can easily isolated from plastid-localized proteins, which are expressed from nuclear genes as precursors and are then targeted to plastids. Such transit peptides encoding sequences can be used for the construction of other expression constructs. The transit peptides advantageously used in the inventive process and which are part of the inventive nucleic acid sequences and proteins are typically 20 to 120 amino acids, preferably 25 to 110, 30 to 100 or 35 to 90 amino acids, more preferably 40 to 85 amino acids and most preferably 45 to 80 amino acids in length and functions post-translationally to direct the protein to the plastid preferably to the chloroplast. The nucleic acid sequences encoding such transit peptides are localized upstream of nucleic acid sequence encoding the mature protein. For the correct molecular joining of the transit peptide encoding nucleic acid and the nucleic acid encoding the protein to be targeted it is sometimes necessary to introduce additional base pairs at the joining position, which forms restriction enzyme recognition sequences useful for the molecular joining of the different nucleic acid molecules. This procedure might lead to very few additional amino acids at the N-terminal of the mature imported protein, which usually and preferably do not interfere with the protein function. In any case, the additional base pairs at the joining position which forms restriction enzyme recognition sequences have to be chosen with care, in order to avoid the formation of stop codons or codons which encode amino acids with a strong influence on protein folding, like e.g. proline. It is preferred that such additional codons encode small n.d. structural flexible amino acids such as glycine or alanine.

[1163] As mentioned above the nucleic acid sequences coding for the proteins as shown in table II, application no. 4, column 3 and its homologs as disclosed in table I, application no. 4, columns 5 and 7 are joined to a nucleic acid sequence encoding a transit peptide, This nucleic acid sequence encoding a transit peptide ensures transport of the protein to the plastid. The nucleic acid sequence of the gene to be expressed and the nucleic acid sequence encoding the transit peptide are operably linked. Therefore the transit peptide is fused in frame to the nucleic acid sequence coding for proteins as shown in table II, application no. 4, column 3 and its homologs as disclosed in table I, application no. 4, columns 5 and 7.

[1164] for the disclosure of the paragraphs [0027.0.0.3] to [0029.0.0.3] see paragraphs [0027.0.0.0] and [0029.0.0.0] above.

[1165] Alternatively, nucleic acid sequences coding for the transit peptides may be chemically synthesized either in part or wholly according to structure of transit peptide sequences disclosed in the prior art. Said natural or chemically synthesized sequences can be directly linked to the sequences encoding the mature protein or via a linker nucleic acid sequence, which may be typically less than 500 base pairs, preferably less than 450, 400, 350, 300, 250 or 200 base pairs, more preferably less than 150, 100, 90, 80, 70, 60, 50, 40 or 30 base pairs and most preferably less than 25, 20, 15, 12, 9, 6 or 3 base pairs in length and are in frame to the coding sequence. Furthermore favorable nucleic acid sequences encoding transit peptides may comprise sequences derived from more than one biological and/or chemical source and may include a nucleic acid sequence derived from the amino-terminal region of the mature protein, which in its native state is linked to the transit peptide. In a preferred embodiment of the invention said amino-terminal region of the mature protein is typically less than 150 amino acids, preferably less than 140, 130, 120, 110, 100 or 90 amino acids, more preferably less than 80, 70, 60, 50, 40, 35, 30, 25 or 20 amino acids and most preferably less than 19, 18, 17, 16, 15, 14, 13, 12, 11 or 10 amino acids in length. But even shorter or longer stretches are also possible. In addition target sequences, which facilitate the transport of proteins to other cell compartments such as the vacuole, endoplasmic reticulum, golgi complex, glyoxysomes, peroxisomes or mitochondria may be also part of the inventive nucleic acid sequence. The proteins translated from said inventive nucleic acid sequences are a kind of fusion proteins that means the nucleic acid sequences encoding the transit peptide for example the ones shown in table V, preferably the last one of the table are joint to the nucleic acid sequences shown in table I, application no. 4, columns 5 and 7. The person skilled in the art is able to join said sequences in a functional manner. Advantageously the transit peptide part is cleaved off from the protein part shown in table II, application no. 4, columns 5 and 7 during the transport preferably into the plastids. All products of the cleavage of the preferred transit peptide shown in the last line of table V have preferably the N-terminal amino acid sequences QIA CSS or QIA EFQLTT in front of the start methionine of the protein mentioned in table II, application no. 4, columns 5 and 7. Other short amino acid sequences of an range of 1 to 20 amino acids preferable 2 to 15 amino acids, more preferable 3 to 10 amino acids most preferably 4 to 8 amino acids are also possible in front of the start methionine of the protein mentioned in table II, application no. 4, columns 5 and 7. In case of the amino acid sequence QIA CSS the three amino acids in front of the start methionine are stemming from the LIC (=ligatation independent cloning) cassette. Said short amino acid sequence is preferred in the case of the expression of E. coli genes. In case of the amino acid sequence QIA EFQLTT the six amino acids in front of the start methionine are stemming from the LIC cassette. Said short amino acid sequence is preferred in the case of the expression of S. cerevisiae genes. The skilled worker knows that other short sequences are also useful in the expression of the genes mentioned in table I, application no. 4, columns 5 and 7. Furthermore the skilled worker is aware of the fact that there is not a need for such short sequences in the expression of the genes.

[1166] Table V: Examples of transit peptides disclosed by von Heijne et al. for the disclosure of Table V see paragraph [0030.2.0.0] above.

[1167] Alternatively to the targeting of the sequences shown in table II, application no. 4, columns 5 and 7 preferably of sequences in general encoded in the nucleus with the aid of the targeting sequences mentioned for example in table V alone or in combination with other targeting sequences preferably into the plastids, the nucleic acids of the invention can directly introduced into the plastidal genome. Therefore in a preferred embodiment the nucleic acid sequences shown in table I, application no. 4, columns 5 and 7 are directly introduced and expressed in plastids.

The term “introduced” in the context of this specification shall mean the insertion of a nucleic acid sequence into the organism by means of a “transfection”, “transduction” or preferably by “transformation”.
A plastid, such as a chloroplast, has been “transformed” by an exogenous (preferably foreign) nucleic acid sequence if nucleic acid sequence has been introduced into the plastid that means that this sequence has crossed the membrane or the membranes of the plastid. The foreign DNA may be integrated (covalently linked) into plastid DNA making up the genome of the plastid, or it may remain unintegrated (e.g., by including a chloroplast origin of replication). “Stably” integrated DNA sequences are those, which are inherited through plastid replication, thereby transferring new plastids, with the features of the integrated DNA sequence to the progeny.

[1168] for the disclosure of the paragraphs [0030.2.0.3] and [0030.3.0.3] see paragraphs [0030.2.0.0] and [0030.3.0.0] above.

[1169] For the inventive process it is of great advantage that by transforming the plastids the intraspecies specific transgene flow is blocked, because a lot of species such as corn, cotton and rice have a strict maternal inheritance of plastids. By placing the genes specified in table I, application no. 4, columns 5 and 7 or active fragments thereof in the plastids of plants, these genes will not be present in the pollen of said plants.

A further preferred embodiment of the invention relates to the use of so called “chloroplast localization sequences”, in which a first RNA sequence or molecule is capable of transporting or “chaperoning” a second RNA sequence, such as a RNA sequence transcribed from the sequences depicted in table I, application no. 4, columns 5 and 7 or a sequence encoding a protein, as depicted in table II, application no. 4, columns 5 and 7, from an external environment inside a cell or outside a plastid into a chloroplast. In one embodiment the chloroplast localization signal is substantially similar or complementary to a complete or intact viroid sequence. The chloroplast localization signal may be encoded by a DNA sequence, which is transcribed into the chloroplast localization RNA. The term “viroid” refers to a naturally occurring single stranded RNA molecule (Flores, C R Acad Sci III. 2001 October; 324(10): 943-52). Viroids usually contain about 200-500 nucleotides and generally exist as circular molecules. Examples of viroids that contain chloroplast localization signals include but are not limited to ASBVd, PLMVd, CChMVd and ELVd. The viroid sequence or a functional part of it can be fused to the sequences depicted in table I, application no. 4, columns 5 and 7 or a sequence encoding a protein, as depicted in table II, application no. 4, columns 5 and 7 in such a manner that the viroid sequence transports a sequence transcribed from a sequence as depicted in table I, application no. 4 columns 5 and 7 or a sequence encoding a protein as depicted in table II, application no. 4 columns 5 and 7 into the chloroplasts. A preferred embodiment uses a modified ASBVd (Navarro et al., Virology. 2000 Mar. 1; 268(1): 218-25).
In a further specific embodiment the protein to be expressed in the plastids such as the proteins depicted in table II, application no. 4, columns 5 and 7 are encoded by different nucleic acids. Such a method is disclosed in WO 2004/040973, which shall be incorporated by reference. WO 2004/040973 teaches a method, which relates to the translocation of an RNA corresponding to a gene or gene fragment into the chloroplast by means of a chloroplast localization sequence. The genes, which should be expressed in the plant or plants cells, are split into nucleic acid fragments, which are introduced into different compartments in the plant e.g. the nucleus, the plastids and/or mitochondria. Additionally plant cells are described in which the chloroplast contains a ribozyme fused at one end to an RNA encoding a fragment of a protein used in the inventive process such that the ribozyme can trans-splice the translocated fusion RNA to the RNA encoding the gene fragment to form and as the case may be reunite the nucleic acid fragments to an intact mRNA encoding a functional protein for example as disclosed in table II, application no. 4, columns 5 and 7.

[1170] In a preferred embodiment of the invention the nucleic acid sequences as shown in table I, application no. 4, columns 5 and 7 used in the inventive process are transformed into plastids, which are metabolical active. Those plastids should preferably maintain at a high copy number in the plant or plant tissue of interest, most preferably the chloroplasts found in green plant tissues, such as leaves or cotyledons or in seeds.

[1171] For a good expression in the plastids the nucleic acid sequences as shown in table I, application no. 4, columns 5 and 7 are introduced into an expression cassette using a preferably a promoter and terminator, which are active in plastids preferably a chloroplast promoter. Examples of such promoters include the psbA promoter from the gene from spinach or pea, the rbcL promoter, and the atpB promoter from corn.

[1172] for the disclosure of the paragraphs [0031.0.0.3] and [0032.0.0.3] see paragraphs [0031.0.0.0] and [0032.0.0.0] above.

[1173] Advantageously the process for the production of the fine chemical leads to an enhanced production of the fine chemical. The terms “enhanced” or “increase” mean at least a 10%, 20%, 30%, 40% or 50%, preferably at least 60%, 70%, 80%, 90% or 100%, more preferably 150%, 200%, 300%, 400% or 500% higher production of the fine chemical in comparison to the reference as defined below, e.g. that means in comparison to an organism without the aforementioned modification of the activity of a protein as shown in table II, application no. 4, column 3. Preferably the modification of the activity of a protein as shown in table II, application no. 4, column 3 or their combination can be achieved by joining the protein to a transit peptide.

[1174] Surprisingly it was found, that the transgenic expression of the Saccharomyces cerevisiae protein as shown in table II, application no. 4, column 3 in plastids of a plant such as Arabidopsis thaliana for example through the linkage to at least one targeting sequence for example as mentioned in table V conferred an increase in the fine chemical content of the transformed plants.

[1175] for the disclosure of this paragraph see paragraph [0035.0.0.0] above.

[1176] The sequence of b0342 (Accession number PIR:XXECTG) from Escherichia coli has been published in Blattner et al., Science 277 (5331), 1453-1474 (1997), and its activity is being defined as “thiogalactoside acetyltransferase”. Accordingly, in one embodiment, the process of the present invention comprises the use of a “thiogalactoside acetyltransferase” or its homolog, e.g. as shown herein, for the production of the fine chemical, meaning of leucine, isoleucine and/or valine, in particular for increasing the amount of leucine, isoleucine and/or valine in free or bound form in an organism or a part thereof, as mentioned. In one embodiment, in the process of the present invention the activity of a b0342 protein is increased or generated, e.g. from Escherichia coli or a homolog thereof, preferably linked at least to one transit peptide as mentioned for example in table V.

In another embodiment, in the process of the present invention the activity of a b0342 protein is increased or generated in a subcellular compartment of the organism or organism cell such as in an organelle like a plastid or mitochondria.
The sequence of b1223 (Accession number NP_{—}415741) from Escherichia coli has been published in Blattner et al., Science 277 (5331), 1453-1474 (1997), and its activity is being defined as “nitrite extrusion protein”. Accordingly, in one embodiment, the process of the present invention comprises the use of a “nitrite extrusion protein” or its homolog, e.g. as shown herein, for the production of the fine chemical, meaning of leucine, isoleucine and/or valine, in particular for increasing the amount of leucine, isoleucine and/or valine in free or bound form in an organism or a part thereof, as mentioned. In one embodiment, in the process of the present invention the activity of a b1223 protein is increased or generated, e.g. from Escherichia coli or a homolog thereof, preferably linked at least to one transit peptide as mentioned for example in table V.
In another embodiment, in the process of the present invention the activity of a b1223 protein is increased or generated in a subcellular compartment of the organism or organism cell such as in an organelle like a plastid or mitochondria.
The sequence of b1704 (Accession number NP_{—}416219) from Escherichia coli has been published in Blattner et al., Science 277 (5331), 1453-1474 (1997), and its activity is being defined as “3-deoxy-D-arabinoheptulosonate-7-phosphate synthase (DAHP synthetase, tryptophan repressible)”. Accordingly, in one embodiment, the process of the present invention comprises the use of a “3-deoxy-D-arabinoheptulosonate-7-phosphate synthase” or its homolog, e.g. as shown herein, for the production of the fine chemical, meaning of leucine, isoleucine and/or valine, in particular for increasing the amount of leucine, isoleucine and/or valine in free or bound form in an organism or a part thereof, as mentioned. In one embodiment, in the process of the present invention the activity of a b1704 protein is increased or generated, e.g. from Escherichia coli or a homolog thereof, preferably linked at least to one transit peptide as mentioned for example in table V.
In another embodiment, in the process of the present invention the activity of a b1704 protein is increased or generated in a subcellular compartment of the organism or organism cell such as in an organelle like a plastid or mitochondria.
The sequence of b2066 (Accession number NP_{—}416570) from Escherichia coli has been published in Blattner et al., Science 277 (5331), 1453-1474 (1997), and its activity is being defined as “uridine/cytidine kinase”. Accordingly, in one embodiment, the process of the present invention comprises the use of a “uridine/cytidine kinase” or its homolog, e.g. as shown herein, for the production of the fine chemical, meaning of leucine, isoleucine and/or valine, in particular for increasing the amount of leucine, isoleucine and/or valine in free or bound form in an organism or a part thereof, as mentioned. In one embodiment, in the process of the present invention the activity of a b2066 protein is increased or generated, e.g. from Escherichia coli or a homolog thereof, preferably linked at least to one transit peptide as mentioned for example in table V.
In another embodiment, in the process of the present invention the activity of a b2066 protein is increased or generated in a subcellular compartment of the organism or organism cell such as in an organelle like a plastid or mitochondria.
The sequence of b2965 (Accession number NP_{—}417440) from Escherichia coli has been published in Blattner et al., Science 277 (5331), 1453-1474 (1997), and its activity is being defined as “ornithine decarboxylase”. Accordingly, in one embodiment, the process of the present invention comprises the use of a “ornithine decarboxylase” or its homolog, e.g. as shown herein, for the production of the fine chemical, meaning of leucine, isoleucine and/or valine, in particular for increasing the amount of leucine, isoleucine and/or valine in free or bound form in an organism or a part thereof, as mentioned.
In one embodiment, in the process of the present invention the activity of a b2965 protein is increased or generated, e.g. from Escherichia coli or a homolog thereof, preferably linked at least to one transit peptide as mentioned for example in table V.
In another embodiment, in the process of the present invention the activity of a b2965 protein is increased or generated in a subcellular compartment of the organism or organism cell such as in an organelle like a plastid or mitochondria.
The sequence of b3770 (Accession number YP_{—}026247) from Escherichia coli has been published in Blattner et al., Science 277 (5331), 1453-1474 (1997), and its activity is being defined as “branched-chain amino-acid aminotransferase”. Accordingly, in one embodiment, the process of the present invention comprises the use of a “branched-chain amino-acid aminotransferase” or its homolog, e.g. as shown herein, for the production of the fine chemical, meaning of leucine, isoleucine and/or valine, in particular for increasing the amount of leucine, isoleucine and/or valine in free or bound form in an organism or a part thereof, as mentioned. In one embodiment, in the process of the present invention the activity of a b3770 protein is increased or generated, e.g. from Escherichia coli or a homolog thereof, preferably linked at least to one transit peptide as mentioned for example in table V.
In another embodiment, in the process of the present invention the activity of a b3770 protein is increased or generated in a subcellular compartment of the organism or organism cell such as in an organelle like a plastid or mitochondria.
The sequence of b3117 (Accession number PIR:DWECTD) from Escherichia coli has been published in Blattner et al., Science 277 (5331), 1453-1474 (1997), and its activity is being defined as “threonine dehydratase, catabolic, PLP-dependent”. Accordingly, in one embodiment, the process of the present invention comprises the use of a “threonine dehydratase, catabolic, PLP-dependent” or its homolog, e.g. as shown herein, for the production of the fine chemical, meaning of leucine, isoleucine and/or valine, in particular for increasing the amount of leucine, isoleucine and/or valine in free or bound form in an organism or a part thereof, as mentioned. In one embodiment, in the process of the present invention the activity of a b3117 protein is increased or generated, e.g. from Escherichia coli or a homolog thereof, preferably linked at least to one transit peptide as mentioned for example in table V.
In another embodiment, in the process of the present invention the activity of a b3117 protein is increased or generated in a subcellular compartment of the organism or organism cell such as in an organelle like a plastid or mitochondria.
The sequence of YOR353C (Accession number NP_{—}014998) from Saccharomyces cerevisiae has been published in Goffeau et al., Science 274 (5287), 546-547, 1996, and its activity is being defined as “Protein required for cell morphogenesis and cell separation after mitosis; Sog2p”. Accordingly, in one embodiment, the process of the present invention comprises the use of a “Protein required for cell morphogenesis and cell separation after mitosis; Sog2p” or its homolog, e.g. as shown herein, for the production of the fine chemical, meaning of leucine, isoleucine and/or valine, in particular for increasing the amount of leucine, isoleucine and/or valine in free or bound form in an organism or a part thereof, as mentioned. In one embodiment, in the process of the present invention the activity of a YOR353C protein is increased or generated, e.g. from Saccharomyces cerevisiae or a homolog thereof, preferably linked at least to one transit peptide as mentioned for example in table V.
In another embodiment, in the process of the present invention the activity of an YOR353C protein is increased or generated in a subcellular compartment of the organism or organism cell such as in an organelle like a plastid or mitochondria.
The sequence of YAL038W (Accession number NP_{—}009362) from Saccharomyces cerevisiae has been published in Goffeau et al., Science 274 (5287), 546-547, 1996 and Bussey et al., Proc. Natl. Acad. Sci. U.S.A. 92 (9), 3809-3813 (1995), and its activity is being defined as “pyruvate kinase”, which functions as a homotetramer in glycolysis to convert phosphoenolpyruvate to pyruvate (Cdc19p). Pyruvate is the input for aerobic (TCA cycle) or anaerobic (glucose fermentation) respiration. Accordingly, in one embodiment, the process of the present invention comprises the use of a “pyruvate kinase” or its homolog, e.g. as shown herein, for the production of the fine chemical, meaning of leucine, isoleucine and/or valine, in particular for increasing the amount of leucine, isoleucine and/or valine in free or bound form in an organism or a part thereof, as mentioned. In one embodiment, in the process of the present invention the activity of a YAL038W protein is increased or generated, e.g. from Saccharomyces cerevisiae or a homolog thereof, preferably linked at least to one transit peptide as mentioned for example in table V.
In another embodiment, in the process of the present invention the activity of an YAL038W protein is increased or generated in a subcellular compartment of the organism or organism cell such as in an organelle like a plastid or mitochondria.
The sequence of YDR497C (Accession number NP_{—}010785) from Saccharomyces cerevisiae has been published in Goffeau et al., Science 274 (5287), 546-547, 1996 and Jacq et al., Nature 387 (6632 Suppl), 75-78 (1997), and its activity is being defined as a “myo-inositol transporter”. Accordingly, in one embodiment, the process of the present invention comprises the use of a “myo-inositol transporter” or its homolog, e.g. as shown herein, for the production of the fine chemical, meaning of leucine, isoleucine and/or valine, in particular for increasing the amount of leucine, isoleucine and/or valine in free or bound form in an organism or a part thereof, as mentioned. In one embodiment, in the process of the present invention the activity of a YDR497C protein is increased or generated, e.g. from Saccharomyces cerevisiae or a homolog thereof, preferably linked at least to one transit peptide as mentioned for example in table V.
In another embodiment, in the process of the present invention the activity of an YDR497C protein is increased or generated in a subcellular compartment of the organism or organism cell such as in an organelle like a plastid or mitochondria.
The sequence of YEL046C (Accession number NP_{—}010868) from Saccharomyces cerevisiae has been published in Goffeau et al., Science 274 (5287), 546-547, 1996 and Dietrich et al., Nature 387 (6632 Suppl), 78-81 (1997), and its activity is being defined as a “L-threonine aldolase”, which catalyzes cleavage of L-allo-threonine and L-threonine to Glycine (Gly1p). Accordingly, in one embodiment, the process of the present invention comprises the use of a “L-threonine aldolase” or its homolog, e.g. as shown herein, for the production of the fine chemical, meaning of leucine, isoleucine and/or valine, in particular for increasing the amount of leucine, isoleucine and/or valine in free or bound form in an organism or a part thereof, as mentioned. In one embodiment, in the process of the present invention the activity of a YEL046C protein is increased or generated, e.g. from Saccharomyces cerevisiae or a homolog thereof, preferably linked at least to one transit peptide as mentioned for example in table V.
In another embodiment, in the process of the present invention the activity of an YEL046C protein is increased or generated in a subcellular compartment of the organism or organism cell such as in an organelle like a plastid or mitochondria.
The sequence of YER024W (Accession number NP_{—}010941) from Saccharomyces cerevisiae has been published in Goffeau et al., Science 274 (5287), 546-547, 1996 and Dietrich et al., Nature 387 (6632 Suppl), 78-81 (1997) and its activity is being defined as a “carnitine acetyltransferase”. Accordingly, in one embodiment, the process of the present invention comprises the use of a carnitine acetyltransferase or its homolog, e.g. as shown herein, for the production of the fine chemical, meaning of leucine, isoleucine and/or valine, in particular for increasing the amount of leucine, isoleucine and/or valine in free or bound form in an organism or a part thereof, as mentioned. In one embodiment, in the process of the present invention the activity of a YER024W protein is increased or generated, e.g. from Saccharomyces cerevisiae or a homolog thereof, preferably linked at least to one transit peptide as mentioned for example in table V.
In another embodiment, in the process of the present invention the activity of a YER024W protein is increased or generated in a subcellular compartment of the organism or organism cell such as in an organelle like a plastid or mitochondria.
The sequence of YKR043C (Accession number NP_{—}012969) from Saccharomyces cerevisiae has been published in Goffeau et al., Science 274 (5287), 546-547, 1996 and Dujon et al., Nature 369 (6479), 371-378 (1994), and its activity is being defined as a “phosphoglycerate mutase like protein”. Accordingly, in one embodiment, the process of the present invention comprises the use of a “phosphoglycerate mutase like protein” or its homolog, e.g. as shown herein, for the production of the fine chemical, meaning of leucine, isoleucine and/or valine, in particular for increasing the amount of leucine, isoleucine and/or valine in free or bound form in an organism or a part thereof, as mentioned. In one embodiment, in the process of the present invention the activity of a YKR043C protein is increased or generated, e.g. from Saccharomyces cerevisiae or a homolog thereof, preferably linked at least to one transit peptide as mentioned for example in table V.
In another embodiment, in the process of the present invention the activity of an YKR043C protein is increased or generated in a subcellular compartment of the organism or organism cell such as in an organelle like a plastid or mitochondria.
The sequence of YLR174W (Accession number NP_{—}013275) from Saccharomyces cerevisiae has been published in Goffeau et al., Science 274 (5287), 546-547, 1996 and Johnston et al., Nature 387 (6632 Suppl), 87-90 (1997), and its activity is being defined as a “NADP-dependent isocitrate dehydrogenase”. Accordingly, in one embodiment, the process of the present invention comprises the use of a “NADP-dependent isocitrate dehydrogenase” or its homolog, e.g. as shown herein, for the production of the fine chemical, meaning of leucine, isoleucine and/or valine, in particular for increasing the amount of leucine, isoleucine and/or valine in free or bound form in an organism or a part thereof, as mentioned. In one embodiment, in the process of the present invention the activity of a YLR174W protein is increased or generated, e.g. from Saccharomyces cerevisiae or a homolog thereof, preferably linked at least to one transit peptide as mentioned for example in table V.
In another embodiment, in the process of the present invention the activity of an YLR174W protein is increased or generated in a subcellular compartment of the organism or organism cell such as in an organelle like a plastid or mitochondria.
The sequence of YNL241C (Accession number NP_{—}014158) from Saccharomyces cerevisiae has been published in Goffeau et al., Science 274 (5287), 546-547, 1996 and Philippsen et al., Nature 387 (6632 Suppl), 93-98 (1997), and its activity is being defined as “glucose-6-phosphate dehydrogenase”. Accordingly, in one embodiment, the process of the present invention comprises the use of a “glucose-6-phosphate dehydrogenase” or its homolog, e.g. as shown herein, for the production of the fine chemical, meaning of leucine, isoleucine and/or valine, in particular for increasing the amount of leucine, isoleucine and/or valine in free or bound form in an organism or a part thereof, as mentioned. In one embodiment, in the process of the present invention the activity of a YNL241C protein is increased or generated, e.g. from Saccharomyces cerevisiae or a homolog thereof, preferably linked at least to one transit peptide as mentioned for example in table V.
In another embodiment, in the process of the present invention the activity of an YNL241C protein is increased or generated in a subcellular compartment of the organism or organism cell such as in an organelle like a plastid or mitochondria.

[1177] In one embodiment, the homolog of the YOR353C, YAL038W, YDR497C, YEL046C, YER024W, YKR043C, YLR174W and/or YNL241C, is a homolog having said activity and being derived from Eukaryot. In one embodiment, the homolog of the b0342, b1223, b3117,b1704, b2066, b2965 and/or b3770 is a homolog having said activity and being derived from bacteria. In one embodiment, the homolog of the YOR353C, YAL038W, YDR497C, YEL046C, YER024W, YKR043C, YLR174W and/or YNL241C_is a homolog having said activity and being derived from Fungi. In one embodiment, the homolog of the b0342, b1223, b3117,b1704, b2066, b2965 and/or b3770 is a homolog having said activity and being derived from Proteobacteria. In one embodiment, the homolog of the YOR353C, YAL038W, YDR497C, YEL046C, YER024W, YKR043C, YLR174W and/or YNL241C is a homolog having said activity and being derived from Ascomycota. In one embodiment, the homolog of the b0342, b1223, b3117,b1704, b2066, b2965 and/or b3770 is a homolog having said activity and being derived from Gammaproteobacteria. In one embodiment, the homolog of the YOR353C, YAL038W, YDR497C, YEL046C, YER024W, YKR043C, YLR174W and/or YNL241C is a homolog having said activity and being derived from Saccharomycotina. In one embodiment, the homolog of the b0342, b1223, b3117,b1704, b2066, b2965 and/or b3770 is a homolog having said activity and being derived from Enterobacteriales. In one embodiment, the homolog of the YOR353C, YAL038W, YDR497C, YEL046C, YER024W, YKR043C, YLR174W and/or YNL241C is a homolog having said activity and being derived from Saccharomycetes. In one embodiment, the homolog of the b0342, b1223, b3117,b1704, b2066, b2965 and/or b3770 is a homolog having said activity and being derived from Enterobacteriaceae. In one embodiment, the homolog of the YOR353C, YAL038W, YDR497C, YEL046C, YER024W, YKR043C, YLR174W and/or YNL241C is a homolog having said activity and being derived from Saccharomycetales. In one embodiment, the homolog of the b0342, b1223, b3117,b1704, b2066, b2965 and/or b3770 is a homolog having said activity and being derived from Escherichia, preferably from Escherichia coli. In one embodiment, the homolog of the YOR353C, YAL038W, YDR497C, YEL046C, YER024W, YKR043C, YLR174W and/or YNL241C is a homolog having said activity and being derived from Saccharomycetaceae. In one embodiment, the homolog of the YOR353C, YAL038W, YDR497C, YEL046C, YER024W, YKR043C, YLR174W and/or YNL241C is a homolog having said activity and being derived from Saccharomycetes, preferably from Saccharomyces cerevisiae.

[1178] for the disclosure of this paragraph see paragraph [0038.0.0.0] above.

[1179] In accordance with the invention, a protein or polypeptide has the “activity of an protein as shown in table II, application no. 4, column 3” if its de novo activity, or its increased expression directly or indirectly leads to an increased in the fine chemical level in the organism or a part thereof, preferably in a cell of said organism, more preferably in an organelle such as a plastid or mitochondria of said organism and the protein has the above mentioned activities of a protein as shown in table II, application no. 4, column 3, preferably in the event the nucleic acid sequences encoding said proteins is functionally joined to the nucleic acid sequence of a transit peptide. Throughout the specification the activity or preferably the biological activity of such a protein or polypeptide or an nucleic acid molecule or sequence encoding such protein or polypeptide is identical or similar if it still has the biological or enzymatic activity of a protein as shown in table II, application no. 4, column 3, or which has at least 10% of the original enzymatic activity, preferably 20%, particularly preferably 30%, most particularly preferably 40% in comparison to a protein as shown in table II, application no. 4, column 3 of Saccharomyces cerevisiae.

[1180] for the disclosure of the paragraphs [0040.0.0.3] to [0047.0.0.3] see paragraphs [0040.0.0.0] to [0047.0.0.0] above.

[1181] Preferably, the reference, control or wild type differs form the subject of the present invention only in the cellular activity, preferably of the plastidial activity of the polypeptide of the invention, e.g. as result of an increase in the level of the nucleic acid molecule of the present invention or an increase of the specific activity of the polypeptide of the invention, e.g. by or in the expression level or activity of an protein having the activity of a protein as shown in table II, application no. 4, column 3 its biochemical or genetical causes and the increased amount of the fine chemical.

[1182] for the disclosure of the paragraphs [0049.0.0.3] to [0051.0.0.3] see paragraphs [0049.0.0.0] to [0051.0.0.0] above.

[1183] For example, the molecule number or the specific activity of the polypeptide or the nucleic acid molecule may be increased. Larger amounts of the fine chemical can be produced if the polypeptide or the nucleic acid of the invention is expressed de novo in an organism lacking the activity of said protein, preferably the nucleic acid molecules as mentioned in table I, application no. 4, columns 5 and 7 alone or preferably in combination with a transit peptide for example as mentioned in table V or in another embodiment by introducing said nucleic acid molecules into an organelle such as an plastid or mitochondria in the transgenic organism. However, it is also possible to modify the expression of the gene which is naturally present in the organisms, for example by integrating a nucleic acid sequence, encoding a plastidic targeting sequence in front (5 prime) of the coding sequence, leading to a functional preprotein, which is directed for example to the plastids.

[1184] for the disclosure of the paragraphs [0053.0.0.3] to [0058.0.0.3] see paragraphs [0053.0.0.0] to [0058.0.0.0] above.

[1185] In case the activity of the Escherichia coli protein b0342 or its homologs, e.g. a “thiogalactoside acetyltransferase” is increased advantageously in an organelle such as a plastid or mitochondria, preferably, in one embodiment an increase of the fine chemical, preferably of valine between 21% and 68% or more is conferred.

In case the activity of the Escherichia coli protein b1223 or its homologs, e.g. a “nitrite extrusion protein” is increased advantageously in an organelle such as a plastid or mitochondria, preferably, in one embodiment an increase of the fine chemical, preferably of valine between 30% and 157% or more is conferred.
In case the activity of the Escherichia coli protein b3117 or its homologs, e.g. a “threonine dehydratase, catabolic, PLP-dependent” is increased advantageously in an organelle such as a plastid or mitochondria, preferably, in one embodiment an increase of the fine chemical, preferably of leucine between 209% and 703% or more and/or isoleucine between 233% and 36031% or more is conferred.
In case the activity of the Escherichia coli protein b1704 or its homologs, e.g. a “3-deoxy-D-arabinoheptulosonate-7-phosphate synthase” is increased advantageously in an organelle such as a plastid or mitochondria, preferably, in one embodiment an increase of the fine chemical, preferably of leucine between 40% and 541% or more and/or valine between 24% and 287% or more is conferred.
In case the activity of the Escherichia coli protein b2066 or its homologs, e.g. a “uridine/cytidine kinase” is increased advantageously in an organelle such as a plastid or mitochondria, preferably, in one embodiment an increase of the fine chemical, preferably of isoleucine between 58% and 199% or more and/or valine between 30% and 99% or more is conferred.
In case the activity of the Escherichia coli protein b2965 or its homologs, e.g. an “ornithine decarboxylase” is increased advantageously in an organelle such as a plastid or mitochondria, preferably, in one embodiment an increase of the fine chemical, preferably of valine between 20% and 299% or more is conferred.
In case the activity of the Escherichia coli protein b3770 or its homologs, e.g. a “branched-chain amino-acid aminotransferase” is increased advantageously in an organelle such as a plastid or mitochondria, preferably, in one embodiment an increase of the fine chemical, preferably of valine between 53% and 128% or more is conferred.
In case the activity of the Saccharomyces cerevisiae protein YAL038W or its homologs, e.g. a “pyruvate kinase” is increased advantageously in an organelle such as a plastid or mitochondria, preferably, in one embodiment an increase of the fine chemical, preferably of leucine between 58% and 261% or more or isoleucine between 33% and 97% or more and/or valine between 21% and 206% or more is conferred.
In case the activity of the Saccharomyces cerevisiae protein YOR353C or its homologs, e.g. a “protein required for cell morphogenesis and cell separation after mitosis; Sog2p” is increased advantageously in an organelle such as a plastid or mitochondria, preferably, in one embodiment an increase of the fine chemical, preferably of leucine between 54% and 172% or more and/or isoleucine between 34% and 132% or more and/or valine between 20% and 77% or more is conferred.
In case the activity of the Saccharomyces cerevisiae protein YDR497C or its homologs, e.g. a “myo-inositol transporter” is increased advantageously in an organelle such as a plastid or mitochondria, preferably, in one embodiment an increase of the fine chemical, preferably of leucine between 46% and 87% and/or isoleucine between 34% and 43% or more is conferred.
In case the activity of the Saccharomyces cerevisiae protein YEL046C or its homologs, e.g. a “L-threonine aldolase” is increased advantageously in an organelle such as a plastid or mitochondria, preferably, in one embodiment an increase of the fine chemical, preferably of leucine between 117% and 144% or more is conferred.
In case the activity of the Saccharomyces cerevisiae protein YER024W or its homologs, e.g. a “carnitine acetyltransferase” is increased advantageously in an organelle such as a plastid or mitochondria, preferably, in one embodiment an increase of the fine chemical, preferably of leucine between 50% and 68% and/or isoleucine between 40% and 43% or more is conferred.
In case the activity of the Saccharomyces cerevisiae protein YKR043C or its homologs, e.g. a “phosphoglycerate mutase like protein” is increased advantageously in an organelle such as a plastid or mitochondria, preferably, in one embodiment an increase of the fine chemical, preferably of valine between 20% and 260% or more is conferred.
In case the activity of the Saccharomyces cerevisiae protein YLR174W or its homologs, e.g. a “NADP-dependent isocitrate dehydrogenase” is increased advantageously in an organelle such as a plastid or mitochondria, preferably, in one embodiment an increase of the fine chemical, preferably of valine between 19% and 30% or more is conferred.
In case the activity of the Saccharomyces cerevisiae protein YNL241C or its homologs, e.g. an “glucose-6-phosphate dehydrogenase” is increased advantageously in an organelle such as a plastid or mitochondria, preferably, in one embodiment an increase of the fine chemical, preferably of valine between 57% and 88% and/or isoleucine between 30% and 33% or more is conferred.
In case the activity of the Escherichia coli protein b0342 or its homologs, e.g. a “thiogalactoside acetyltransferase” is increased advantageously in an organelle such as a plastid or mitochondria, preferably an increase of the fine chemical and of proteins containing valine is conferred.
In case the activity of the Escherichia coli protein b1223 or its homologs, e.g. a “nitrite extrusion protein” is increased advantageously in an organelle such as a plastid or mitochondria, preferably an increase of the fine chemical and of proteins containing valine is conferred.
In case the activity of the Escherichia coli protein b3117 or its homologs, e.g. a “threonine dehydratase, catabolic, PLP-dependent” is increased advantageously in an organelle such as a plastid or mitochondria, preferably an increase of the fine chemical and of proteins containing leucine and/or isoleucine is conferred.
In case the activity of the Escherichia coli protein b1704 or its homologs, e.g. a “3-deoxy-D-arabinoheptulosonate-7-phosphate synthase” is increased advantageously in an organelle such as a plastid or mitochondria, preferably an increase of the fine chemical and of proteins containing leucine and/or valine is conferred.
In case the activity of the Escherichia coli protein b2066 or its homologs, e.g. a “uridine/cytidine kinase” is increased advantageously in an organelle such as a plastid or mitochondria, preferably, in one embodiment an increase of the fine chemical, preferably an increase of the fine chemical and of proteins containing isoleucine and/or valine is conferred.
In case the activity of the Escherichia coli protein b2965 or its homologs, e.g. an “ornithine decarboxylase” is increased advantageously in an organelle such as a plastid or mitochondria, preferably, in one embodiment an increase of the fine chemical, preferably an increase of the fine chemical and of proteins containing valine is conferred.
In case the activity of the Escherichia coli protein b3770 or its homologs, e.g. a “branched-chain amino-acid aminotransferase” is increased advantageously in an organelle such as a plastid or mitochondria, preferably, in one embodiment an increase of the fine chemical, preferably an increase of the fine chemical and of proteins containing valine is conferred.
In case the activity of the Saccharomyces cerevisiae protein YOR353C or its homologs, e.g. a “protein required for cell morphogenesis and cell separation after mitosis; Sog2p” is increased advantageously in an organelle such as a plastid or mitochondria, preferably, in one embodiment an increase of the fine chemical, preferably an increase of the fine chemical and of proteins containing isoleucine, leucine and/or valine is conferred.
In case the activity of the Saccharomyces cerevisiae protein YAL038W or its homologs, e.g. a “pyruvate kinase” is increased advantageously in an organelle such as a plastid or mitochondria, preferably, in one embodiment an increase of the fine chemical, preferably an increase of the fine chemical and of proteins containing isoleucine, leucine and/or valine is conferred.
In case the activity of the Saccharomyces cerevisiae protein YDR497C or its homologs, e.g. a “myo-inositol transporter” is increased advantageously in an organelle such as a plastid or mitochondria, preferably, in one embodiment an increase of the fine chemical, preferably an increase of the fine chemical and of proteins containing leucine and/or isoleucine is conferred.
In case the activity of the Saccharomyces cerevisiae protein YEL046C or its homologs, e.g. a “L-threonine aldolase” is increased advantageously in an organelle such as a plastid or mitochondria, preferably, in one embodiment an increase of the fine chemical, preferably an increase of the fine chemical and of proteins containing leucine is conferred.
In case the activity of the Saccharomyces cerevisiae protein YER024W or its homologs, e.g. a “carnitine acetyltransferase” is increased advantageously in an organelle such as a plastid or mitochondria, preferably, in one embodiment an increase of the fine chemical, preferably an increase of the fine chemical and of proteins containing leucine and/or isleucine is conferred.
In case the activity of the Saccharomyces cerevisiae protein YKR043C or its homologs, e.g. a “phosphoglycerate mutase like protein” is increased advantageously in an organelle such as a plastid or mitochondria, preferably, in one embodiment an increase of the fine chemical, preferably an increase of the fine chemical and of proteins containing valine is conferred.
In case the activity of the Saccharomyces cerevisiae protein YLR174W or its homologs, e.g. a “NADP-dependent isocitrate dehydrogenase” is increased advantageously in an organelle such as a plastid or mitochondria, preferably, in one embodiment an increase of the fine chemical, preferably an increase of the fine chemical and of proteins containing valine is conferred.
In case the activity of the Saccharomyces cerevisiae protein YNL241C or its homologs, e.g. an “glucose-6-phosphate dehydrogenase” is increased advantageously in an organelle such as a plastid or mitochondria, preferably, in one embodiment an increase of the fine chemical, preferably an increase of the fine chemical and of proteins containing isoleucine and/or valine is conferred.

[1186] for the disclosure of the paragraphs [0061.0.0.3] and [0062.0.0.3] see paragraphs [0061.0.0.0] and [0062.0.0.0] above.

[1187] A protein having an activity conferring an increase in the amount or level of the fine chemical, preferably upon targeting to the plastids preferably has the structure of the polypeptide described herein, in particular of the polypeptides comprising the consensus sequence shown in table IV, application no. 4, column 7 or of the polypeptide as shown in the amino acid sequences as disclosed in table II, application no. 4, columns 5 and 7 or the functional homologues thereof as described herein, or is encoded by the nucleic acid molecule characterized herein or the nucleic acid molecule according to the invention, for example by the nucleic acid molecule as shown in table I, application no. 4, columns 5 and 7 or its herein described functional homologues and has the herein mentioned activity.

[1188] For the purposes of the present invention, the terms “L-leucine, L-isoleucine and/or L-valine” and “leucine, isoleucine and/or valine” also encompass the corresponding salts, such as, for example, leucine, isoleucine and/or valine hydrochloride or leucine, isoleucine and/or valine sulfate. Preferably the terms leucine, isoleucine and/or valine is intended to encompass the term L-leucine, L-isoleucine and/or L-valine.

[1189] for the disclosure of the paragraphs [0065.0.0.3] and [0066.0.0.3] see paragraphs [0065.0.0.0] and [0066.0.0.0] above.

[1190] In one embodiment, the process of the present invention comprises one or more of the following steps
[1191] a) stabilizing a protein conferring the increased expression of a protein encoded by the nucleic acid molecule of the invention or of the polypeptide of the invention, e.g. of a polypeptide having a polypeptide having the activity of a protein as indicated in table II, application no. 4, columns 5 and 7 or its homologs activity having herein-mentioned leucine, isoleucine and/or valine increasing activity; and/or
[1192] b) stabilizing a mRNA conferring the increased expression of a protein encoded by the nucleic acid molecule of the invention, which is in the sense of the invention a fusion of a nucleic acid sequence encoding a transit peptide and of a nucleic acid sequence as shown in table I, application no. 4, columns 5 and 7, e.g. a nucleic acid sequence encoding a polypeptide having a polypeptide having the activity of a protein as indicated in table II, application no. 4, columns 5 and 7 or its homologs activity or of a mRNA encoding the polypeptide of the present invention having herein-mentioned leucine, isoleucine and/or valine increasing activity; and/or
[1193] c) increasing the specific activity of a protein conferring the increased expression of a protein encoded by the nucleic acid molecule of the invention or of the polypeptide of the present invention having herein-mentioned leucine, isoleucine and/or valine increasing activity, e.g. of a polypeptide having the activity of a protein as indicated in table II, application no. 4, columns 5 and 7 or its homologs activity, or decreasing the inhibitory regulation of the polypeptide of the invention; and/or
[1194] d) generating or increasing the expression of an endogenous or artificial transcription factor mediating the expression of a protein conferring the increased expression of a protein encoded by the nucleic acid molecule of the invention or of the polypeptide of the invention having herein-mentioned leucine, isoleucine and/or valine increasing activity, e.g. of a polypeptide having the activity of a protein as indicated in table II, application no. 4, columns 5 and 7 or its homologs activity; and/or
[1195] e) stimulating activity of a protein conferring the increased expression of a protein encoded by the nucleic acid molecule of the present invention or a polypeptide of the present invention having herein-mentioned leucine, isoleucine and/or valine increasing activity, e.g. of a polypeptide having the activity of a protein as indicated in table II, application no. 4, columns 5 and 7 or its homologs activity, by adding one or more exogenous inducing factors to the organisms or parts thereof; and/or
[1196] f) expressing a transgenic gene encoding a protein conferring the increased expression of a polypeptide encoded by the nucleic acid molecule of the present invention or a polypeptide of the present invention, having herein-mentioned leucine, isoleucine and/or valine increasing activity, e.g. of a polypeptide having the activity of a protein as indicated in table II, application no. 4, columns 5 and 7 or its homologs activity, and/or
[1197] g) increasing the copy number of a gene conferring the increased expression of a nucleic acid molecule encoding a polypeptide encoded by the nucleic acid molecule of the invention or the polypeptide of the invention having herein-mentioned leucine, isoleucine and/or valine increasing activity, e.g. of a polypeptide having the activity of a protein as indicated in table II, application no. 4, columns 5 and 7 or its homologs activity; and/or
[1198] h) increasing the expression of the endogenous gene encoding the polypeptide of the invention, e.g. a polypeptide having the activity of a protein as indicated in table II, application no. 4, columns 5 and 7 or its homologs activity, by adding positive expression or removing negative expression elements, e.g. homologous recombination can be used to either introduce positive regulatory elements like for plants the 35S enhancer into the promoter or to remove repressor elements form regulatory regions. Further gene conversion methods can be used to disrupt repressor elements or to enhance to activity of positive elements. Positive elements can be randomly introduced in plants by T-DNA or transposon mutagenesis and lines can be identified in which the positive elements have be integrated near to a gene of the invention, the expression of which is thereby enhanced; and/or
[1199] i) modulating growth conditions of an organism in such a manner, that the expression or activity of the gene encoding the protein of the invention or the protein itself is enhanced for example microorganisms or plants can be grown for example under a higher temperature regime leading to an enhanced expression of heat shock proteins, which can lead an enhanced fine chemical production; and/or
[1200] j) selecting of organisms with especially high activity of the proteins of the invention from natural or from mutagenized resources and breeding them into the target organisms, eg the elite crops; and/or
[1201] k) directing a protein encoded by the nucleic acid molecule of the invention or of the polypeptide of the present invention having herein-mentioned leucine, isoleucine and/or valine increasing activity, e.g. of a polypeptide having the activity of a protein as indicated in table II, application no. 4, columns 5 and 7 or its homologs activity, to the plastids by the addition of a plastidial targeting sequence; and/or
[1202] l) generating the expression of a protein encoded by the nucleic acid molecule of the invention or of the polypeptide of the present invention having herein-mentioned leucine, isoleucine and/or valine increasing activity, e.g. of a polypeptide having the activity of a protein as indicated in table II, application no. 4, columns 5 and 7 or its homologs activity in plastids by the stable or transient transformation advantageously stable transformation of organelles preferably plastids with an inventive nucleic acid sequence preferably in form of an expression cassette containing said sequence leading to the plastidial expression of the nucleic acids or polypeptides of the invention; and/or
[1203] m) generating the expression of a protein encoded by the nucleic acid molecule of the invention or of the polypeptide of the present invention having herein-mentioned leucine, isoleucine and/or valine increasing activity, e.g. of a polypeptide having the activity of a protein as indicated in table II, application no. 4, columns 5 and 7 or its homologs activity in plastids by integration of a nucleic acid of the invention into the plastidal genome under control of preferable a plastidial promoter.

[1204] Preferably, said mRNA is the nucleic acid molecule of the present invention and/or the protein conferring the increased expression of a protein encoded by the nucleic acid molecule of the present invention alone or link to a transit nucleic acid sequence or transit peptide encoding nucleic acid sequence or the polypeptide having the herein mentioned activity, e.g. conferring the increase of the fine chemical after increasing the expression or activity of the encoded polypeptide preferably in organelles such as plastids or having the activity of a polypeptide having an activity as the protein as shown in table II, application no. 4, column 3 or its homologs. Preferably the increase of the fine chemical takes place in plastids.

[1205] for the disclosure of the paragraphs [0069.0.0.3] to [0079.0.0.3] see paragraphs [0069.0.0.0] to [0079.0.0.0] above.

[1206] The activation of an endogenous polypeptide having above-mentioned activity, e.g. having the activity of a protein as shown in table II, application no. 4, column 3 or of the polypeptide of the invention, e.g. conferring the increase of the fine chemical after increase of expression or activity in the cytsol and/or in an organelle like a plastid, preferentially in the plastid, can also be increased by introducing a synthetic transcription factor, which binds close to the coding region of the gene encoding the protein as shown in table II, application no. 4, column 3 and activates its transcription. A chimeric zinc finger protein can be constructed, which comprises a specific DNA-binding domain and an activation domain as e.g. the VP16 domain of Herpes Simplex virus. The specific binding domain can bind to the regulatory region of the gene encoding the protein as shown in table II, application no. 4, column 3. The expression of the chimeric transcription factor in a organism, in particular in a plant, leads to a specific expression of the protein as shown in table II, application no. 4, column 3, see e.g. in WO01/52620, Oriz, Proc. Natl. Acad. Sci. USA, 2002, Vol. 99, 13290 or Guan, Proc. Natl. Acad. Sci. USA, 2002, Vol. 99, 13296.

[1207] for the disclosure of the paragraphs [0081.0.0.3] to [0084.0.0.3] see paragraphs [0081.0.0.0] to [0084.0.0.0] above.

[1208] Owing to the introduction of a gene or a plurality of genes conferring the expression of the nucleic acid molecule of the invention or the polypeptide of the invention, for example the nucleic acid construct mentioned below, or encoding the protein as shown in table II, application no. 4, column 3 into an organism alone or in combination with other genes, it is possible not only to increase the biosynthetic flux towards the end product, but also to increase, modify or create de novo an advantageous, preferably novel metabolites composition in the organism, e.g. an advantageous amino acid composition comprising a higher content of (from a viewpoint of nutritional physiology limited) amino acids, like methionine, lysine or threonine alone or in combination in free or bound form.

[1209] for the disclosure of this paragraph see paragraph [0086.0.0.0] above.

[1210] By influencing the metabolism thus, it is possible to produce, in the process according to the invention, further advantageous compounds. Examples of such compounds are, in addition to leucine, isoleucine and/or valine for example compounds like amino acids such as methionine, threonine or lysine or other desirable compounds.

[1211] Accordingly, in one embodiment, the process according to the invention relates to a process, which comprises:
[1212] a) providing a non-human organism, preferably a microorganism, a non-human animal, a plant or animal cell, a plant or animal tissue or a plant, more preferably a microorganism, a plant or a plant tissue;
[1213] b) increasing the activity of a protein as shown in table II, application no. 4, column 3 or of a polypeptide being encoded by the nucleic acid molecule of the present invention and described below, e.g. conferring an increase of the fine chemical in the organism, preferably in the microorganism, the non-human animal, the plant or animal cell, the plant or animal tissue or the plant, more preferably a microorganism, a plant or a plant tissue, in the cytsol or in the plastids, preferentially in the plastids,
[1214] c) growing the organism, preferably the microorganism, the non-human animal, the plant or animal cell, the plant or animal tissue or the plant under conditions which permit the production of the fine chemical in the organism, preferably the microorganism, the plant cell, the plant tissue or the plant; and
[1215] d) if desired, recovering, optionally isolating, the free and/or bound the fine chemical and, optionally further free and/or bound amino acids synthesized by the organism, the microorganism, the non-human animal, the plant or animal cell, the plant or animal tissue or the plant.

[1216] The organism, in particular the microorganism, non-human animal, the plant or animal cell, the plant or animal tissue or the plant is advantageously grown in such a way that it is not only possible to recover, if desired isolate the free or bound the fine chemical or the free and bound the fine chemical but as option it is also possible to produce, recover and, if desired isolate, other free or/and bound amino acids, in particular leucine, isoleucine and/or valine.

[1217] for the disclosure of the paragraphs [0090.0.0.3] to [0097.0.0.3] see paragraphs [0090.0.0.0] to [0097.0.0.0] above.

[1218] With regard to the nucleic acid sequence as depicted a nucleic acid construct which contains a nucleic acid sequence mentioned herein or an organism (=transgenic organism) which is transformed with said nucleic acid sequence or said nucleic acid construct, “transgene” means all those constructs which have been brought about by genetic manipulation methods, preferably in which either
[1219] a) the nucleic acid sequence as shown in table I, application no. 4, columns 5 and 7 or a derivative thereof, or
[1220] b) a genetic regulatory element, for example a promoter, which is functionally linked to the nucleic acid sequence as shown table I, application no. 4, columns 5 and 7 or a derivative thereof, or
[1221] c) (a) and (b)
   is/are not present in its/their natural genetic environment or has/have been modified by means of genetic manipulation methods, it being possible for the modification to be, by way of example, a substitution, addition, deletion, inversion or insertion of one or more nucleotide. “Natural genetic environment” means the natural chromosomal locus in the organism of origin or the presence in a genomic library. In the case of a genomic library, the natural, genetic environment of the nucleic acid sequence is preferably at least partially still preserved. The environment flanks the nucleic acid sequence at least on one side and has a sequence length of at least 50 bp, preferably at least 500 bp, particularly preferably at least 1000 bp, very particularly preferably at least 5000 bp.

[1222] The use of the nucleic acid sequence according to the invention or of the nucleic acid construct according to the invention for the generation of transgenic plants is therefore also subject matter of the invention. As mentioned above the inventive nucleic acid sequence consists advantageously of the nucleic acid sequences as depicted in the sequence protocol and disclosed in table I, application no. 4, columns 5 and 7 joined to a nucleic acid sequence encoding a transit peptide, or a targeting nucleic acid sequence which directs the nucleic acid sequences disclosed in table I, application no. 4, columns 5 and 7 to the organelle preferentially the plastids. Alternatively the inventive nucleic acids sequences consist advantageously of the nucleic acid sequences as depicted in the sequence protocol and disclosed in table I, application no. 4, columns 5 and 7 joined preferably to a nucleic acids sequence mediating the stable integration of nucleic acids into the plastidial genome and optionally sequences mediating the transcription of the sequence in the plastidial compartment. A transient expression is in principal also desirable and possible.

[1223] for the disclosure of this paragraph see paragraph [0100.0.0.0] above.

[1224] In an advantageous embodiment of the invention, the organism takes the form of a plant whose amino acid content is modified advantageously owing to the nucleic acid molecule of the present invention expressed. This is important for plant breeders since, for example, the nutritional value of plants for monogastric animals is limited by a few essential amino acids such as lysine, threonine or methionine. After the activity of the protein as shown in table II, application no. 4, column 3 has been increased or generated in the cytsol or plastids, preferentially in the plastids, or after the expression of nucleic acid molecule or polypeptide according to the invention has been generated or increased, the transgenic plant generated thus is grown on or in a nutrient medium or else in the soil and subsequently harvested.

[1225] for the disclosure of the paragraphs [0102.0.0.3] to [0110.0.0.3] see paragraphs [0102.0.0.0] to [0110.0.0.0] above.

[1226] In a preferred embodiment, the fine chemical (leucine, isoleucine and/or valine) is produced in accordance with the invention and, if desired, is isolated. The production of further amino acids such as lysine, methionine, threonine, tryptophane etc. and of amino acid mixtures by the process according to the invention is advantageous.

[1227] for the disclosure of the paragraphs [0112.0.0.3] to [0115.0.0.3] see paragraphs [0112.0.0.0] to [0115.0.0.0] above.

[1228] In a preferred embodiment, the present invention relates to a process for the production of the fine chemical comprising or generating in an organism or a part thereof, preferably in a cell compartment such as a plastid or mitochondria, the expression of at least one nucleic acid molecule comprising a nucleic acid molecule selected from the group consisting of:
[1229] a) nucleic acid molecule encoding, preferably at least the mature form, of the polypeptide shown in table II, application no. 4, columns 5 and 7 or a fragment thereof, which confers an increase in the amount of the fine chemical in an organism or a part thereof;
[1230] b) nucleic acid molecule comprising, preferably at least the mature form, of the nucleic acid molecule shown in table I, application no. 4, columns 5 and 7;
[1231] c) nucleic acid molecule whose sequence can be deduced from a polypeptide sequence encoded by a nucleic acid molecule of (a) or (b) as result of the degeneracy of the genetic code and conferring an increase in the amount of the fine chemical in an organism or a part thereof;
[1232] d) nucleic acid molecule encoding a polypeptide which has at least 50% identity with the amino acid sequence of the polypeptide encoded by the nucleic acid molecule of (a) to (c) and conferring an increase in the amount of the fine chemical in an organism or a part thereof;
[1233] e) nucleic acid molecule which hybridizes with a nucleic acid molecule of (a) to (c) under stringent hybridisation conditions and conferring an increase in the amount of the fine chemical in an organism or a part thereof;
[1234] f) nucleic acid molecule encoding a polypeptide, the polypeptide being derived by substituting, deleting and/or adding one or more amino acids of the amino acid sequence of the polypeptide encoded by the nucleic acid molecules (a) to (d), preferably to (a) to (c) and conferring an increase in the amount of the fine chemical in an organism or a part thereof;
[1235] g) nucleic acid molecule encoding a fragment or an epitope of a polypeptide which is encoded by one of the nucleic acid molecules of (a) to (e), preferably to (a) to (c) and conferring an increase in the amount of the fine chemical in an organism or a part thereof;
[1236] h) nucleic acid molecule comprising a nucleic acid molecule which is obtained by amplifying nucleic acid molecules from a cDNA library or a genomic library using the primers shown in table III, application no. 4, column 7 and conferring an increase in the amount of the fine chemical in an organism or a part thereof;
[1237] i) nucleic acid molecule encoding a polypeptide which is isolated, e.g. from an expression library, with the aid of monoclonal antibodies against a polypeptide encoded by one of the nucleic acid molecules of (a) to (h), preferably to (a) to (c), and conferring an increase in the amount of the fine chemical in an organism or a part thereof;
[1238] j) nucleic acid molecule which encodes a polypeptide comprising the consensus sequence shown in table IV, application no. 4, column 7 and conferring an increase in the amount of the fine chemical in an organism or a part thereof;
[1239] k) nucleic acid molecule comprising one or more of the nucleic acid molecule encoding the amino acid sequence of a polypeptide encoding a domain of the polypeptide shown in table II, application no. 4, columns 5 and 7 and conferring an increase in the amount of the fine chemical in an organism or a part thereof; and
[1240] l) nucleic acid molecule which is obtainable by screening a suitable library under stringent conditions with a probe comprising one of the sequences of the nucleic acid molecule of (a) to (k), preferably to (a) to (c), or with a fragment of at least 15 nt, preferably 20 nt, 30 nt, 50 nt, 100 nt, 200 nt or 500 nt of the nucleic acid molecule characterized in (a) to (k), preferably to (a) to (c), and conferring an increase in the amount of the fine chemical in an organism or a part thereof;
   or which comprises a sequence which is complementary thereto.

[1241] In one embodiment, the nucleic acid molecule used in the process of the invention distinguishes over the sequence indicated in table I A, application no. 4, columns 5 and 7 by one or more nucleotides. In one embodiment, the nucleic acid molecule used in the process of the invention does not consist of the sequence indicated in table I A, application no. 4, columns 5 and 7. In one embodiment, the nucleic acid molecule used in the process of the invention is less than 100%, 99.999%, 99.99%, 99.9% or 99% identical to a sequence indicated in table I A, application no. 4, columns 5 and 7. In another embodiment, the nucleic acid molecule does not encode a polypeptide of a sequence indicated in table II A, application no. 4, columns 5 and 7.

[1242] In one embodiment, the nucleic acid molecule used in the process of the invention distinguishes over the sequence indicated in table I B, application no. 4, columns 5 and 7, by one or more nucleotides. In one embodiment, the nucleic acid molecule used in the process of the invention does not consist of the sequence indicated in table I B, application no. 4, columns 5 and 7. In one embodiment, the nucleic acid molecule used in the process of the invention is less than 100%, 99.999%, 99.99%, 99.9% or 99% identical to a sequence indicated in table I B, application no. 4, columns 5 and 7. In another embodiment, the nucleic acid molecule does not encode a polypeptide of a sequence indicated in table II B, application no. 4, columns 5 and 7.

[1243] In one embodiment, the nucleic acid molecule used in the process distinguishes over the sequence shown in table I, application no. 4, columns 5 and 7 by one or more nucleotides or does not consist of the sequence shown in table I, application no. 4, columns 5 and 7. In one embodiment, the nucleic acid molecule of the present invention is less than 100%, 99.999%, 99.99%, 99.9% or 99% identical to the sequence shown in table I, application no. 4, columns 5 and 7. In another embodiment, the nucleic acid molecule does not encode a polypeptide of the sequence shown in table II, application no. 4, columns 5 and 7.

[1244] for the disclosure of the paragraphs [0118.0.0.3] to [0120.0.0.3] see paragraphs [0118.0.0.0] to [0120.0.0.0] above.

[1245] Nucleic acid molecules with the sequence shown in table I, application no. 4, columns 5 and 7, nucleic acid molecules which are derived from the amino acid sequences shown in table II, application no. 4, columns 5 and 7 or from polypeptides comprising the consensus sequence shown in table IV, application no. 4, column 7, or their derivatives or homologues encoding polypeptides with the enzymatic or biological activity of a protein as shown in table II, application no. 4, column 3 or conferring the fine chemical increase after increasing its expression or activity are advantageously increased in the process according to the invention by expression either in the cytsol or in an organelle such as a plastid or mitochondria or both, preferably in plastids.

[1246] for the disclosure of this paragraph see paragraph [0122.0.0.0] above.

[1247] Nucleic acid molecules, which are advantageous for the process according to the invention and which encode polypeptides with the activity of a protein as shown in table II, application no. 4, column 3 can be determined from generally accessible databases.

[1248] for the disclosure of this paragraph see paragraph [0124.0.0.0] above.

[1249] The nucleic acid molecules used in the process according to the invention take the form of isolated nucleic acid sequences, which encode polypeptides with the activity of the proteins as shown in table II, application no. 4, column 3 and conferring the fine chemical increase by expression either in the cytsol or in an organelle such as a plastid or mitochondria or both, preferably in plastids.

[1250] for the disclosure of the paragraphs [0126.0.0.3] to [0133.0.0.3] see paragraphs [0126.0.0.0] to [0133.0.0.0] above.

[1251] However, it is also possible to use artificial sequences, which differ in one or more bases from the nucleic acid sequences found in organisms, or in one or more amino acid molecules from polypeptide sequences found in organisms, in particular from the polypeptide sequences shown in table II, application no. 4, columns 5 and 7 or the functional homologues thereof as described herein, preferably conferring above-mentioned activity, i.e. conferring the fine chemical increase after increasing its activity, e.g. after increasing the activity of a protein as shown in table II, column 3 by for example expression either in the cytsol or in an organelle such as a plastid or mitochondria or both, preferably in plastids.

[1252] for the disclosure of the paragraphs [0135.0.0.3] to [0140.0.0.3] see paragraphs [0135.0.0.0] to [0140.0.0.0] above.

[1253] Synthetic oligonucleotide primers for the amplification, e.g. as shown in table III, application no. 4, column 7, by means of polymerase chain reaction can be generated on the basis of a sequence shown herein, for example the sequence shown in table I, application no. 4, columns 5 and 7 or the sequences derived from table II, application no. 4, columns 5 and 7.

[1254] Moreover, it is possible to identify conserved regions from various organisms by carrying out protein sequence alignments with the polypeptide used in the process of the invention, in particular with sequences of the polypeptide of the invention, from which conserved regions, and in turn, degenerate primers can be derived. Conserved regions are those, which show a very little variation in the amino acid in one particular position of several homologs from different origin. The consensus sequence shown in table IV, application no. 4, column 7 is derived from said alignments.

[1255] Degenerated primers can then be utilized by PCR for the amplification of fragments of novel proteins having above-mentioned activity, e.g. conferring the increase of the fine chemical after increasing the expression or activity or having the activity of a protein as shown in table II, application no. 4, column 3 or further functional homologs of the polypeptide of the invention from other organisms.

[1256] for the disclosure of the paragraphs [0144.0.0.3] to [0151.0.0.3] see paragraphs [0144.0.0.0] to [0151.0.0.0] above.

[1257] Polypeptides having above-mentioned activity, i.e. conferring the fine chemical increase, derived from other organisms, can be encoded by other DNA sequences which hybridize to the sequences shown in table I, application no. 4, columns 5 and 7, preferably shown in table I B, application no. 4, columns 5 and 7 under relaxed hybridization conditions and which code on expression for peptides having the methionine increasing activity.

[1258] for the disclosure of the paragraphs [0153.0.0.3] to [0159.0.0.3] see paragraphs [0153.0.0.0] to [0159.0.0.0] above.

[1259] Further, the nucleic acid molecule of the invention comprises a nucleic acid molecule, which is a complement of one of the nucleotide sequences of above mentioned nucleic acid molecules or a portion thereof. A nucleic acid molecule which is complementary to one of the nucleotide sequences shown in table I, application no. 4, columns 5 and 7, preferably shown in table I B, application no. 4, columns 5 and 7 is one which is sufficiently complementary to one of the nucleotide sequences shown in table I, application no. 4, columns 5 and 7, preferably shown in table I B, application no. 4, columns 5 and 7 such that it can hybridize to one of the nucleotide sequences shown in table I, application no. 4, columns 5 and 7, preferably shown in table I B, application no. 4, columns 5 and 7, thereby forming a stable duplex. Preferably, the hybridisation is performed under stringent hybridization conditions. However, a complement of one of the herein disclosed sequences is preferably a sequence complement thereto according to the base pairing of nucleic acid molecules well known to the skilled person. For example, the bases A and G undergo base pairing with the bases T and U or C, resp. and visa versa. Modifications of the bases can influence the base-pairing partner.

[1260] The nucleic acid molecule of the invention comprises a nucleotide sequence which is at least about 30%, 35%, 40% or 45%, preferably at least about 50%, 55%, 60% or 65%, more preferably at least about 70%, 80%, or 90%, and even more preferably at least about 95%, 97%, 98%, 99% or more homologous to a nucleotide sequence shown in table I, application no. 4, columns 5 and 7, preferably shown in table I B, application no. 4, columns 5 and 7, or a portion thereof and preferably has above mentioned activity, in particular having a fine chemical increasing activity after increasing the activity or an activity of a gene product as shown in table II, application no. 4, column 3 by for example expression either in the cytsol or in an organelle such as a plastid or mitochondria or both, preferably in plastids.

[1261] The nucleic acid molecule of the invention comprises a nucleotide sequence which hybridizes, preferably hybridizes under stringent conditions as defined herein, to one of the nucleotide sequences shown in table I, application no. 4, columns 5 and 7, preferably shown in table I B, application no. 4, columns 5 and 7, or a portion thereof and encodes a protein having above-mentioned activity, e.g. conferring of a leucine, isoleucine and/or valine increase by for example expression either in the cytsol or in an organelle such as a plastid or mitochondria or both, preferably in plastids, and optionally, the activity of a protein as shown in table II, application no. 4, column 3.

[1262] Moreover, the nucleic acid molecule of the invention can comprise only a portion of the coding region of one of the sequences shown in table I, application no. 4, columns 5 and 7, preferably shown in table I B, application no. 4, columns 5 and 7, for example a fragment which can be used as a probe or primer or a fragment encoding a biologically active portion of the polypeptide of the present invention or of a polypeptide used in the process of the present invention, i.e. having above-mentioned activity, e.g. conferring an increase of the fine chemical if its activity is increased by for example expression either in the cytsol or in an organelle such as a plastid or mitochondria or both, preferably in plastids. The nucleotide sequences determined from the cloning of the present protein-according-to-the-invention-encoding gene allows for the generation of probes and primers designed for use in identifying and/or cloning its homologues in other cell types and organisms. The probe/primer typically comprises substantially purified oligonucleotide. The oligonucleotide typically comprises a region of nucleotide sequence that hybridizes under stringent conditions to at least about 12, 15 preferably about 20 or 25, more preferably about 40, 50 or 75 consecutive nucleotides of a sense strand of one of the sequences set forth, e.g., in table I, application no. 4, columns 5 and 7, preferably shown in table I B, application no. 4, columns 5 and 7, an anti-sense sequence of one of the sequences, e.g., set forth in table I, application no. 4, columns 5 and 7, preferably shown in table I B, application no. 4, columns 5 and 7, or naturally occurring mutants thereof. Primers based on a nucleotide of invention can be used in PCR reactions to clone homologues of the polypeptide of the invention or of the polypeptide used in the process of the invention, e.g. as the primers described in the examples of the present invention, e.g. as shown in the examples. A PCR with the primers shown in table Ill, application no. 4, column 7 will result in a fragment of the gene product as shown in table II, column 3.

[1263] for the disclosure of this paragraph see paragraph [0164.0.0.0] above.

[1264] The nucleic acid molecule of the invention encodes a polypeptide or portion thereof which includes an amino acid sequence which is sufficiently homologous to the amino acid sequence shown in table II, application no. 4, columns 5 and 7 such that the protein or portion thereof maintains the ability to participate in the fine chemical production, in particular a leucine, isoleucine and/or valine increasing the activity as mentioned above or as described in the examples in plants or microorganisms is comprised.

[1265] As used herein, the language “sufficiently homologous” refers to proteins or portions thereof which have amino acid sequences which include a minimum number of identical or equivalent amino acid residues (e.g., an amino acid residue which has a similar side chain as an amino acid residue in one of the sequences of the polypeptide of the present invention) to an amino acid sequence shown in table II, application no. 4, columns 5 and 7 such that the protein or portion thereof is able to participate in the increase of the fine chemical production. For examples having the activity of a protein as shown in table II, column 3 and as described herein.

[1266] In one embodiment, the nucleic acid molecule of the present invention comprises a nucleic acid that encodes a portion of the protein of the present invention. The protein is at least about 30%, 35%, 40%, 45% or 50%, preferably at least about 55%, 60%, 65% or 70%, and more preferably at least about 75%, 80%, 85%, 90%, 91%, 92%, 93% or 94% and most preferably at least about 95%, 97%, 98%, 99% or more homologous to an entire amino acid sequence of table II, application no. 4, columns 5 and 7 and having above-mentioned activity, e.g. conferring preferably the increase of the fine chemical by for example expression either in the cytsol or in an organelle such as a plastid or mitochondria or both, preferably in plastids.

[1267] for the disclosure of the paragraphs [0168.0.0.3] and [0169.0.0.3] see paragraphs [0168.0.0.0] to [0169.0.0.0] above.

[1268] The invention further relates to nucleic acid molecules that differ from one of the nucleotide sequences shown in table I, application no. 4, columns 5 and 7 (and portions thereof) due to degeneracy of the genetic code and thus encode a polypeptide of the present invention, in particular a polypeptide having above mentioned activity, e.g. conferring an increase in the fine chemical in a organism, e.g. as that polypeptides depicted by the sequence shown in table II, application no. 4, columns 5 and 7 or the functional homologues. Advantageously, the nucleic acid molecule of the invention comprises, or in an other embodiment has, a nucleotide sequence encoding a protein comprising, or in an other embodiment having, an amino acid sequence shown in table II, application no. 4, columns 5 and 7 or the functional homologues. In a still further embodiment, the nucleic acid molecule of the invention encodes a full length protein which is substantially homologous to an amino acid sequence shown in table II, application no. 4, columns 5 and 7 or the functional homologues. However, in a preferred embodiment, the nucleic acid molecule of the present invention does not consist of the sequence shown in table I, application no. 4, columns 5 and 7, preferably as indicated in table I A, application no. 4, columns 5 and 7. Preferably the nucleic acid molecule of the invention is a functional homologue or identical to a nucleic acid molecule indicated in table I B, application no. 4, columns 5 and 7.

[1269] for the disclosure of the paragraphs [0171.0.0.3] to [0173.0.0.3] see paragraphs [0171.0.0.0] to [0173.0.0.0] above.

[1270] Accordingly, in another embodiment, a nucleic acid molecule of the invention is at least 15, 20, 25 or 30 nucleotides in length. Preferably, it hybridizes under stringent conditions to a nucleic acid molecule comprising a nucleotide sequence of the nucleic acid molecule of the present invention or used in the process of the present invention, e.g. comprising the sequence shown in table I, application no. 4, columns 5 and 7. The nucleic acid molecule is preferably at least 20, 30, 50, 100, 250 or more nucleotides in length.

[1271] for the disclosure of this paragraph see paragraph [0175.0.0.0] above.

[1272] Preferably, nucleic acid molecule of the invention that hybridizes under stringent conditions to a sequence shown in table I, application no. 4, columns 5 and 7 corresponds to a naturally-occurring nucleic acid molecule of the invention. As used herein, a “naturally-occurring” nucleic acid molecule refers to an RNA or DNA molecule having a nucleotide sequence that occurs in nature (e.g., encodes a natural protein).

[1273] Preferably, the nucleic acid molecule encodes a natural protein having abovementioned activity, e.g. conferring the fine chemical increase after increasing the expression or activity thereof or the activity of a protein of the invention or used in the process of the invention by for example expression the nucleic acid sequence of the gene product in the cytsol and/or in an organelle such as a plastid or mitochondria, preferably in plastids.

[1274] for the disclosure of this paragraph see paragraph [0177.0.0.0] above.

[1275] For example, nucleotide substitutions leading to amino acid substitutions at “non-essential” amino acid residues can be made in a sequence of the nucleic acid molecule of the invention or used in the process of the invention, e.g. shown in table I, application no. 4, columns 5 and 7.

[1276] for the disclosure of the paragraphs [0179.0.0.3] and [0180.0.0.3] see paragraphs [0179.0.0.0] and [0180.0.0.0] above.

[1277] Accordingly, the invention relates to nucleic acid molecules encoding a polypeptide having above-mentioned activity, e.g. conferring an increase in the fine chemical in an organisms or parts thereof by for example expression either in the cytsol or in an organelle such as a plastid or mitochondria or both, preferably in plastids that contain changes in amino acid residues that are not essential for said activity. Such polypeptides differ in amino acid sequence from a sequence contained in the sequences shown in table II, application no. 4, columns 5 and 7, preferably shown in table II A, application no. 4, columns 5 and 7 yet retain said activity described herein. The nucleic acid molecule can comprise a nucleotide sequence encoding a polypeptide, wherein the polypeptide comprises an amino acid sequence at least about 50% identical to an amino acid sequence shown in table II, application no. 4, columns 5 and 7, preferably shown in table II A, application no. 4, columns 5 and 7 and is capable of participation in the increase of production of the fine chemical after increasing its activity, e.g. its expression by for example expression either in the cytsol or in an organelle such as a plastid or mitochondria or both, preferably in plastids. Preferably, the protein encoded by the nucleic acid molecule is at least about 60% identical to the sequence shown in table II, application no. 4, columns 5 and 7, preferably shown in table II A, application no. 4, columns 5 and 7, more preferably at least about 70% identical to one of the sequences shown in table II, application no. 4, columns 5 and 7, preferably shown in table II A, application no. 4, columns 5 and 7, even more preferably at least about 80%, 90%, 95% homologous to the sequence shown in table II, application no. 4, columns 5 and 7, and most preferably at least about 96%, 97%, 98%, or 99% identical to the sequence shown in table II, application no. 4, columns 5 and 7, preferably shown in table II A, application no. 4, columns 5 and 7.

[1278] for the disclosure of the paragraphs [0182.0.0.3] to [0188.0.0.3] see paragraphs [0182.0.0.0] to [0188.0.0.0] above.

[1279] Functional equivalents derived from one of the polypeptides as shown in table II, application no. 4, columns 5 and 7, preferably shown in table II B, application no. 4, columns 5 and 7 resp., according to the invention by substitution, insertion or deletion have at least 30%, 35%, 40%, 45% or 50%, preferably at least 55%, 60%, 65% or 70% by preference at least 80%, especially preferably at least 85% or 90%, 91%, 92%, 93% or 94%, very especially preferably at least 95%, 97%, 98% or 99% homology with one of the polypeptides as shown in table II, application no. 4, columns 5 and 7, preferably shown in table II B, application no. 4, columns 5 and 7 resp., according to the invention and are distinguished by essentially the same properties as the polypeptide as shown in table II, application no. 4, columns 5 and 7, preferably shown in table II B, application no. 1, columns 5 and 7.

[1280] Functional equivalents derived from the nucleic acid sequence as shown in table I, application no. 4, columns 5 and 7, preferably shown in table I B, application no. 4, columns 5 and 7 resp., according to the invention by substitution, insertion or deletion have at least 30%, 35%, 40%, 45% or 50%, preferably at least 55%, 60%, 65% or 70% by preference at least 80%, especially preferably at least 85% or 90%, 91%, 92%, 93% or 94%, very especially preferably at least 95%, 97%, 98% or 99% homology with one of the polypeptides as shown in table II, application no. 4, columns 5 and 7, preferably shown in table II B, application no. 4, columns 5 and 7 resp., according to the invention and encode polypeptides having essentially the same properties as the polypeptide as shown in table II, application no. 4, columns 5 and 7, preferably shown in table II B, application no. 4, columns 5 and 7.

[1281] for the disclosure of this paragraph see paragraph [0191.0.0.0] above.

[1282] A nucleic acid molecule encoding an homologous to a protein sequence of table II, application no. 4, columns 5 and 7, preferably shown in table II B, application no. 4, columns 5 and 7 resp., can be created by introducing one or more nucleotide substitutions, additions or deletions into a nucleotide sequence of the nucleic acid molecule of the present invention, in particular of table I, application no. 4, columns 5 and 7, preferably shown in table I B, application no. 4, columns 5 and 7 resp., such that one or more amino acid substitutions, additions or deletions are introduced into the encoded protein. Mutations can be introduced into the encoding sequences of table I, application no. 4, columns 5 and 7, preferably shown in table I B, application no. 4, columns 5 and 7 resp., by standard techniques, such as site-directed mutagenesis and PCR-mediated mutagenesis.

[1283] for the disclosure of the paragraphs [0193.0.0.3] to [0196.0.0.3] see paragraphs [0193.0.0.0] to [0196.0.0.0] above.

[1284] Homologues of the nucleic acid sequences used, with the sequence shown in table I, application no. 4, columns 5 and 7, preferably shown in table I B, application no. 4, columns 5 and 7, comprise also allelic variants with at least approximately 30%, 35%, 40% or 45% homology, by preference at least approximately 50%, 60% or 70%, more preferably at least approximately 90%, 91%, 92%, 93%, 94% or 95% and even more preferably at least approximately 96%, 97%, 98%, 99% or more homology with one of the nucleotide sequences shown or the abovementioned derived nucleic acid sequences or their homologues, derivatives or analogues or parts of these. Allelic variants encompass in particular functional variants which can be obtained by deletion, insertion or substitution of nucleotides from the sequences shown, preferably from table I, application no. 4, columns 5 and 7, preferably shown in table I B, application no. 4, columns 5 and 7, or from the derived nucleic acid sequences, the intention being, however, that the enzyme activity or the biological activity of the resulting proteins synthesized is advantageously retained or increased.

[1285] In one embodiment of the present invention, the nucleic acid molecule of the invention or used in the process of the invention comprises the sequences shown in any of the table I, application no. 4, columns 5 and 7, preferably shown in table I B, application no. 4, columns 5 and 7. It is preferred that the nucleic acid molecule comprises as little as possible other nucleotides not shown in any one of table I, application no. 4, columns 5 and 7, preferably shown in table I B, application no. 4, columns 5 and 7. In one embodiment, the nucleic acid molecule comprises less than 500, 400, 300, 200, 100, 90, 80, 70, 60, 50 or 40 further nucleotides. In a further embodiment, the nucleic acid molecule comprises less than 30, 20 or 10 further nucleotides. In one embodiment, the nucleic acid molecule use in the process of the invention is identical to the sequences shown in table I, application no. 4, columns 5 and 7, preferably shown in table I B, application no. 4, columns 5 and 7.

[1286] Also preferred is that the nucleic acid molecule used in the process of the invention encodes a polypeptide comprising the sequence shown in table II, application no. 4, columns 5 and 7, preferably shown in table II B, application no. 4, columns 5 and 7. In one embodiment, the nucleic acid molecule encodes less than 150, 130, 100, 80, 60, 50, 40 or 30 further amino acids. In a further embodiment, the encoded polypeptide comprises less than 20, 15, 10, 9, 8, 7, 6 or 5 further amino acids. In one embodiment used in the inventive process, the encoded polypeptide is identical to the sequences shown in table II, application no. 4, columns 5 and 7, preferably shown in table II B, application no. 4, columns 5 and 7.

[1287] In one embodiment, the nucleic acid molecule of the invention or used in the process encodes a polypeptide comprising the sequence shown in table II, application no. 4, columns 5 and 7, preferably shown in table II B, application no. 4, columns 5 and 7 comprises less than 100 further nucleotides. In a further embodiment, said nucleic acid molecule comprises less than 30 further nucleotides. In one embodiment, the nucleic acid molecule used in the process is identical to a coding sequence of the sequences shown in table I, application no. 4, columns 5 and 7, preferably shown in table I B, application no. 4, columns 5 and 7.

[1288] Polypeptides (=proteins), which still have the essential biological or enzymatic activity of the polypeptide of the present invention conferring an increase of the fine chemical i.e. whose activity is essentially not reduced, are polypeptides with at least 10% or 20%, by preference 30% or 40%, especially preferably 50% or 60%, very especially preferably 80% or 90 or more of the wild type biological activity or enzyme activity, advantageously, the activity is essentially not reduced in comparison with the activity of a polypeptide shown in table II, application no. 4, columns 5 and 7 expressed under identical conditions.

[1289] Homologues of table I, application no. 4, columns 5 and 7 or of the derived sequences of table II, application no. 4, columns 5 and 7 also mean truncated sequences, cDNA, single-stranded DNA or RNA of the coding and noncoding DNA sequence. Homologues of said sequences are also understood as meaning derivatives, which comprise noncoding regions such as, for example, UTRs, terminators, enhancers or promoter variants. The promoters upstream of the nucleotide sequences stated can be modified by one or more nucleotide substitution(s), insertion(s) and/or deletion(s) without, however, interfering with the functionality or activity either of the promoters, the open reading frame (=ORF) or with the 3′-regulatory region such as terminators or other 3′ regulatory regions, which are far away from the ORF. It is furthermore possible that the activity of the promoters is increased by modification of their sequence, or that they are replaced completely by more active promoters, even promoters from heterologous organisms. Appropriate promoters are known to the person skilled in the art and are mentioned herein below.

[1290] for the disclosure of the paragraphs [0203.0.0.3] to [0215.0.0.3] see paragraphs [0203.0.0.0] to [0215.0.0.0] above.

[1291] Accordingly, in one embodiment, the invention relates to a nucleic acid molecule, which comprises a nucleic acid molecule selected from the group consisting of:
[1292] a) nucleic acid molecule encoding, preferably at least the mature form, of the polypeptide shown in table II, application no. 4, columns 5 and 7, preferably in Table II B, application no. 4, columns 5 and 7; or a fragment thereof conferring an increase in the amount of the fine chemical in an organism or a part thereof
[1293] b) nucleic acid molecule comprising, preferably at least the mature form, of the nucleic acid molecule shown in table I, application no. 4, columns 5 and 7, preferably in Table I B, application no. 4, columns 5 and 7, or a fragment thereof conferring an increase in the amount of the fine chemical in an organism or a part thereof;
[1294] c) nucleic acid molecule whose sequence can be deduced from a polypeptide sequence encoded by a nucleic acid molecule of (a) or (b) as result of the degeneracy of the genetic code and conferring an increase in the amount of the fine chemical in an organism or a part thereof;
[1295] d) nucleic acid molecule encoding a polypeptide whose sequence has at least 50% identity with the amino acid sequence of the polypeptide encoded by the nucleic acid molecule of (a) to (c) and conferring an increase in the amount of the fine chemical in an organism or a part thereof;
[1296] e) nucleic acid molecule which hybridizes with a nucleic acid molecule of (a) to (c) under stringent hybridisation conditions and conferring an increase in the amount of the fine chemical in an organism or a part thereof;
[1297] f) nucleic acid molecule encoding a polypeptide, the polypeptide being derived by substituting, deleting and/or adding one or more amino acids of the amino acid sequence of the polypeptide encoded by the nucleic acid molecules (a) to (d), preferably to (a) to (c), and conferring an increase in the amount of the fine chemical in an organism or a part thereof;
[1298] g) nucleic acid molecule encoding a fragment or an epitope of a polypeptide which is encoded by one of the nucleic acid molecules of (a) to (e), preferably to (a) to (c) and conferring an increase in the amount of the fine chemical in an organism or a part thereof;
[1299] h) nucleic acid molecule comprising a nucleic acid molecule which is obtained by amplifying a cDNA library or a genomic library using the primers in table Ill, application no. 4, column 7 and conferring an increase in the amount of the fine chemical in an organism or a part thereof;
[1300] i) nucleic acid molecule encoding a polypeptide which is isolated, e.g. from a expression library, with the aid of monoclonal antibodies against a polypeptide encoded by one of the nucleic acid molecules of (a) to (g), preferably to (a) to (c) and conferring an increase in the amount of the fine chemical in an organism or a part thereof;
[1301] j) nucleic acid molecule which encodes a polypeptide comprising the consensus sequence shown in table IV, application no. 4, columns 7 and conferring an increase in the amount of the fine chemical in an organism or a part thereof;
[1302] k) nucleic acid molecule encoding the amino acid sequence of a polypeptide encoding a domain of the polypeptide shown in table II, application no. 4, columns 5 and 7 and conferring an increase in the amount of the fine chemical in an organism or a part thereof; and
[1303] l) nucleic acid molecule which is obtainable by screening a suitable nucleic acid library under stringent hybridization conditions with a probe comprising one of the sequences of the nucleic acid molecule of (a) to (k) or with a fragment of at least 15 nt, preferably 20 nt, 30 nt, 50 nt, 100 nt, 200 nt or 500 nt of the nucleic acid molecule characterized in (a) to (h) or of the nucleic acid molecule shown in table I, application no. 4, columns 5 and 7 or a nucleic acid molecule encoding, preferably at least the mature form of, the polypeptide shown in table II, application no. 4, columns 5 and 7, and conferring an increase in the amount of the fine chemical in an organism or a part thereof; or which encompasses a sequence which is complementary thereto;
   whereby, preferably, the nucleic acid molecule according to (a) to (l) distinguishes over the sequence depicted in table I A and/or I B, application no. 4, columns 5 and 7 by one or more nucleotides. In one embodiment, the nucleic acid molecule of the invention does not consist of the sequence shown in table I A and/or I B, application no. 4, columns 5 and 7. In an other embodiment, the nucleic acid molecule of the present invention is at least 30% identical and less than 100%, 99.999%, 99.99%, 99.9% or 99% identical to the sequence shown in table I A and/or I B, application no. 4, columns 5 and 7. In a further embodiment the nucleic acid molecule does not encode the polypeptide sequence shown in table II A and/or II B, application no. 4, columns 5 and 7. Accordingly, in one embodiment, the nucleic acid molecule of the present invention encodes in one embodiment a polypeptide which differs at least in one or more amino acids from the polypeptide shown in table II A and/or II B, application no. 4, columns 5 and 7 does not encode a protein of the sequence shown in table II A and/or II B, application no. 4, columns 5 and 7. Accordingly, in one embodiment, the protein encoded by a sequence of a nucleic acid according to (a) to (l) does not consist of the sequence shown in table I A and/or I B, application no. 4, columns 5 and 7. In a further embodiment, the protein of the present invention is at least 30% identical to protein sequence depicted in table II A and/or II B, application no. 4, columns 5 and 7 and less than 100%, preferably less than 99.999%, 99.99% or 99.9%, more preferably less than 99%, 985, 97%, 96% or 95% identical to the sequence shown in table II A and/or II B, application no. 4, columns 5 and 7.

[1304] for the disclosure of the paragraphs [0217.0.0.3] to [0226.0.0.3] see paragraphs [0217.0.0.0] to [0226.0.0.0] above.

[1305] In general, vector systems preferably also comprise further cis-regulatory regions such as promoters and terminators and/or selection markers by means of which suitably transformed organisms can be identified. While vir genes and T-DNA sequences are located on the same vector in the case of cointegrated vector systems, binary systems are based on at least two vectors, one of which bears vir genes, but no T-DNA, while a second one bears T-DNA, but no vir gene. Owing to this fact, the last-mentioned vectors are relatively small, easy to manipulate and capable of replication in E. coli and in Agrobacterium. These binary vectors include vectors from the series pBIB-HYG, pPZP, pBecks, pGreen. Those which are preferably used in accordance with the invention are Bin19, pBI101, pBinAR, pGPTV and pCAMBIA. An overview of binary vectors and their use is given by Hellens et al, Trends in Plant Science (2000) 5, 446-451. The vectors are preferably modified in such a manner, that they already contain the nucleic acid coding for the transitpeptide and that the nucleic acids of the invention, preferentially the nucleic acid sequences encoding the polypeptides shown in table II, application no. 4, columns 5 and 7 can be cloned 3″ prime to the transitpeptide encoding sequence, leading to a functional preprotein, which is directed to the plastids and which means that the mature protein fulfills its biological activity.

[1306] for the disclosure of the paragraphs [0228.0.0.3] to [0239.0.0.3] see paragraphs [0228.0.0.0] to [0239.0.0.0] above.

[1307] In addition to the sequence mentioned in table I, application no. 4, columns 5 and 7 or its derivatives, it is advantageous additionally to express and/or mutate further genes in the organisms. Especially advantageously, additionally at least one further gene of the amino acid biosynthetic pathway such as for L-lysine, L-threonine and/or L-methionine is expressed in the organisms such as plants or microorganisms. It is also possible that the regulation of the natural genes has been modified advantageously so that the gene and/or its gene product is no longer subject to the regulatory mechanisms which exist in the organisms. This leads to an increased synthesis of the amino acids desired since, for example, feedback regulations no longer exist to the same extent or not at all. In addition it might be advantageously to combine the nucleic acids sequences of the invention containing the sequences shown in table I, application no. 4, columns 5 and 7 with genes which generally support or enhances to growth or yield of the target organism, for example genes which lead to faster growth rate of microorganisms or genes which produces stress-, pathogen, or herbicide resistant plants.

[1308] for the disclosure of the paragraphs [0241.0.0.3] to [0264.0.0.3] see paragraphs [0241.0.0.0] to [0264.0.0.0] above.

[1309] Other preferred sequences for use in operable linkage in gene expression constructs are targeting sequences, which are required for targeting the gene product into specific cell compartments (for a review, see Kermode, Crit. Rev. Plant Sci. 15, 4 (1996) 285-423 and references cited therein), for example into the vacuole, the nucleus, all types of plastids, such as amyloplasts, chloroplasts, chromoplasts, the extracellular space, the mitochondria, the endoplasmic reticulum, elaioplasts, peroxisomes, glycosomes, and other compartments of cells or extracellular preferred are sequences, which are involved in targeting to plastids as mentioned above. Sequences, which must be mentioned in this context are, in particular, the signal-peptide- or transit-peptide-encoding sequences which are known per se. For example, plastid-transit-peptide-encoding sequences enable the targeting of the expression product into the plastids of a plant cell. Targeting sequences are also known for eukaryotic and to a lower extent for prokaryotic organisms and can advantageously be operable linked with the nucleic acid molecule of the present invention as shown in table I, application no. 4, columns 5 and 7 and described herein to achieve an expression in one of said compartments or extracellular.

[1310] for the disclosure of the paragraphs [0266.0.0.3] to [0287.0.0.3] see paragraphs [0266.0.0.0] to [0287.0.0.0] above.

[1311] Accordingly, one embodiment of the invention relates to a vector where the nucleic acid molecule according to the invention is linked operably to regulatory sequences which permit the expression in a prokaryotic or eukaryotic or in a prokaryotic and eukaryotic host. A further preferred embodiment of the invention relates to a vector in which a nucleic acid sequence encoding one of the polypeptides shown in table II, application no. 4, columns 5 and 7 or their homologs is functionally linked to a plastidial targeting sequence. A further preferred embodiment of the invention relates to a vector in which a nucleic acid sequence encoding one of the polypeptides shown in table II, application no. 4, columns 5 and 7 or their homologs is functionally linked to a regulatory sequences which permit the expression in plastids.

[1312] for the disclosure of the paragraphs [0289.0.0.3] to [0296.0.0.3] see paragraphs [0289.0.0.0] to [0296.0.0.0] above.

[1313] Moreover, native polypeptide conferring the increase of the fine chemical in an organism or part thereof can be isolated from cells (e.g., endothelial cells), for example using the antibody of the present invention as described below, in particular, an anti-b0342, anti-b1223, anti-b3117, anti-b1704, anti-b2066, anti-b2965, anti-b3770, anti-YOR353C, anti-YAL038W, anti-YDR497C, anti-YEL046C, anti-YER024, anti-YKR043C, anti-YLR174W and/or anti-YNL241C protein antibody or an antibody against polypeptides as shown in table II, application no. 4, columns 5 and 7, which can be produced by standard techniques utilizing the polypeptide of the present invention or fragment thereof, i.e., the polypeptide of this invention. Preferred are monoclonal antibodies.

[1314] for the disclosure of this paragraph see paragraph [0298.0.0.0] above.

[1315] In one embodiment, the present invention relates to a polypeptide having the sequence shown in table II, application no. 4, columns 5 and 7 or as coded by the nucleic acid molecule shown in table I, application no. 4, columns 5 and 7 or functional homologues thereof.

[1316] In one advantageous embodiment, in the method of the present invention the activity of a polypeptide is increased comprising or consisting of the consensus sequence shown in table IV, application no. 4, columns 7 and in one another embodiment, the present invention relates to a polypeptide comprising or consisting of the consensus sequence shown in table IV, application no. 4, columns 7 whereby 20 or less, preferably 15 or 10, preferably 9, 8, 7, or 6, more preferred 5 or 4, even more preferred 3, even more preferred 2, even more preferred 1, most preferred 0 of the amino acids positions indicated can be replaced by any amino acid.

[1317] for the disclosure of the paragraphs [0301.0.0.3] to [0304.0.0.3] see paragraphs [0301.0.0.0] to [0304.0.0.0] above.

[1318] In one advantageous embodiment, the method of the present invention comprises the increasing of a polypeptide comprising or consisting of plant or microorganism specific consensus sequences.

In one embodiment, said polypeptide of the invention distinguishes over the sequence shown in table II A and/or II B, application no. 4, columns 5 and 7 by one or more amino acids. In one embodiment, polypeptide distinguishes form the sequence shown in table II, application no. 4, columns 5 and 7 by more than 5, 6, 7, 8 or 9 amino acids, preferably by more than 10, 15, 20, 25 or 30 amino acids, even more preferred are more than 40, 50, or 60 amino acids and, preferably, the sequence of the polypeptide of the invention distinguishes from the sequence shown in table II A and/or II B, application no. 4, columns 5 and 7 by not more than 80% or 70% of the amino acids, preferably not more than 60% or 50%, more preferred not more than 40% or 30%, even more preferred not more than 20% or 10%. In an other embodiment, said polypeptide of the invention does not consist of the sequence shown in table II A and/or II B, application no. 4, columns 5 and 7.

[1319] for the disclosure of this paragraph see paragraph [0306.0.0.0] above.

[1320] In one embodiment, the invention relates to polypeptide conferring an increase in the fine chemical in an organism or part being encoded by the nucleic acid molecule of the invention or used in the process of the invention and having a sequence which distinguishes from the sequence as shown in table II A and/or II B, application no. 4, columns 5 and 7 by one or more amino acids. In another embodiment, said polypeptide of the invention does not consist of the sequence shown in table II A and/or II B, application no. 4, columns 5 and 7. In a further embodiment, said polypeptide of the present invention is less than 100%, 99.999%, 99.99%, 99.9% or 99% identical. In one embodiment, said polypeptide does not consist of the sequence encoded by the nucleic acid molecules shown in table I A and/or I B, application no. 4, columns 5 and 7.

[1321] In one embodiment, the present invention relates to a polypeptide having the activity of the protein as shown in table II A and/or II B, application no. 4, column 3, which distinguishes over the sequence depicted in table II A and/or II B, application no. 4, columns 5 and 7 by one or more amino acids, preferably by more than 5, 6, 7, 8 or 9 amino acids, preferably by more than 10, 15, 20, 25 or 30 amino acids, even more preferred are more than 40, 50, or 60 amino acids but even more preferred by less than 70% of the amino acids, more preferred by less than 50%, even more preferred my less than 30% or 25%, more preferred are 20% or 15%, even more preferred are less than 10%. In a further preferred embodiment the polypeptide of the invention takes the form of a preprotein consisting of a plastidial transitpeptide joint to a polypeptide having the activity of the protein as shown in table II A and/or II B, column 3, from which the transitpeptide is preferably cleaved off upon transport of the preprotein into the organelle for example into the plastid or mitochondria.

[1322] for the disclosure of the paragraphs [0309.0.0.3] to [0311.0.0.3] see paragraphs [0309.0.0.0] to [0311.0.0.0] above.

[1323] A polypeptide of the invention can participate in the process of the present invention. The polypeptide or a portion thereof comprises preferably an amino acid sequence, which is sufficiently homologous to an amino acid sequence shown in table II A and/or II B, application no. 4, columns 5 and 7.

[1324] Further, the polypeptide can have an amino acid sequence which is encoded by a nucleotide sequence which hybridizes, preferably hybridizes under stringent conditions as described above, to a nucleotide sequence of the nucleic acid molecule of the present invention. Accordingly, the polypeptide has an amino acid sequence which is encoded by a nucleotide sequence that is at least about 35%, 40%, 45%, 50%, 55%, 60%, 65% or 70%, preferably at least about 75%, 80%, 85% or 90, and more preferably at least about 91%, 92%, 93%, 94% or 95%, and even more preferably at least about 96%, 97%, 98%, 99% or more homologous to one of the amino acid sequences as shown in table II A and/or II B, application no. 4, columns 5 and 7. The preferred polypeptide of the present invention preferably possesses at least one of the activities according to the invention and described herein. A preferred polypeptide of the present invention includes an amino acid sequence encoded by a nucleotide sequence which hybridizes, preferably hybridizes under stringent conditions, to a nucleotide sequence of table I A and/or I B, application no. 4, columns 5 and 7 or which is homologous thereto, as defined above.

[1325] Accordingly the polypeptide of the present invention can vary from the sequences shown in table II A and/or II B, application no. 4; columns 5 and 7 in amino acid sequence due to natural variation or mutagenesis, as described in detail herein. Accordingly, the polypeptide comprise an amino acid sequence which is at least about 35%, 40%, 45%, 50%, 55%, 60%, 65% or 70%, preferably at least about 75%, 80%, 85% or 90, and more preferably at least about 91%, 92%, 93%, 94% or 95%, and most preferably at least about 96%, 97%, 98%, 99% or more homologous to an entire amino acid sequence shown in table II A and/or II B, application no. 4, columns 5 and 7.

[1326] for the disclosure of this paragraph see paragraph [0315.0.0.0] above.

[1327] Biologically active portions of an polypeptide of the present invention include peptides comprising amino acid sequences derived from the amino acid sequence of the polypeptide of the present invention or used in the process of the present invention, e.g., the amino acid sequence shown in table II, application no. 4, columns 5 and 7 or the amino acid sequence of a protein homologous thereto, which include fewer amino acids than a full length polypeptide of the present invention or used in the process of the present invention or the full length protein which is homologous to an polypeptide of the present invention or used in the process of the present invention depicted herein, and exhibit at least one activity of polypeptide of the present invention or used in the process of the present invention.

[1328] for the disclosure of this paragraph see paragraph [0317.0.0.0] above.

[1329] Manipulation of the nucleic acid molecule of the invention may result in the production of a protein having differences from the wild-type protein as shown in table II, application no. 4, column 3. Differences shall mean at least one amino acid different from the sequences as shown in table II, application no. 4, column 3, preferably at least 2, 3, 4, 5, 6, 7, 8, 9 or 10 amino acids, more preferably at least 15, 20, 25, 30, 35, 40, 45 or 50 amino acids different from the sequences as shown in table II, application no. 4, column 3. These proteins may be improved in efficiency or activity, may be present in greater numbers in the cell than is usual, or may be decreased in efficiency or activity in relation to the wild type protein.

[1330] Any mutagenesis strategies for the polypeptide of the present invention or the polypeptide used in the process of the present invention to result in increasing said activity are not meant to be limiting; variations on these strategies will be readily apparent to one skilled in the art. Using such strategies, and incorporating the mechanisms disclosed herein, the nucleic acid molecule and polypeptide of the invention may be utilized to generate plants or parts thereof, expressing wildtype proteins or mutated proteins of the proteins as shown in table II, application no. 4, column 3. The nucleic acid molecules and polypeptide molecules of the invention are expressed such that the yield, production, and/or efficiency of production of a desired compound is improved.

[1331] for the disclosure of the paragraphs [0320.0.0.3] to [0322.0.0.3] see paragraphs [0320.0.0.0] to [0322.0.0.0] above.

[1332] In one embodiment, a protein (=polypeptide) as shown in table II, application no. 4, column 3 refers to a polypeptide having an amino acid sequence corresponding to the polypeptide of the invention or used in the process of the invention, whereas a “non-inventive protein or polypeptide” or “other polypeptide” refers to a polypeptide having an amino acid sequence corresponding to a protein which is not substantially homologous to a polypeptide of the invention, preferably which is not substantially homologous to a polypeptide or protein as shown in table II, application no. 4, column 3, e.g., a protein which does not confer the activity described herein and which is derived from the same or a different organism.

[1333] for the disclosure of the paragraphs [0324.0.0.3] to [0329.0.0.3] see paragraphs [0324.0.0.0] to [0329.0.0.0] above.

[1334] In an especially preferred embodiment, the polypeptide according to the invention furthermore also does not have the sequences of those proteins which are encoded by the sequences shown in table II, application no. 4, columns 5 and 7.

[1335] for the disclosure of the paragraphs [0331.0.0.3] to [0346.0.0.3] see paragraphs [0331.0.0.0] to [0346.0.0.0] above.

[1336] Accordingly the present invention relates to any cell transgenic for any nucleic acid characterized as part of the invention, e.g. conferring the increase of the fine chemical in a cell or an organism or a part thereof, e.g. the nucleic acid molecule of the invention, the nucleic acid construct of the invention, the antisense molecule of the invention, the vector of the invention or a nucleic acid molecule encoding the polypeptide of the invention, e.g. encoding a polypeptide having an activity as the protein as shown in table II, application no. 4, column 3. Due to the above mentioned activity the fine chemical content in a cell or an organism is increased. For example, due to modulation or manipulation, the cellular activity is increased preferably in organelles such as plastids or mitochondria, e.g. due to an increased expression or specific activity or specific targeting of the subject matters of the invention in a cell or an organism or a part thereof especially in organelles such as plastids or mitochondria. Transgenic for a polypeptide having a protein or activity means herein that due to modulation or manipulation of the genome, the activity of protein as shown in table II, application no. 4, column 3 or a protein as shown in table II, application no. 4, column 3-like activity is increased in the cell or organism or part thereof especially in organelles such as plastids or mitochondria. Examples are described above in context with the process of the invention.

[1337] for the disclosure of this paragraph see paragraph [0348.0.0.0] above.

[1338] A naturally occurring expression cassette—for example the naturally occurring combination of the promoter of the gene encoding a protein as shown in table II, application no. 4, column 3 with the corresponding encoding gene—becomes a transgenic expression cassette when it is modified by non-natural, synthetic “artificial” methods such as, for example, mutagenization. Such methods have been described (U.S. Pat. No. 5,565,350; WO 00/15815; also see above).

[1339] for the disclosure of the paragraphs [0350.0.0.3] to [0369.0.0.3] see paragraphs [0350.0.0.0] to [0369.0.0.0] above.

[1340] The fermentation broths obtained in this way, containing in particular L-valine, L-leucine and/or L-isoleucine preferably L-leucine and/or L-valine, normally have a dry matter content of from 7.5 to 25% by weight. The fermentation broth can be processed further. Depending on requirements, the biomass can be removed entirely or partly by separation methods, such as, for example, centrifugation, filtration, decantation or a combination of these methods, from the fermentation broth or left completely in it. The fermentation broth can then be thickened or concentrated by known methods, such as, for example, with the aid of a rotary evaporator, thin-film evaporator, falling film evaporator, by reverse osmosis or by nanofiltration. This concentrated fermentation broth can then be worked up by freeze-drying, spray drying, spray granulation or by other processes.

[1341] for the disclosure of the paragraphs [0371.0.0.3] to [0376.0.0.3], [0376.1.0.3] and [0377.0.0.3] see paragraphs [0371.0.0.3] to [0376.0.0.0], [0376.1.0.0] and [0377.0.0.0] above.

[1342] In one embodiment, the present invention relates to a method for the identification of a gene product conferring an increase in the fine chemical production in a cell, comprising the following steps:
[1343] (a) contacting e.g. hybridising, the nucleic acid molecules of a sample, e.g. cells, tissues, plants or microorganisms or a nucleic acid library, which can contain a candidate gene encoding a gene product conferring an increase in the fine chemical after expression, with the nucleic acid molecule of the present invention;
[1344] (b) identifying the nucleic acid molecules, which hybridize under relaxed stringent conditions with the nucleic acid molecule of the present invention in particular to the nucleic acid molecule sequence shown in table I, application no. 4, columns 5 and 7, preferably in table I B, application no. 4, columns 5 and 7, and, optionally, isolating the full length cDNA clone or complete genomic clone;
[1345] (c) introducing the candidate nucleic acid molecules in host cells, preferably in a plant cell or a microorganism, appropriate for producing the fine chemical;
[1346] (d) expressing the identified nucleic acid molecules in the host cells;
[1347] (e) assaying the fine chemical level in the host cells; and
[1348] (f) identifying the nucleic acid molecule and its gene product which expression confers an increase in the fine chemical level in the host cell after expression compared to the wild type.

[1349] for the disclosure of the paragraphs [0379.0.0.3] to [0383.0.0.3] see paragraphs [0379.0.0.0] to [0383.0.0.0] above.

[1350] The screen for a gene product or an agonist conferring an increase in the fine chemical production can be performed by growth of an organism for example a microorganism in the presence of growth reducing amounts of an inhibitor of the synthesis of the fine chemical. Better growth, eg higher dividing rate or high dry mass in comparison to the control under such conditions would identify a gene or gene product or an agonist conferring an increase in fine chemical production.

One can think to screen for increased fine chemical production by for example resistance to drugs blocking fine chemical synthesis and looking whether this effect is dependent on the proteins as shown in table II, application no. 4, column 3, eg comparing near identical organisms with low and high activity of the proteins as shown in table II, application no. 4, column 3.

[1351] for the disclosure of the paragraphs [0385.0.0.3] to [0435.0.0.3] see paragraphs [0385.0.0.0] to [0435.0.0.0] above.

[1352] Leucine, Isoleucine and/or Valine Production in Chlamydomonas reinhardtii

[1353] The amino acid production can be analysed as mentioned above. The proteins and nucleic acids can be analysed as mentioned below.

[1354] for the disclosure of the paragraphs [0437.0.0.3] to [0497.0.0.3] see paragraphs [0437.0.0.0] to [0497.0.0.0] above.
[1355] The results of the different plant analyses can be seen from the table, which follows:

TABLE VI

| ORF | Metabolite | Method | Min | Max |
|---|---|---|---|---|
| YOR353C | Leucine | GC | 1.54 | 2.72 |
| YOR353C | Isoleucine | GC | 1.34 | 2.32 |
| YOR353C | Valine | GC | 1.20 | 1.77 |
| YAL038W | Valine | GC | 1.21 | 3.06 |
| YAL038W | Isoleucine | GC | 1.33 | 1.97 |
| YAL038W | Leucine | GC | 1.58 | 3.61 |
| YDR497C | Isoleucine | GC | 1.34 | 1.43 |
| YDR497C | Leucine | GC | 1.46 | 1.87 |
| YEL046C | Leucine | GC | 2.17 | 2.44 |
| YER024W | Isoleucine | GC | 1.40 | 1.43 |
| YER024W | Leucine | GC | 1.50 | 1.68 |
| YKR043C | Valine | GC | 1.20 | 3.60 |
| YLR174W | Valine | GC | 1.19 | 1.30 |
| YNL241C | Valine | GC | 1.57 | 1.88 |
| YNL241C | Isoleucine | GC | 1.30 | 1.33 |
| b2066 | Valine | GC | 1.30 | 1.99 |
| b2066 | Isoleucine | GC | 1.58 | 2.99 |
| b1704 | Leucine | GC | 1.40 | 6.41 |
| b1704 | Valine | GC | 1.24 | 3.87 |
| b2965 | Valine | GC | 1.20 | 3.99 |
| b3770 | Valine | GC | 1.53 | 2.28 |
| b0342 | Valine | GC | 1.21 | 1.68 |
| b1223 | Valine | GC | 1.30 | 2.57 |
| b3117 | Isoleucine | GC | 3.33 | 361.31 |
| b3117 | Leucine | GC | 3.09 | 8.03 |

[1356] for the disclosure of the paragraphs [0499.0.0.3] and [0500.0.0.3] see paragraphs [0499.0.0.0] and [0500.0.0.0] above.

### Example 15a

### Engineering Ryegrass Plants by Over-Expressing YER024W from Saccharomyces cerevisiae or Homologs of YER024W from Other Organisms

[1357] for the disclosure of the paragraphs [0502.0.0.3] to [0508.0.0.3] see paragraphs [0502.0.0.0] to [0508.0.0.0] above.

### Example 15b

### Engineering Soybean Plants by Over-Expressing YER024W from Saccharomyces cerevisiae or Homologs of YER024W from Other Organisms

[1358] for the disclosure of the paragraphs [0510.0.0.3] to [0513.0.0.3] see paragraphs [0510.0.0.0] to [0513.0.0.0] above.

### Example 15c

### Engineering Corn Plants by Over-Expressing YER024W from Saccharomyces cerevisiae or Homologs of YER024W from Other Organisms

[1359] for the disclosure of the paragraphs [0515.0.0.3] to [0540.0.0.3] see paragraphs [0515.0.0.0] to [0540.0.0.0] above.

### Example 15d

### Engineering Wheat Plants by Over-Expressing YER024W from Saccharomyces cerevisiae or Homologs of YER024W from Other Organisms

[1360] for the disclosure of the paragraphs [0542.0.0.3] to [0544.0.0.3] see paragraphs [0542.0.0.0] to [0544.0.0.0] above.

### Example 15e

### Engineering Rapeseed/Canola Plants by Over-Expressing YER024W from Saccharomyces cerevisiae or Homologs of YER024W from Other Organisms

[1361] for the disclosure of the paragraphs [0546.0.0.3] to [0549.0.0.3] see paragraphs [0544.0.0.0] to [0549.0.0.0] above.

### Example 15f

### Engineering Alfalfa Plants by Over-Expressing YER024W from Saccharomyces cerevisiae or Homologs of YER024W from Other Organisms

[1362] for the disclosure of the paragraphs [0551.0.0.3] to [0554.0.0.3] see paragraphs [0551.0.0.0] to [0554.0.0.0] above.

### Example 16

### Metabolite Profiling Info from Zea mays

[1363] Zea mays plants were engineered as described in Example 15c.
Metabolic results were either obtained from regenerated primary transformants (T0) or from the following progeny generation (T1) in comparison to appropriate control plants. The results are shown in table VII

TABLE VII

| ORF_NAME | Metabolite | MIN | MAX |
|---|---|---|---|
| b1704 | Valine | 1.58 | 2.21 |
| b1704 | Leucine | 1.49 | 2.23 |
| YAL038W | Valine | 1.36 | 1.74 |
| YAL038W | Isoleucine | 1.49 | 7.52 |
| YDR497C | Isoleucine | 1.27 | 1.91 |
| YDR497C | Leucine | 1.79 | 2.12 |
| YEL046C | Leucine | 1.32 | 1.75 |
| YKR043C | Valine | 2.79 | 9.34 |
| YNL241C | Isoleucine | 1.35 | 1.74 |

Table VII shows the increase in valine, leucine, or isoleucine in genetically modified corn plants expressing the Escherichia coli nucleic acid sequence b1704 or the Saccharomyces cerevisiae nucleic acid sequences YAL038W, YDR497C, YEL046C, YKR043C and YNL241C.
In one embodiment, in case the activity of the Escherichia coli protein b1704 or its homologs, e.g. a “3-deoxy-D-arabinoheptulosonate-7-phosphate synthase (DAHP synthetase, tryptophan repressible)”, is increased in corn plants, preferably, an increase of the fine chemical valine between 58% and 121% or more is conferred.
In one embodiment, in case the activity of the Escherichia coli protein b1704 or its homologs, e.g. a “3-deoxy-D-arabinoheptulosonate-7-phosphate synthase (DAHP synthetase, tryptophan repressible)”, is increased in corn plants, preferably, an increase of the fine chemical leucine between 49% and 123% is conferred.
In one embodiment, in case the activity of the Escherichia coli protein b1704 or its homologs, e.g. a “3-deoxy-D-arabinoheptulosonate-7-phosphate synthase (DAHP synthetase, tryptophan repressible)”, is increased in corn plants, preferably, an increase of the fine chemical leucine between 49% and 123% or more and of the fine chemical valine between 58% and 121% or more is conferred.
In one embodiment, in case the activity of the Saccharomyces cerevisiae protein YAL038W or its homologs, e.g. a “pyruvate kinase”, is increased in corn plants, preferably, an increase of the fine chemical valine between 36% and 74% or more is conferred.
In one embodiment, in case the activity of the Saccharomyces cerevisiae protein YAL038W or its homologs, e.g. a “pyruvate kinase”, is increased in corn plants, preferably, an increase of the fine chemical isoleucine between 49% and 652 or more % is conferred.
In one embodiment, in case the activity of the Saccharomyces cerevisiae protein YAL038W or its homologs, e.g. a “pyruvate kinase”, is increased in corn plants, preferably, an increase of the fine chemical isoleucine between 49% and 652% and of the fine chemical valine between 36% and 74% or more is conferred.
In one embodiment, in case the activity of the Saccharomyces cerevisiae protein YDR497C or its homologs, e.g. a “myo-inositol transporter”, is increased in corn plants, preferably, an increase of the fine chemical isoleucine between 27% and 91% or more is conferred.
In one embodiment, in case the activity of the Saccharomyces cerevisiae protein YDR497C or its homologs, e.g. a “myo-inositol transporter”, is increased in corn plants, preferably, an increase of the fine chemical leucine between 79% and 121% or more is conferred.
In one embodiment, in case the activity of the Saccharomyces cerevisiae protein YDR497C or its homologs, e.g. a “myo-inositol transporter”, is increased in corn plants, preferably, an increase of the fine chemical leucine between 79% and 121% or more and of the fine chemical isoleucine between 27% and 91% or more is conferred.
In one embodiment, in case the activity of the Saccharomyces cerevisiae protein YEL046C or its homologs, e.g. a “L-threonine aldolase”, is increased in corn plants, preferably, an increase of the fine chemical leucine between 32% and 75% or more is conferred.
In one embodiment, in case the activity of the Saccharomyces cerevisiae protein YKR043C or its homologs, e.g. a “unknown ORF”, is increased in corn plants, preferably, an increase of the fine chemical valine between 179% and 834% or more is conferred.
In one embodiment, in case the activity of the Saccharomyces cerevisiae protein YNL241C or its homologs, e.g. a “glucose-6-phosphate dehydrogenase”, is increased in corn plants, preferably, an increase of the fine chemical isoleucine between 35% and 74% or more is conferred.

[1364] for the disclosure of this paragraph see [0554.2.0.0] above.

[1365] for the disclosure of this paragraph see [0555.0.0.0] above.

[1366] for the disclosure of the paragraphs [0001.0.0.4] to [0007.0.0.4] see paragraphs [0001.0.0.0] to [0007.0.0.0] above.

[1367] for the disclosure of the paragraphs [0007.1.0.4] and [0008.0.0.4] see paragraphs [0007.1.0.0] and [0008.0.0.0] above.

[1368] As described above, the essential amino acids are necessary for humans and many mammals, for example for livestock. Arginine is a semi-essential amino acid involved in multiple areas of human physiology and metabolism. It is not considered essential because humans can synthesize it de novo from glutamine, glutamate, and proline. However, dietary intake remains the primary determinant of plasma arginine levels, since the rate of arginine biosynthesis does not increase to compensate for depletion or inadequate supply. Dietary arginine intake regulates whole body arginine synthesis from proline in the neonatal piglet. The maximal rate of arginine synthesis (0.68 g/kg/d) is not enough to supply the whole body metabolic requirement for arginine in the young pig. In animals, glutamate functions as a neurotransmitter and activates glutamate receptor cation channels (iGluRs), which trigger electrical or Ca²⁺ signal cascades. In plants, amino acids are involved in signalling of both plant nitrogen status and plant nitrogen: carbon ratios. Endogenous glutamine has been implicated in feedback inhibition of root N uptake, via the suppression of transcription of genes encoding inorganic nitrogen transporters (Rawat et al., Plant Journal 19: 143-152, 1999; Zhuo et al., Plant Journal 17: 563-568, 1999). The nonessential amino acid, proline, is synthesized from L-ornithine or L-glutamate. The proline from L-ornithine is linked to protein metabolism in the urea cycle and the proline from L-glutamate is linked to carbohydrate metabolism. Collagen is the major reservoir for proline in the body. Vitamin C should be used with proline for collagen problems.

[1369] for the disclosure of the paragraphs [0010.0.0.4] and [0011.0.0.4] see paragraphs [0010.0.0.0] and [0011.0.0.0] above.

[1370] It is an object of the present invention to develop an inexpensive process for the synthesis of arginine and/or glutamate and/or glutamine and/or proline, preferably L-arginine and/or L-glutamate and/or L-glutamine and/or L-proline.

[1371] for the disclosure of this paragraph see [0013.0.0.0] above.

[1372] Accordingly, in a first embodiment, the invention relates to a process for the production of a fine chemical, whereby the fine chemical is arginine, glutamate, glutamine and/or proline, preferably arginine, glutamate, glutamine and/or proline. Accordingly, in the present invention, the term “the fine chemical” as used herein relates to “arginine, glutamate, glutamine and/or proline”. Further, the term “the fine chemicals” as used herein also relates to fine chemicals comprising arginine, glutamate, glutamine and/or proline.

[1373] In one embodiment, the term “the fine chemical” means arginine, glutamate, glutamine and/or proline. Throughout the specification the term “the fine chemical” means arginine, glutamate, glutamine and/or proline, preferably L-arginine, L-glutamate, L-glutamine and/or L-proline, its salts, ester or amids in free form or bound to proteins. In a preferred embodiment, the term “the fine chemical” means arginine, glutamate, glutamine and/or proline, preferably L-arginine, L-glutamate, L-glutamine and/or L-proline in free form or its salts or bound to proteins.

[1374] Accordingly, the present invention relates to a process for the production of arginine, glutamate, glutamine and/or proline, which comprises
[1375] (a) increasing or generating the activity of a protein as shown in table II, application no. 5, column 3 encoded by the nucleic acid sequences as shown in table I, application no. 5, column 5, in an organelle of a microorganism or plant, or
[1376] (b) increasing or generating the activity of a protein as shown in table II, application no. 5, column 3 encoded by the nucleic acid sequences as shown in table I, application no. 5, column 5 in the plastid of a microorganism or plant, or in one or more parts thereof; and
[1377] (b) growing the organism under conditions which permit the production of the fine chemical, thus, arginine, glutamate, glutamine and/or proline or fine chemicals comprising arginine, glutamate, glutamine and/or proline, in said organism or in the culture medium surrounding the organism.

[1378] Accordingly, the term “the fine chemical” means in one embodiment “arginine” in relation to all sequences listed in Table I to IV, application no. 5, lines 38, 40, 46 and 52 or homologs thereof and means in one embodiment “glutamate” in relation to all sequences listed in Tables I to IV, application no. 5, line 44 or homologs thereof and means in one embodiment “proline” in relation to all sequences listed in Table I to IV, application no. 5, lines 37, 39, 41, 42, 44, 45, 47 to 51 or homologs thereof and means in one embodiment “glutamine” in relation to all sequences listed in Tables I to IV, application no. 5, lines 36 and 43 or homologs thereof.

Accordingly, in one embodiment the term “the fine chemical” means “glutamate” and “proline” in relation to all sequences listed in Table I to IV, application no. 5, lines 37, 39, 41, 42, 44, 45, 47 to 51, in one embodiment the term “the fine chemical” means “arginine” and “glutamine” in relation to all sequences listed in Table I to IV, application no. 5, lines 36, 38, 40, 43, 46 and 52, in one embodiment the term “the fine chemical” means “glutamine” and “proline” in relation to all sequences listed in Table I to IV, application no. 5, lines 36, 37, 39, 41 to 45 and 47 to 51, in one embodiment the term “the fine chemical” means “arginine” and “glutamine” in relation to all sequences listed in Table I to IV, application no. 5, lines 36, 38, 40, 43, 46 and 52, in one embodiment the term “the fine chemical” means “arginine”, “proline” and “glutamine” or “arginine”, “proline”, glutamate and “glutamine” in relation to all sequences listed in Table I to IV, application no. 5, lines 36 to 52.
Accordingly, the term “the fine chemical” can mean “arginine” and/or “glutamate” and/or “glutamine” and/or “proline”, owing to circumstances and the context. In order to illustrate that the meaning of the term “the fine chemical” means “arginine”, and/or “glutamate” and/or “glutamine” and/or “proline” the term “the respective fine chemical” is also used.

[1379] In another embodiment the present invention is related to a process for the production of arginine, glutamate, glutamine and/or proline, which comprises
[1380] (a) increasing or generating the activity of a protein as shown in table II, application no. 5, column 3 encoded by the nucleic acid sequences as shown in table I, application no. 5, column 5, in an organelle of a non-human organism, or
[1381] (b) increasing or generating the activity of a protein as shown in table II, application no. 5, column 3 encoded by the nucleic acid sequences as shown in table I, application no. 5, column 5, which are joined to a nucleic acid sequence encoding a transit peptide in a non-human organism, or in one or more parts thereof; or
[1382] (c) increasing or generating the activity of a protein as shown in table II, application no. 5, column 3 encoded by the nucleic acid sequences as shown in table I, application no. 5, column 5, which are joined to a nucleic acid sequence encoding chloroplast localization sequence, in a non-human organism, or in one or more parts thereof, and
[1383] (d) growing the organism under conditions which permit the production of arginine, glutamate, glutamine and/or proline in said organism.

[1384] In another embodiment, the present invention relates to a process for the production of arginine, glutamate, glutamine and/or proline, which comprises
[1385] (a) increasing or generating the activity of a protein as shown in table II, application no. 5, column 3 encoded by the nucleic acid sequences as shown in table I, application no. 5, column 5, in an organelle of a microorganism or plant through the transformation of the organelle, or
[1386] (b) increasing or generating the activity of a protein as shown in table II, application no. 5, column 3 encoded by the nucleic acid sequences as shown in table I, application no. 5, column 5 in the plastid of a microorganism or plant, or in one or more parts thereof through the transformation of the plastids; and
[1387] (c) growing the organism under conditions which permit the production of the fine chemical, thus, arginine, glutamate, glutamine and/or proline or fine chemicals comprising arginine, glutamate, glutamine and/or proline, in said organism or in the culture medium surrounding the organism.

[1388] Advantageously the activity of the protein as shown in table II, application no. 5, column 3 encoded by the nucleic acid sequences as shown in table I, application no. 5, column 5 is increased or generated in the abovementioned process in the plastid of a microorganism or plant.

[1389] for the disclosure of the paragraphs [0019.0.0.4] to [0024.0.0.4] see paragraphs [0019.0.0.0] and [0024.0.0.0] above.

[1390] Even more preferred nucleic acid sequences are encoding transit peptides as disclosed by von Heijne et al. [Plant Molecular Biology Reporter, Vol. 9 (2), 1991: 104-126], which are hereby incorporated by reference. Table V shows some examples of the transit peptide sequences disclosed by von Heijne et al. According to the disclosure of the invention especially in the examples the skilled worker is able to link other nucleic acid sequences disclosed by von Heijne et al. to the nucleic acid sequences shown in table I, application no. 5, columns 5 and 7. Most preferred nucleic acid sequences encoding transit peptides are derived from the genus Spinacia such as chloroplast 30S ribosomal protein PSrp-1, root acyl carrier protein II, acyl carrier protein, ATP synthase: γ subunit, ATP synthase: δ subunit, cytochrom f, ferredoxin I, ferredoxin NADP oxidoreductase (=FNR), nitrite reductase, phosphoribulokinase, plastocyanin or carbonic anhydrase. The skilled worker will recognize that various other nucleic acid sequences encoding transit peptides can easily isolated from plastid-localized proteins, which are expressed from nuclear genes as precursors and are then targeted to plastids. Such transit peptides encoding sequences can be used for the construction of other expression constructs. The transit peptides advantageously used in the inventive process and which are part of the inventive nucleic acid sequences and proteins are typically 20 to 120 amino acids, preferably 25 to 110, 30 to 100 or 35 to 90 amino acids, more preferably 40 to 85 amino acids and most preferably 45 to 80 amino acids in length and functions post-translationally to direct the protein to the plastid preferably to the chloroplast. The nucleic acid sequences encoding such transit peptides are localized upstream of nucleic acid sequence encoding the mature protein. For the correct molecular joining of the transit peptide encoding nucleic acid and the nucleic acid encoding the protein to be targeted it is sometimes necessary to introduce additional base pairs at the joining position, which forms restriction enzyme recognition sequences useful for the molecular joining of the different nucleic acid molecules. This procedure might lead to very few additional amino acids at the N-terminal of the mature imported protein, which usually and preferably do not interfere with the protein function. In any case, the additional base pairs at the joining position which forms restriction enzyme recognition sequences have to be chosen with care, in order to avoid the formation of stop codons or codons which encode amino acids with a strong influence on protein folding, like e.g. proline. It is preferred that such additional codons encode small n.d. structural flexible amino acids such as glycine or alanine.

[1391] As mentioned above the nucleic acid sequences coding for the proteins as shown in table II, application no. 5, column 3 and its homologs as disclosed in table I, application no. 5, columns 5 and 7 are joined to a nucleic acid sequence encoding a transit peptide, This nucleic acid sequence encoding a transit peptide ensures transport of the protein to the plastid. The nucleic acid sequence of the gene to be expressed and the nucleic acid sequence encoding the transit peptide are operably linked. Therefore the transit peptide is fused in frame to the nucleic acid sequence coding for proteins as shown in table II, application no. 5, column 3 and its homologs as disclosed in table I, application no. 5, columns 5 and 7.

[1392] for the disclosure of the paragraphs [0027.0.0.4] to [0029.0.0.4] see paragraphs [0027.0.0.0] and [0029.0.0.0] above.

[1393] Alternatively, nucleic acid sequences coding for the transit peptides may be chemically synthesized either in part or wholly according to structure of transit peptide sequences disclosed in the prior art. Said natural or chemically synthesized sequences can be directly linked to the sequences encoding the mature protein or via a linker nucleic acid sequence, which may be typically less than 500 base pairs, preferably less than 450, 400, 350, 300, 250 or 200 base pairs, more preferably less than 150, 100, 90, 80, 70, 60, 50, 40 or 30 base pairs and most preferably less than 25, 20, 15, 12, 9, 6 or 3 base pairs in length and are in frame to the coding sequence. Furthermore favorable nucleic acid sequences encoding transit peptides may comprise sequences derived from more than one biological and/or chemical source and may include a nucleic acid sequence derived from the amino-terminal region of the mature protein, which in its native state is linked to the transit peptide. In a preferred embodiment of the invention said amino-terminal region of the mature protein is typically less than 150 amino acids, preferably less than 140, 130, 120, 110, 100 or 90 amino acids, more preferably less than 80, 70, 60, 50, 40, 35, 30, 25 or 20 amino acids and most preferably less than 19, 18, 17, 16, 15, 14, 13, 12, 11 or 10 amino acids in length. But even shorter or longer stretches are also possible. In addition target sequences, which facilitate the transport of proteins to other cell compartments such as the vacuole, endoplasmic reticulum, golgi complex, glyoxysomes, peroxisomes or mitochondria may be also part of the inventive nucleic acid sequence. The proteins translated from said inventive nucleic acid sequences are a kind of fusion proteins that means the nucleic acid sequences encoding the transit peptide for example the ones shown in table V, preferably the last one of the table are joint to the nucleic acid sequences shown in table I, application no. 5, columns 5 and 7. The person skilled in the art is able to join said sequences in a functional manner. Advantageously the transit peptide part is cleaved off from the protein part shown in table II, application no. 5, columns 5 and 7 during the transport preferably into the plastids. All products of the cleavage of the preferred transit peptide shown in the last line of table V have preferably the N-terminal amino acid sequences QIA CSS or QIA EFQLTT in front of the start methionine of the protein mentioned in table II, application no. 5, columns 5 and 7. Other short amino acid sequences of an range of 1 to 20 amino acids preferable 2 to 15 amino acids, more preferable 3 to 10 amino acids most preferably 4 to 8 amino acids are also possible in front of the start methionine of the protein mentioned in table II, application no. 5, columns 5 and 7. In case of the amino acid sequence QIA CSS the three amino acids in front of the start methionine are stemming from the LIC (=ligatation independent cloning) cassette. Said short amino acid sequence is preferred in the case of the expression of E. coli genes. In case of the amino acid sequence QIA EFQLTT the six amino acids in front of the start methionine are stemming from the LIC cassette. Said short amino acid sequence is preferred in the case of the expression of S. cerevisiae genes. The skilled worker knows that other short sequences are also useful in the expression of the genes mentioned in table I, application no. 5, columns 5 and 7. Furthermore the skilled worker is aware of the fact that there is not a need for such short sequences in the expression of the genes.

[1394] Table V: Examples of transit peptides disclosed by von Heijne et al. for the disclosure of Table V see paragraph [0030.2.0.0] above.

[1395] Alternatively to the targeting of the sequences shown in table II, application no. 5, columns 5 and 7 preferably of sequences in general encoded in the nucleus with the aid of the targeting sequences mentioned for example in table V alone or in combination with other targeting sequences preferably into the plastids, the nucleic acids of the invention can directly introduced into the plastidal genome. Therefore in a preferred embodiment the nucleic acid sequences shown in table I, application no. 5, columns 5 and 7 are directly introduced and expressed in plastids.

The term “introduced” in the context of this specification shall mean the insertion of a nucleic acid sequence into the organism by means of a “transfection”, “transduction” or preferably by “transformation”.
A plastid, such as a chloroplast, has been “transformed” by an exogenous (preferably foreign) nucleic acid sequence if nucleic acid sequence has been introduced into the plastid that means that this sequence has crossed the membrane or the membranes of the plastid. The foreign DNA may be integrated (covalently linked) into plastid DNA making up the genome of the plastid, or it may remain unintegrated (e.g., by including a chloroplast origin of replication). “Stably” integrated DNA sequences are those, which are inherited through plastid replication, thereby transferring new plastids, with the features of the integrated DNA sequence to the progeny.

[1396] for the disclosure of the paragraphs [0030.2.0.4] and [0030.3.0.4] see paragraphs [0030.2.0.0] and [0030.3.0.0] above.

[1397] For the inventive process it is of great advantage that by transforming the plastids the intraspecies specific transgene flow is blocked, because a lot of species such as corn, cotton and rice have a strict maternal inheritance of plastids. By placing the genes specified in table I, application no. 5, columns 5 and 7 or active fragments thereof in the plastids of plants, these genes will not be present in the pollen of said plants.

A further preferred embodiment of the invention relates to the use of so called “chloroplast localization sequences”, in which a first RNA sequence or molecule is capable of transporting or “chaperoning” a second RNA sequence, such as a RNA sequence transcribed from the sequences depicted in table I, application no. 5, columns 5 and 7 or a sequence encoding a protein, as depicted in table II, application no. 5, columns 5 and 7, from an external environment inside a cell or outside a plastid into a chloroplast. In one embodiment the chloroplast localization signal is substantially similar or complementary to a complete or intact viroid sequence. The chloroplast localization signal may be encoded by a DNA sequence, which is transcribed into the chloroplast localization RNA. The term “viroid” refers to a naturally occurring single stranded RNA molecule (Flores, C R Acad Sci III. 2001 October; 324(10): 943-52). Viroids usually contain about 200-500 nucleotides and generally exist as circular molecules. Examples of vivoids that contain chloroplast localization signals include but are not limited to ASBVd, PLMVd, CChMVd and ELVd. The viroid sequence or a functional part of it can be fused to the sequences depicted in table I, application no. 5, columns 5 and 7 or a sequence encoding a protein, as depicted in table II, application no. 5, columns 5 and 7 in such a manner that the viroid sequence transports a sequence transcribed from a sequence as depicted in table I, application no. 5 columns 5 and 7 or a sequence encoding a protein as depicted in table II, application no. 5 columns 5 and 7 into the chloroplasts. A preferred embodiment uses a modified ASBVd (Navarro et al., Virology. 2000 Mar. 1; 268(1): 218-25).
In a further specific embodiment the protein to be expressed in the plastids such as the proteins depicted in table II, application no. 5, columns 5 and 7 are encoded by different nucleic acids. Such a method is disclosed in WO 2004/040973, which shall be incorporated by reference. WO 2004/040973 teaches a method, which relates to the translocation of an RNA corresponding to a gene or gene fragment into the chloroplast by means of a chloroplast localization sequence. The genes, which should be expressed in the plant or plants cells, are split into nucleic acid fragments, which are introduced into different compartments in the plant e.g. the nucleus, the plastids and/or mitochondria. Additionally plant cells are described in which the chloroplast contains a ribozyme fused at one end to an RNA encoding a fragment of a protein used in the inventive process such that the ribozyme can trans-splice the translocated fusion RNA to the RNA encoding the gene fragment to form and as the case may be reunite the nucleic acid fragments to an intact mRNA encoding a functional protein for example as disclosed in table II, application no. 5, columns 5 and 7.

[1398] In a preferred embodiment of the invention the nucleic acid sequences as shown in table I, application no. 5, columns 5 and 7 used in the inventive process are transformed into plastids, which are metabolical active. Those plastids should preferably maintain at a high copy number in the plant or plant tissue of interest, most preferably the chloroplasts found in green plant tissues, such as leaves or cotyledons or in seeds.

[1399] For a good expression in the plastids the nucleic acid sequences as shown in table I, application no. 5, columns 5 and 7 are introduced into an expression cassette using a preferably a promoter and terminator, which are active in plastids preferably a chloroplast promoter. Examples of such promoters include the psbA promoter from the gene from spinach or pea, the rbcL promoter, and the atpB promoter from corn.

[1400] for the disclosure of the paragraphs [0031.0.0.4] and [0032.0.0.3] see paragraphs [0031.0.0.0] and [0032.0.0.0] above.

[1401] Advantageously the process for the production of the fine chemical leads to an enhanced production of the fine chemical. The terms “enhanced” or “increase” mean at least a 10%, 20%, 30%, 40% or 50%, preferably at least 60%, 70%, 80%, 90% or 100%, more preferably 150%, 200%, 300%, 400% or 500% higher production of the fine chemical in comparison to the reference as defined below, e.g. that means in comparison to an organism without the aforementioned modification of the activity of a protein as shown in table II, application no. 5, column 3. Preferably the modification of the activity of a protein as shown in table II, application no. 5, column 3 or their combination can be achieved by joining the protein to a transit peptide.

[1402] Surprisingly it was found, that the transgenic expression of the Saccharomyces cerevisiae protein as shown in table II, application no. 5, column 3 in plastids of a plant such as Arabidopsis thaliana for example through the linkage to at least one targeting sequence for example as mentioned in table V conferred an increase in the fine chemical content of the transformed plants.

[1403] for the disclosure of this paragraph see paragraph [0035.0.0.0] above.

[1404] The sequence of b0342 (Accession number PIR:XXECTG) from Escherichia coli has been published in Blattner et al., Science 277 (5331), 1453-1474 (1997), and its activity is being defined as “thiogalactoside acetyltransferase”. Accordingly, in one embodiment, the process of the present invention comprises the use of a “thiogalactoside acetyltransferase” or its homolog, e.g. as shown herein, for the production of the fine chemical, meaning of arginine, glutamate, glutamine and/or proline, in particular for increasing the amount of arginine, glutamate, glutamine and/or proline in free or bound form, preferably glutamate and/or glutamine in free or bound form in an organism or a part thereof, as mentioned. In one embodiment, in the process of the present invention the activity of a b0342 protein is increased or generated, e.g. from Escherichia coli or a homolog thereof, preferably linked at least to one transit peptide as mentioned for example in table V.

In another embodiment, in the process of the present invention the activity of a b0342 protein is increased or generated in a subcellular compartment of the organism or organism cell such as in an organelle like a plastid or mitochondria.
The sequence of b0855 (Accession number NP 415376) from Escherichia coli has been published in Blattner et al., Science 277 (5331), 1453-1474 (1997), and its activity is being defined as “ATP-binding component of putrescine transport system”. Accordingly, in one embodiment, the process of the present invention comprises the use of a “ATP-binding component of putrescine transport system” or its homolog, e.g. as shown herein, for the production of the fine chemical, meaning of arginine, glutamate, glutamine and/or proline, in particular for increasing the amount of arginine, glutamate, glutamine and/or proline in free or bound form, preferably arginine in free or bound form in an organism or a part thereof, as mentioned. In one embodiment, in the process of the present invention the activity of a b0855 protein is increased or generated, e.g. from Escherichia coli or a homolog thereof, preferably linked at least to one transit peptide as mentioned for example in table V.
In another embodiment, in the process of the present invention the activity of a b0855 protein is increased or generated in a subcellular compartment of the organism or organism cell such as in an organelle like a plastid or mitochondria.
The sequence of b1062 (Accession number DEECOO) from Escherichia coli has been published in Blattner et al., Science 277 (5331), 1453-1474 (1997), and its activity is being defined as “dihydro-orotase”. Accordingly, in one embodiment, the process of the present invention comprises the use of a “dihydro-orotase” or its homolog, e.g. as shown herein, for the production of the fine chemical, meaning of arginine, glutamate, glutamine and/or proline, in particular for increasing the amount of arginine, glutamate, glutamine and/or proline in free or bound form, preferably proline in free or bound form in an organism or a part thereof, as mentioned. In one embodiment, in the process of the present invention the activity of a b1062 protein is increased or generated, e.g. from Escherichia coli or a homolog thereof, preferably linked at least to one transit peptide as mentioned for example in table V.
In another embodiment, in the process of the present invention the activity of a b1062 protein is increased or generated in a subcellular compartment of the organism or organism cell such as in an organelle like a plastid or mitochondria.
The sequence of b1184 (Accession number NP_{—}415702) from Escherichia coli has been published in Blattner et al., Science 277 (5331), 1453-1474 (1997), and its activity is being defined as “SOS mutagenesis and repair”. Accordingly, in one embodiment, the process of the present invention comprises the use of a “SOS mutagenesis and repair” or its homolog, e.g. as shown herein, for the production of the fine chemical, meaning of arginine, glutamate, glutamine and/or proline, in particular for increasing the amount of arginine, glutamate, glutamine and/or proline in free or bound form, preferably proline in free or bound form in an organism or a part thereof, as mentioned. In one embodiment, in the process of the present invention the activity of a b1184 protein is increased or generated, e.g. from Escherichia coli or a homolog thereof, preferably linked at least to one transit peptide as mentioned for example in table V.
In another embodiment, in the process of the present invention the activity of a b1184 protein is increased or generated in a subcellular compartment of the organism or organism cell such as in an organelle like a plastid or mitochondria.
The sequence of b1223 (Accession number NP_{—}415741) from Escherichia coli has been published in Blattner et al., Science 277 (5331), 1453-1474 (1997), and its activity is being defined as “nitrite extrusion protein”. Accordingly, in one embodiment, the process of the present invention comprises the use of a “nitrite extrusion protein” or its homolog, e.g. as shown herein, for the production of the fine chemical, meaning of arginine, glutamate, glutamine and/or proline, in particular for increasing the amount of arginine, glutamate, glutamine and/or proline in free or bound form, preferably proline in free or bound form in an organism or a part thereof, as mentioned. In one embodiment, in the process of the present invention the activity of a b1223 protein is increased or generated, e.g. from Escherichia coli or a homolog thereof, preferably linked at least to one transit peptide as mentioned for example in table V.
In another embodiment, in the process of the present invention the activity of a b1223 protein is increased or generated in a subcellular compartment of the organism or organism cell such as in an organelle like a plastid or mitochondria.
The sequence of b1264 (Accession number NP_{—}415780) from Escherichia coli has been published in Blattner et al., Science 277 (5331), 1453-1474 (1997), and its activity is being defined as “anthranilate synthase component I”. Accordingly, in one embodiment, the process of the present invention comprises the use of a “anthranilate synthase component I” or its homolog, e.g. as shown herein, for the production of the fine chemical, meaning of arginine, glutamate, glutamine and/or proline, in particular for increasing the amount of arginine, glutamate, glutamine and/or proline in free or bound form in an organism or a part thereof, as mentioned. In one embodiment, in the process of the present invention the activity of a b1264 protein is increased or generated, e.g. from Escherichia coli or a homolog thereof, preferably linked at least to one transit peptide as mentioned for example in table V.
In another embodiment, in the process of the present invention the activity of a b1264 protein is increased or generated in a subcellular compartment of the organism or organism cell such as in an organelle like a plastid or mitochondria.
The sequence of b1556 (Accession number NP_{—}416074) from Escherichia coli has been published in Blattner et al., Science 277 (5331), 1453-1474 (1997), and its activity is being defined as “Qin prophage”. Accordingly, in one embodiment, the process of the present invention comprises the use of a “Qin prophage” or its homolog, e.g. as shown herein, for the production of the fine chemical, meaning of arginine, glutamate, glutamine and/or proline, in particular for increasing the amount of arginine, glutamate, glutamine and/or proline in free or bound form, preferably proline in free or bound form in an organism or a part thereof, as mentioned. In one embodiment, in the process of the present invention the activity of a b1556 protein is increased or generated, e.g. from Escherichia coli or a homolog thereof, preferably linked at least to one transit peptide as mentioned for example in table V.
In another embodiment, in the process of the present invention the activity of a b1556 protein is increased or generated in a subcellular compartment of the organism or organism cell such as in an organelle like a plastid or mitochondria.
The sequence of b1758 (Accession number NP_{—}416272) from Escherichia coli has been published in Blattner et al., Science 277 (5331), 1453-1474 (1997), and its activity is being defined as “putative cytochrome oxidase”. Accordingly, in one embodiment, the process of the present invention comprises the use of a “putative cytochrome oxidase” or its homolog, e.g. as shown herein, for the production of the fine chemical, meaning of arginine, glutamate, glutamine and/or proline, in particular for increasing the amount of arginine, glutamate, glutamine and/or proline in free or bound form, preferably glutamate in free or bound form in an organism or a part thereof, as mentioned. In one embodiment, in the process of the present invention the activity of a b1758 protein is increased or generated, e.g. from Escherichia coli or a homolog thereof, preferably linked at least to one transit peptide as mentioned for example in table V.
In another embodiment, in the process of the present invention the activity of a b1758 protein is increased or generated in a subcellular compartment of the organism or organism cell such as in an organelle like a plastid or mitochondria.
The sequence of b1852 (Accession number NP 416366) from Escherichia coli has been published in Blattner et al., Science 277 (5331), 1453-1474 (1997), and its activity is being defined as “glucose-6-phosphate dehydrogenase”. Accordingly, in one embodiment, the process of the present invention comprises the use of a “glucose-6-phosphate dehydrogenase” or its homolog, e.g. as shown herein, for the production of the fine chemical, meaning of arginine, glutamate, glutamine and/or proline, in particular for increasing the amount of arginine, glutamate, glutamine and/or proline in free or bound form in an organism or a part thereof, as mentioned. In one embodiment, in the process of the present invention the activity of a b1852 protein is increased or generated, e.g. from Escherichia coli or a homolog thereof, preferably linked at least to one transit peptide as mentioned for example in table V.
In another embodiment, in the process of the present invention the activity of a b1852 protein is increased or generated in a subcellular compartment of the organism or organism cell such as in an organelle like a plastid or mitochondria.
The sequence of b1907 (Accession number NP_{—}416420) from Escherichia coli has been published in Blattner et al., Science 277 (5331), 1453-1474 (1997), and its activity is being defined as “tyrosine-specific transport protein” (HAAAP family). Accordingly, in one embodiment, the process of the present invention comprises the use of a “tyrosine-specific transport protein” or its homolog, e.g. as shown herein, for the production of the fine chemical, meaning of arginine, glutamate, glutamine and/or proline, in particular for increasing the amount of arginine, glutamate, glutamine and/or proline in free or bound form in an organism or a part thereof, as mentioned. In one embodiment, in the process of the present invention the activity of a b1907 protein is increased or generated, e.g. from Escherichia coli or a homolog thereof, preferably linked at least to one transit peptide as mentioned for example in table V.
In another embodiment, in the process of the present invention the activity of a b1907 protein is increased or generated in a subcellular compartment of the organism or organism cell such as in an organelle like a plastid or mitochondria.
The sequence of b2025 (Accession number NP_{—}416529) from Escherichia coli has been published in Blattner et al., Science 277 (5331), 1453-1474 (1997), and its activity is being defined as “imidazole glycerol phosphate synthase subunit”, which is in a heterodimer with HisH=imidazole glycerol phosphate synthase holoenzyme. Accordingly, in one embodiment, the process of the present invention comprises the use of a “imidazole glycerol phosphate synthase” or its homolog, e.g. as shown herein, for the production of the fine chemical, meaning of arginine, glutamate, glutamine and/or proline, in particular for increasing the amount of arginine, glutamate, glutamine and/or proline in free or bound form in an organism or a part thereof, as mentioned. In one embodiment, in the process of the present invention the activity of a b2025 protein is increased or generated, e.g. from Escherichia coli or a homolog thereof, preferably linked at least to one transit peptide as mentioned for example in table V.
In another embodiment, in the process of the present invention the activity of a b2025 protein is increased or generated in a subcellular compartment of the organism or organism cell such as in an organelle like a plastid or mitochondria.
The sequence of b2040 (Accession number G64969) from Escherichia coli has been published in Blattner et al., Science 277 (5331), 1453-1474 (1997), and its activity is being defined as “TDP-rhamnose synthetase, NAD(P)-binding”. Accordingly, in one embodiment, the process of the present invention comprises the use of a “TDP-rhamnose synthetase, NAD(P)-binding” or its homolog, e.g. as shown herein, for the production of the fine chemical, meaning of arginine, glutamate, glutamine and/or proline, in particular for increasing the amount of arginine, glutamate, glutamine and/or proline in free or bound form, preferably glutamine in free or bound form in an organism or a part thereof, as mentioned. In one embodiment, in the process of the present invention the activity of a b2040 protein is increased or generated, e.g. from Escherichia coli or a homolog thereof, preferably linked at least to one transit peptide as mentioned for example in table V.
In another embodiment, in the process of the present invention the activity of a b2040 protein is increased or generated in a subcellular compartment of the organism or organism cell such as in an organelle like a plastid or mitochondria.
The sequence of b2818 (Accession number NP_{—}417295) from Escherichia coli has been published in Blattner et al., Science 277 (5331), 1453-1474 (1997), and its activity is being defined as “N-acetylglutamate synthase (amino acid N-acetyltransferase)”. Accordingly, in one embodiment, the process of the present invention comprises the use of a “N-acetylglutamate synthase” or its homolog, e.g. as shown herein, for the production of the fine chemical, meaning of arginine, glutamate, glutamine and/or proline, in particular for increasing the amount of arginine, glutamate, glutamine and/or proline in free or bound form in an organism or a part thereof, as mentioned. In one embodiment, in the process of the present invention the activity of a b2818 protein is increased or generated, e.g. from Escherichia coli or a homolog thereof, preferably linked at least to one transit peptide as mentioned for example in table V.
In another embodiment, in the process of the present invention the activity of a b2818 protein is increased or generated in a subcellular compartment of the organism or organism cell such as in an organelle like a plastid or mitochondria.
The sequence of b2926 (Accession number NP_{—}417401) from Escherichia coli has been published in Blattner et al., Science 277 (5331), 1453-1474 (1997), and its activity is being defined as “phosphoglycerate kinase”. Accordingly, in one embodiment, the process of the present invention comprises the use of a “phosphoglycerate kinase” or its homolog, e.g. as shown herein, for the production of the fine chemical, meaning of arginine, glutamate, glutamine and/or proline, in particular for increasing the amount of arginine, glutamate, glutamine and/or proline in free or bound form in an organism or a part thereof, as mentioned. In one embodiment, in the process of the present invention the activity of a b2926 protein is increased or generated, e.g. from Escherichia coli or a homolog thereof, preferably linked at least to one transit peptide as mentioned for example in table V.
In another embodiment, in the process of the present invention the activity of a b2926 protein is increased or generated in a subcellular compartment of the organism or organism cell such as in an organelle like a plastid or mitochondria.
The sequence of b2965 (Accession number NP_{—}417440) from Escherichia coli has been published in Blattner et al., Science 277 (5331), 1453-1474 (1997), and its activity is being defined as “ornithine decarboxylase”. Accordingly, in one embodiment, the process of the present invention comprises the use of a “ornithine decarboxylase” or its homolog, e.g. as shown herein, for the production of the fine chemical, meaning of arginine, glutamate, glutamine and/or proline, in particular for increasing the amount of arginine, glutamate, glutamine and/or proline in free or bound form in an organism or a part thereof, as mentioned. In one embodiment, in the process of the present invention the activity of a b2965 protein is increased or generated, e.g. from Escherichia coli or a homolog thereof, preferably linked at least to one transit peptide as mentioned for example in table V.
In another embodiment, in the process of the present invention the activity of a b2965 protein is increased or generated in a subcellular compartment of the organism or organism cell such as in an organelle like a plastid or mitochondria.
The sequence of b3443 (Accession number NP_{—}417900) from Escherichia coli has been published in Blattner et al., Science 277 (5331), 1453-1474 (1997), and its activity is being defined as “conserved unknown protein”. Accordingly, in one embodiment, the process of the present invention comprises the use of a “conserved unknown protein” or its homolog, e.g. as shown herein, for the production of the fine chemical, meaning of arginine, glutamate, glutamine and/or proline, in particular for increasing the amount of arginine, glutamate, glutamine and/or proline in free or bound form, preferably glutamine in free or bound form in an organism or a part thereof, as mentioned. In one embodiment, in the process of the present invention the activity of a b3443 protein is increased or generated, e.g. from Escherichia coli or a homolog thereof, preferably linked at least to one transit peptide as mentioned for example in table V.
In another embodiment, in the process of the present invention the activity of a b3443 protein is increased or generated in a subcellular compartment of the organism or organism cell such as in an organelle like a plastid or mitochondria.
The sequence of b4072 (Accession number C57987) from Escherichia coli has been published in Blattner et al., Science 277 (5331), 1453-1474 (1997), and its activity is being defined as “formate-dependent nitrite reductase NrfC”. Accordingly, in one embodiment, the process of the present invention comprises the use of a “formate-dependent nitrite reductase NrfC” or its homolog, e.g. as shown herein, for the production of the fine chemical, meaning of arginine, glutamate, glutamine and/or proline, in particular for increasing the amount of arginine, glutamate, glutamine and/or proline in free or bound form, preferably glutamine in free or bound form in an organism or a part thereof, as mentioned. In one embodiment, in the process of the present invention the activity of a b4072 protein is increased or generated, e.g. from Escherichia coli or a homolog thereof, preferably linked at least to one transit peptide as mentioned for example in table V.
In another embodiment, in the process of the present invention the activity of a b4072 protein is increased or generated in a subcellular compartment of the organism or organism cell such as in an organelle like a plastid or mitochondria.
The sequence of b4074 (Accession number E57987) from Escherichia coli has been published in Blattner et al., Science 277 (5331), 1453-1474 (1997), and its activity is being defined as “formate-dependent nitrite reductase”. Accordingly, in one embodiment, the process of the present invention comprises the use of a “formate-dependent nitrite reductase” or its homolog, e.g. as shown herein, for the production of the fine chemical, meaning of arginine, glutamate, glutamine and/or proline, in particular for increasing the amount of arginine, glutamate, glutamine and/or proline in free or bound form, preferably proline in free or bound form in an organism or a part thereof, as mentioned. In one embodiment, in the process of the present invention the activity of a b4074 protein is increased or generated, e.g. from Escherichia coli or a homolog thereof, preferably linked at least to one transit peptide as mentioned for example in table V.
In another embodiment, in the process of the present invention the activity of a b4074 protein is increased or generated in a subcellular compartment of the organism or organism cell such as in an organelle like a plastid or mitochondria.
The sequence of b4139 (Accession number NP_{—}418562) from Escherichia coli has been published in Blattner et al., Science 277 (5331), 1453-1474 (1997), and its activity is being defined as “aspartate ammonia-lyase (aspartase)”. Accordingly, in one embodiment, the process of the present invention comprises the use of a “aspartate ammonia-lyase” or its homolog, e.g. as shown herein, for the production of the fine chemical, meaning of arginine, glutamate, glutamine and/or proline, in particular for increasing the amount of arginine, glutamate, glutamine and/or proline in free or bound form preferably glutamine and/or arginine in free or bound form in an organism or a part thereof, as mentioned. In one embodiment, in the process of the present invention the activity of a b4139 protein is increased or generated, e.g. from Escherichia coli or a homolog thereof, preferably linked at least to one transit peptide as mentioned for example in table V.
In another embodiment, in the process of the present invention the activity of a b4139 protein is increased or generated in a subcellular compartment of the organism or organism cell such as in an organelle like a plastid or mitochondria.
The sequence of YGR262C (Accession number S64595) from Saccharomyces cerevisiae has been published in Tettelin et al., Nature 387 (6632 Suppl), 81-84 (1997), and Goffeau et al., Science 274 (5287), 546-547, 1996, and its activity is being defined as “protein involved in bud-site selection”. Accordingly, in one embodiment, the process of the present invention comprises the use of a “protein involved in bud-site selection” or its homolog, e.g. as shown herein, for the production of the fine chemical, meaning of arginine, glutamate, glutamine and/or proline, in particular for increasing the amount of arginine, glutamate, glutamine and/or proline in free or bound form preferably glutamate in free or bound form in an organism or a part thereof, as mentioned. In one embodiment, in the process of the present invention the activity of a YGR262C protein is increased or generated, e.g. from Saccharomyces cerevisiae or a homolog thereof, preferably linked at least to one transit peptide as mentioned for example in table V.
In another embodiment, in the process of the present invention the activity of an YGR262C protein is increased or generated in a subcellular compartment of the organism or organism cell such as in an organelle like a plastid or mitochondria.
The sequence of YHR202W (Accession number NP_{—}012072) from Saccharomyces cerevisiae has been published in Goffeau et al., Science 274 (5287), 546-547, 1996, and its activity is being defined as “uncharacterized protein”. Accordingly, in one embodiment, the process of the present invention comprises the use of a “conserved protein” or its homolog, e.g. as shown herein, for the production of the fine chemical, meaning of arginine, glutamate, glutamine and/or proline, in particular for increasing the amount of arginine, glutamate, glutamine and/or proline in free or bound form preferably glutamate in free or bound form in an organism or a part thereof, as mentioned. In one embodiment, in the process of the present invention the activity of a YHR202W protein is increased or generated, e.g. from Saccharomyces cerevisiae or a homolog thereof, preferably linked at least to one transit peptide as mentioned for example in table V.
In another embodiment, in the process of the present invention the activity of an YHR202W protein is increased or generated in a subcellular compartment of the organism or organism cell such as in an organelle like a plastid or mitochondria.
The sequence of YMR262W (Accession number S54474) from Saccharomyces cerevisiae has been published in Bowman et al., Nature 387:90-93, (1997) and Goffeau et al., Science 274 (5287), 546-547, 1996, and its activity is being defined as “uncharacterized ORF”. Accordingly, in one embodiment, the process of the present invention comprises the use of a “uncharacterized ORF” or its homolog, e.g. as shown herein, for the production of the fine chemical, meaning of arginine, glutamate, glutamine and/or proline, in particular for increasing the amount of arginine, glutamate, glutamine and/or proline in free or bound form preferably glutamate in free or bound form in an organism or a part thereof, as mentioned. In one embodiment, in the process of the present invention the activity of a YMR262W protein is increased or generated, e.g. from Saccharomyces cerevisiae or a homolog thereof, preferably linked at least to one transit peptide as mentioned for example in table V.
In another embodiment, in the process of the present invention the activity of an YMR262W protein is increased or generated in a subcellular compartment of the organism or organism cell such as in an organelle like a plastid or mitochondria.
The sequence of YPL162C (Accession number S65173) from Saccharomyces cerevisiae has been published in Goffeau et al., Science 274 (5287), 546-547, 1996 and Bussey et al., Nature 387 (6632 Suppl), 103-105 (1997) and its activity is being defined as “probable membrane protein”. Accordingly, in one embodiment, the process of the present invention comprises the use of a “probable membrane protein” or its homolog, e.g. as shown herein, for the production of the fine chemical, meaning of arginine, glutamate, glutamine and/or proline, in particular for increasing the amount of arginine, glutamate, glutamine and/or proline in free or bound form preferably glutamine in free or bound form in an organism or a part thereof, as mentioned. In one embodiment, in the process of the present invention the activity of a YPL162C protein is increased or generated, e.g. from Saccharomyces cerevisiae or a homolog thereof, preferably linked at least to one transit peptide as mentioned for example in table V.
In another embodiment, in the process of the present invention the activity of an YPL162C protein is increased or generated in a subcellular compartment of the organism or organism cell such as in an organelle like a plastid or mitochondria.
The sequence of YAL038W (Accession number NP_{—}009362) from Saccharomyces cerevisiae has been published in Goffeau et al., Science 274 (5287), 546-547, 1996 and Bussey et al., Proc. Natl. Acad. Sci. U.S.A. 92 (9), 3809-3813 (1995), and its activity is being defined as “pyruvate kinase”, which functions as a homotetramer in glycolysis to convert phosphoenolpyruvate to pyruvate (Cdc19p). Pyruvate is the input for aerobic (TCA cycle) or anaerobic (glucose fermentation) respiration. Accordingly, in one embodiment, the process of the present invention comprises the use of a “pyruvate kinase” or its homolog, e.g. as shown herein, for the production of the fine chemical, meaning of arginine, glutamate, glutamine and/or proline, in particular for increasing the amount of arginine, glutamate, glutamine and/or proline in free or bound form in an organism or a part thereof, as mentioned. In one embodiment, in the process of the present invention the activity of a YAL038W protein is increased or generated, e.g. from Saccharomyces cerevisiae or a homolog thereof, preferably linked at least to one transit peptide as mentioned for example in table V.
In another embodiment, in the process of the present invention the activity of an YAL038W protein is increased or generated in a subcellular compartment of the organism or organism cell such as in an organelle like a plastid or mitochondria.
The sequence of YBR001C (Accession number NP_{—}009555) from Saccharomyces cerevisiae has been published in Goffeau et al., Science 274 (5287), 546-547, 1996 and Feldmann et al., EMBO J. 13 (24), 5795-5809 (1994), and its activity is being defined as “neutral trehalase” which degrades trehalose and which is required for thermotolerance and may mediate resistance to other cellular stresses (Nth2p). Accordingly, in one embodiment, the process of the present invention comprises the use of a “neutral trehalase” or its homolog, e.g. as shown herein, for the production of the fine chemical, meaning of arginine, glutamate, glutamine and/or proline, in particular for increasing the amount of arginine, glutamate, glutamine and/or proline in free or bound form in an organism or a part thereof, as mentioned. In one embodiment, in the process of the present invention the activity of a YBR001C protein is increased or generated, e.g. from Saccharomyces cerevisiae or a homolog thereof, preferably linked at least to one transit peptide as mentioned for example in table V.
In another embodiment, in the process of the present invention the activity of an YBR001C protein is increased or generated in a subcellular compartment of the organism or organism cell such as in an organelle like a plastid or mitochondria.
The sequence of YER024W (Accession number NP_{—}010941) from Saccharomyces cerevisiae has been published in Goffeau et al., Science 274 (5287), 546-547, 1996 and Dietrich et al., Nature 387 (6632 Suppl), 78-81 (1997). The activity of the protein is unclear. The protein shows significant homology with the known carnitine acetyltransferase associated with the outer-mitochondrial membrane (Yat1p), and might also functions as a carnitine acetyltransferase. Accordingly, in one embodiment, the process of the present invention comprises the use of said putative carnitine acetyltransferase or its homolog, e.g. as shown herein, for the production of the fine chemical, meaning of arginine, glutamate, glutamine and/or proline, in particular for increasing the amount of arginine, glutamate, glutamine and/or proline in free or bound form in an organism or a part thereof, as mentioned. In one embodiment, in the process of the present invention the activity of a YER024W protein is increased or generated, e.g. from Saccharomyces cerevisiae or a homolog thereof, preferably linked at least to one transit peptide as mentioned for example in table V.
In another embodiment, in the process of the present invention the activity of a YER024W protein is increased or generated in a subcellular compartment of the organism or organism cell such as in an organelle like a plastid or mitochondria.
The sequence of YGR256W (Accession number NP_{—}011772) from Saccharomyces cerevisiae has been published in Goffeau et al., Science 274 (5287), 546-547, 1996 and Tettelin et al., Nature 387 (6632 Suppl), 81-84 (1997), and its activity is being defined as “6-phosphogluconate dehydrogenase”, which has a decarboxylating activity and converts 6-phosphogluconate+NADP to ribulose-5-phosphate+NADPH+CO₂ (Gnd2p). Accordingly, in one embodiment, the process of the present invention comprises the use of a “6-phosphogluconate dehydrogenase” or its homolog, e.g. as shown herein, for the production of the fine chemical, meaning of arginine, glutamate, glutamine and/or proline, in particular for increasing the amount of arginine, glutamate, glutamine and/or proline in free or bound form in an organism or a part thereof, as mentioned. In one embodiment, in the process of the present invention the activity of a YGR256W protein is increased or generated, e.g. from Saccharomyces cerevisiae or a homolog thereof, preferably linked at least to one transit peptide as mentioned for example in table V.
In another embodiment, in the process of the present invention the activity of an YGR256W protein is increased or generated in a subcellular compartment of the organism or organism cell such as in an organelle like a plastid or mitochondria.
The sequence of YGR289C (Accession number NP_{—}011805) from Saccharomyces cerevisiae has been published in Goffeau et al., Science 274 (5287), 546-547, 1996 and Tettelin et al., Nature 387 (6632 Suppl), 81-84 (1997), and its activity is being defined as “general alpha-glucoside permease”. Accordingly, in one embodiment, the process of the present invention comprises the use of a “general alpha-glucoside permease” or its homolog, e.g. as shown herein, for the production of the fine chemical, meaning of arginine, glutamate, glutamine and/or proline, in particular for increasing the amount of arginine, glutamate, glutamine and/or proline in free or bound form in an organism or a part thereof, as mentioned. In one embodiment, in the process of the present invention the activity of a YGR289C protein is increased or generated, e.g. from Saccharomyces cerevisiae or a homolog thereof, preferably linked at least to one transit peptide as mentioned for example in table V.
In another embodiment, in the process of the present invention the activity of an YGR289C protein is increased or generated in a subcellular compartment of the organism or organism cell such as in an organelle like a plastid or mitochondria.
The sequence of YHR037W (Accession number NP_{—}011902) from Saccharomyces cerevisiae has been published in Goffeau et al., Science 274 (5287), 546-547, 1996 and Johnston et al., Science 265 (5181), 2077-2082 (1994), and its activity is being defined as “delta-1-pyrroline-5-carboxylate dehydrogenase”. Accordingly, in one embodiment, the process of the present invention comprises the use of a “delta-1-pyrroline-5-carboxylate dehydrogenase” or its homolog, e.g. as shown herein, for the production of the fine chemical, meaning of arginine, glutamate, glutamine and/or proline, in particular for increasing the amount of arginine, glutamate, glutamine and/or proline in free or bound form in an organism or a part thereof, as mentioned. In one embodiment, in the process of the present invention the activity of a YHR037W protein is increased or generated, e.g. from Saccharomyces cerevisiae or a homolog thereof, preferably linked at least to one transit peptide as mentioned for example in table V.
In another embodiment, in the process of the present invention the activity of an YHR037W protein is increased or generated in a subcellular compartment of the organism or organism cell such as in an organelle like a plastid or mitochondria.
The sequence of YKR043C (Accession number NP_{—}012969) from Saccharomyces cerevisiae has been published in Goffeau et al., Science 274 (5287), 546-547, 1996 and Dujon et al., Nature 369 (6479), 371-378 (1994), and its activity is being defined as “phosphoglycerate mutase like protein”. Accordingly, in one embodiment, the process of the present invention comprises the use of a “phosphoglycerate mutase like protein” or its homolog, e.g. as shown herein, for the production of the fine chemical, meaning of arginine, glutamate, glutamine and/or proline, in particular for increasing the amount of arginine, glutamate, glutamine and/or proline in free or bound form in an organism or a part thereof, as mentioned. In one embodiment, in the process of the present invention the activity of a YKR043C protein is increased or generated, e.g. from Saccharomyces cerevisiae or a homolog thereof, preferably linked at least to one transit peptide as mentioned for example in table V.
In another embodiment, in the process of the present invention the activity of an YKR043C protein is increased or generated in a subcellular compartment of the organism or organism cell such as in an organelle like a plastid or mitochondria.
The sequence of YLR027C (Accession number NP_{—}013127) from Saccharomyces cerevisiae has been published in Goffeau et al., Science 274 (5287), 546-547, 1996 and Johnston et al., Science 265 (5181), 2077-2082 (1994), and its activity is being defined as “aspartate aminotransferase”. Accordingly, in one embodiment, the process of the present invention comprises the use of a “aspartate aminotransferase” or its homolog, e.g. as shown herein, for the production of the fine chemical, meaning of arginine, glutamate, glutamine and/or proline, in particular for increasing the amount of arginine, glutamate, glutamine and/or proline in free or bound form in an organism or a part thereof, as mentioned. In one embodiment, in the process of the present invention the activity of a YLR027C protein is increased or generated, e.g. from Saccharomyces cerevisiae or a homolog thereof, preferably linked at least to one transit peptide as mentioned for example in table V.
In another embodiment, in the process of the present invention the activity of an YLR027C protein is increased or generated in a subcellular compartment of the organism or organism cell such as in an organelle like a plastid or mitochondria.
The sequence of YNL241C (Accession number NP_{—}014158) from Saccharomyces cerevisiae has been published in Goffeau et al., Science 274 (5287), 546-547, 1996 and Philippsen et al., Nature 387 (6632 Suppl), 93-98 (1997), and its activity is being defined as “glucose-6-phosphate dehydrogenase” (Zwf1p). Accordingly, in one embodiment, the process of the present invention comprises the use of a “glucose-6-phosphate dehydrogenase” or its homolog, e.g. as shown herein, for the production of the fine chemical, meaning of arginine, glutamate, glutamine and/or proline, in particular for increasing the amount of arginine, glutamate, glutamine and/or proline in free or bound form in an organism or a part thereof, as mentioned. In one embodiment, in the process of the present invention the activity of a YNL241C protein is increased or generated, e.g. from Saccharomyces cerevisiae or a homolog thereof, preferably linked at least to one transit peptide as mentioned for example in table V.
In another embodiment, in the process of the present invention the activity of an YNL241C protein is increased or generated in a subcellular compartment of the organism or organism cell such as in an organelle like a plastid or mitochondria.

[1405] In one embodiment, the homolog of the YGR262C, YHR202W, YMR262W, YPL162C, YAL038W, YBR001C, YER024W, YGR256W, YGR289C, YHR037W, YKR043C, YLR027C and/or YNL241C, is a homolog having said activity and being derived from Eukaryot. In one embodiment, the homolog of the b0342, b0855, b1062, b1184, b1223, b1556, b1758, b2040, b3443, b4072, b4074, b1264, b1852, b1907, b2025, b2818, b2926, b2965 and/or b4139 is a homolog having said activity and being derived from bacteria. In one embodiment, the homolog of the YGR262C, YHR202W, YMR262W, YPL162C, YAL038W, YBR001C, YER024W, YGR256W, YGR289C, YHR037W, YKR043C, YLR027C and/or YNL241C is a homolog having said activity and being derived from Fungi. In one embodiment, the homolog of the b0342, b0855, b1062, b1184, b1223, b1556, b1758, b2040, b3443, b4072, b4074, b1264, b1852, b1907, b2025, b2818, b2926, b2965 and/or b4139 is a homolog having said activity and being derived from Proteobacteria. In one embodiment, the homolog of the YGR262C, YHR202W, YMR262W, YPL162C, YAL038W, YBR001C, YER024W, YGR256W, YGR289C, YHR037W, YKR043C, YLR027C and/or YNL241C is a homolog having said activity and being derived from Ascomycota. In one embodiment, the homolog of the b0342, b0855, b1062, b1184, b1223, b1556, b1758, b2040, b3443, b4072, b4074, b1264, b1852, b1907, b2025, b2818, b2926, b2965 and/or b4139 is a homolog having said activity and being derived from Gammaproteobacteria. In one embodiment, the homolog of the YGR262C, YHR202W, YMR262W, YPL162C, YAL038W, YBR001C, YER024W, YGR256W, YGR289C, YHR037W, YKR043C, YLR027C and/or YNL241C is a homolog having said activity and being derived from Saccharomycotina. In one embodiment, the homolog of the b0342, b0855, b1062, b1184, b1223, b1556, b1758, b2040, b3443, b4072, b4074, b1264, b1852, b1907, b2025, b2818, b2926, b2965 and/or b4139 is a homolog having said activity and being derived from Enterobacteriales. In one embodiment, the homolog of the YGR262C, YHR202W, YMR262W, YPL162C, YAL038W, YBR001C, YER024W, YGR256W, YGR289C, YHR037W, YKR043C, YLR027C and/or YNL241C is a homolog having said activity and being derived from Saccharomycetes. In one embodiment, the homolog of the b0342, b0855, b1062, b1184, b1223, b1556, b1758, b2040, b3443, b4072, b4074, b1264, b1852, b1907, b2025, b2818, b2926, b2965 and/or b4139 is a homolog having said activity and being derived from Enterobacteriaceae. In one embodiment, the homolog of the YGR262C, YHR202W, YMR262W, YPL162C, YAL038W, YBR001C, YER024W, YGR256W, YGR289C, YHR037W, YKR043C, YLR027C and/or YNL241C is a homolog having said activity and being derived from Saccharomycetales. In one embodiment, the homolog of the b0342, b0855, b1062, b1184, b1223, b1556, b1758, b2040, b3443, b4072, b4074, b1264, b1852, b1907, b2025, b2818, b2926, b2965 and/or b4139 is a homolog having said activity and being derived from Escherichia, preferably from Escherichia coli. In one embodiment, the homolog of the YGR262C, YHR202W, YMR262W, YPL162C, YAL038W, YBR001C, YER024W, YGR256W, YGR289C, YHR037W, YKR043C, YLR027C and/or YNL241C is a homolog having said activity and being derived from Saccharomycetaceae. In one embodiment, the homolog of the YGR262C, YHR202W, YMR262W, YPL162C, YAL038W, YBR001C, YER024W, YGR256W, YGR289C, YHR037W, YKR043C, YLR027C and/or YNL241C is a homolog having said activity and being derived from Saccharomycetes, preferably from Saccharomyces cerevisiae.

[1406] for the disclosure of this paragraph see paragraph [0038.0.0.0] above.

[1407] In accordance with the invention, a protein or polypeptide has the “activity of an protein as shown in table II, application no. 5, column 3” if its de novo activity, or its increased expression directly or indirectly leads to an increased in the fine chemical level in the organism or a part thereof, preferably in a cell of said organism, more preferably in an organelle such as a plastid or mitochondria of said organism and the protein has the above mentioned activities of a protein as shown in table II, application no. 5, column 3, preferably in the event the nucleic acid sequences encoding said proteins is functionally joined to the nucleic acid sequence of a transit peptide. Throughout the specification the activity or preferably the biological activity of such a protein or polypeptide or an nucleic acid molecule or sequence encoding such protein or polypeptide is identical or similar if it still has the biological or enzymatic activity of a protein as shown in table II, application no. 5, column 3, or which has at least 10% of the original enzymatic activity, preferably 20%, particularly preferably 30%, most particularly preferably 40% in comparison to a protein as shown in table II, application no. 5, column 3 of Saccharomyces cerevisiae.

[1408] for the disclosure of the paragraphs [0040.0.0.4] to [0047.0.0.4] see paragraphs [0040.0.0.0] to [0047.0.0.0] above.

[1409] Preferably, the reference, control or wild type differs form the subject of the present invention only in the cellular activity, preferably of the plastidial activity of the polypeptide of the invention, e.g. as result of an increase in the level of the nucleic acid molecule of the present invention or an increase of the specific activity of the polypeptide of the invention, e.g. by or in the expression level or activity of an protein having the activity of a protein as shown in table II, application no. 5, column 3 its biochemical or genetical causes and the increased amount of the fine chemical.

[1410] for the disclosure of the paragraphs [0049.0.0.4] to [0051.0.0.4] see paragraphs [0049.0.0.0] to [0051.0.0.0] above.

[1411] For example, the molecule number or the specific activity of the polypeptide or the nucleic acid molecule may be increased. Larger amounts of the fine chemical can be produced if the polypeptide or the nucleic acid of the invention is expressed de novo in an organism lacking the activity of said protein, preferably the nucleic acid molecules as mentioned in table I, application no. 5, columns 5 and 7 alone or preferably in combination with a transit peptide for example as mentioned in table V or in another embodiment by introducing said nucleic acid molecules into an organelle such as an plastid or mitochondria in the transgenic organism. However, it is also possible to modify the expression of the gene which is naturally present in the organisms, for example by integrating a nucleic acid sequence, encoding a plastidic targeting sequence in front (5 prime) of the coding sequence, leading to a functional preprotein, which is directed for example to the plastids.

[1412] for the disclosure of the paragraphs [0053.0.0.4] to [0058.0.0.4] see paragraphs [0053.0.0.0] to [0058.0.0.0] above.

[1413] In case the activity of the Escherichia coli protein b0342 or its homologs, e.g. a “thiogalactoside acetyltransferase” is increased advantageously in an organelle such as a plastid or mitochondria, preferably, in one embodiment an increase of the fine chemical, preferably of glutamine between 29% and 81% and/or glutamate between 33% and 85% or more is conferred.

In case the activity of the Escherichia coli protein b0855 or its homologs, e.g. a “ATP-binding component of putrescine transport system” is increased advantageously in an organelle such as a plastid or mitochondria, preferably, in one embodiment an increase of the fine chemical, preferably of arginine between 46% and 113% or more is conferred.
In case the activity of the Escherichia coli protein b1062 or its homologs, e.g. a “dihydro-orotase” is increased advantageously in an organelle such as a plastid or mitochondria, preferably, in one embodiment an increase of the fine chemical, preferably of proline between 43% and 145% or more is conferred.
In case the activity of the Escherichia coli protein b1184 or its homologs, e.g. a “SOS mutagenesis and repair” is increased advantageously in an organelle such as a plastid or mitochondria, preferably, in one embodiment an increase of the fine chemical, preferably of proline between 34% and 130% or more is conferred.
In case the activity of the Escherichia coli protein b1223 or its homologs, e.g. a “nitrite extrusion protein” is increased advantageously in an organelle such as a plastid or mitochondria, preferably, in one embodiment an increase of the fine chemical, preferably of proline between 44% and 501% or more is conferred.
In case the activity of the Escherichia coli protein b1556 or its homologs, e.g. a “Qin prophage” is increased advantageously in an organelle such as a plastid or mitochondria, preferably, in one embodiment an increase of the fine chemical, preferably of proline between 45% and 229% or more is conferred.
In case the activity of the Escherichia coli protein b1758 or its homologs, e.g. a “putative cytochrome oxidase” is increased advantageously in an organelle such as a plastid or mitochondria, preferably, in one embodiment an increase of the fine chemical, preferably of glutamate between 36% and 38% or more is conferred.
In case the activity of the Escherichia coli protein b2040 or its homologs, e.g. a “TDP-rhamnose synthetase, NAD(P)-binding” is increased advantageously in an organelle such as a plastid or mitochondria, preferably, in one embodiment an increase of the fine chemical, preferably of glutamine between 32% and 49% or more is conferred.
In case the activity of the Escherichia coli protein b3443 or its homologs, e.g. a “conserved unknown protein” is increased advantageously in an organelle such as a plastid or mitochondria, preferably, in one embodiment an increase of the fine chemical, preferably of glutamine between 30% and 36% or more is conferred.
In case the activity of the Escherichia coli protein b4072 or its homologs, e.g. a “formate-dependent nitrite reductase NrfC” is increased advantageously in an organelle such as a plastid or mitochondria, preferably, in one embodiment an increase of the fine chemical, preferably of glutamine between 33% and 451% or more is conferred.
In case the activity of the Escherichia coli protein b4074 or its homologs, e.g. a “formate-dependent nitrite reductase” is increased advantageously in an organelle such as a plastid or mitochondria, preferably, in one embodiment an increase of the fine chemical, preferably of proline between 45% and 62% or more is conferred.
In case the activity of the Escherichia coli protein b1264 or its homologs, e.g. a “anthranilate synthase (component I)” is increased advantageously in an organelle such as a plastid or mitochondria, preferably, in one embodiment an increase of the fine chemical, preferably of glutamine between 27% and 75% or more is conferred.
In case the activity of the Escherichia coli protein b1852 or its homologs, e.g. a “glucose-6-phosphate dehydrogenase” is increased advantageously in an organelle such as a plastid or mitochondria, preferably, in one embodiment an increase of the fine chemical, preferably of proline between 45% and 62% or more is conferred.
In case the activity of the Escherichia coli protein b1907 or its homologs, e.g. a “tyrosine-specific transport protein” is increased advantageously in an organelle such as a plastid or mitochondria, preferably, in one embodiment an increase of the fine chemical, preferably of arginine between 46% and 113% or more is conferred.
In case the activity of the Escherichia coli protein b2025 or its homologs, e.g. a “imidazole glycerol phosphate synthase subunit” is increased advantageously in an organelle such as a plastid or mitochondria, preferably, in one embodiment an increase of the fine chemical, preferably of proline between 38% and 353% or more is conferred.
In case the activity of the Escherichia coli protein b2818 or its homologs, e.g. a “N-acetylglutamate synthase” is increased advantageously in an organelle such as a plastid or mitochondria, preferably, in one embodiment an increase of the fine chemical, preferably of arginine between 333% and 1336% or more is conferred.
In case the activity of the Escherichia coli protein b2926 or its homologs, e.g. a “phosphoglycerate kinase” is increased advantageously in an organelle such as a plastid or mitochondria, preferably, in one embodiment an increase of the fine chemical, preferably of proline between 34% and 130% or more is conferred.
In case the activity of the Escherichia coli protein b2965 or its homologs, e.g. a “ornithine decarboxylase” is increased advantageously in an organelle such as a plastid or mitochondria, preferably, in one embodiment an increase of the fine chemical, preferably of proline between 60% and 855% or more is conferred.
In case the activity of the Escherichia coli protein b4139 or its homologs, e.g. a “aspartate ammonia-lyase” is increased advantageously in an organelle such as a plastid or mitochondria, preferably, in one embodiment an increase of the fine chemical, preferably of glutamine between 38% and 100% and/or arginine between 106% and 1038% or more is conferred.
In case the activity of the Saccharomyces cerevisiae protein YGR262C or its homologs, e.g. a “protein involved in bud-site selection” is increased advantageously in an organelle such as a plastid or mitochondria, preferably, in one embodiment an increase of the fine chemical, preferably of glutamate between 33% and 48% or more is conferred.
In case the activity of the Saccharomyces cerevisiae protein YHR202W or its homologs, e.g. a “uncharacterized protein” is increased advantageously in an organelle such as a plastid or mitochondria, preferably, in one embodiment an increase of the fine chemical, preferably of glutamate between 33% and 34% or more is conferred.
In case the activity of the Saccharomyces cerevisiae protein YMR262W or its homologs, e.g. a “uncharacterized ORF” is increased advantageously in an organelle such as a plastid or mitochondria, preferably, in one embodiment an increase of the fine chemical, preferably of glutamate between 35% and 128% or more is conferred.
In case the activity of the Saccharomyces cerevisiae protein YPL162C or its homologs, e.g. a “probable membrane protein” is increased advantageously in an organelle such as a plastid or mitochondria, preferably, in one embodiment an increase of the fine chemical, preferably of glutamine between 28% and 59% or more is conferred.
In case the activity of the Saccharomyces cerevisiae protein YAL038W or its homologs, e.g. a “pyruvate kinase” is increased advantageously in an organelle such as a plastid or mitochondria, preferably, in one embodiment an increase of the fine chemical, preferably of proline between 41% and 101% or more or and/or glutamate between 58% and 120% or more is conferred.
In case the activity of the Saccharomyces cerevisiae protein YBR001C or its homologs, e.g. a “neutral trehalase” is increased advantageously in an organelle such as a plastid or mitochondria, preferably, in one embodiment an increase of the fine chemical, preferably of proline between 33% and 66% or more is conferred.
In case the activity of the Saccharomyces cerevisiae protein YER024W or its homologs, e.g. a “carnitine acetyltransferase” is increased advantageously in an organelle such as a plastid or mitochondria, preferably, in one embodiment an increase of the fine chemical, preferably of arginine between 24% and 39% or more is conferred.
In case the activity of the Saccharomyces cerevisiae protein YGR256W or its homologs, e.g. a “6-phospho-gluconate dehydrogenase” is increased advantageously in an organelle such as a plastid or mitochondria, preferably, in one embodiment an increase of the fine chemical, preferably of proline between 54% and 122% or more is conferred.
In case the activity of the Saccharomyces cerevisiae protein YGR289C or its homologs, e.g. a “general alpha-glucoside permease” is increased advantageously in an organelle such as a plastid or mitochondria, preferably, in one embodiment an increase of the fine chemical, preferably of proline between 37% and 82% or more is conferred.
In case the activity of the Saccharomyces cerevisiae protein YHR037W or its homologs, e.g. a “delta-1-pyrroline-5-carboxylate dehydrogenase” is increased advantageously in an organelle such as a plastid or mitochondria, preferably, in one embodiment an increase of the fine chemical, preferably of proline between 71% and 117% or more is conferred.
In case the activity of the Saccharomyces cerevisiae protein YKR043C or its homologs, e.g. a “phosphoglycerate mutase like protein” is increased advantageously in an organelle such as a plastid or mitochondria, preferably, in one embodiment an increase of the fine chemical, preferably of proline between 34% and 330% or more is conferred.
In case the activity of the Saccharomyces cerevisiae protein YLR027C or its homologs, e.g. a “aspartate aminotransferase” is increased advantageously in an organelle such as a plastid or mitochondria, preferably, in one embodiment an increase of the fine chemical, preferably of proline between 52% and 182% or more is conferred.
In case the activity of the Saccharomyces cerevisiae protein YNL241C or its homologs, e.g. an “glucose-6-phosphate dehydrogenase” is increased advantageously in an organelle such as a plastid or mitochondria, preferably, in one embodiment an increase of the fine chemical, preferably of arginine between 48% and 274% or more is conferred.

[1414] In case the activity of the Escherichia coli protein b0342 or its homologs, e.g. a “thiogalactoside acetyltransferase” is increased advantageously in an organelle such as a plastid or mitochondria, preferably an increase of the fine chemical and of proteins containing glutamine and/or glutamate is conferred.

In case the activity of the Escherichia coli protein b0855 or its homologs, e.g. a “ATP-binding component of putrescine transport system” is increased advantageously in an organelle such as a plastid or mitochondria, preferably an increase of the fine chemical and of proteins containing arginine is conferred.
In case the activity of the Escherichia coli protein b1062 or its homologs, e.g. a “dihydro-orotase” is increased advantageously in an organelle such as a plastid or mitochondria, preferably an increase of the fine chemical and of proteins containing proline is conferred.
In case the activity of the Escherichia coli protein b1184 or its homologs, e.g. a “SOS mutagenesis and repair” is increased advantageously in an organelle such as a plastid or mitochondria, preferably an increase of the fine chemical and of proteins containing proline is conferred.
In case the activity of the Escherichia coli protein b1223 or its homologs, e.g. a “nitrite extrusion protein” is increased advantageously in an organelle such as a plastid or mitochondria, preferably an increase of the fine chemical and of proteins containing proline is conferred.
In case the activity of the Escherichia coli protein b1556 or its homologs, e.g. a “Qin prophage” is increased advantageously in an organelle such as a plastid or mitochondria, preferably an increase of the fine chemical and of proteins containing proline is conferred.
In case the activity of the Escherichia coli protein b1758 or its homologs, e.g. a “putative cytochrome oxidase” is increased advantageously in an organelle such as a plastid or mitochondria, preferably an increase of the fine chemical and of proteins containing glutamate is conferred.
In case the activity of the Escherichia coli protein b2040 or its homologs, e.g. a “TDP-rhamnose synthetase, NAD(P)-binding” is increased advantageously in an organelle such as a plastid or mitochondria, preferably an increase of the fine chemical and of proteins containing glutamine is conferred.
In case the activity of the Escherichia coli protein b3443 or its homologs, e.g. a “conserved unknown protein” is increased advantageously in an organelle such as a plastid or mitochondria, preferably an increase of the fine chemical and of proteins containing glutamine is conferred.
In case the activity of the Escherichia coli protein b4072 or its homologs, e.g. a “formate-dependent nitrite reductase NrfC” is increased advantageously in an organelle such as a plastid or mitochondria, preferably an increase of the fine chemical and of proteins containing glutamine is conferred.
In case the activity of the Escherichia coli protein b4074 or its homologs, e.g. a “formate-dependent nitrite reductase” is increased advantageously in an organelle such as a plastid or mitochondria, preferably an increase of the fine chemical and of proteins containing proline is conferred.
In case the activity of the Escherichia coli protein b1264 or its homologs, e.g. a “anthranilate synthase (component I)” is increased advantageously in an organelle such as a plastid or mitochondria, preferably an increase of the fine chemical and of proteins containing glutamine is conferred.
In case the activity of the Escherichia coli protein b1852 or its homologs, e.g. a “glucose-6-phosphate dehydrogenase” is increased advantageously in an organelle such as a plastid or mitochondria, preferably an increase of the fine chemical and of proteins containing proline is conferred.
In case the activity of the Escherichia coli protein b1907 or its homologs, e.g. a “tyrosine-specific transport protein” is increased advantageously in an organelle such as a plastid or mitochondria, preferably an increase of the fine chemical and of proteins containing arginine is conferred.
In case the activity of the Escherichia coli protein b2025 or its homologs, e.g. a “imidazole glycerol phosphate synthase subunit” is increased advantageously in an organelle such as a plastid or mitochondria, preferably an increase of the fine chemical and of proteins containing proline is conferred.
In case the activity of the Escherichia coli protein b2818 or its homologs, e.g. a “N-acetylglutamate synthase” is increased advantageously in an organelle such as a plastid or mitochondria, preferably an increase of the fine chemical and of proteins containing arginine is conferred.
In case the activity of the Escherichia coli protein b2926 or its homologs, e.g. a “phosphoglycerate kinase” is increased advantageously in an organelle such as a plastid or mitochondria, preferably an increase of the fine chemical and of proteins containing proline is conferred.
In case the activity of the Escherichia coli protein b2965 or its homologs, e.g. a “ornithine decarboxylase” is increased advantageously in an organelle such as a plastid or mitochondria, preferably an increase of the fine chemical and of proteins containing proline is conferred.
In case the activity of the Escherichia coli protein b4139 or its homologs, e.g. a “aspartate ammonia-lyase” is increased advantageously in an organelle such as a plastid or mitochondria, preferably an increase of the fine chemical and of proteins containing glutamine and/or arginine is conferred.
In case the activity of the Saccharomyces cerevisiae protein YGR262C or its homologs, e.g. a “protein involved in bud-site selection” is increased advantageously in an organelle such as a plastid or mitochondria, preferably an increase of the fine chemical and of proteins containing glutamate is conferred.
In case the activity of the Saccharomyces cerevisiae protein YHR202W or its homologs, e.g. a “uncharacterized protein” is increased advantageously in an organelle such as a plastid or mitochondria, preferably an increase of the fine chemical and of proteins containing glutamate is conferred.
In case the activity of the Saccharomyces cerevisiae protein YMR262W or its homologs, e.g. a “uncharacterized ORF” is increased advantageously in an organelle such as a plastid or mitochondria, preferably an increase of the fine chemical and of proteins containing glutamate is conferred.
In case the activity of the Saccharomyces cerevisiae protein YPL162C or its homologs, e.g. a “probable membrane protein” is increased advantageously in an organelle such as a plastid or mitochondria, preferably an increase of the fine chemical and of proteins containing glutamine is conferred.
In case the activity of the Saccharomyces cerevisiae protein YAL038W or its homologs, e.g. a “pyruvate kinase” is increased advantageously in an organelle such as a plastid or mitochondria, preferably an increase of the fine chemical and of proteins containing proline and/or glutamate is conferred.
In case the activity of the Saccharomyces cerevisiae protein YBR001C or its homologs, e.g. a “neutral trehalase” is increased advantageously in an organelle such as a plastid or mitochondria, preferably an increase of the fine chemical and of proteins containing proline is conferred.
In case the activity of the Saccharomyces cerevisiae protein YER024W or its homologs, e.g. a “carnitine acetyltransferase” is increased advantageously in an organelle such as a plastid or mitochondria, preferably an increase of the fine chemical and of proteins containing arginine is conferred.
In case the activity of the Saccharomyces cerevisiae protein YGR256W or its homologs, e.g. a “6-phospho-gluconate dehydrogenase” is increased advantageously in an organelle such as a plastid or mitochondria, preferably an increase of the fine chemical and of proteins containing proline is conferred.
In case the activity of the Saccharomyces cerevisiae protein YGR289C or its homologs, e.g. a “general alpha-glucoside permease” is increased advantageously in an organelle such as a plastid or mitochondria, preferably an increase of the fine chemical and of proteins containing proline is conferred.
In case the activity of the Saccharomyces cerevisiae protein YHR037W or its homologs, e.g. a “delta-1-pyrroline-5-carboxylate dehydrogenase” is increased advantageously in an organelle such as a plastid or mitochondria, preferably an increase of the fine chemical and of proteins containing proline is conferred.
In case the activity of the Saccharomyces cerevisiae protein YKR043C or its homologs, e.g. a “phosphoglycerate mutase like protein” is increased advantageously in an organelle such as a plastid or mitochondria, preferably an increase of the fine chemical and of proteins containing proline is conferred.
In case the activity of the Saccharomyces cerevisiae protein YLR027C or its homologs, e.g. a “aspartate aminotransferase” is increased advantageously in an organelle such as a plastid or mitochondria, preferably an increase of the fine chemical and of proteins containing proline is conferred.
In case the activity of the Saccharomyces cerevisiae protein YNL241C or its homologs, e.g. an “glucose-6-phosphate dehydrogenase” is increased advantageously in an organelle such as a plastid or mitochondria, preferably, in one embodiment an increase of the fine chemical, preferably an increase of the fine chemical and of proteins containing arginine is conferred.

[1415] for the disclosure of the paragraphs [0061.0.0.4] and [0062.0.0.4] see paragraphs [0061.0.0.0] and [0062.0.0.0] above.

[1416] A protein having an activity conferring an increase in the amount or level of the fine chemical, preferably upon targeting to the plastids preferably has the structure of the polypeptide described herein, in particular of the polypeptides comprising the consensus sequence shown in table IV, application no. 5, column 7 or of the polypeptide as shown in the amino acid sequences as disclosed in table II, application no. 5, columns 5 and 7 or the functional homologues thereof as described herein, or is encoded by the nucleic acid molecule characterized herein or the nucleic acid molecule according to the invention, for example by the nucleic acid molecule as shown in table I, application no. 5, columns 5 and 7 or its herein described functional homologues and has the herein mentioned activity.

[1417] For the purposes of the present invention, the terms “L-arginine, L-glutamate, L-glutamine and/or L-proline” and “arginine, glutamate, glutamine and/or proline” also encompass the corresponding salts, such as, for example, arginine, glutamate, glutamine and/or proline hydrochloride or arginine, glutamate, glutamine and/or proline sulfate. Preferably the terms arginine, glutamate, glutamine and/or proline is intended to encompass the term L-arginine, L-glutamate, L-glutamine and/or L-proline.

[1418] for the disclosure of the paragraphs [0065.0.0.4] and [0066.0.0.4] see paragraphs [0065.0.0.0] and [0066.0.0.0] above.

[1419] In one embodiment, the process of the present invention comprises one or more of the following steps
[1420] a) stabilizing a protein conferring the increased expression of a protein encoded by the nucleic acid molecule of the invention or of the polypeptide of the invention, e.g. of a polypeptide having the activity of a protein as indicated in table II, application no. 5, columns 5 and 7 or its homologs activity having herein-mentioned arginine, glutamate, glutamine and/or proline increasing activity; and/or
[1421] b) stabilizing a mRNA conferring the increased expression of a protein encoded by the nucleic acid molecule of the invention, which is in the sense of the invention a fusion of a nucleic acid sequence encoding a transit peptide and of a nucleic acid sequence as shown in table I, application no. 5, columns 5 and 7, e.g. a nucleic acid sequence encoding a polypeptide having the activity of a protein as indicated in table II, application no. 5, columns 5 and 7 or its homologs activity or of a mRNA encoding the polypeptide of the present invention having herein-mentioned arginine, glutamate, glutamine and/or proline increasing activity; and/or
[1422] c) increasing the specific activity of a protein conferring the increased expression of a protein encoded by the nucleic acid molecule of the invention or of the polypeptide of the present invention having herein-mentioned arginine, glutamate, glutamine and/or proline increasing activity, e.g. of a polypeptide having the activity of a protein as indicated in table II, application no. 5, columns 5 and 7 or its homologs activity, or decreasing the inhibitory regulation of the polypeptide of the invention; and/or
[1423] d) generating or increasing the expression of an endogenous or artificial transcription factor mediating the expression of a protein conferring the increased expression of a protein encoded by the nucleic acid molecule of the invention or of the polypeptide of the invention having herein-mentioned arginine, glutamate, glutamine and/or proline increasing activity, e.g. of a polypeptide having the activity of a protein as indicated in table II, application no. 5, columns 5 and 7 or its homologs activity; and/or
[1424] e) stimulating activity of a protein conferring the increased expression of a protein encoded by the nucleic acid molecule of the present invention or a polypeptide of the present invention having herein-mentioned arginine, glutamate, glutamine and/or proline increasing activity, e.g. of a polypeptide having the activity of a protein as indicated in table II, application no. 5, columns 5 and 7 or its homologs activity, by adding one or more exogenous inducing factors to the organisms or parts thereof; and/or
[1425] f) expressing a transgenic gene encoding a protein conferring the increased expression of a polypeptide encoded by the nucleic acid molecule of the present invention or a polypeptide of the present invention, having herein-mentioned arginine, glutamate, glutamine and/or proline increasing activity, e.g. of a polypeptide having the activity of a protein as indicated in table II, application no. 5, columns 5 and 7 or its homologs activity, and/or
[1426] g) increasing the copy number of a gene conferring the increased expression of a nucleic acid molecule encoding a polypeptide encoded by the nucleic acid molecule of the invention or the polypeptide of the invention having herein-mentioned arginine, glutamate, glutamine and/or proline increasing activity, e.g. of a polypeptide having the activity of a protein as indicated in table II, application no. 5, columns 5 and 7 or its homologs activity; and/or
[1427] h) increasing the expression of the endogenous gene encoding the polypeptide of the invention, e.g. a polypeptide having the activity of a protein as indicated in table II, application no. 5, columns 5 and 7 or its homologs activity, by adding positive expression or removing negative expression elements, e.g. homologous recombination can be used to either introduce positive regulatory elements like for plants the 35S enhancer into the promoter or to remove repressor elements form regulatory regions. Further gene conversion methods can be used to disrupt repressor elements or to enhance to activity of positive elements. Positive elements can be randomly introduced in plants by T-DNA or transposon mutagenesis and lines can be identified in which the positive elements have be integrated near to a gene of the invention, the expression of which is thereby enhanced; and/or
[1428] i) modulating growth conditions of an organism in such a manner, that the expression or activity of the gene encoding the protein of the invention or the protein itself is enhanced for example microorganisms or plants can be grown for example under a higher temperature regime leading to an enhanced expression of heat shock proteins, which can lead an enhanced fine chemical production; and/or
[1429] j) selecting of organisms with especially high activity of the proteins of the invention from natural or from mutagenized resources and breeding them into the target organisms, eg the elite crops; and/or
[1430] k) directing a protein encoded by the nucleic acid molecule of the invention or of the polypeptide of the present invention having herein-mentioned arginine, glutamate, glutamine and/or proline increasing activity, e.g. of a polypeptide having the activity of a protein as indicated in table II, application no. 5, columns 5 and 7 or its homologs activity, to the plastids by the addition of a plastidial targeting sequence; and/or
[1431] l) generating the expression of a protein encoded by the nucleic acid molecule of the invention or of the polypeptide of the present invention having herein-mentioned arginine, glutamate, glutamine and/or proline increasing activity, e.g. of a polypeptide having the activity of a protein as indicated in table II, application no. 5, columns 5 and 7 or its homologs activity in plastids by the stable or transient transformation advantageously stable transformation of organelles preferably plastids with an inventive nucleic acid sequence preferably in form of an expression cassette containing said sequence leading to the plastidial expression of the nucleic acids or polypeptides of the invention; and/or
[1432] m) generating the expression of a protein encoded by the nucleic acid molecule of the invention or of the polypeptide of the present invention having herein-mentioned arginine, glutamate, glutamine and/or proline increasing activity, e.g. of a polypeptide having the activity of a protein as indicated in table II, application no. 5, columns 5 and 7 or its homologs activity in plastids by integration of a nucleic acid of the invention into the plastidal genome under control of preferable a plastidial promoter.

[1433] Preferably, said mRNA is the nucleic acid molecule of the present invention and/or the protein conferring the increased expression of a protein encoded by the nucleic acid molecule of the present invention alone or link to a transit nucleic acid sequence or transit peptide encoding nucleic acid sequence or the polypeptide having the herein mentioned activity, e.g. conferring the increase of the fine chemical after increasing the expression or activity of the encoded polypeptide preferably in organelles such as plastids or having the activity of a polypeptide having an activity as the protein as shown in table II, application no. 5, column 3 or its homologs. Preferably the increase of the fine chemical takes place in plastids.

[1434] for the disclosure of the paragraphs [0069.0.0.4] to [0079.0.0.4] see paragraphs [0069.0.0.0] to [0079.0.0.0] above.

[1435] The activation of an endogenous polypeptide having above-mentioned activity, e.g. having the activity of a protein as shown in table II, application no. 5, column 3 or of the polypeptide of the invention, e.g. conferring the increase of the fine chemical after increase of expression or activity in the cytsol and/or in an organelle like a plastid, preferentially in the plastid, can also be increased by introducing a synthetic transcription factor, which binds close to the coding region of the gene encoding the protein as shown in table II, application no. 5, column 3 and activates its transcription. A chimeric zinc finger protein can be constructed, which comprises a specific DNA-binding domain and an activation domain as e.g. the VP16 domain of Herpes Simplex virus. The specific binding domain can bind to the regulatory region of the gene encoding the protein as shown in table II, application no. 5, column 3. The expression of the chimeric transcription factor in a organism, in particular in a plant, leads to a specific expression of the protein as shown in table II, application no. 5, column 3, see e.g. in WO01/52620, Oriz, Proc. Natl. Acad. Sci. USA, 2002, Vol. 99, 13290 or Guan, Proc. Natl. Acad. Sci. USA, 2002, Vol. 99, 13296.

[1436] for the disclosure of the paragraphs [0081.0.0.4] to [0084.0.0.4] see paragraphs [0081.0.0.0] to [0084.0.0.0] above.

[1437] Owing to the introduction of a gene or a plurality of genes conferring the expression of the nucleic acid molecule of the invention or the polypeptide of the invention, for example the nucleic acid construct mentioned below, or encoding the protein as shown in table II, application no. 5, column 3 into an organism alone or in combination with other genes, it is possible not only to increase the biosynthetic flux towards the end product, but also to increase, modify or create de novo an advantageous, preferably novel metabolites composition in the organism, e.g. an advantageous amino acid composition comprising a higher content of (from a viewpoint of nutritional physiology limited) amino acids, like methionine, lysine or threonine alone or in combination in free or bound form.

[1438] for the disclosure of this paragraph see paragraph [0086.0.0.0] above.

[1439] By influencing the metabolism thus, it is possible to produce, in the process according to the invention, further advantageous compounds. Examples of such compounds are, in addition to arginine, glutamate, glutamine and/or proline for example compounds like amino acids such as methionine, threonine or lysine or other desirable compounds.

[1440] Accordingly, in one embodiment, the process according to the invention relates to a process, which comprises:
[1441] a) providing a non-human organism, preferably a microorganism, a non-human animal, a plant or animal cell, a plant or animal tissue or a plant, more preferably a microorganism, a plant or a plant tissue;
[1442] b) increasing the activity of a protein as shown in table II, application no. 5, column 3 or of a polypeptide being encoded by the nucleic acid molecule of the present invention and described below, e.g. conferring an increase of the fine chemical in the organism, preferably in the microorganism, the non-human animal, the plant or animal cell, the plant or animal tissue or the plant, more preferably a microorganism, a plant or a plant tissue, in the cytsol or in the plastids, preferentially in the plastids,
[1443] c) growing the organism, preferably the microorganism, the non-human animal, the plant or animal cell, the plant or animal tissue or the plant under conditions which permit the production of the fine chemical in the organism, preferably the microorganism, the plant cell, the plant tissue or the plant; and
[1444] d) if desired, recovering, optionally isolating, the free and/or bound the fine chemical and, optionally further free and/or bound amino acids synthesized by the organism, the microorganism, the non-human animal, the plant or animal cell, the plant or animal tissue or the plant.

[1445] The organism, in particular the microorganism, non-human animal, the plant or animal cell, the plant or animal tissue or the plant is advantageously grown in such a way that it is not only possible to recover, if desired isolate the free or bound the fine chemical or the free and bound the fine chemical but as option it is also possible to produce, recover and, if desired isolate, other free or/and bound amino acids, in particular arginine, glutamate, glutamine and/or proline.

[1446] for the disclosure of the paragraphs [0090.0.0.4] to [0097.0.0.4] see paragraphs [0090.0.0.0] to [0097.0.0.0] above.

[1447] With regard to the nucleic acid sequence as depicted a nucleic acid construct which contains a nucleic acid sequence mentioned herein or an organism (=transgenic organism) which is transformed with said nucleic acid sequence or said nucleic acid construct, “transgene” means all those constructs which have been brought about by genetic manipulation methods, preferably in which either
[1448] a) the nucleic acid sequence as shown in table I, application no. 5, columns 5 and 7 or a derivative thereof, or
[1449] b) a genetic regulatory element, for example a promoter, which is functionally linked to the nucleic acid sequence as shown table I, application no. 5, columns 5 and 7 or a derivative thereof, or
[1450] c) (a) and (b)
   is/are not present in its/their natural genetic environment or has/have been modified by means of genetic manipulation methods, it being possible for the modification to be, by way of example, a substitution, addition, deletion, inversion or insertion of one or more nucleotide. “Natural genetic environment” means the natural chromosomal locus in the organism of origin or the presence in a genomic library. In the case of a genomic library, the natural, genetic environment of the nucleic acid sequence is preferably at least partially still preserved. The environment flanks the nucleic acid sequence at least on one side and has a sequence length of at least 50 bp, preferably at least 500 bp, particularly preferably at least 1000 bp, very particularly preferably at least 5000 bp.

[1451] The use of the nucleic acid sequence according to the invention or of the nucleic acid construct according to the invention for the generation of transgenic plants is therefore also subject matter of the invention. As mentioned above the inventive nucleic acid sequence consists advantageously of the nucleic acid sequences as depicted in the sequence protocol and disclosed in table I, application no. 5, columns 5 and 7 joined to a nucleic acid sequence encoding a transit peptide, or a targeting nucleic acid sequence which directs the nucleic acid sequences disclosed in table I, application no. 5, columns 5 and 7 to the organelle preferentially the plastids. Alternatively the inventive nucleic acids sequences consist advantageously of the nucleic acid sequences as depicted in the sequence protocol and disclosed in table I, application no. 5, columns 5 and 7 joined preferably to a nucleic acids sequence mediating the stable integration of nucleic acids into the plastidial genome and optionally sequences mediating the transcription of the sequence in the plastidial compartment. A transient expression is in principal also desirable and possible.

[1452] for the disclosure of this paragraph see paragraph [0100.0.0.0] above.

[1453] In an advantageous embodiment of the invention, the organism takes the form of a plant whose amino acid content is modified advantageously owing to the nucleic acid molecule of the present invention expressed. This is important for plant breeders since, for example, the nutritional value of plants for monogastric animals is limited by a few essential amino acids such as lysine, threonine or methionine. After the activity of the protein as shown in table II, application no. 5, column 3 has been increased or generated in the cytsol or plastids, preferentially in the plastids, or after the expression of nucleic acid molecule or polypeptide according to the invention has been generated or increased, the transgenic plant generated thus is grown on or in a nutrient medium or else in the soil and subsequently harvested.

[1454] for the disclosure of the paragraphs [0102.0.0.4] to [0110.0.0.4] see paragraphs [0102.0.0.0] to [0110.0.0.0] above.

[1455] In a preferred embodiment, the fine chemical (arginine, glutamate, glutamine and/or proline) is produced in accordance with the invention and, if desired, is isolated. The production of further amino acids such as lysine, methionine, threonine, tryptophane etc. and of amino acid mixtures by the process according to the invention is advantageous.

[1456] for the disclosure of the paragraphs [0112.0.0.4] to [0115.0.0.4] see paragraphs [0112.0.0.0] to [0115.0.0.0] above.

[1457] In a preferred embodiment, the present invention relates to a process for the production of the fine chemical comprising or generating in an organism or a part thereof, preferably in a cell compartment such as a plastid or mitochondria, the expression of at least one nucleic acid molecule comprising a nucleic acid molecule selected from the group consisting of:
[1458] a) nucleic acid molecule encoding, preferably at least the mature form, of the polypeptide shown in table II, application no. 5, columns 5 and 7 or a fragment thereof, which confers an increase in the amount of the fine chemical in an organism or a part thereof;
[1459] b) nucleic acid molecule comprising, preferably at least the mature form, of the nucleic acid molecule shown in table I, application no. 5, columns 5 and 7;
[1460] c) nucleic acid molecule whose sequence can be deduced from a polypeptide sequence encoded by a nucleic acid molecule of (a) or (b) as result of the degeneracy of the genetic code and conferring an increase in the amount of the fine chemical in an organism or a part thereof;
[1461] d) nucleic acid molecule encoding a polypeptide which has at least 50% identity with the amino acid sequence of the polypeptide encoded by the nucleic acid molecule of (a) to (c) and conferring an increase in the amount of the fine chemical in an organism or a part thereof;
[1462] e) nucleic acid molecule which hybridizes with a nucleic acid molecule of (a) to (c) under stringent hybridisation conditions and conferring an increase in the amount of the fine chemical in an organism or a part thereof;
[1463] f) nucleic acid molecule encoding a polypeptide, the polypeptide being derived by substituting, deleting and/or adding one or more amino acids of the amino acid sequence of the polypeptide encoded by the nucleic acid molecules (a) to (d), preferably to (a) to (c) and conferring an increase in the amount of the fine chemical in an organism or a part thereof;
[1464] g) nucleic acid molecule encoding a fragment or an epitope of a polypeptide which is encoded by one of the nucleic acid molecules of (a) to (e), preferably to (a) to (c) and conferring an increase in the amount of the fine chemical in an organism or a part thereof;
[1465] h) nucleic acid molecule comprising a nucleic acid molecule which is obtained by amplifying nucleic acid molecules from a cDNA library or a genomic library using the primers shown in table Ill, application no. 5, column 7 and conferring an increase in the amount of the fine chemical in an organism or a part thereof;
[1466] i) nucleic acid molecule encoding a polypeptide which is isolated, e.g. from an expression library, with the aid of monoclonal antibodies against a polypeptide encoded by one of the nucleic acid molecules of (a) to (h), preferably to (a) to (c), and conferring an increase in the amount of the fine chemical in an organism or a part thereof;
[1467] j) nucleic acid molecule which encodes a polypeptide comprising the consensus sequence shown in table IV, application no. 5, column 7 and conferring an increase in the amount of the fine chemical in an organism or a part thereof;
[1468] k) nucleic acid molecule comprising one or more of the nucleic acid molecule encoding the amino acid sequence of a polypeptide encoding a domain of the polypeptide shown in table II, application no. 5, columns 5 and 7 and conferring an increase in the amount of the fine chemical in an organism or a part thereof; and
[1469] l) nucleic acid molecule which is obtainable by screening a suitable library under stringent conditions with a probe comprising one of the sequences of the nucleic acid molecule of (a) to (k), preferably to (a) to (c), or with a fragment of at least 15 nt, preferably 20 nt, 30 nt, 50 nt, 100 nt, 200 nt or 500 nt of the nucleic acid molecule characterized in (a) to (k), preferably to (a) to (c), and conferring an increase in the amount of the fine chemical in an organism or a part thereof;
   or which comprises a sequence which is complementary thereto.

[1470] In one embodiment, the nucleic acid molecule used in the process of the invention distinguishes over the sequence indicated in table I A, application no. 5, columns 5 and 7 by one or more nucleotides. In one embodiment, the nucleic acid molecule used in the process of the invention does not consist of the sequence indicated in table I A, application no. 5, columns 5 and 7. In one embodiment, the nucleic acid molecule used in the process of the invention is less than 100%, 99.999%, 99.99%, 99.9% or 99% identical to a sequence indicated in table I A, application no. 5, columns 5 and 7. In another embodiment, the nucleic acid molecule does not encode a polypeptide of a sequence indicated in table II A, application no. 5, columns 5 and 7.

[1471] In one embodiment, the nucleic acid molecule used in the process of the invention distinguishes over the sequence indicated in table I B, application no. 5, columns 5 and 7, by one or more nucleotides. In one embodiment, the nucleic acid molecule used in the process of the invention does not consist of the sequence indicated in table I B, application no. 5, columns 5 and 7. In one embodiment, the nucleic acid molecule used in the process of the invention is less than 100%, 99.999%, 99.99%, 99.9% or 99% identical to a sequence indicated in table I B, application no. 5, columns 5 and 7. In another embodiment, the nucleic acid molecule does not encode a polypeptide of a sequence indicated in table II B, application no. 5, columns 5 and 7.

[1472] In one embodiment, the nucleic acid molecule used in the process distinguishes over the sequence shown in table I, application no. 5, columns 5 and 7 by one or more nucleotides or does not consist of the sequence shown in table I, application no. 5, columns 5 and 7. In one embodiment, the nucleic acid molecule of the present invention is less than 100%, 99.999%, 99.99%, 99.9% or 99% identical to the sequence shown in table I, application no. 5, columns 5 and 7. In another embodiment, the nucleic acid molecule does not encode a polypeptide of the sequence shown in table II, application no. 5, columns 5 and 7.

[1473] for the disclosure of the paragraphs [0118.0.0.4] to [00120.0.0.4] see paragraphs [0118.0.0.0] to [0120.0.0.0] above.

[1474] Nucleic acid molecules with the sequence shown in table I, application no. 5, columns 5 and 7, nucleic acid molecules which are derived from the amino acid sequences shown in table II, application no. 5, columns 5 and 7 or from polypeptides comprising the consensus sequence shown in table IV, application no. 5, column 7, or their derivatives or homologues encoding polypeptides with the enzymatic or biological activity of a protein as shown in table II, application no. 5, column 3 or conferring the fine chemical increase after increasing its expression or activity are advantageously increased in the process according to the invention by expression either in the cytsol or in an organelle such as a plastid or mitochondria or both, preferably in plastids.

[1475] for the disclosure of this paragraph see paragraph [0122.0.0.0] above.

[1476] Nucleic acid molecules, which are advantageous for the process according to the invention and which encode polypeptides with the activity of a protein as shown in table II, application no. 5, column 3 can be determined from generally accessible databases.

[1477] for the disclosure of this paragraph see paragraph [0124.0.0.0] above.

[1478] The nucleic acid molecules used in the process according to the invention take the form of isolated nucleic acid sequences, which encode polypeptides with the activity of the proteins as shown in table II, application no. 5, column 3 and conferring the fine chemical increase by expression either in the cytsol or in an organelle such as a plastid or mitochondria or both, preferably in plastids.

[1479] for the disclosure of the paragraphs [0126.0.0.4] to [0133.0.0.4] see paragraphs [0126.0.0.0] to [0133.0.0.0] above.

[1480] However, it is also possible to use artificial sequences, which differ in one or more bases from the nucleic acid sequences found in organisms, or in one or more amino acid molecules from polypeptide sequences found in organisms, in particular from the polypeptide sequences shown in table II, application no. 5, columns 5 and 7 or the functional homologues thereof as described herein, preferably conferring above-mentioned activity, i.e. conferring the fine chemical increase after increasing its activity, e.g. after increasing the activity of a protein as shown in table II, column 3 by for example expression either in the cytsol or in an organelle such as a plastid or mitochondria or both, preferably in plastids.

[1481] for the disclosure of the paragraphs [0135.0.0.4] to [0140.0.0.4] see paragraphs [0135.0.0.0] to [0140.0.0.0] above.

[1482] Synthetic oligonucleotide primers for the amplification, e.g. as shown in table III, application no. 5, column 7, by means of polymerase chain reaction can be generated on the basis of a sequence shown herein, for example the sequence shown in table I, application no. 5, columns 5 and 7 or the sequences derived from table II, application no. 5, columns 5 and 7.

[1483] Moreover, it is possible to identify conserved regions from various organisms by carrying out protein sequence alignments with the polypeptide used in the process of the invention, in particular with sequences of the polypeptide of the invention, from which conserved regions, and in turn, degenerate primers can be derived. Conserved regions are those, which show a very little variation in the amino acid in one particular position of several homologs from different origin. The consensus sequence shown in table IV, application no. 5, column 7 is derived from said alignments.

[1484] Degenerated primers can then be utilized by PCR for the amplification of fragments of novel proteins having above-mentioned activity, e.g. conferring the increase of the fine chemical after increasing the expression or activity or having the activity of a protein as shown in table II, application no. 5, column 3 or further functional homologs of the polypeptide of the invention from other organisms.

[1485] for the disclosure of the paragraphs [0144.0.0.4] to [0151.0.0.4] see paragraphs [0144.0.0.0] to [0151.0.0.0] above.

[1486] Polypeptides having above-mentioned activity, i.e. conferring the fine chemical increase, derived from other organisms, can be encoded by other DNA sequences which hybridize to the sequences shown in table I, application no. 5, columns 5 and 7, preferably shown in table I B, application no. 5, columns 5 and 7 under relaxed hybridization conditions and which code on expression for peptides having the methionine increasing activity.

[1487] for the disclosure of the paragraphs [0153.0.0.4] to [0159.0.0.4] see paragraphs [0153.0.0.0] to [0159.0.0.0] above.

[1488] Further, the nucleic acid molecule of the invention comprises a nucleic acid molecule, which is a complement of one of the nucleotide sequences of above mentioned nucleic acid molecules or a portion thereof. A nucleic acid molecule which is complementary to one of the nucleotide sequences shown in table I, application no. 5, columns 5 and 7, preferably shown in table I B, application no. 5, columns 5 and 7 is one which is sufficiently complementary to one of the nucleotide sequences shown in table I, application no. 5, columns 5 and 7, preferably shown in table I B, application no. 5, columns 5 and 7 such that it can hybridize to one of the nucleotide sequences shown in table I, application no. 5, columns 5 and 7, preferably shown in table I B, application no. 5, columns 5 and 7, thereby forming a stable duplex. Preferably, the hybridisation is performed under stringent hybridization conditions. However, a complement of one of the herein disclosed sequences is preferably a sequence complement thereto according to the base pairing of nucleic acid molecules well known to the skilled person. For example, the bases A and G undergo base pairing with the bases T and U or C, resp. and visa versa. Modifications of the bases can influence the base-pairing partner.

[1489] The nucleic acid molecule of the invention comprises a nucleotide sequence which is at least about 30%, 35%, 40% or 45%, preferably at least about 50%, 55%, 60% or 65%, more preferably at least about 70%, 80%, or 90%, and even more preferably at least about 95%, 97%, 98%, 99% or more homologous to a nucleotide sequence shown in table I, application no. 5, columns 5 and 7, preferably shown in table I B, application no. 5, columns 5 and 7, or a portion thereof and preferably has above mentioned activity, in particular having a fine chemical increasing activity after increasing the activity or an activity of a gene product as shown in table II, application no. 5, column 3 by for example expression either in the cytsol or in an organelle such as a plastid or mitochondria or both, preferably in plastids.

[1490] The nucleic acid molecule of the invention comprises a nucleotide sequence which hybridizes, preferably hybridizes under stringent conditions as defined herein, to one of the nucleotide sequences shown in table I, application no. 5, columns 5 and 7, preferably shown in table I B, application no. 5, columns 5 and 7, or a portion thereof and encodes a protein having above-mentioned activity, e.g. conferring of a arginine, glutamate, glutamine and/or proline increase by for example expression either in the cytsol or in an organelle such as a plastid or mitochondria or both, preferably in plastids, and optionally, the activity of a protein as shown in table II, application no. 5, column 3.

[1491] Moreover, the nucleic acid molecule of the invention can comprise only a portion of the coding region of one of the sequences shown in table I, application no. 5, columns 5 and 7, preferably shown in table I B, application no. 5, columns 5 and 7, for example a fragment which can be used as a probe or primer or a fragment encoding a biologically active portion of the polypeptide of the present invention or of a polypeptide used in the process of the present invention, i.e. having above-mentioned activity, e.g. conferring an increase of the fine chemical if its activity is increased by for example expression either in the cytsol or in an organelle such as a plastid or mitochondria or both, preferably in plastids. The nucleotide sequences determined from the cloning of the present protein-according-to-the-invention-encoding gene allows for the generation of probes and primers designed for use in identifying and/or cloning its homologues in other cell types and organisms. The probe/primer typically comprises substantially purified oligonucleotide. The oligonucleotide typically comprises a region of nucleotide sequence that hybridizes under stringent conditions to at least about 12, 15 preferably about 20 or 25, more preferably about 40, 50 or 75 consecutive nucleotides of a sense strand of one of the sequences set forth, e.g., in table I, application no. 5, columns 5 and 7, preferably shown in table I B, application no. 5, columns 5 and 7, an anti-sense sequence of one of the sequences, e.g., set forth in table I, application no. 5, columns 5 and 7, preferably shown in table I B, application no. 5, columns 5 and 7, or naturally occurring mutants thereof. Primers based on a nucleotide of invention can be used in PCR reactions to clone homologues of the polypeptide of the invention or of the polypeptide used in the process of the invention, e.g. as the primers described in the examples of the present invention, e.g. as shown in the examples. A PCR with the primers shown in table III, application no. 5, column 7 will result in a fragment of the gene product as shown in table II, column 3.

[1492] for the disclosure of this paragraph see paragraph [0164.0.0.0] above.

[1493] The nucleic acid molecule of the invention encodes a polypeptide or portion thereof which includes an amino acid sequence which is sufficiently homologous to the amino acid sequence shown in table II, application no. 5, columns 5 and 7 such that the protein or portion thereof maintains the ability to participate in the fine chemical production, in particular a arginine, glutamate, glutamine and/or proline increasing the activity as mentioned above or as described in the examples in plants or microorganisms is comprised.

[1494] As used herein, the language “sufficiently homologous” refers to proteins or portions thereof which have amino acid sequences which include a minimum number of identical or equivalent amino acid residues (e.g., an amino acid residue which has a similar side chain as an amino acid residue in one of the sequences of the polypeptide of the present invention) to an amino acid sequence shown in table II, application no. 5, columns 5 and 7 such that the protein or portion thereof is able to participate in the increase of the fine chemical production. For examples having the activity of a protein as shown in table II, column 3 and as described herein.

[1495] In one embodiment, the nucleic acid molecule of the present invention comprises a nucleic acid that encodes a portion of the protein of the present invention. The protein is at least about 30%, 35%, 40%, 45% or 50%, preferably at least about 55%, 60%, 65% or 70%, and more preferably at least about 75%, 80%, 85%, 90%, 91%, 92%, 93% or 94% and most preferably at least about 95%, 97%, 98%, 99% or more homologous to an entire amino acid sequence of table II, application no. 5, columns 5 and 7 and having above-mentioned activity, e.g. conferring preferably the increase of the fine chemical by for example expression either in the cytsol or in an organelle such as a plastid or mitochondria or both, preferably in plastids.

[1496] for the disclosure of the paragraphs [0168.0.0.4] and [0169.0.0.4] see paragraphs [0168.0.0.0] to [0169.0.0.0] above.

[1497] The invention further relates to nucleic acid molecules that differ from one of the nucleotide sequences shown in table I, application no. 5, columns 5 and 7 (and portions thereof) due to degeneracy of the genetic code and thus encode a polypeptide of the present invention, in particular a polypeptide having above mentioned activity, e.g. conferring an increase in the fine chemical in a organism, e.g. as that polypeptides depicted by the sequence shown in table II, application no. 5, columns 5 and 7 or the functional homologues. Advantageously, the nucleic acid molecule of the invention comprises, or in an other embodiment has, a nucleotide sequence encoding a protein comprising, or in an other embodiment having, an amino acid sequence shown in table II, application no. 5, columns 5 and 7 or the functional homologues. In a still further embodiment, the nucleic acid molecule of the invention encodes a full length protein which is substantially homologous to an amino acid sequence shown in table II, application no. 5, columns 5 and 7 or the functional homologues. However, in a preferred embodiment, the nucleic acid molecule of the present invention does not consist of the sequence shown in table I, application no. 5, columns 5 and 7, preferably as indicated in table I A, application no. 5, columns 5 and 7. Preferably the nucleic acid molecule of the invention is a functional homologue or identical to a nucleic acid molecule indicated in table I B, application no. 5, columns 5 and 7.

[1498] for the disclosure of the paragraphs [0171.0.0.4] to [0173.0.0.4] see paragraphs [0171.0.0.0] to [0173.0.0.0] above.

[1499] Accordingly, in another embodiment, a nucleic acid molecule of the invention is at least 15, 20, 25 or 30 nucleotides in length. Preferably, it hybridizes under stringent conditions to a nucleic acid molecule comprising a nucleotide sequence of the nucleic acid molecule of the present invention or used in the process of the present invention, e.g. comprising the sequence shown in table I, application no. 5, columns 5 and 7. The nucleic acid molecule is preferably at least 20, 30, 50, 100, 250 or more nucleotides in length.

[1500] for the disclosure of this paragraph see paragraph [0175.0.0.0] above.

[1501] Preferably, nucleic acid molecule of the invention that hybridizes under stringent conditions to a sequence shown in table I, application no. 5, columns 5 and 7 corresponds to a naturally-occurring nucleic acid molecule of the invention. As used herein, a “naturally-occurring” nucleic acid molecule refers to an RNA or DNA molecule having a nucleotide sequence that occurs in nature (e.g., encodes a natural protein). Preferably, the nucleic acid molecule encodes a natural protein having abovementioned activity, e.g. conferring the fine chemical increase after increasing the expression or activity thereof or the activity of a protein of the invention or used in the process of the invention by for example expression the nucleic acid sequence of the gene product in the cytsol and/or in an organelle such as a plastid or mitochondria, preferably in plastids.

[1502] for the disclosure of this paragraph see paragraph [0177.0.0.0] above.

[1503] For example, nucleotide substitutions leading to amino acid substitutions at “non-essential” amino acid residues can be made in a sequence of the nucleic acid molecule of the invention or used in the process of the invention, e.g. shown in table I, application no. 5, columns 5 and 7.

[1504] for the disclosure of the paragraphs [0179.0.0.4] and [0180.0.0.4] see paragraphs [0179.0.0.0] and [0180.0.0.0] above.

[1505] Accordingly, the invention relates to nucleic acid molecules encoding a polypeptide having above-mentioned activity, e.g. conferring an increase in the fine chemical in an organisms or parts thereof by for example expression either in the cytsol or in an organelle such as a plastid or mitochondria or both, preferably in plastids that contain changes in amino acid residues that are not essential for said activity. Such polypeptides differ in amino acid sequence from a sequence contained in the sequences shown in table II, application no. 5, columns 5 and 7, preferably shown in table II A, application no. 5, columns 5 and 7 yet retain said activity described herein. The nucleic acid molecule can comprise a nucleotide sequence encoding a polypeptide, wherein the polypeptide comprises an amino acid sequence at least about 50% identical to an amino acid sequence shown in table II, application no. 5, columns 5 and 7, preferably shown in table II A, application no. 5, columns 5 and 7 and is capable of participation in the increase of production of the fine chemical after increasing its activity, e.g. its expression by for example expression either in the cytsol or in an organelle such as a plastid or mitochondria or both, preferably in plastids. Preferably, the protein encoded by the nucleic acid molecule is at least about 60% identical to the sequence shown in table II, application no. 5, columns 5 and 7, preferably shown in table II A, application no. 5, columns 5 and 7, more preferably at least about 70% identical to one of the sequences shown in table II, application no. 5, columns 5 and 7, preferably shown in table II A, application no. 5, columns 5 and 7, even more preferably at least about 80%, 90%, 95% homologous to the sequence shown in table II, application no. 5, columns 5 and 7, preferably shown in table II A, application no. 5, columns 5 and 7, and most preferably at least about 96%, 97%, 98%, or 99% identical to the sequence shown in table II, application no. 5, columns 5 and 7, preferably shown in table II A, application no. 5, columns 5 and 7.

[1506] for the disclosure of the paragraphs [0182.0.0.4] to [0188.0.0.4] see paragraphs [0182.0.0.0] to [0188.0.0.0] above.

[1507] Functional equivalents derived from one of the polypeptides as shown in table II, application no. 5, columns 5 and 7, preferably shown in table II B, application no. 5, columns 5 and 7 resp., according to the invention by substitution, insertion or deletion have at least 30%, 35%, 40%, 45% or 50%, preferably at least 55%, 60%, 65% or 70% by preference at least 80%, especially preferably at least 85% or 90%, 91%, 92%, 93% or 94%, very especially preferably at least 95%, 97%, 98% or 99% homology with one of the polypeptides as shown in table II, application no. 5, columns 5 and 7, preferably shown in table II B, application no. 5, columns 5 and 7 resp., according to the invention and are distinguished by essentially the same properties as the polypeptide as shown in table II, application no. 5, columns 5 and 7, preferably shown in table II B, application no. 5, columns 5 and 7.

[1508] Functional equivalents derived from the nucleic acid sequence as shown in table I, application no. 5, columns 5 and 7, preferably shown in table I B, application no. 5, columns 5 and 7 resp., according to the invention by substitution, insertion or deletion have at least 30%, 35%, 40%, 45% or 50%, preferably at least 55%, 60%, 65% or 70% by preference at least 80%, especially preferably at least 85% or 90%, 91%, 92%, 93% or 94%, very especially preferably at least 95%, 97%, 98% or 99% homology with one of the polypeptides as shown in table II, application no. 5, columns 5 and 7, preferably shown in table II B, application no. 5, columns 5 and 7 resp., according to the invention and encode polypeptides having essentially the same properties as the polypeptide as shown in table II, application no. 5, columns 5 and 7, preferably shown in table II B, application no. 5, columns 5 and 7.

[1509] for the disclosure of this paragraph see paragraph [0191.0.0.0] above.

[1510] A nucleic acid molecule encoding an homologous to a protein sequence of table II, application no. 5, columns 5 and 7, preferably shown in table II B, application no. 5, columns 5 and 7 resp., can be created by introducing one or more nucleotide substitutions, additions or deletions into a nucleotide sequence of the nucleic acid molecule of the present invention, in particular of table I, application no. 5, columns 5 and 7, preferably shown in table I B, application no. 5, columns 5 and 7 resp., such that one or more amino acid substitutions, additions or deletions are introduced into the encoded protein. Mutations can be introduced into the encoding sequences of table I, application no. 5, columns 5 and 7, preferably shown in table I B, application no. 5, columns 5 and 7 resp., by standard techniques, such as site-directed mutagenesis and PCR-mediated mutagenesis.

[1511] for the disclosure of the paragraphs [0193.0.0.4] to [0196.0.0.4] see paragraphs [0193.0.0.0] to [0196.0.0.0] above.

[1512] Homologues of the nucleic acid sequences used, with the sequence shown in table I, application no. 5, columns 5 and 7, preferably shown in table I B, application no. 5, columns 5 and 7, comprise also allelic variants with at least approximately 30%, 35%, 40% or 45% homology, by preference at least approximately 50%, 60% or 70%, more preferably at least approximately 90%, 91%, 92%, 93%, 94% or 95% and even more preferably at least approximately 96%, 97%, 98%, 99% or more homology with one of the nucleotide sequences shown or the abovementioned derived nucleic acid sequences or their homologues, derivatives or analogues or parts of these. Allelic variants encompass in particular functional variants which can be obtained by deletion, insertion or substitution of nucleotides from the sequences shown, preferably from table I, application no. 5, columns 5 and 7, preferably shown in table I B, application no. 5, columns 5 and 7, or from the derived nucleic acid sequences, the intention being, however, that the enzyme activity or the biological activity of the resulting proteins synthesized is advantageously retained or increased.

[1513] In one embodiment of the present invention, the nucleic acid molecule of the invention or used in the process of the invention comprises the sequences shown in any of the table I, application no. 5, columns 5 and 7, preferably shown in table I B, application no. 5, columns 5 and 7. It is preferred that the nucleic acid molecule comprises as little as possible other nucleotides not shown in any one of table I, application no. 5, columns 5 and 7, preferably shown in table I B, application no. 5, columns 5 and 7. In one embodiment, the nucleic acid molecule comprises less than 500, 400, 300, 200, 100, 90, 80, 70, 60, 50 or 40 further nucleotides. In a further embodiment, the nucleic acid molecule comprises less than 30, 20 or 10 further nucleotides. In one embodiment, the nucleic acid molecule use in the process of the invention is identical to the sequences shown in table I, application no. 5, columns 5 and 7, preferably shown in table I B, application no. 5, columns 5 and 7.

[1514] Also preferred is that the nucleic acid molecule used in the process of the invention encodes a polypeptide comprising the sequence shown in table II, application no. 5, columns 5 and 7, preferably shown in table II B, application no. 5, columns 5 and 7. In one embodiment, the nucleic acid molecule encodes less than 150, 130, 100, 80, 60, 50, 40 or 30 further amino acids. In a further embodiment, the encoded polypeptide comprises less than 20, 15, 10, 9, 8, 7, 6 or 5 further amino acids. In one embodiment used in the inventive process, the encoded polypeptide is identical to the sequences shown in table II, application no. 5, columns 5 and 7, preferably shown in table II B, application no. 5, columns 5 and 7.

[1515] In one embodiment, the nucleic acid molecule of the invention or used in the process encodes a polypeptide comprising the sequence shown in table II, application no. 5, columns 5 and 7, preferably shown in table II B, application no. 5, columns 5 and 7 comprises less than 100 further nucleotides. In a further embodiment, said nucleic acid molecule comprises less than 30 further nucleotides. In one embodiment, the nucleic acid molecule used in the process is identical to a coding sequence of the sequences shown in table I, application no. 5, columns 5 and 7, preferably shown in table II B, application no. 5, columns 5 and 7.

[1516] Polypeptides (=proteins), which still have the essential biological or enzymatic activity of the polypeptide of the present invention conferring an increase of the fine chemical i.e. whose activity is essentially not reduced, are polypeptides with at least 10% or 20%, by preference 30% or 40%, especially preferably 50% or 60%, very especially preferably 80% or 90 or more of the wild type biological activity or enzyme activity, advantageously, the activity is essentially not reduced in comparison with the activity of a polypeptide shown in table II, application no. 5, columns 5 and 7 expressed under identical conditions.

[1517] Homologues of table I, application no. 5, columns 5 and 7 or of the derived sequences of table II, application no. 5, columns 5 and 7 also mean truncated sequences, cDNA, single-stranded DNA or RNA of the coding and noncoding DNA sequence. Homologues of said sequences are also understood as meaning derivatives, which comprise noncoding regions such as, for example, UTRs, terminators, enhancers or promoter variants. The promoters upstream of the nucleotide sequences stated can be modified by one or more nucleotide substitution(s), insertion(s) and/or deletion(s) without, however, interfering with the functionality or activity either of the promoters, the open reading frame (=ORF) or with the 3′-regulatory region such as terminators or other 3′ regulatory regions, which are far away from the ORF. It is furthermore possible that the activity of the promoters is increased by modification of their sequence, or that they are replaced completely by more active promoters, even promoters from heterologous organisms. Appropriate promoters are known to the person skilled in the art and are mentioned herein below.

[1518] for the disclosure of the paragraphs [0203.0.0.4] to [0215.0.0.4] see paragraphs [0203.0.0.0] to [0215.0.0.0] above.

[1519] Accordingly, in one embodiment, the invention relates to a nucleic acid molecule, which comprises a nucleic acid molecule selected from the group consisting of:
[1520] a) nucleic acid molecule encoding, preferably at least the mature form, of the polypeptide shown in table II, application no. 5, columns 5 and 7, preferably in Table II B, application no. 5, columns 5 and 7; or a fragment thereof conferring an increase in the amount of the fine chemical in an organism or a part thereof
[1521] b) nucleic acid molecule comprising, preferably at least the mature form, of the nucleic acid molecule shown in table I, application no. 5, columns 5 and 7, preferably in Table I B, application no. 5, columns 5 and 7 or a fragment thereof conferring an increase in the amount of the fine chemical in an organism or a part thereof;
[1522] c) nucleic acid molecule whose sequence can be deduced from a polypeptide sequence encoded by a nucleic acid molecule of (a) or (b) as result of the degeneracy of the genetic code and conferring an increase in the amount of the fine chemical in an organism or a part thereof;
[1523] d) nucleic acid molecule encoding a polypeptide whose sequence has at least 50% identity with the amino acid sequence of the polypeptide encoded by the nucleic acid molecule of (a) to (c) and conferring an increase in the amount of the fine chemical in an organism or a part thereof;
[1524] e) nucleic acid molecule which hybridizes with a nucleic acid molecule of (a) to (c) under stringent hybridisation conditions and conferring an increase in the amount of the fine chemical in an organism or a part thereof;
[1525] f) nucleic acid molecule encoding a polypeptide, the polypeptide being derived by substituting, deleting and/or adding one or more amino acids of the amino acid sequence of the polypeptide encoded by the nucleic acid molecules (a) to (d), preferably to (a) to (c), and conferring an increase in the amount of the fine chemical in an organism or a part thereof;
[1526] g) nucleic acid molecule encoding a fragment or an epitope of a polypeptide which is encoded by one of the nucleic acid molecules of (a) to (e), preferably to (a) to (c) and conferring an increase in the amount of the fine chemical in an organism or a part thereof;
[1527] h) nucleic acid molecule comprising a nucleic acid molecule which is obtained by amplifying a cDNA library or a genomic library using the primers in table III, application no. 5, column 7 and conferring an increase in the amount of the fine chemical in an organism or a part thereof;
[1528] i) nucleic acid molecule encoding a polypeptide which is isolated, e.g. from a expression library, with the aid of monoclonal antibodies against a polypeptide encoded by one of the nucleic acid molecules of (a) to (g), preferably to (a) to (c) and conferring an increase in the amount of the fine chemical in an organism or a part thereof;
[1529] j) nucleic acid molecule which encodes a polypeptide comprising the consensus sequence shown in table IV, application no. 5, columns 7 and conferring an increase in the amount of the fine chemical in an organism or a part thereof;
[1530] k) nucleic acid molecule encoding the amino acid sequence of a polypeptide encoding a domain of the polypeptide shown in table II, application no. 5, columns 5 and 7 and conferring an increase in the amount of the fine chemical in an organism or a part thereof; and
[1531] l) nucleic acid molecule which is obtainable by screening a suitable nucleic acid library under stringent hybridization conditions with a probe comprising one of the sequences of the nucleic acid molecule of (a) to (k) or with a fragment of at least 15 nt, preferably 20 nt, 30 nt, 50 nt, 100 nt, 200 nt or 500 nt of the nucleic acid molecule characterized in (a) to (h) or of the nucleic acid molecule shown in table I, application no. 5, columns 5 and 7 or a nucleic acid molecule encoding, preferably at least the mature form of, the polypeptide shown in table II, application no. 5, columns 5 and 7, and conferring an increase in the amount of the fine chemical in an organism or a part thereof; or which encompasses a sequence which is complementary thereto;
   whereby, preferably, the nucleic acid molecule according to (a) to (l) distinguishes over the sequence depicted in table I A and/or I B, application no. 5, columns 5 and 7 by one or more nucleotides. In one embodiment, the nucleic acid molecule of the invention does not consist of the sequence shown in table I A and/or I B, application no. 5, columns 5 and 7. In another embodiment, the nucleic acid molecule of the present invention is at least 30% identical and less than 100%, 99.999%, 99.99%, 99.9% or 99% identical to the sequence shown in table I A and/or I B, application no. 5, columns 5 and 7. In a further embodiment the nucleic acid molecule does not encode the polypeptide sequence shown in table II A and/or II B, application no. 5, columns 5 and 7. Accordingly, in one embodiment, the nucleic acid molecule of the present invention encodes in one embodiment a polypeptide which differs at least in one or more amino acids from the polypeptide shown in table II A and/or II B, application no. 5, columns 5 and 7 does not encode a protein of the sequence shown in table II A and/or II B, application no. 5, columns 5 and 7. Accordingly, in one embodiment, the protein encoded by a sequence of a nucleic acid according to (a) to (l) does not consist of the sequence shown in table IA and/or I B, application no. 5, columns 5 and 7. In a further embodiment, the protein of the present invention is at least 30% identical to protein sequence depicted in table II A and/or II B, application no. 5, columns 5 and 7 and less than 100%, preferably less than 99.999%, 99.99% or 99.9%, more preferably less than 99%, 985, 97%, 96% or 95% identical to the sequence shown in table II A and/or II B, application no. 5, columns 5 and 7.

[1532] for the disclosure of the paragraphs [0217.0.0.4] to [0226.0.0.4] see paragraphs [0217.0.0.0] to [0226.0.0.0] above.

[1533] In general, vector systems preferably also comprise further cis-regulatory regions such as promoters and terminators and/or selection markers by means of which suitably transformed organisms can be identified. While vir genes and T-DNA sequences are located on the same vector in the case of cointegrated vector systems, binary systems are based on at least two vectors, one of which bears vir genes, but no T-DNA, while a second one bears T-DNA, but no vir gene. Owing to this fact, the last-mentioned vectors are relatively small, easy to manipulate and capable of replication in E. coli and in Agrobacterium. These binary vectors include vectors from the series pBIB-HYG, pPZP, pBecks, pGreen. Those which are preferably used in accordance with the invention are Bin19, pBI101, pBinAR, pGPTV and pCAMBIA. An overview of binary vectors and their use is given by Hellens et al, Trends in Plant Science (2000) 5, 446-451. The vectors are preferably modified in such a manner, that they already contain the nucleic acid coding for the transitpeptide and that the nucleic acids of the invention, preferentially the nucleic acid sequences encoding the polypeptides shown in table II, application no. 5, columns 5 and 7 can be cloned 3′ prime to the transitpeptide encoding sequence, leading to a functional preprotein, which is directed to the plastids and which means that the mature protein fulfills its biological activity.

[1534] for the disclosure of the paragraphs [0228.0.0.4] to [0239.0.0.4] see paragraphs [0228.0.0.0] to [0239.0.0.0] above.

[1535] In addition to the sequence mentioned in table I, application no. 5, columns 5 and 7 or its derivatives, it is advantageous additionally to express and/or mutate further genes in the organisms. Especially advantageously, additionally at least one further gene of the amino acid biosynthetic pathway such as for L-lysine, L-threonine and/or L-methionine is expressed in the organisms such as plants or microorganisms. It is also possible that the regulation of the natural genes has been modified advantageously so that the gene and/or its gene product is no longer subject to the regulatory mechanisms which exist in the organisms. This leads to an increased synthesis of the amino acids desired since, for example, feedback regulations no longer exist to the same extent or not at all. In addition it might be advantageously to combine the nucleic acids sequences of the invention containing the sequences shown in table I, application no. 5, columns 5 and 7 with genes which generally support or enhances to growth or yield of the target organism, for example genes which lead to faster growth rate of microorganisms or genes which produces stress-, pathogen, or herbicide resistant plants.

[1536] for the disclosure of the paragraphs [0241.0.0.4] to [0264.0.0.4] see paragraphs [0241.0.0.0] to [0264.0.0.0] above.

[1537] Other preferred sequences for use in operable linkage in gene expression constructs are targeting sequences, which are required for targeting the gene product into specific cell compartments (for a review, see Kermode, Crit. Rev. Plant Sci. 15, 4 (1996) 285-423 and references cited therein), for example into the vacuole, the nucleus, all types of plastids, such as amyloplasts, chloroplasts, chromoplasts, the extracellular space, the mitochondria, the endoplasmic reticulum, elaioplasts, peroxisomes, glycosomes, and other compartments of cells or extracellular preferred are sequences, which are involved in targeting to plastids as mentioned above. Sequences, which must be mentioned in this context are, in particular, the signal-peptide- or transit-peptide-encoding sequences which are known per se. For example, plastid-transit-peptide-encoding sequences enable the targeting of the expression product into the plastids of a plant cell. Targeting sequences are also known for eukaryotic and to a lower extent for prokaryotic organisms and can advantageously be operable linked with the nucleic acid molecule of the present invention as shown in table I, application no. 5, columns 5 and 7 and described herein to achieve an expression in one of said compartments or extracellular.

[1538] for the disclosure of the paragraphs [0266.0.0.4] to [0287.0.0.4] see paragraphs [0266.0.0.0] to [0287.0.0.0] above.

[1539] Accordingly, one embodiment of the invention relates to a vector where the nucleic acid molecule according to the invention is linked operably to regulatory sequences which permit the expression in a prokaryotic or eukaryotic or in a prokaryotic and eukaryotic host. A further preferred embodiment of the invention relates to a vector in which a nucleic acid sequence encoding one of the polypeptides shown in table II, application no. 5, columns 5 and 7 or their homologs is functionally linked to a plastidial targeting sequence. A further preferred embodiment of the invention relates to a vector in which a nucleic acid sequence encoding one of the polypeptides shown in table II, application no. 5, columns 5 and 7 or their homologs is functionally linked to a regulatory sequences which permit the expression in plastids.

[1540] for the disclosure of the paragraphs [0289.0.0.4] to [0296.0.0.4] see paragraphs [0289.0.0.0] to [0296.0.0.0] above.

[1541] Moreover, native polypeptide conferring the increase of the fine chemical in an organism or part thereof can be isolated from cells (e.g., endothelial cells), for example using the antibody of the present invention as described below, in particular, an anti-b0342, anti-b0855, anti-b1062, anti-b1184, anti-b1223, anti-b1556, anti-b1758, anti-b2040, anti-b3443, anti-b4072, anti-b4074, anti-b1264, anti-b1852, anti-b1907, anti-b2025, anti-b2818, anti-b2926, anti-b2965, anti-b4139, anti-YGR262C, anti-YHR202W, anti-YMR262W, anti-YPL162C, anti-YAL038W, anti-YBR001C, anti-YER024W, anti-YGR256W, anti-YGR289C, anti-YHR037W, anti-YKR043C, anti-YLR027C and/or anti-YNL241C protein antibody or an antibody against polypeptides as shown in table II, application no. 5, columns 5 and 7, which can be produced by standard techniques utilizing the polypeptide of the present invention or fragment thereof, i.e., the polypeptide of this invention. Preferred are monoclonal antibodies.

[1542] for the disclosure of this paragraph see paragraph [0298.0.0.0] above.

[1543] In one embodiment, the present invention relates to a polypeptide having the sequence shown in table II, application no. 5, columns 5 and 7 or as coded by the nucleic acid molecule shown in table I, application no. 5, columns 5 and 7 or functional homologues thereof.

[1544] In one advantageous embodiment, in the method of the present invention the activity of a polypeptide is increased comprising or consisting of the consensus sequence shown in table IV, application no. 5, columns 7 and in one another embodiment, the present invention relates to a polypeptide comprising or consisting of the consensus sequence shown in table IV, application no. 5, columns 7 whereby 20 or less, preferably 15 or 10, preferably 9, 8, 7, or 6, more preferred 5 or 4, even more preferred 3, even more preferred 2, even more preferred 1, most preferred 0 of the amino acids positions indicated can be replaced by any amino acid.

[1545] for the disclosure of the paragraphs [0301.0.0.4] to [0304.0.0.4] see paragraphs [0301.0.0.0] to [0304.0.0.0] above.

[1546] In one advantageous embodiment, the method of the present invention comprises the increasing of a polypeptide comprising or consisting of plant or microorganism specific consensus sequences.

In one embodiment, said polypeptide of the invention distinguishes over the sequence shown in table II A and/or II B, application no. 5, columns 5 and 7 by one or more amino acids. In one embodiment, polypeptide distinguishes form the sequence shown in table II, application no. 5, columns 5 and 7 by more than 5, 6, 7, 8 or 9 amino acids, preferably by more than 10, 15, 20, 25 or 30 amino acids, even more preferred are more than 40, 50, or 60 amino acids and, preferably, the sequence of the polypeptide of the invention distinguishes from the sequence shown in table II A and/or II B, application no. 5, columns 5 and 7 by not more than 80% or 70% of the amino acids, preferably not more than 60% or 50%, more preferred not more than 40% or 30%, even more preferred not more than 20% or 10%. In an other embodiment, said polypeptide of the invention does not consist of the sequence shown in table II A and/or II B, application no. 5, columns 5 and 7.

[1547] for the disclosure of this paragraph see paragraph [0306.0.0.0] above.

[1548] In one embodiment, the invention relates to polypeptide conferring an increase in the fine chemical in an organism or part being encoded by the nucleic acid molecule of the invention or used in the process of the invention and having a sequence which distinguishes from the sequence as shown in table II A and/or II B, application no. 5, columns 5 and 7 by one or more amino acids. In another embodiment, said polypeptide of the invention does not consist of the sequence shown in table II A and/or II B, application no. 5, columns 5 and 7. In a further embodiment, said polypeptide of the present invention is less than 100%, 99.999%, 99.99%, 99.9% or 99% identical. In one embodiment, said polypeptide does not consist of the sequence encoded by the nucleic acid molecules shown in table I A and/or I B, application no. 5, columns 5 and 7.

[1549] In one embodiment, the present invention relates to a polypeptide having the activity of the protein as shown in table II A and/or II B, application no. 5, column 3, which distinguishes over the sequence depicted in table II A and/or II B, application no. 5, columns 5 and 7 by one or more amino acids, preferably by more than 5, 6, 7, 8 or 9 amino acids, preferably by more than 10, 15, 20, 25 or 30 amino acids, even more preferred are more than 40, 50, or 60 amino acids but even more preferred by less than 70% of the amino acids, more preferred by less than 50%, even more preferred my less than 30% or 25%, more preferred are 20% or 15%, even more preferred are less than 10%. In a further preferred embodiment the polypeptide of the invention takes the form of a preprotein consisting of a plastidial transitpeptide joint to a polypeptide having the activity of the protein as shown in table II A and/or II B, column 3, from which the transitpeptide is preferably cleaved off upon transport of the preprotein into the organelle for example into the plastid or mitochondria.

[1550] for the disclosure of the paragraphs [0309.0.0.4] to [0311.0.0.4] see paragraphs [0309.0.0.0] to [0311.0.0.0] above.

[1551] A polypeptide of the invention can participate in the process of the present invention. The polypeptide or a portion thereof comprises preferably an amino acid sequence, which is sufficiently homologous to an amino acid sequence shown in table II A and/or II B, application no. 5, columns 5 and 7.

[1552] Further, the polypeptide can have an amino acid sequence which is encoded by a nucleotide sequence which hybridizes, preferably hybridizes under stringent conditions as described above, to a nucleotide sequence of the nucleic acid molecule of the present invention. Accordingly, the polypeptide has an amino acid sequence which is encoded by a nucleotide sequence that is at least about 35%, 40%, 45%, 50%, 55%, 60%, 65% or 70%, preferably at least about 75%, 80%, 85% or 90, and more preferably at least about 91%, 92%, 93%, 94% or 95%, and even more preferably at least about 96%, 97%, 98%, 99% or more homologous to one of the amino acid sequences as shown in table II A and/or II B, application no. 5, columns 5 and 7. The preferred polypeptide of the present invention preferably possesses at least one of the activities according to the invention and described herein. A preferred polypeptide of the present invention includes an amino acid sequence encoded by a nucleotide sequence which hybridizes, preferably hybridizes under stringent conditions, to a nucleotide sequence of table I A and/or I B, application no. 5, columns 5 and 7 or which is homologous thereto, as defined above.

[1553] Accordingly the polypeptide of the present invention can vary from the sequences shown in table II A and/or II B, application no. 5, columns 5 and 7 in amino acid sequence due to natural variation or mutagenesis, as described in detail herein. Accordingly, the polypeptide comprise an amino acid sequence which is at least about 35%, 40%, 45%, 50%, 55%, 60%, 65% or 70%, preferably at least about 75%, 80%, 85% or 90, and more preferably at least about 91%, 92%, 93%, 94% or 95%, and most preferably at least about 96%, 97%, 98%, 99% or more homologous to an entire amino acid sequence shown in table II A and/or II B, application no. 5, columns 5 and 7.

[1554] for the disclosure of this paragraph see paragraph [0315.0.0.0] above.

[1555] Biologically active portions of an polypeptide of the present invention include peptides comprising amino acid sequences derived from the amino acid sequence of the polypeptide of the present invention or used in the process of the present invention, e.g., the amino acid sequence shown in table II, application no. 5, columns 5 and 7 or the amino acid sequence of a protein homologous thereto, which include fewer amino acids than a full length polypeptide of the present invention or used in the process of the present invention or the full length protein which is homologous to an polypeptide of the present invention or used in the process of the present invention depicted herein, and exhibit at least one activity of polypeptide of the present invention or used in the process of the present invention.

[1556] for the disclosure of this paragraph see paragraph [0317.0.0.0] above.

[1557] Manipulation of the nucleic acid molecule of the invention may result in the production of a protein having differences from the wild-type protein as shown in table II, application no. 5, column 3. Differences shall mean at least one amino acid different from the sequences as shown in table II, application no. 5, column 3, preferably at least 2, 3, 4, 5, 6, 7, 8, 9 or 10 amino acids, more preferably at least 15, 20, 25, 30, 35, 40, 45 or 50 amino acids different from the sequences as shown in table II, application no. 5, column 3. These proteins may be improved in efficiency or activity, may be present in greater numbers in the cell than is usual, or may be decreased in efficiency or activity in relation to the wild type protein.

[1558] Any mutagenesis strategies for the polypeptide of the present invention or the polypeptide used in the process of the present invention to result in increasing said activity are not meant to be limiting; variations on these strategies will be readily apparent to one skilled in the art. Using such strategies, and incorporating the mechanisms disclosed herein, the nucleic acid molecule and polypeptide of the invention may be utilized to generate plants or parts thereof, expressing wildtype proteins or mutated proteins of the proteins as shown in table II, application no. 5, column 3. The nucleic acid molecules and polypeptide molecules of the invention are expressed such that the yield, production, and/or efficiency of production of a desired compound is improved.

[1559] for the disclosure of the paragraphs [0320.0.0.4] to [0322.0.0.4] see paragraphs [0320.0.0.0] to [0322.0.0.0] above.

[1560] In one embodiment, a protein (=polypeptide) as shown in table II, application no. 5, column 3 refers to a polypeptide having an amino acid sequence corresponding to the polypeptide of the invention or used in the process of the invention, whereas a “non-inventive protein or polypeptide” or “other polypeptide” refers to a polypeptide having an amino acid sequence corresponding to a protein which is not substantially homologous to a polypeptide of the invention, preferably which is not substantially homologous to a polypeptide or protein as shown in table II, application no. 5, column 3, e.g., a protein which does not confer the activity described herein and which is derived from the same or a different organism.

[1561] for the disclosure of the paragraphs [0324.0.0.4] to [0329.0.0.4] see paragraphs [0324.0.0.0] to [0329.0.0.0] above.

[1562] In an especially preferred embodiment, the polypeptide according to the invention furthermore also does not have the sequences of those proteins which are encoded by the sequences shown in table II, application no. 5, columns 5 and 7.

[1563] for the disclosure of the paragraphs [0331.0.0.4] to [0346.0.0.4] see paragraphs [0331.0.0.0] to [0346.0.0.0] above.

[1564] Accordingly the present invention relates to any cell transgenic for any nucleic acid characterized as part of the invention, e.g. conferring the increase of the fine chemical in a cell or an organism or a part thereof, e.g. the nucleic acid molecule of the invention, the nucleic acid construct of the invention, the antisense molecule of the invention, the vector of the invention or a nucleic acid molecule encoding the polypeptide of the invention, e.g. encoding a polypeptide having an activity as the protein as shown in table II, application no. 5, column 3. Due to the above mentioned activity the fine chemical content in a cell or an organism is increased. For example, due to modulation or manipulation, the cellular activity is increased preferably in organelles such as plastids or mitochondria, e.g. due to an increased expression or specific activity or specific targeting of the subject matters of the invention in a cell or an organism or a part thereof especially in organelles such as plastids or mitochondria. Transgenic for a polypeptide having a protein or activity means herein that due to modulation or manipulation of the genome, the activity of protein as shown in table II, application no. 5, column 3 or a protein as shown in table II, application no. 5, column 3-like activity is increased in the cell or organism or part thereof especially in organelles such as plastids or mitochondria. Examples are described above in context with the process of the invention.

[1565] for the disclosure of this paragraph see paragraph [0348.0.0.0] above.

[1566] A naturally occurring expression cassette—for example the naturally occurring combination of the promoter of the gene encoding a protein as shown in table II, application no. 5, column 3 with the corresponding encoding gene—becomes a transgenic expression cassette when it is modified by non-natural, synthetic “artificial” methods such as, for example, mutagenization. Such methods have been described (U.S. Pat. No. 5,565,350; WO 00/15815; also see above).

[1567] for the disclosure of the paragraphs [0350.0.0.4] to [0369.0.0.4] see paragraphs [0350.0.0.0] to [0369.0.0.0] above.

[1568] The fermentation broths obtained in this way, containing in particular L-arginine, L-glutamate, L-glutamine and/or L-proline preferably L-arginine, L-glutamine and/or L-proline, normally have a dry matter content of from 7.5 to 25% by weight. The fermentation broth can be processed further. Depending on requirements, the biomass can be removed entirely or partly by separation methods, such as, for example, centrifugation, filtration, decantation or a combination of these methods, from the fermentation broth or left completely in it. The fermentation broth can then be thickened or concentrated by known methods, such as, for example, with the aid of a rotary evaporator, thin-film evaporator, falling film evaporator, by reverse osmosis or by nanofiltration. This concentrated fermentation broth can then be worked up by freeze-drying, spray drying, spray granulation or by other processes.

[1569] for the disclosure of the paragraphs [0371.0.0.4] to [0376.0.0.4], [0376.1.0.4] and [0377.0.0.4] see paragraphs [0371.0.0.4] to [0376.0.0.0], [0376.1.0.0] and [0377.0.0.0] above.

[1570] In one embodiment, the present invention relates to a method for the identification of a gene product conferring an increase in the fine chemical production in a cell, comprising the following steps:
[1571] (a) contacting, e.g. hybridising, the nucleic acid molecules of a sample, e.g. cells, tissues, plants or microorganisms or a nucleic acid library, which can contain a candidate gene encoding a gene product conferring an increase in the fine chemical after expression, with the nucleic acid molecule of the present invention;
[1572] (b) identifying the nucleic acid molecules, which hybridize under relaxed stringent conditions with the nucleic acid molecule of the present invention in particular to the nucleic acid molecule sequence shown in table I, application no. 5, columns 5 and 7, preferably in table I B, application no. 5, columns 5 and 7, and, optionally, isolating the full length cDNA clone or complete genomic clone;
[1573] (c) introducing the candidate nucleic acid molecules in host cells, preferably in a plant cell or a microorganism, appropriate for producing the fine chemical;
[1574] (d) expressing the identified nucleic acid molecules in the host cells;
[1575] (e) assaying the fine chemical level in the host cells; and
[1576] (f) identifying the nucleic acid molecule and its gene product which expression confers an increase in the fine chemical level in the host cell after expression compared to the wild type.

[1577] for the disclosure of the paragraphs [0379.0.0.4] to [0383.0.0.4] see paragraphs [0379.0.0.0] to [0383.0.0.0] above.

[1578] The screen for a gene product or an agonist conferring an increase in the fine chemical production can be performed by growth of an organism for example a microorganism in the presence of growth reducing amounts of an inhibitor of the synthesis of the fine chemical. Better growth, eg higher dividing rate or high dry mass in comparison to the control under such conditions would identify a gene or gene product or an agonist conferring an increase in fine chemical production.

One can think to screen for increased fine chemical production by for example resistance to drugs blocking fine chemical synthesis and looking whether this effect is dependent on the proteins as shown in table II, application no. 5, column 3, eg comparing near identical organisms with low and high activity of the proteins as shown in table II, application no. 5, column 3.

[1579] for the disclosure of the paragraphs [0385.0.0.4] to [0435.0.0.4] see paragraphs [0385.0.0.0] to [0435.0.0.0] above.

[1580] Arginine, Glutamate, Glutamine and/or Proline Production in Chlamydomonas reinhardtii

[1581] The amino acid production can be analysed as mentioned above. The proteins and nucleic acids can be analysed as mentioned below.

[1582] for the disclosure of the paragraphs [0437.0.0.4] to [0497.0.0.4] see paragraphs [0437.0.0.0] to [0497.0.0.0] above.
[1583] The results of the different plant analyses can be seen from the table, which follows:

TABLE VI

| ORF | Metabolite | Method | Min | Max |
|---|---|---|---|---|
| b1264 | Glutamine | LC | 1.27 | 1.75 |
| b1852 | Proline | GC + LC | 1.45 | 1.62 |
| b1907 | Arginine | LC | 1.46 | 2.13 |
| b2025 | Proline | GC | 1.38 | 4.53 |
| b2818 | Arginine | LC | 4.33 | 14.36 |
| b2926 | Proline | GC | 1.34 | 2.30 |
| b2965 | Proline | GC + LC | 1.60 | 9.55 |
| b4139 | Glutamine | LC | 1.38 | 2.00 |
| YAL038W | Proline | GC | 1.41 | 2.01 |
| YAL038W | Glutamate | GC | 1.58 | 2.20 |
| YBR001C | Proline | GC + LC | 1.33 | 1.66 |
| YER024W | Arginine | LC | 1.24 | 1.39 |
| YGR256W | Proline | LC | 1.54 | 2.22 |
| YGR289C | Proline | GC | 1.37 | 1.82 |
| YHR037W | Proline | GC + LC | 1.71 | 2.17 |
| YKR043C | Proline | GC + LC | 1.34 | 4.30 |
| YLR027C | Proline | LC | 1.52 | 2.82 |
| YNL241C | Arginine | LC | 1.48 | 3.74 |
| b0342 | Glutamine | LC | 1.29 | 1.81 |
| b0342 | Glutamate | LC | 1.33 | 1.85 |
| b0855 | Arginine | LC | 1.46 | 2.13 |
| b1062 | Proline | GC | 1.43 | 2.45 |
| b1184 | Proline | GC | 1.34 | 2.30 |
| b1223 | Proline | GC | 1.44 | 6.01 |
| b1556 | Proline | GC | 1.45 | 3.29 |
| b1758 | Glutamate | LC | 1.36 | 1.38 |
| b2040 | Glutamine | LC | 1.32 | 1.49 |
| b3443 | Glutamine | LC | 1.30 | 1.36 |
| b4072 | Glutamine | LC | 1.33 | 1.45 |
| b4074 | Proline | LC | 1.45 | 1.62 |
| b4139 | Arginine | LC | 2.06 | 11.38 |
| YGR262C | Glutamate | LC | 1.33 | 1.48 |
| YHR202W | Glutamate | LC | 1.33 | 1.34 |
| YMR262W | Glutamate | LC | 1.35 | 2.28 |
| YPL162C | Glutamine | LC | 1.28 | 1.59 |

[1584] for the disclosure of the paragraphs [0499.0.0.4] and [0500.0.0.4] see paragraphs [0499.0.0.0] and [0500.0.0.0] above.

### Example 15a

### Engineering Ryegrass Plants by Over-Expressing YAL038W from Saccharomyces cerevisiae or Homologs of YAL038W from Other Organisms

[1585] for the disclosure of the paragraphs [0502.0.0.4] to [0508.0.0.4] see paragraphs [0502.0.0.0] to [0508.0.0.0] above.

### Example 15b

### Engineering Soybean Plants by Over-Expressing YAL038W from Saccharomyces cerevisiae or Homologs of YAL038W from Other Organisms

[1586] for the disclosure of the paragraphs [0510.0.0.4] to [0513.0.0.4] see paragraphs [0510.0.0.0] to [0513.0.0.0] above.

### Example 15c

### Engineering Corn Plants by Over-Expressing YAL038W from Saccharomyces cerevisiae or Homologs of YAL038W from Other Organisms

[1587] for the disclosure of the paragraphs [0515.0.0.4] to [0540.0.0.4] see paragraphs [0515.0.0.0] to [0540.0.0.0] above.

### Example 15d

### Engineering Wheat Plants by Over-Expressing YAL038W from Saccharomyces cerevisiae or Homologs of YAL038W from Other Organisms

[1588] for the disclosure of the paragraphs [0542.0.0.4] to [0544.0.0.4] see paragraphs [0542.0.0.0] to [0544.0.0.0] above.

### Example 15e

### Engineering Rapeseed/Canola Plants by Over-Expressing YAL038W from Saccharomyces cerevisiae or Homologs of YAL038W from Other Organisms

[1589] for the disclosure of the paragraphs [0546.0.0.4] to [0549.0.0.4] see paragraphs [0544.0.0.0] to [0549.0.0.0] above.

### Example 15f

### Engineering Alfalfa Plants by Over-Expressing YAL038W from Saccharomyces cerevisiae or Homologs of YAL038W from Other Organisms

[1590] for the disclosure of the paragraphs [0551.0.0.4] to [0554.0.0.4] see paragraphs [0551.0.0.0] to [0554.0.0.0] above.

### Example 16

### Metabolite Profiling Info from Zea mays

[1591] Zea mays plants were engineered as described in Example 15c.
Metabolic results were either obtained from regenerated primary transformants (T0) or from the following progeny generation (T1) in comparison to appropriate control plants. The results are shown in table VII as minimal (MIN) or maximal changes (MAX) in the respective fine chemical (column “metabolite”) in genetically modified corn plants expressing the sequence listed in column 1 (ORF): The results of the different Zea mays plants analysed can be seen from table VII, which follows:

TABLE VII

| ORF_NAME | Metabolite | Min | Max |
|---|---|---|---|
| b2818 | Arginine | 5.47 | 12.62 |
| b4139 | Arginine | 2.32 | 2.46 |
| b4139 | Glutamine | 1.37 | 4.47 |
| YAL038W | Proline | 1.51 | 4.48 |
| YKR043C | Proline | 2.03 | 2.61 |
| YLR027C | Proline | 1.44 | 2.41 |

Table VII shows the increase in arginine or proline in genetically modified corn plants expressing the Escherichia coli sequences b2818 or b4139 or the Saccharomyces cerevisiae nucleic acid sequence YAL038W, YKR043C or YLR027C.
In one embodiment, in case the activity of the Saccharomyces cerevisiae protein YAL038W or its homologs, e.g. a “pyruvate kinase”, is increased in corn plants, preferably, an increase of the fine chemical proline between 51% and 338% or more is conferred.
In one embodiment, in case the activity of the Saccharomyces cerevisiae protein YKR043C or its homologs, e.g. a “phosphoglycerate mutase like protein”, is increased in corn plants, preferably, an increase of the fine chemical proline between 103% and 161% or more is conferred.
In one embodiment, in case the activity of the Saccharomyces cerevisiae protein YLR027C or its homologs, e.g. a “aspartate aminotransferase”, is increased in corn plants, preferably, an increase of the fine chemical proline between 103% and 161% or more is conferred.
In one embodiment, in case the activity of the Escherichia coli protein b2818 or its homologs, e.g. a “N-acetylglutamate synthase”, is increased in corn plants, preferably, an increase of the fine chemical proline between 447% and 1162% or more is conferred.
In one embodiment, in case the activity of the Escherichia coli protein b4139 or its homologs, e.g. a “aspartate ammonia-lyase (aspartase)”, is increased in corn plants, preferably, an increase of the fine chemical arginine between 132% and 146% or more is conferred.
In one embodiment, in case the activity of the Escherichia coli protein b4139 or its homologs, e.g. a “aspartate ammonia-lyase (aspartase)”, is increased in corn plants, preferably, an increase of the fine chemical glutamine between 37% and 347% or more is conferred.
In one embodiment, in case the activity of the Escherichia coli protein b4139 or its homologs, e.g. a “aspartate ammonia-lyase (aspartase)”, is increased in corn plants, preferably, an increase of the fine chemical glutamine between 37% and 347% or more and of the fine chemical arginine between 132% and 146% or more is conferred.

[1592] for the disclosure of this paragraph see [0554.2.0.0] above.

[1593] for the disclosure of this paragraph see [0555.0.0.0] above.

[1594] for the disclosure of this paragraph see [0001.0.0.0].

[1595] Fatty acids are the building blocks of triglycerides, lipids, oils and fats. Some of the fatty acids such as linoleic or linolenic acid are “essential” because the human body is not able to synthesize them but needs them, so humans must ingest them through the diet. The human body can synthesize other fatty acids therefore they are not labeled as “essential”. Nevertheless very often the amount of production of for example fatty acids such as eicosapentaenoic acid (=EPA, C_{20.5}^{Δ5,8,11,14,17}) or docosahexaenoic acid (=DHA, C_{22:6}^{Δ4,7,10,13,16,19}) in the body is not sufficient for an optimal body function. Polyunsaturated fatty acids (=PUFA) that mean fatty acids, which have more than 1 double bond in the carbon chain are divided into families depending on where their end-most double bond is located. There are two main subtypes of fatty acids: the omega-3 and omega-6 fatty acids. The Omega-3's are those with their end-most double bond 3 carbons from their methyl end. The Omega-6's are those with their endmost double bond 6 carbons from their methyl end. Linoleic acid (an omega-6) and alphα-linolenic acid (an omega-3) are the only true “essential” fatty acids. Both are used inside the body as starting material to synthesize others such as EPA or DHA.

[1596] Fatty acids and triglycerides have numerous applications in the food and feed industry, in cosmetics and in the drug sector. Depending on whether they are free saturated or unsaturated fatty acids or triglycerides with an increased content of saturated or unsaturated fatty acids, they are suitable for the most varied applications; thus, for example, polyunsaturated fatty acids (=PUFAs) are added to infant formula to increase its nutritional value. The various fatty acids and triglycerides are mainly obtained from microorganisms such as fungi or from oil-producing plants including phytoplankton and algae, such as soybean, oilseed rape, sunflower and others, where they are usually obtained in the form of their triacylglycerides.

[1597] Principally microorganisms such as Mortierella or oil producing plants such as soybean, rapeseed or sunflower or algae such as Crytocodinium or Phaeodactylum are a common source for oils containing PUFAs, where they are usually obtained in the form of their triacyl glycerides. Alternatively, they are obtained advantageously from animals, such as fish. The free fatty acids are prepared advantageously by hydrolysis with a strong base such as potassium or sodium hydroxide. Higher poly unsaturated fatty acids such as DHA, EPA, ARA, Dihomo-γ-linoleic acid (C_{20:3}^{Δ8,11,14}) or Docosapentaenoic acid (=DPA, C_{22:5}^{Δ7,10,13,16,19}) are not produced by oil producing plants such as soybean, rapeseed, safflower or sunflower. A natural sources for said fatty acids are fish for example herring, salmon, sardine, redfish, eel, carp, trout, halibut, mackerel, pike-perch or tuna or algae.

[1598] Whether oils with unsaturated or with saturated fatty acids are preferred depends on the intended purpose; thus, for example, lipids with unsaturated fatty acids, specifically polyunsaturated fatty acids, are preferred in human nutrition since they have a positive effect on the cholesterol level in the blood and thus on the possibility of heart disease. They are used in a variety of dietetic foodstuffs or medicaments. In addition PUFAs are commonly used in food, feed and in the cosmetic industry. Poly unsaturated ω-3- and/or ω-6-fatty acids are an important part of animal feed and human food. Because of the common composition of human food polyunsaturated ω-3-fatty acids, which are an essential component of fish oil, should be added to the food to increase the nutritional value of the food; thus, for example, polyunsaturated fatty acids such as DHA or EPA are added as mentioned above to infant formula to increase its nutritional value. The true essential fatty acids linoleic and linolenic fatty acid have a lot of positive effects in the human body such as a positive effect on healthy heart, arteries and skin. They bring for example relieve from eczema, diabetic neuropathy or PMS and cyclical breast pain.

[1599] Poly unsaturated ω-3- and ω-6-fatty acids are for example precursor of a family of paracrine hormones called eicosanoids such as prostaglandins which are products of the metabolism of Dihomo-γ-linoleic acid, ARA or EPA. Eicosanoids are involved in the regulation of lipolysis, the initiation of inflammatory responses, the regulation of blood circulation and pressure and other central functions of the body. Eicosanoids comprise prostaglandins, leukotrienes, thromboxanes, and prostacyclins. ω-3-fatty acids seem to prevent artherosclerosis and cardiovascular diseases primarily by regulating the levels of different eicosanoids. Other Eicosanoids are the thromboxanes and leukotrienes, which are products of the metabolism of ARA or EPA.

[1600] On account of their positive properties there has been no shortage of attempts in the past to make available genes which participate in the synthesis of fatty acids or triglycerides for the production of oils in various organisms having a modified content of unsaturated fatty acids.

[1601] Methods of recombinant DNA technology have also been used for some years to improve the oil content in microorganisms or plants by amplifying individual fatty acid biosynthesis genes and investigating the effect on fatty acid production. For example in WO 91/13972 a Δ-9-desaturase is described, which is involved in the synthesis of polyunsaturated fatty acids. In WO 93/11245 a Δ-15-desaturase and in WO 94/11516 a Δ-12-desaturase is claimed. Other desaturases are described, for example, in EP-A-0 550 162, WO 94/18337, WO 97/30582, WO 97/21340, WO 95/18222, EP-A-0 794 250, Stukey et al., J. Biol. Chem., 265, 1990: 20144-20149, Wada et al., Nature 347, 1990: 200-203 or Huang et al., Lipids 34, 1999: 649-659. To date, however, the various desaturases have been only inadequately characterized biochemically since the enzymes in the form of membrane-bound proteins are isolable and characterizable only with very great difficulty (McKeon et al., Methods in Enzymol. 71, 1981: 12141-12147, Wang et al., Plant Physiol. Biochem., 26, 1988: 777-792). Generally, membrane-bound desaturases are characterized by introduction into a suitable organism, which is then investigated for enzyme activity by means of analysis of starting materials and products. With regard to the effectiveness of the expression of desaturases and their effect on the formation of polyunsaturated fatty acids it may be noted that through expression of a desaturases and elongases as described to date only low contents of poly-unsaturated fatty acids/lipids have been achieved. Therefore, an alternative and more effective pathway with higher product yield is desirable.

[1602] As described above, the essential fatty acids are necessary for humans and many mammals, for example for livestock. In a study of middle-aged men disclosed by Finnish researchers (International Journal of Cancer, Sep. 1, 2004), high intake of linoleic acid seemed to lower the risk of prostate and other cancers. In another publication the positive influence on stroke is disclosed (Umemura et al., Stroke, 2002, vol. 33, pp. 2086-2093).

[1603] Therefore improving the quality of foodstuffs and animal feeds is an important task of the food-and-feed industry. This is necessary since, for example, as mentioned above certain fatty acids, which occur in plants are limited with regard to the supply of mammals. Especially advantageous for the quality of foodstuffs and animal feeds is as balanced as possible fatty acid profile in the diet since a great excess of omega-3-fatty acids above a specific concentration in the food has no positive effect unless the omega-3-fatty acid content is in balance to the omega-6-fatty acid content of the diet. A further increase in quality is only possible via addition of further fatty acids, which are limiting under these conditions. The targeted addition of the limiting fatty acid in the form of synthetic products must be carried out with extreme caution in order to avoid fatty acid imbalance.

[1604] To ensure a high quality of foods and animal feeds, it is therefore necessary to add a plurality of fatty acids in a balanced manner to suit the organism.

[1605] Accordingly, there is still a great demand for new and more suitable genes which encode proteins which participate in the biosynthesis of fatty acids and make it possible to produce certain fatty acids specifically on an industrial scale without unwanted byproducts forming. In the selection of genes for biosynthesis two characteristics above all are particularly important. On the one hand, there is as ever a need for improved processes for obtaining the highest possible contents of polyunsaturated fatty acids on the other hand as less as possible byproducts should be produced in the production process.

[1606] for the disclosure of this paragraph see [0013.0.0.0] above.

[1607] Accordingly, in a first embodiment, the invention relates to a process for the production of a fine chemical, whereby the fine chemical is linoleic acid or tryglycerides, lipids, oils or fats containing linoleic acid. Accordingly, in the present invention, the term “the fine chemical” as used herein relates to “linoleic acid and/or tryglycerides, lipids, oils and/or fats containing linoleic acid”. Further, the term “the fine chemicals” as used herein also relates to fine chemicals comprising linoleic acid and/or tryglycerides, lipids, oils and/or fats containing linoleic acid.

[1608] In one embodiment, the term “the fine chemical” or “the respective fine chemical” means linoleic acid and/or tryglycerides, lipids, oils and/or fats containing linoleic acid. Throughout the specification the term “the fine chemical” or “the respective fine chemical” means linoleic acid and/or tryglycerides, lipids, oils and/or fats containing linoleic acid, linoleic acid and its salts, ester, thioester or linoleic acid in free form or bound to other compounds such as triglycerides, glycolipids, phospholipids etc. In a preferred embodiment, the term “the fine chemical” means linoleic acid, in free form or its salts or bound to triglycerides. Triglycerides, lipids, oils, fats or lipid mixture thereof shall mean any triglyceride, lipid, oil and/or fat containing any bound or free linoleic acid for example sphingolipids, phosphoglycerides, lipids, glycolipids such as glycosphingolipids, phospholipids such as phosphatidylethanolamine, phosphatidylcholine, phosphatidylserine, phosphatidylglycerol, phosphatidylinositol or diphosphatidylglycerol, or as monoacylglyceride, diacyiglyceride or triacylglyceride or other fatty acid esters such as acetyl-Coenzym A thioester, which contain further saturated or unsaturated fatty acids in the fatty acid molecule.

In one embodiment, the term “the fine chemical” and the term “the respective fine chemical” mean at least one chemical compound with an activity of the abovementioned fine chemical.

[1609] Accordingly, the present invention relates to a process for the production of linoleic acid, which comprises
[1610] (a) increasing or generating the activity of a protein as shown in table II, application no. 6, column 3 encoded by the nucleic acid sequences as shown in table I, application no. 6, column 5, in an organelle of a microorganism or plant, or
[1611] (b) increasing or generating the activity of a protein as shown in table II, application no. 6, column 3 encoded by the nucleic acid sequences as shown in table I, application no. 6, column 5 in the plastid of a microorganism or plant, or in one or more parts thereof; and
[1612] (b) growing the organism under conditions which permit the production of the fine chemical, thus, linoleic acid or fine chemicals comprising linoleic acid, in said organism or in the culture medium surrounding the organism.

[1613] /

[1614] In another embodiment the present invention is related to a process for the production of linoleic acid, which comprises
[1615] (a) increasing or generating the activity of a protein as shown in table II, application no. 6 column 3 encoded by the nucleic acid sequences as shown in table I, application no. 6, column 5, in an organelle of a non-human organism, or
[1616] (b) increasing or generating the activity of a protein as shown in table II, application no. 6, column 3 encoded by the nucleic acid sequences as shown in table I, application no. 6, column 5, which are joined to a nucleic acid sequence encoding a transit peptide in a non-human organism, or in one or more parts thereof; or
[1617] (c) increasing or generating the activity of a protein as shown in table II, application no. 6, column 3 encoded by the nucleic acid sequences as shown in table I, application no. 6, column 5, which are joined to a nucleic acid sequence encoding chloroplast localization sequence, in a non-human organism, or in one or more parts thereof, and
[1618] (d) growing the organism under conditions which permit the production of linoleic acid in said organism.

[1619] In another embodiment, the present invention relates to a process for the production of linoleic acid, which comprises
[1620] (a) increasing or generating the activity of a protein as shown in table II, application no. 6, column 3 encoded by the nucleic acid sequences as shown in table I, application no. 6, column 5, in an organelle of a microorganism or plant through the transformation of the organelle, or
[1621] (b) increasing or generating the activity of a protein as shown in table II, application no. 6, column 3 encoded by the nucleic acid sequences as shown in table I, application no. 6, column 5 in the plastid of a microorganism or plant, or in one or more parts thereof through the transformation of the plastids; and
[1622] (c) growing the organism under conditions which permit the production of the fine chemical, thus, linoleic acid or fine chemicals comprising linoleic acid, in said organism or in the culture medium surrounding the organism.

[1623] Advantageously the activity of the protein as shown in table II, application no. 6, column 3 encoded by the nucleic acid sequences as shown in table I, application no. 6, column 5 is increased or generated in the abovementioned process in the plastid of a microorganism or plant.

[1624] for the disclosure of the paragraphs [0019.0.0.5] to [0024.0.0.4] see paragraphs [0019.0.0.0] and [0024.0.0.0] above.

[1625] Even more preferred nucleic acid sequences are encoding transit peptides as disclosed by von Heijne et al. [Plant Molecular Biology Reporter, Vol. 9 (2), 1991: 104-126], which are hereby incorporated by reference. Table V shows some examples of the transit peptide sequences disclosed by von Heijne et al. According to the disclosure of the invention especially in the examples the skilled worker is able to link other nucleic acid sequences disclosed by von Heijne et al. to the nucleic acid sequences shown in table I, application no. 6, columns 5 and 7. Most preferred nucleic acid sequences encoding transit peptides are derived from the genus Spinacia such as chloroplast 30S ribosomal protein PSrp-1, root acyl carrier protein II, acyl carrier protein, ATP synthase: γ subunit, ATP synthase: δ subunit, cytochrom f, ferredoxin I, ferredoxin NADP oxidoreductase (=FNR), nitrite reductase, phosphoribulokinase, plastocyanin or carbonic anhydrase. The skilled worker will recognize that various other nucleic acid sequences encoding transit peptides can easily isolated from plastid-localized proteins, which are expressed from nuclear genes as precursors and are then targeted to plastids. Such transit peptides encoding sequences can be used for the construction of other expression constructs. The transit peptides advantageously used in the inventive process and which are part of the inventive nucleic acid sequences and proteins are typically 20 to 120 amino acids, preferably 25 to 110, 30 to 100 or 35 to 90 amino acids, more preferably 40 to 85 amino acids and most preferably 45 to 80 amino acids in length and functions post-translationally to direct the protein to the plastid preferably to the chloroplast. The nucleic acid sequences encoding such transit peptides are localized upstream of nucleic acid sequence encoding the mature protein. For the correct molecular joining of the transit peptide encoding nucleic acid and the nucleic acid encoding the protein to be targeted it is sometimes necessary to introduce additional base pairs at the joining position, which forms restriction enzyme recognition sequences useful for the molecular joining of the different nucleic acid molecules. This procedure might lead to very few additional amino acids at the N-terminal of the mature imported protein, which usually and preferably do not interfere with the protein function. In any case, the additional base pairs at the joining position which forms restriction enzyme recognition sequences have to be chosen with care, in order to avoid the formation of stop codons or codons which encode amino acids with a strong influence on protein folding, like e.g. proline. It is preferred that such additional codons encode small n.d. structural flexible amino acids such as glycine or alanine.

[1626] As mentioned above the nucleic acid sequences coding for the proteins as shown in table II, application no. 6, column 3 and its homologs as disclosed in table I, application no. 6, columns 5 and 7 are joined to a nucleic acid sequence encoding a transit peptide, This nucleic acid sequence encoding a transit peptide ensures transport of the protein to the plastid. The nucleic acid sequence of the gene to be expressed and the nucleic acid sequence encoding the transit peptide are operably linked. Therefore the transit peptide is fused in frame to the nucleic acid sequence coding for proteins as shown in table II, application no. 6, column 3 and its homologs as disclosed in table I, application no. 6, columns 5 and 7.

[1627] for the disclosure of the paragraphs [0027.0.0.5] to [0029.0.0.4] see paragraphs [0027.0.0.0] and [0029.0.0.0] above.

[1628] Alternatively, nucleic acid sequences coding for the transit peptides may be chemically synthesized either in part or wholly according to structure of transit peptide sequences disclosed in the prior art. Said natural or chemically synthesized sequences can be directly linked to the sequences encoding the mature protein or via a linker nucleic acid sequence, which may be typically less than 500 base pairs, preferably less than 450, 400, 350, 300, 250 or 200 base pairs, more preferably less than 150, 100, 90, 80, 70, 60, 50, 40 or 30 base pairs and most preferably less than 25, 20, 15, 12, 9, 6 or 3 base pairs in length and are in frame to the coding sequence. Furthermore favorable nucleic acid sequences encoding transit peptides may comprise sequences derived from more than one biological and/or chemical source and may include a nucleic acid sequence derived from the amino-terminal region of the mature protein, which in its native state is linked to the transit peptide. In a preferred embodiment of the invention said amino-terminal region of the mature protein is typically less than 150 amino acids, preferably less than 140, 130, 120, 110, 100 or 90 amino acids, more preferably less than 80, 70, 60, 50, 40, 35, 30, 25 or 20 amino acids and most preferably less than 19, 18, 17, 16, 15, 14, 13, 12, 11 or 10 amino acids in length. But even shorter or longer stretches are also possible. In addition target sequences, which facilitate the transport of proteins to other cell compartments such as the vacuole, endoplasmic reticulum, Golgi complex, glyoxysomes, peroxisomes or mitochondria may be also part of the inventive nucleic acid sequence. The proteins translated from said inventive nucleic acid sequences are a kind of fusion proteins that means the nucleic acid sequences encoding the transit peptide for example the ones shown in table V, preferably the last one of the table are joint to the nucleic acid sequences shown in table I, application no. 6, columns 5 and 7. The person skilled in the art is able to join said sequences in a functional manner. Advantageously the transit peptide part is cleaved off from the protein part shown in table II, application no. 6, columns 5 and 7 during the transport preferably into the plastids. All products of the cleavage of the preferred transit peptide shown in the last line of table V have preferably the N-terminal amino acid sequences QIA CSS or QIA EFQLTT in front of the start methionine of the protein mentioned in table II, application no. 6, columns 5 and 7. Other short amino acid sequences of an range of 1 to 20 amino acids preferable 2 to 15 amino acids, more preferable 3 to 10 amino acids most preferably 4 to 8 amino acids are also possible in front of the start methionine of the protein mentioned in table II, application no. 6, columns 5 and 7. In case of the amino acid sequence QIA CSS the three amino acids in front of the start methionine are stemming from the LIC (=ligatation independent cloning) cassette. Said short amino acid sequence is preferred in the case of the expression of E. coli genes. In case of the amino acid sequence QIA EFQLTT the six amino acids in front of the start methionine are stemming from the LIC cassette. Said short amino acid sequence is preferred in the case of the expression of S. cerevisiae genes. The skilled worker knows that other short sequences are also useful in the expression of the genes mentioned in table I, application no. 6, columns 5 and 7. Furthermore the skilled worker is aware of the fact that there is not a need for such short sequences in the expression of the genes.

[1629] Table V: Examples of transit peptides disclosed by von Heijne et al. for the disclosure of Table V see paragraph [0030.2.0.0] above.

[1630] Alternatively to the targeting of the sequences shown in table II, application no. 6, columns 5 and 7 preferably of sequences in general encoded in the nucleus with the aid of the targeting sequences mentioned for example in table V alone or in combination with other targeting sequences preferably into the plastids, the nucleic acids of the invention can directly introduced into the plastidal genome. Therefore in a preferred embodiment the nucleic acid sequences shown in table I, application no. 6, columns 5 and 7 are directly introduced and expressed in plastids.

The term “introduced” in the context of this specification shall mean the insertion of a nucleic acid sequence into the organism by means of a “transfection”, “transduction” or preferably by “transformation”.
A plastid, such as a chloroplast, has been “transformed” by an exogenous (preferably foreign) nucleic acid sequence if nucleic acid sequence has been introduced into the plastid that means that this sequence has crossed the membrane or the membranes of the plastid. The foreign DNA may be integrated (covalently linked) into plastid DNA making up the genome of the plastid, or it may remain unintegrated (e.g., by including a chloroplast origin of replication). “Stably” integrated DNA sequences are those, which are inherited through plastid replication, thereby transferring new plastids, with the features of the integrated DNA sequence to the progeny.

[1631] for the disclosure of the paragraphs [0030.2.0.5] and [0030.3.0.5] see paragraphs [0030.2.0.0] and [0030.3.0.0] above.

[1632] For the inventive process it is of great advantage that by transforming the plastids the intraspecies specific transgene flow is blocked, because a lot of species such as corn, cotton and rice have a strict maternal inheritance of plastids. By placing the genes specified in table I, application no. 6, columns 5 and 7 or active fragments thereof in the plastids of plants, these genes will not be present in the pollen of said plants.

A further preferred embodiment of the invention relates to the use of so called “chloroplast localization sequences”, in which a first RNA sequence or molecule is capable of transporting or “chaperoning” a second RNA sequence, such as a RNA sequence transcribed from the sequences depicted in table I, application no. 6, columns 5 and 7 or a sequence encoding a protein, as depicted in table II, application no. 6, columns 5 and 7, from an external environment inside a cell or outside a plastid into a chloroplast. In one embodiment the chloroplast localization signal is substantially similar or complementary to a complete or intact viroid sequence. The chloroplast localization signal may be encoded by a DNA sequence, which is transcribed into the chloroplast localization RNA. The term “viroid” refers to a naturally occurring single stranded RNA molecule (Flores, C R Acad Sci III. 2001 October; 324(10): 943-52). Viroids usually contain about 200-500 nucleotides and generally exist as circular molecules. Examples of viroids that contain chloroplast localization signals include but are not limited to ASBVd, PLMVd, CChMVd and ELVd. The viroid sequence or a functional part of it can be fused to the sequences depicted in table I, application no. 6, columns 5 and 7 or a sequence encoding a protein, as depicted in table II, application no. 6, columns 5 and 7 in such a manner that the viroid sequence transports a sequence transcribed from a sequence as depicted in table I, application no. 6, columns 5 and 7 or a sequence encoding a protein as depicted in table II, application no. 6, columns 5 and 7 into the chloroplasts. A preferred embodiment uses a modified ASBVd (Navarro et al., Virology. 2000 Mar. 1; 268(1): 218-25).
In a further specific embodiment the protein to be expressed in the plastids such as the proteins depicted in table II, application no. 6, columns 5 and 7 are encoded by different nucleic acids. Such a method is disclosed in WO 2004/040973, which shall be incorporated by reference. WO 2004/040973 teaches a method, which relates to the translocation of an RNA corresponding to a gene or gene fragment into the chloroplast by means of a chloroplast localization sequence. The genes, which should be expressed in the plant or plants cells, are split into nucleic acid fragments, which are introduced into different compartments in the plant e.g. the nucleus, the plastids and/or mitochondria. Additionally plant cells are described in which the chloroplast contains a ribozyme fused at one end to an RNA encoding a fragment of a protein used in the inventive process such that the ribozyme can trans-splice the translocated fusion RNA to the RNA encoding the gene fragment to form and as the case may be reunite the nucleic acid fragments to an intact mRNA encoding a functional protein for example as disclosed in table II, application no. 6, columns 5 and 7.

[1633] In a preferred embodiment of the invention the nucleic acid sequences as shown in table I, application no. 6, columns 5 and 7 used in the inventive process are transformed into plastids, which are metabolical active. Those plastids should preferably maintain at a high copy number in the plant or plant tissue of interest, most preferably the chloroplasts found in green plant tissues, such as leaves or cotyledons or in seeds.

[1634] For a good expression in the plastids the nucleic acid sequences as shown in table I, application no. 6, columns 5 and 7 are introduced into an expression cassette using a preferably a promoter and terminator, which are active in plastids preferably a chloroplast promoter. Examples of such promoters include the psbA promoter from the gene from spinach or pea, the rbcL promoter, and the atpB promoter from corn.

[1635] for the disclosure of the paragraphs [0031.0.0.5] and [0032.0.0.5] see paragraphs [0031.0.0.0] and [0032.0.0.0] above.

[1636] Advantageously the process for the production of the fine chemical leads to an enhanced production of the fine chemical. The terms “enhanced” or “increase” mean at least a 10%, 20%, 30%, 40% or 50%, preferably at least 60%, 70%, 80%, 90% or 100%, more preferably 150%, 200%, 300%, 400% or 500% higher production of the fine chemical in comparison to the reference as defined below, e.g. that means in comparison to an organism without the aforementioned modification of the activity of a protein as shown in table II, application no. 6, column 3. Preferably the modification of the activity of a protein as shown in table II, application no. 6, column 3 or their combination can be achieved by joining the protein to a transit peptide.

[1637] Surprisingly it was found, that the transgenic expression of the Saccharomyces cerevisiae protein as shown in table II, application no. 6, column 3 in plastids of a plant such as Arabidopsis thaliana for example through the linkage to at least one targeting sequence for example as mentioned in table V conferred an increase in the fine chemical content of the transformed plants.

[1638] for the disclosure of this paragraph see paragraph [0035.0.0.0] above.

[1639] The sequence of b0403 (Accession number PIR:C64769) from Escherichia coli has been published in Blattner et al., Science 277 (5331), 1453-1474 (1997), and its activity is being defined as “maltodextrin glucosidase”. Accordingly, in one embodiment, the process of the present invention comprises the use of a “maltodextrin glucosidase” or its homolog, e.g. as shown herein, for the production of the fine chemical, meaning of linoleic acid and/or tryglycerides, lipids, oils and/or fats containing linoleic acid, in particular for increasing the amount of linoleic acid in free or bound form in an organism or a part thereof, as mentioned. In one embodiment, in the process of the present invention the activity of a b0403 protein is increased or generated, e.g. from Escherichia coli or a homolog thereof, preferably linked at least to one transit peptide as mentioned for example in table V.

In another embodiment, in the process of the present invention the activity of a b0403 protein is increased or generated in a subcellular compartment of the organism or organism cell such as in an organelle like a plastid or mitochondria.
The sequence of b0931 (Accession number PIR:JQ0756) from Escherichia coli has been published in Blattner et al., Science 277 (5331), 1453-1474 (1997), and its activity is being defined as “nicotinate phosphoribosyltransferase”. Accordingly, in one embodiment, the process of the present invention comprises the use of a “nicotinate phosphoribosyltransferase” or its homolog, e.g. as shown herein, for the production of the fine chemical, meaning of linoleic acid and/or tryglycerides, lipids, oils and/or fats containing linoleic acid, in particular for increasing the amount of linoleic acid in free or bound form in an organism or a part thereof, as mentioned. In one embodiment, in the process of the present invention the activity of a b0931 protein is increased or generated, e.g. from Escherichia coli or a homolog thereof, preferably linked at least to one transit peptide as mentioned for example in table V.
In another embodiment, in the process of the present invention the activity of a b0931 protein is increased or generated in a subcellular compartment of the organism or organism cell such as in an organelle like a plastid or mitochondria.
The sequence of b1046 (Accession number PIR:C64847) from Escherichia coli has been published in Blattner et al., Science 277 (5331), 1453-1474 (1997), and its activity is being defined as “putative synthase with phospholipase D/nuclease domain”. Accordingly, in one embodiment, the process of the present invention comprises the use of a “putative synthase with phospholipase D/nuclease domain” or its homolog, e.g. as shown herein, for the production of the fine chemical, meaning of linoleic acid and/or tryglycerides, lipids, oils and/or fats containing linoleic acid, in particular for increasing the amount of linoleic acid in free or bound form in an organism or a part thereof, as mentioned. In one embodiment, in the process of the present invention the activity of a b1046 protein is increased or generated, e.g. from Escherichia coli or a homolog thereof, preferably linked at least to one transit peptide as mentioned for example in table V.
In another embodiment, in the process of the present invention the activity of a b1046 protein is increased or generated in a subcellular compartment of the organism or organism cell such as in an organelle like a plastid or mitochondria.
The sequence of b1933 (Accession number PIR:B64957) from Escherichia coli has been published in Blattner et al., Science 277 (5331), 1453-1474 (1997), and its activity has not been characterized. Accordingly, in one embodiment, the process of the present invention comprises the use of a “b1933 protein” or its homolog, e.g. as shown herein, for the production of the fine chemical, meaning of linoleic acid and/or tryglycerides, lipids, oils and/or fats containing linoleic acid, in particular for increasing the amount of linoleic acid in free or bound form in an organism or a part thereof, as mentioned. In one embodiment, in the process of the present invention the activity of a b1933 protein is increased or generated, e.g. from Escherichia coli or a homolog thereof, preferably linked at least to one transit peptide as mentioned for example in table V.
In another embodiment, in the process of the present invention the activity of a b1933 protein is increased or generated in a subcellular compartment of the organism or organism cell such as in an organelle like a plastid or mitochondria.
The sequence of b2126 (Accession number PIR:E64980) from Escherichia coli has been published in Blattner et al., Science 277 (5331), 1453-1474 (1997), and its activity is being defined as “putative sensory kinase in a two component regulatory system”. Accordingly, in one embodiment, the process of the present invention comprises the use of a “putative sensory kinase” or its homolog, e.g. as shown herein, for the production of the fine chemical, meaning of linoleic acid and/or tryglycerides, lipids, oils and/or fats containing linoleic acid, in particular for increasing the amount of linoleic acid in free or bound form in an organism or a part thereof, as mentioned. In one embodiment, in the process of the present invention the activity of a b2126 protein is increased or generated, e.g. from Escherichia coli or a homolog thereof, preferably linked at least to one transit peptide as mentioned for example in table V.
In another embodiment, in the process of the present invention the activity of a b2126 protein is increased or generated in a subcellular compartment of the organism or organism cell such as in an organelle like a plastid or mitochondria.
The sequence of b3708 (Accession number PIR:WZEC) from Escherichia coli has been published in Blattner et al., Science 277 (5331), 1453-1474 (1997), and its activity is being defined as “tryptophan deaminase PLP dependent”. Accordingly, in one embodiment, the process of the present invention comprises the use of a “tryptophan deaminase” or its homolog, e.g. as shown herein, for the production of the fine chemical, meaning of linoleic acid and/or tryglycerides, lipids, oils and/or fats containing linoleic acid, in particular for increasing the amount of linoleic acid in free or bound form in an organism or a part thereof, as mentioned. In one embodiment, in the process of the present invention the activity of a b3708 protein is increased or generated, e.g. from Escherichia coli or a homolog thereof, preferably linked at least to one transit peptide as mentioned for example in table V.
In another embodiment, in the process of the present invention the activity of a b3708 protein is increased or generated in a subcellular compartment of the organism or organism cell such as in an organelle like a plastid or mitochondria.
The sequence of b3728 (Accession number PIR:BYECPR) from Escherichia coli has been published in Blattner et al., Science 277 (5331), 1453-1474 (1997), and its activity is being defined as “high affinity phosphate transport protein (ABC superfamily peri bind)”. Accordingly, in one embodiment, the process of the present invention comprises the use of a “high affinity phosphate transport protein” or its homolog, e.g. as shown herein, for the production of the fine chemical, meaning of linoleic acid and/or tryglycerides, lipids, oils and/or fats containing linoleic acid, in particular for increasing the amount of linoleic acid in free or bound form in an organism or a part thereof, as mentioned. In one embodiment, in the process of the present invention the activity of a b3728 protein is increased or generated, e.g. from Escherichia coli or a homolog thereof, preferably linked at least to one transit peptide as mentioned for example in table V.
In another embodiment, in the process of the present invention the activity of a b3728 protein is increased or generated in a subcellular compartment of the organism or organism cell such as in an organelle like a plastid or mitochondria.
The sequence of YNR012W (Accession number NP_{—}014409) from Saccharomyces cerevisiae has been published in Goffeau et al., Science 274 (5287), 546-547, 1996, and its activity is being defined as “uridine kinase”. Accordingly, in one embodiment, the process of the present invention comprises the use of a “uridine kinase” or its homolog, e.g. as shown herein, for the production of the fine chemical, meaning of linoleic acid and/or tryglycerides, lipids, oils and/or fats containing linoleic acid, in particular for increasing the amount of linoleic acid in free or bound form in an organism or a part thereof, as mentioned. In one embodiment, in the process of the present invention the activity of a YNR012W protein is increased or generated, e.g. from Saccharomyces cerevisiae or a homolog thereof, preferably linked at least to one transit peptide as mentioned for example in table V.
In another embodiment, in the process of the present invention the activity of an YNR012W protein is increased or generated in a subcellular compartment of the organism or organism cell such as in an organelle like a plastid or mitochondria.

[1640] In one embodiment, the homolog of the YNR012W, is a homolog having said activity and being derived from Eukaryot. In one embodiment, the homolog of the b0403, b0931, b1046, b1933, b2126, b3708 and/or b3728 is a homolog having said activity and being derived from bacteria. In one embodiment, the homolog of the YNR012W is a homolog having said activity and being derived from Fungi. In one embodiment, the homolog of the b0403, b0931, b1046, b1933, b2126, b3708 and/or b3728 is a homolog having said activity and being derived from Proteobacteria. In one embodiment, the homolog of the YNR012W is a homolog having said activity and being derived from Ascomycota. In one embodiment, the homolog of the b0403, b0931, b1046, b1933, b2126, b3708 and/or b3728 is a homolog having said activity and being derived from Gammaproteobacteria. In one embodiment, the homolog of the YNR012W is a homolog having said activity and being derived from Saccharomycotina. In one embodiment, the homolog of the b0403, b0931, b1046, b1933, b2126, b3708 and/or b3728 is a homolog having said activity and being derived from Enterobacteriales. In one embodiment, the homolog of the YNR012W is a homolog having said activity and being derived from Saccharomycetes. In one embodiment, the homolog of the b0403, b0931, b1046, b1933, b2126, b3708 and/or b3728 is a homolog having said activity and being derived from Enterobacteriaceae. In one embodiment, the homolog of the YNR012W is a homolog having said activity and being derived from Saccharomycetales. In one embodiment, the homolog of the b0403, b0931, b1046, b1933, b2126, b3708 and/or b3728 is a homolog having said activity and being derived from Escherichia, preferably from Escherichia coli. In one embodiment, the homolog of the YNR012W is a homolog having said activity and being derived from Saccharomycetaceae. In one embodiment, the homolog of the YNR012W is a homolog having said activity and being derived from Saccharomycetes, preferably from Saccharomyces cerevisiae.

[1641] for the disclosure of this paragraph see paragraph [0038.0.0.0] above.

[1642] In accordance with the invention, a protein or polypeptide has the “activity of an protein as shown in table II, application no. 6, column 3” if its de novo activity, or its increased expression directly or indirectly leads to an increased in the fine chemical level in the organism or a part thereof, preferably in a cell of said organism, more preferably in an organelle such as a plastid or mitochondria of said organism and the protein has the above mentioned activities of a protein as shown in table II, application no. 6, column 3, preferably in the event the nucleic acid sequences encoding said proteins is functionally joined to the nucleic acid sequence of a transit peptide. Throughout the specification the activity or preferably the biological activity of such a protein or polypeptide or an nucleic acid molecule or sequence encoding such protein or polypeptide is identical or similar if it still has the biological or enzymatic activity of a protein as shown in table II, application no. 6, column 3, or which has at least 10% of the original enzymatic activity, preferably 20%, particularly preferably 30%, most particularly preferably 40% in comparison to a protein as shown in table II, application no. 6, column 3 of Saccharomyces cerevisiae.

[1643] for the disclosure of the paragraphs [0040.0.0.5] to [0047.0.0.5] see paragraphs [0040.0.0.0] to [0047.0.0.0] above.

[1644] Preferably, the reference, control or wild type differs form the subject of the present invention only in the cellular activity, preferably of the plastidial activity of the polypeptide of the invention, e.g. as result of an increase in the level of the nucleic acid molecule of the present invention or an increase of the specific activity of the polypeptide of the invention, e.g. by or in the expression level or activity of an protein having the activity of a protein as shown in table II, application no. 6, column 3 its biochemical or genetical causes and the increased amount of the fine chemical.

[1645] for the disclosure of the paragraphs [0049.0.0.5] to [0051.0.0.5] see paragraphs [0049.0.0.0] to [0051.0.0.0] above.

[1646] For example, the molecule number or the specific activity of the polypeptide or the nucleic acid molecule may be increased. Larger amounts of the fine chemical can be produced if the polypeptide or the nucleic acid of the invention is expressed de novo in an organism lacking the activity of said protein, preferably the nucleic acid molecules as mentioned in table I, application no. 6, columns 5 and 7 alone or preferably in combination with a transit peptide for example as mentioned in table V or in another embodiment by introducing said nucleic acid molecules into an organelle such as an plastid or mitochondria in the transgenic organism. However, it is also possible to modify the expression of the gene which is naturally present in the organisms, for example by integrating a nucleic acid sequence, encoding a plastidic targeting sequence in front (5 prime) of the coding sequence, leading to a functional preprotein, which is directed for example to the plastids.

[1647] for the disclosure of the paragraphs [0053.0.0.5] to [0058.0.0.5] see paragraphs [0053.0.0.0] to [0058.0.0.0] above.

[1648] In case the activity of the Escherichia coli protein b0403 or its homologs, e.g. a “maltodextrin glucosidase” is increased advantageously in an organelle such as a plastid or mitochondria, preferably, in one embodiment an increase of the fine chemical, preferably of linoleic acid and/or tryglycerides, lipids, oils and/or fats containing linoleic acid between 15% and 38% or more is conferred.

In case the activity of the Escherichia coli protein b0931 or its homologs, e.g. a “nicotinate phosphoribosyltransferase” is increased advantageously in an organelle such as a plastid or mitochondria, preferably, in one embodiment an increase of the fine chemical, preferably of linoleic acid and/or tryglycerides, lipids, oils and/or fats containing linoleic acid between 16% and 45% or more is conferred.
In case the activity of the Escherichia coli protein b1046 or its homologs, e.g. a “putative synthase with phospholipase D/nuclease domain” is increased advantageously in an organelle such as a plastid or mitochondria, preferably, in one embodiment an increase of the fine chemical, preferably of linoleic acid and/or tryglycerides, lipids, oils and/or fats containing linoleic acid between 15% and 22% or more is conferred.
In case the activity of the Escherichia coli protein b1933 or its homologs, e.g. a “b1933 protein with unknown biological function” is increased advantageously in an organelle such as a plastid or mitochondria, preferably, in one embodiment an increase of the fine chemical, preferably of linoleic acid and/or tryglycerides, lipids, oils and/or fats containing linoleic acid between 14% and 22% or more is conferred.
In case the activity of the Escherichia coli protein b2126 or its homologs, e.g. a “putative sensory kinase in a two component regulatory system” is increased advantageously in an organelle such as a plastid or mitochondria, preferably, in one embodiment an increase of the fine chemical, preferably of linoleic acid and/or tryglycerides, lipids, oils and/or fats containing linoleic acid between 14% and 24% or more is conferred.
In case the activity of the Escherichia coli protein b3708 or its homologs, e.g. a “tryptophan deaminase PLP dependent” is increased advantageously in an organelle such as a plastid or mitochondria, preferably, in one embodiment an increase of the fine chemical, preferably of linoleic acid and/or tryglycerides, lipids, oils and/or fats containing linoleic acid between 15% and 39% or more is conferred.
In case the activity of the Escherichia coli protein b3728 or its homologs, e.g. a “high affinity phosphate transport protein (ABC superfamily peri bind)” is increased advantageously in an organelle such as a plastid or mitochondria, preferably, in one embodiment an increase of the fine chemical, preferably of linoleic acid and/or tryglycerides, lipids, oils and/or fats containing linoleic acid between 15% and 21% or more is conferred.
In case the activity of the Saccharomyces cerevisiae protein YNR012W or its homologs, e.g. a “uridine kinase” is increased advantageously in an organelle such as a plastid or mitochondria, preferably, in one embodiment an increase of the fine chemical, preferably of linoleic acid and/or tryglycerides, lipids, oils and/or fats containing linoleic acid between 15% and 21% or more is conferred.

[1649] In case the activity of the Escherichia coli proteins b0403, b0931, b1046, b1933, b2126, b3708 or b3728 or their homologs,” are increased advantageously in an organelle such as a plastid or mitochondria, preferably an increase of the fine chemical linoleic acid and/or tryglycerides, lipids, oils and/or fats containing linoleic acid is conferred.

In case the activity of the Saccharomyces cerevisiae protein YNR012W or its homologs, e.g. a “uridine kinase” is increased advantageously in an organelle such as a plastid or mitochondria, preferably an increase of the fine chemical linoleic acid and/or tryglycerides, lipids, oils and/or fats containing linoleic acid is conferred.

[1650] for the disclosure of the paragraphs [0061.0.0.5] and [0062.0.0.5] see paragraphs [0061.0.0.0] and [0062.0.0.0] above.

[1651] A protein having an activity conferring an increase in the amount or level of the fine chemical, preferably upon targeting to the plastids preferably has the structure of the polypeptide described herein, in particular of the polypeptides comprising the consensus sequence shown in table IV, application no. 6, column 7 or of the polypeptide as shown in the amino acid sequences as disclosed in table II, application no. 6, columns 5 and 7 or the functional homologues thereof as described herein, or is encoded by the nucleic acid molecule characterized herein or the nucleic acid molecule according to the invention, for example by the nucleic acid molecule as shown in table I, application no. 6, columns 5 and 7 or its herein described functional homologues and has the herein mentioned activity.

[1652] For the purposes of the present invention, the term “linoleic acid” also encompasses the corresponding salts, such as, for example, the potassium or sodium salts of linoleic acid or the salts of linoleic acid with amines such as diethylamine as well as tryglycerides, lipids, oils and/or fats containing linoleic acid.

[1653] for the disclosure of the paragraphs [0065.0.0.5] and [0066.0.0.5] see paragraphs [0065.0.0.0] and [0066.0.0.0] above.

[1654] In one embodiment, the process of the present invention comprises one or more of the following steps
[1655] a) stabilizing a protein conferring the increased expression of a protein encoded by the nucleic acid molecule of the invention or of the polypeptide of the invention, e.g. of a polypeptide having the activity of a protein as indicated in table II, application no. 6, columns 5 and 7 or its homologs activity having herein-mentioned linoleic acid increasing activity; and/or
[1656] b) stabilizing a mRNA conferring the increased expression of a protein encoded by the nucleic acid molecule of the invention, which is in the sense of the invention a fusion of a nucleic acid sequence encoding a transit peptide and of a nucleic acid sequence as shown in table I, application no. 6, columns 5 and 7, e.g. a nucleic acid sequence encoding a polypeptide having the activity of a protein as indicated in table II, application no. 6, columns 5 and 7 or its homologs activity or of a mRNA encoding the polypeptide of the present invention having herein-mentioned linoleic acid increasing activity; and/or
[1657] c) increasing the specific activity of a protein conferring the increased expression of a protein encoded by the nucleic acid molecule of the invention or of the polypeptide of the present invention having herein-mentioned linoleic acid increasing activity, e.g. of a polypeptide having the activity of a protein as indicated in table II, application no. 6, columns 5 and 7 or its homologs activity, or decreasing the inhibitory regulation of the polypeptide of the invention; and/or
[1658] d) generating or increasing the expression of an endogenous or artificial transcription factor mediating the expression of a protein conferring the increased expression of a protein encoded by the nucleic acid molecule of the invention or of the polypeptide of the invention having herein-mentioned linoleic acid increasing activity, e.g. of a polypeptide having the activity of a protein as indicated in table II, application no. 6, columns 5 and 7 or its homologs activity; and/or
[1659] e) stimulating activity of a protein conferring the increased expression of a protein encoded by the nucleic acid molecule of the present invention or a polypeptide of the present invention having herein-mentioned linoleic acid increasing activity, e.g. of a polypeptide having the activity of a protein as indicated in table II, application no. 6, columns 5 and 7 or its homologs activity, by adding one or more exogenous inducing factors to the organisms or parts thereof; and/or
[1660] f) expressing a transgenic gene encoding a protein conferring the increased expression of a polypeptide encoded by the nucleic acid molecule of the present invention or a polypeptide of the present invention, having herein-mentioned linoleic acid increasing activity, e.g. of a polypeptide having the activity of a protein as indicated in table II, application no. 6, columns 5 and 7 or its homologs activity, and/or
[1661] g) increasing the copy number of a gene conferring the increased expression of a nucleic acid molecule encoding a polypeptide encoded by the nucleic acid molecule of the invention or the polypeptide of the invention having herein-mentioned linoleic acid increasing activity, e.g. of a polypeptide having the activity of a protein as indicated in table II, application no. 6, columns 5 and 7 or its homologs activity; and/or
[1662] h) increasing the expression of the endogenous gene encoding the polypeptide of the invention, e.g. a polypeptide having the activity of a protein as indicated in table II, application no. 6, columns 5 and 7 or its homologs activity, by adding positive expression or removing negative expression elements, e.g. homologous recombination can be used to either introduce positive regulatory elements like for plants the 35S enhancer into the promoter or to remove repressor elements form regulatory regions. Further gene conversion methods can be used to disrupt repressor elements or to enhance to activity of positive elements. Positive elements can be randomly introduced in plants by T-DNA or transposon mutagenesis and lines can be identified in which the positive elements have be integrated near to a gene of the invention, the expression of which is thereby enhanced; and/or
[1663] i) modulating growth conditions of an organism in such a manner, that the expression or activity of the gene encoding the protein of the invention or the protein itself is enhanced for example microorganisms or plants can be grown for example under a higher temperature regime leading to an enhanced expression of heat shock proteins, which can lead an enhanced fine chemical production; and/or
[1664] j) selecting of organisms with especially high activity of the proteins of the invention from natural or from mutagenized resources and breeding them into the target organisms, eg the elite crops; and/or
[1665] k) directing a protein encoded by the nucleic acid molecule of the invention or of the polypeptide of the present invention having herein-mentioned linoleic acid increasing activity, e.g. of polypeptide having the activity of a protein as indicated in table II, application no. 6, columns 5 and 7 or its homologs activity, to the plastids by the addition of a plastidial targeting sequence; and/or
[1666] l) generating the expression of a protein encoded by the nucleic acid molecule of the invention or of the polypeptide of the present invention having herein-mentioned linoleic acid increasing activity, e.g. of a polypeptide having the activity of a protein as indicated in table II, application no. 6, columns 5 and 7 or its homologs activity in plastids by the stable or transient transformation advantageously stable transformation of organelles preferably plastids with an inventive nucleic acid sequence preferably in form of an expression cassette containing said sequence leading to the plastidial expression of the nucleic acids or polypeptides of the invention; and/or
[1667] m) generating the expression of a protein encoded by the nucleic acid molecule of the invention or of the polypeptide of the present invention having herein-mentioned linoleic acid increasing activity, e.g. of a polypeptide having the activity of a protein as indicated in table II, application no. 6, columns 5 and 7 or its homologs activity in plastids by integration of a nucleic acid of the invention into the plastidal genome under control of preferable a plastidial promoter.

[1668] Preferably, said mRNA is the nucleic acid molecule of the present invention and/or the protein conferring the increased expression of a protein encoded by the nucleic acid molecule of the present invention alone or link to a transit nucleic acid sequence or transit peptide encoding nucleic acid sequence or the polypeptide having the herein mentioned activity, e.g. conferring the increase of the fine chemical after increasing the expression or activity of the encoded polypeptide preferably in organelles such as plastids or having the activity of a polypeptide having an activity as the protein as shown in table II, application no. 6, column 3 or its homologs. Preferably the increase of the fine chemical takes place in plastids.

[1669] for the disclosure of the paragraphs [0069.0.0.5] to [0079.0.0.5] see paragraphs [0069.0.0.0] to [0079.0.0.0] above.

[1670] The activation of an endogenous polypeptide having above-mentioned activity, e.g. having the activity of a protein as shown in table II, application no. 6, column 3 or of the polypeptide of the invention, e.g. conferring the increase of the fine chemical after increase of expression or activity in the cytsol and/or in an organelle like a plastid, preferentially in the plastid, can also be increased by introducing a synthetic transcription factor, which binds close to the coding region of the gene encoding the protein as shown in table II, application no. 6, column 3 and activates its transcription. A chimeric zinc finger protein can be constructed, which comprises a specific DNA-binding domain and an activation domain as e.g. the VP16 domain of Herpes Simplex virus. The specific binding domain can bind to the regulatory region of the gene encoding the protein as shown in table II, application no. 6, column 3. The expression of the chimeric transcription factor in a organism, in particular in a plant, leads to a specific expression of the protein as shown in table II, application no. 6, column 3, see e.g. in WO01/52620, Oriz, Proc. Natl. Acad. Sci. USA, 2002, Vol. 99, 13290 or Guan, Proc. Natl. Acad. Sci. USA, 2002, Vol. 99, 13296.

[1671] for the disclosure of the paragraphs [0081.0.0.5] to [0084.0.0.5] see paragraphs [0081.0.0.0] to [0084.0.0.0] above.

[1672] Owing to the introduction of a gene or a plurality of genes conferring the expression of the nucleic acid molecule of the invention or the nucleic acid molecule used in the method of the invention or the polypeptide of the invention or the polypeptide used in the method of the invention as described below, for example the nucleic acid construct mentioned below into an organism alone or in combination with other genes, it is possible not only to increase the biosynthetic flux towards the end product, but also to increase, modify or create de novo an advantageous, preferably novel metabolites composition in the organism, e.g. an advantageous fatty acid composition comprising a higher content of (from a viewpoint of nutritional physiology limited) fatty acids, like palmitate, palmitoleate, stearate and/or oleate.

[1673] for the disclosure of this paragraph see paragraph [0086.0.0.0] above.

[1674] By influencing the metabolism thus, it is possible to produce, in the process according to the invention, further advantageous compounds. Examples of such compounds are, in addition to linoleic acid, triglycerides, lipids, oils and/or fats containing linoleic acid compounds such as palmitate, palmitoleate, stearate and/or oleate.

[1675] Accordingly, in one embodiment, the process according to the invention relates to a process, which comprises:
[1676] a) providing a non-human organism, preferably a microorganism, a non-human animal, a plant or animal cell, a plant or animal tissue or a plant, more preferably a microorganism, a plant or a plant tissue;
[1677] b) increasing the activity of a protein as shown in table II, application no. 6, column 3 or of a polypeptide being encoded by the nucleic acid molecule of the present invention and described below, e.g. conferring an increase of the fine chemical in the organism, preferably in the microorganism, the non-human animal, the plant or animal cell, the plant or animal tissue or the plant, more preferably a microorganism, a plant or a plant tissue, in the cytsol or in the plastids, preferentially in the plastids,
[1678] c) growing the organism, preferably the microorganism, the non-human animal, the plant or animal cell, the plant or animal tissue or the plant under conditions which permit the production of the fine chemical in the organism, preferably the microorganism, the plant cell, the plant tissue or the plant; and
[1679] d) if desired, recovering, optionally isolating, the free and/or bound the fine chemical and, optionally further free and/or bound amino acids synthesized by the organism, the microorganism, the non-human animal, the plant or animal cell, the plant or animal tissue or the plant.

[1680] The organism, in particular the microorganism, non-human animal, the plant or animal cell, the plant or animal tissue or the plant is advantageously grown in such a way that it is not only possible to recover, if desired isolate the free or bound the fine chemical or the free and bound the fine chemical but as option it is also possible to produce, recover and, if desired isolate, other free or/and bound fatty acids, in particular oleic acid.

[1681] for the disclosure of the paragraphs [0090.0.0.5] to [0097.0.0.5] see paragraphs [0090.0.0.0] to [0097.0.0.0] above.

[1682] With regard to the nucleic acid sequence as depicted a nucleic acid construct which contains a nucleic acid sequence mentioned herein or an organism (=transgenic organism) which is transformed with said nucleic acid sequence or said nucleic acid construct, “transgene” means all those constructs which have been brought about by genetic manipulation methods, preferably in which either
[1683] a) the nucleic acid sequence as shown in table I, application no. 6, columns 5 and 7 or a derivative thereof, or
[1684] b) a genetic regulatory element, for example a promoter, which is functionally linked to the nucleic acid sequence as shown table I, application no. 6, columns 5 and 7 or a derivative thereof, or
[1685] c) (a) and (b)
   is/are not present in its/their natural genetic environment or has/have been modified by means of genetic manipulation methods, it being possible for the modification to be, by way of example, a substitution, addition, deletion, inversion or insertion of one or more nucleotide. “Natural genetic environment” means the natural chromosomal locus in the organism of origin or the presence in a genomic library. In the case of a genomic library, the natural, genetic environment of the nucleic acid sequence is preferably at least partially still preserved. The environment flanks the nucleic acid sequence at least on one side and has a sequence length of at least 50 bp, preferably at least 500 bp, particularly preferably at least 1000 bp, very particularly preferably at least 5000 bp.

[1686] The use of the nucleic acid sequence according to the invention or of the nucleic acid construct according to the invention for the generation of transgenic plants is therefore also subject matter of the invention. As mentioned above the inventive nucleic acid sequence consists advantageously of the nucleic acid sequences as depicted in the sequence protocol and disclosed in table I, application no. 6, columns 5 and 7 joined to a nucleic acid sequence encoding a transit peptide, or a targeting nucleic acid sequence which directs the nucleic acid sequences disclosed in table I, application no. 6, columns 5 and 7 to the organelle preferentially the plastids. Alternatively the inventive nucleic acids sequences consist advantageously of the nucleic acid sequences as depicted in the sequence protocol and disclosed in table I, application no. 6, columns 5 and 7 joined preferably to a nucleic acids sequence mediating the stable integration of nucleic acids into the plastidial genome and optionally sequences mediating the transcription of the sequence in the plastidial compartment. A transient expression is in principal also desirable and possible.

[1687] for the disclosure of this paragraph see paragraph [0100.0.0.0] above.

[1688] In an advantageous embodiment of the invention, the organism takes the form of a plant whose fatty acid content is modified advantageously owing to the nucleic acid molecule of the present invention expressed. This is important for plant breeders since, for example, the nutritional value of plants for poultry is dependent on the abovementioned essential fatty acids and the general amount of fatty acids as energy source in feed. After the activity of the protein as shown in table II, application no. 6, column 3 has been increased or generated, or after the expression of nucleic acid molecule or polypeptide according to the invention has been generated or increased, the transgenic plant generated thus is grown on or in a nutrient medium or else in the soil and subsequently harvested.

[1689] for the disclosure of the paragraphs [0102.0.0.5] to [0110.0.0.5] see paragraphs [0102.0.0.0] to [0110.0.0.0] above.

[1690] In a preferred embodiment, the fine chemical (linoleic acid) is produced in accordance with the invention and, if desired, is isolated. The production of further fatty acids such as palmitic acid, stearic acid, palmitoleic acid and/or oleic acid mixtures thereof or mixtures of other fatty acids by the process according to the invention is advantageous. It may be advantageous to increase the pool of free fatty acids in the transgenic organisms by the process according to the invention in order to isolate high amounts of the pure fine chemical.

[1691] In another preferred embodiment of the invention a combination of the increased expression of the nucleic acid sequence or the protein of the invention together with the transformation of a nucleic acid encoding a protein or polypeptide for example a fatty acid transporter protein or a compound, which functions as a sink for the desired fatty acid for example for linoleic acid in the organism is useful to increase the production of the respective fine chemical (see Bao and Ohlrogge, Plant Physiol. 1999 August; 120 (4): 1057-1062). Such fatty acid transporter protein may serve as a link between the location of fatty acid synthesis and the so called sink tissue, in which fatty acids, triglycerides, oils and fats are stored.

[1692] In the case of the fermentation of microorganisms, the abovementioned fatty acids may accumulate in the medium and/or the cells. If microorganisms are used in the process according to the invention, the fermentation broth can be processed after the cultivation. Depending on the requirement, all or some of the biomass can be removed from the fermentation broth by separation methods such as, for example, centrifugation, filtration, decanting or a combination of these methods, or else the biomass can be left in the fermentation broth. The fermentation broth can subsequently be reduced, or concentrated, with the aid of known methods such as, for example, rotary evaporator, thin-layer evaporator, falling film evaporator, by reverse osmosis or by nanofiltration. Afterwards advantageously further compounds for formulation can be added such as corn starch or silicates. This concentrated fermentation broth advantageously together with compounds for the formulation can subsequently be processed by lyophilization, spray drying, spray granulation or by other methods. Preferably the fatty acids or the fatty acid compositions are isolated from the organisms, such as the microorganisms or plants or the culture medium in or on which the organisms have been grown, or from the organism and the culture medium, in the known manner, for example via extraction, distillation, crystallization, chromatography or a combination of these methods. These purification methods can be used alone or in combination with the aforementioned methods such as the separation and/or concentration methods.

[1693] Transgenic plants which comprise the fatty acids such as saturated or polyunsaturated fatty acids synthesized in the process according to the invention can advantageously be marketed directly without there being any need for the oils, lipids or fatty acids synthesized to be isolated. Plants for the process according to the invention are listed as meaning intact plants and all plant parts, plant organs or plant parts such as leaf, stem, seeds, root, tubers, anthers, fibers, root hairs, stalks, embryos, calli, cotelydons, petioles, harvested material, plant tissue, reproductive tissue and cell cultures which are derived from the actual transgenic plant and/or can be used for bringing about the transgenic plant. In this context, the seed comprises all parts of the seed such as the seed coats, epidermal cells, seed cells, endosperm or embryonic tissue. However, the fine chemical produced in the process according to the invention can also be isolated from the organisms, advantageously plants, in the form of their oils, fats, lipids and/or free fatty acids. Fatty acids produced by this process can be obtained by harvesting the organisms, either from the crop in which they grow, or from the field. This can be done via pressing or extraction of the plant parts, preferably the plant seeds. To increase the efficiency of oil extraction it is beneficial to clean, to temper and if necessary to hull and to flake the plant material especially the seeds. In this context, the oils, fats, lipids and/or free fatty acids can be obtained by what is known as cold beating or cold pressing without applying heat. To allow for greater ease of disruption of the plant parts, specifically the seeds, they are previously comminuted, steamed or roasted. The seeds, which have been pretreated in this manner can subsequently be pressed or extracted with solvents such as preferably warm hexane. The solvent is subsequently removed. In the case of microorganisms, the latter are, after harvesting, for example extracted directly without further processing steps or else, after disruption, extracted via various methods with which the skilled worker is familiar. In this manner, more than 96% of the compounds produced in the process can be isolated. Thereafter, the resulting products are processed further, i.e. degummed and/or refined. In this process, substances such as the plant mucilages and suspended matter are first removed. What is known as desliming can be affected enzymatically or, for example, chemico-physically by addition of acid such as phosphoric acid. Thereafter optionally, the free fatty acids are removed by treatment with a base like alkali, for example aqueous KOH or NaOH, or acid hydrolysis, advantageously in the presence of an alcohol such as methanol or ethanol, or via enzymatic cleavage, and isolated via, for example, phase separation and subsequent acidification via, for example, H₂SO₄. The fatty acids can also be liberated directly without the above-described processing step. If desired the resulting product can be washed thoroughly with water to remove traces of soap and the alkali remaining in the product and then dried. To remove the pigment remaining in the product, the products can be subjected to bleaching, for example using filler's earth or active charcoal. At the end, the product can be deodorized, for example using steam distillation under vacuum. These chemically pure fatty acids or fatty acid compositions are advantageous for applications in the food industry sector, the cosmetic sector and especially the pharmacological industry sector.

[1694] Fatty acids can for example be detected advantageously via GC separation methods. The unambiguous detection for the presence of fatty acid products can be obtained by analyzing recombinant organisms using analytical standard methods: GC, GC-MS or TLC, as described on several occasions by Christie and the references therein (1997, in: Advances on Lipid Methodology, Fourth Edition: Christie, Oily Press, Dundee, 119-169; 1998, Gaschromatographie-Massenspektrometrie-Verfahren [Gas chromatography/mass spectrometric methods], Lipide 33:343-353). One example is the analysis of fatty acids via FAME and GC-MS or TLC (abbreviations: FAME, fatty acid methyl ester; GC-MS, gas liquid chromatography/mass spectrometry; TLC, thin-layer chromatography. The material to be analyzed can be disrupted by sonication, grinding in a glass mill, liquid nitrogen and grinding or via other applicable methods. After disruption, the material must be centrifuged. The sediment is resuspended in distilled water, heated for 10 minutes at 100° C., cooled on ice and recentrifuged, followed by extraction for one hour at 90° C. in 0.5 M sulfuric acid in methanol with 2% dimethoxypropane, which leads to hydrolyzed oil and lipid compounds, which give transmethylated lipids. These fatty acid methyl esters are extracted in petroleum ether and finally subjected to a GC analysis using a capillary column (Chrompack, WCOT Fused Silica, CP-Wax-52 CB, 25 μm, 0.32 mm) at a temperature gradient of between 170° C. and 240° C. for 20 minutes and 5 minutes at 240° C. The identity of the resulting fatty acid methyl esters must be defined using standards, which are available from commercial sources (i.e. Sigma).

[1695] In a preferred embodiment, the present invention relates to a process for the production of the fine chemical comprising or generating in an organism or a part thereof, preferably in a cell compartment such as a plastid or mitochondria, the expression of at least one nucleic acid molecule comprising a nucleic acid molecule selected from the group consisting of:
[1696] a) nucleic acid molecule encoding, preferably at least the mature form, of the polypeptide shown in table II, application no. 6, columns 5 and 7 or a fragment thereof, which confers an increase in the amount of the fine chemical in an organism or a part thereof;
[1697] b) nucleic acid molecule comprising, preferably at least the mature form, of the nucleic acid molecule shown in table I, application no. 6, columns 5 and 7;
[1698] c) nucleic acid molecule whose sequence can be deduced from a polypeptide sequence encoded by a nucleic acid molecule of (a) or (b) as result of the degeneracy of the genetic code and conferring an increase in the amount of the fine chemical in an organism or a part thereof;
[1699] d) nucleic acid molecule encoding a polypeptide which has at least 50% identity with the amino acid sequence of the polypeptide encoded by the nucleic acid molecule of (a) to (c) and conferring an increase in the amount of the fine chemical in an organism or a part thereof;
[1700] e) nucleic acid molecule which hybridizes with a nucleic acid molecule of (a) to (c) under stringent hybridisation conditions and conferring an increase in the amount of the fine chemical in an organism or a part thereof;
[1701] f) nucleic acid molecule encoding a polypeptide, the polypeptide being derived by substituting, deleting and/or adding one or more amino acids of the amino acid sequence of the polypeptide encoded by the nucleic acid molecules (a) to (d), preferably to (a) to (c) and conferring an increase in the amount of the fine chemical in an organism or a part thereof;
[1702] g) nucleic acid molecule encoding a fragment or an epitope of a polypeptide which is encoded by one of the nucleic acid molecules of (a) to (e), preferably to (a) to (c) and conferring an increase in the amount of the fine chemical in an organism or a part thereof;
[1703] h) nucleic acid molecule comprising a nucleic acid molecule which is obtained by amplifying nucleic acid molecules from a cDNA library or a genomic library using the primers shown in table III, application no. 6, column 7 and conferring an increase in the amount of the fine chemical in an organism or a part thereof;
[1704] i) nucleic acid molecule encoding a polypeptide which is isolated, e.g. from an expression library, with the aid of monoclonal antibodies against a polypeptide encoded by one of the nucleic acid molecules of (a) to (h), preferably to (a) to (c), and conferring an increase in the amount of the fine chemical in an organism or a part thereof;
[1705] j) nucleic acid molecule which encodes a polypeptide comprising the consensus sequence shown in table IV, application no. 6, column 7 and conferring an increase in the amount of the fine chemical in an organism or a part thereof;
[1706] k) nucleic acid molecule comprising one or more of the nucleic acid molecule encoding the amino acid sequence of a polypeptide encoding a domain of the polypeptide shown in table II, application no. 6, columns 5 and 7 and conferring an increase in the amount of the fine chemical in an organism or a part thereof; and
[1707] l) nucleic acid molecule which is obtainable by screening a suitable library under stringent conditions with a probe comprising one of the sequences of the nucleic acid molecule of (a) to (k), preferably to (a) to (c), or with a fragment of at least 15 nt, preferably 20 nt, 30 nt, 50 nt, 100 nt, 200 nt or 500 nt of the nucleic acid molecule characterized in (a) to (k), preferably to (a) to (c), and conferring an increase in the amount of the fine chemical in an organism or a part thereof;
   or which comprises a sequence which is complementary thereto.

[1708] In one embodiment, the nucleic acid molecule used in the process of the invention distinguishes over the sequence indicated in table I A, application no. 6, columns 5 and 7 by one or more nucleotides. In one embodiment, the nucleic acid molecule used in the process of the invention does not consist of the sequence indicated in table I A, application no. 6, columns 5 and 7. In one embodiment, the nucleic acid molecule used in the process of the invention is less than 100%, 99.999%, 99.99%, 99.9% or 99% identical to a sequence indicated in table I A, application no. 6, columns 5 and 7. In another embodiment, the nucleic acid molecule does not encode a polypeptide of a sequence indicated in table II A, application no. 6, columns 5 and 7.

[1709] In one embodiment, the nucleic acid molecule used in the process of the invention distinguishes over the sequence indicated in table I B, application no. 6, columns 5 and 7, by one or more nucleotides. In one embodiment, the nucleic acid molecule used in the process of the invention does not consist of the sequence indicated in table I B, application no. 6, columns 5 and 7. In one embodiment, the nucleic acid molecule used in the process of the invention is less than 100%, 99.999%, 99.99%, 99.9% or 99% identical to a sequence indicated in table I B, application no. 6, columns 5 and 7. In another embodiment, the nucleic acid molecule does not encode a polypeptide of a sequence indicated in table II B, application no. 6, columns 5 and 7.

[1710] In one embodiment, the nucleic acid molecule used in the process distinguishes over the sequence shown in table I, application no. 6, columns 5 and 7 by one or more nucleotides or does not consist of the sequence shown in table I, application no. 6, columns 5 and 7. In one embodiment, the nucleic acid molecule of the present invention is less than 100%, 99.999%, 99.99%, 99.9% or 99% identical to the sequence shown in table I, application no. 6, columns 5 and 7. In another embodiment, the nucleic acid molecule does not encode a polypeptide of the sequence shown in table II, application no. 6, columns 5 and 7.

[1711] for the disclosure of the paragraphs [0118.0.0.5] to [0120.0.0.5] see paragraphs [0118.0.0.0] to [0120.0.0.0] above.

[1712] Nucleic acid molecules with the sequence shown in table I, application no. 6, columns 5 and 7, nucleic acid molecules which are derived from the amino acid sequences shown in table II, application no. 6, columns 5 and 0.7 or from polypeptides comprising the consensus sequence shown in table IV, application no. 6, column 7, or their derivatives or homologues encoding polypeptides with the enzymatic or biological activity of a protein as shown in table II, application no. 6, column 3 or conferring the fine chemical increase after increasing its expression or activity are advantageously increased in the process according to the invention by expression either in the cytsol or in an organelle such as a plastid or mitochondria or both, preferably in plastids.

[1713] for the disclosure of this paragraph see paragraph [0122.0.0.0] above.

[1714] Nucleic acid molecules, which are advantageous for the process according to the invention and which encode polypeptides with the activity of a protein as shown in table II, application no. 6, column 3 can be determined from generally accessible databases.

[1715] for the disclosure of this paragraph see paragraph [0124.0.0.0] above.

[1716] The nucleic acid molecules used in the process according to the invention take the form of isolated nucleic acid sequences, which encode polypeptides with the activity of the proteins as shown in table II, application no. 6, column 3 and conferring the fine chemical increase by expression either in the cytsol or in an organelle such as a plastid or mitochondria or both, preferably in plastids.

[1717] for the disclosure of the paragraphs [0126.0.0.5] to [0133.0.0.5] see paragraphs [0126.0.0.0] to [0133.0.0.0] above.

[1718] However, it is also possible to use artificial sequences, which differ in one or more bases from the nucleic acid sequences found in organisms, or in one or more amino acid molecules from polypeptide sequences found in organisms, in particular from the polypeptide sequences shown in table II, application no. 6, columns 5 and 7 or the functional homologues thereof as described herein, preferably conferring above-mentioned activity, i.e. conferring the fine chemical increase after increasing its activity, e.g. after increasing the activity of a protein as shown in table II, application no. 6, column 3 by for example expression either in the cytsol or in an organelle such as a plastid or mitochondria or both, preferably in plastids.

[1719] for the disclosure of the paragraphs [0135.0.0.5] to [0140.0.0.5] see paragraphs [0135.0.0.0] to [0140.0.0.0] above.

[1720] Synthetic oligonucleotide primers for the amplification, e.g. as shown in table Ill, application no. 6, column 7, by means of polymerase chain reaction can be generated on the basis of a sequence shown herein, for example the sequence shown in table I, application no. 6, columns 5 and 7 or the sequences derived from table II, application no. 6, columns 5 and 7.

[1721] Moreover, it is possible to identify conserved regions from various organisms by carrying out protein sequence alignments with the polypeptide used in the process of the invention, in particular with sequences of the polypeptide of the invention, from which conserved regions, and in turn, degenerate primers can be derived. Conserved regions are those, which show a very little variation in the amino acid in one particular position of several homologs from different origin. The consensus sequence shown in table IV, application no. 6, column 7 is derived from said alignments.

[1722] Degenerated primers can then be utilized by PCR for the amplification of fragments of novel proteins having above-mentioned activity, e.g. conferring the increase of the fine chemical after increasing the expression or activity or having the activity of a protein as shown in table II, application no. 6, column 3 or further functional homologs of the polypeptide of the invention from other organisms.

[1723] for the disclosure of the paragraphs [0144.0.0.5] to [0151.0.0.5] see paragraphs [0144.0.0.0] to [0151.0.0.0] above.

[1724] Polypeptides having above-mentioned activity, i.e. conferring the fine chemical increase, derived from other organisms, can be encoded by other DNA sequences which hybridize to the sequences shown in table I, application no. 6, columns 5 and 7, preferably of table I B, application no. 6, columns 5 and 7 under relaxed hybridization conditions and which code on expression for peptides having the linoleic acid, triglycerides, lipids, oils and/or fats containing linoleic acid increasing activity.

[1725] for the disclosure of the paragraphs [0153.0.0.5] to [0159.0.0.5] see paragraphs [0153.0.0.0] to [0159.0.0.0] above.

[1726] Further, the nucleic acid molecule of the invention comprises a nucleic acid molecule, which is a complement of one of the nucleotide sequences of above mentioned nucleic acid molecules or a portion thereof. A nucleic acid molecule which is complementary to one of the nucleotide sequences shown in table I, application no. 6, columns 5 and 7, preferably shown in table I B, application no. 6, columns 5 and 7 is one which is sufficiently complementary to one of the nucleotide sequences shown in table I, application no. 6, columns 5 and 7, preferably shown in table I B, application no. 6, columns 5 and 7 such that it can hybridize to one of the nucleotide sequences shown in table I, application no. 6, columns 5 and 7, preferably shown in table I B, application no. 6, columns 5 and 7, thereby forming a stable duplex. Preferably, the hybridisation is performed under stringent hybridization conditions. However, a complement of one of the herein disclosed sequences is preferably a sequence complement thereto according to the base pairing of nucleic acid molecules well known to the skilled person. For example, the bases A and G undergo base pairing with the bases T and U or C, resp. and visa versa. Modifications of the bases can influence the base-pairing partner.

[1727] The nucleic acid molecule of the invention comprises a nucleotide sequence which is at least about 30%, 35%, 40% or 45%, preferably at least about 50%, 55%, 60% or 65%, more preferably at least about 70%, 80%, or 90%, and even more preferably at least about 95%, 97%, 98%, 99% or more homologous to a nucleotide sequence shown in table I, application no. 6, columns 5 and 7, preferably shown in table I B, application no. 6, columns 5 and 7, or a portion thereof and preferably has above mentioned activity, in particular having a fine chemical increasing activity after increasing the activity or an activity of a gene product as shown in table II, application no. 6, column 3 by for example expression either in the cytsol or in an organelle such as a plastid or mitochondria or both, preferably in plastids.

[1728] The nucleic acid molecule of the invention comprises a nucleotide sequence which hybridizes, preferably hybridizes under stringent conditions as defined herein, to one of the nucleotide sequences shown in table I, application no. 6, columns 5 and 7, preferably shown in table I B, application no. 6, columns 5 and 7, or a portion thereof and encodes a protein having above-mentioned activity, e.g. conferring of a linoleic acid, triglycerides, lipids, oils and/or fats containing linoleic acid increase by for example expression either in the cytsol or in an organelle such as a plastid or mitochondria or both, preferably in plastids, and optionally, the activity of a protein as shown in table II, application no. 6, column 3.

[1729] Moreover, the nucleic acid molecule of the invention can comprise only a portion of the coding region of one of the sequences shown in table I, application no. 6, columns 5 and 7, preferably shown in table I B, application no. 6, columns 5 and 7, for example a fragment which can be used as a probe or primer or a fragment encoding a biologically active portion of the polypeptide of the present invention or of a polypeptide used in the process of the present invention, i.e. having above-mentioned activity, e.g. conferring an increase of the fine chemical if its activity is increased by for example expression either in the cytsol or in an organelle such as a plastid or mitochondria or both, preferably in plastids. The nucleotide sequences determined from the cloning of the present protein-according-to-the-invention-encoding gene allows for the generation of probes and primers designed for use in identifying and/or cloning its homologues in other cell types and organisms. The probe/primer typically comprises substantially purified oligonucleotide. The oligonucleotide typically comprises a region of nucleotide sequence that hybridizes under stringent conditions to at least about 12, 15 preferably about 20 or 25, more preferably about 40, 50 or 75 consecutive nucleotides of a sense strand of one of the sequences set forth, e.g., in table I, application no. 6, columns 5 and 7, an anti-sense sequence of one of the sequences, e.g., set forth in table I, application no. 6, columns 5 and 7, preferably shown in table I B, application no. 6, columns 5 and 7, or naturally occurring mutants thereof. Primers based on a nucleotide of invention can be used in PCR reactions to clone homologues of the polypeptide of the invention or of the polypeptide used in the process of the invention, e.g. as the primers described in the examples of the present invention, e.g. as shown in the examples. A PCR with the primers shown in table III, application no. 6, column 7 will result in a fragment of the gene product as shown in table II, column 3.

[1730] for the disclosure of this paragraph see paragraph [0164.0.0.0] above.

[1731] The nucleic acid molecule of the invention encodes a polypeptide or portion thereof which includes an amino acid sequence which is sufficiently homologous to the amino acid sequence shown in table II, application no. 6, columns 5 and 7 such that the protein or portion thereof maintains the ability to participate in the fine chemical production, in particular a linoleic acid, triglycerides, lipids, oils and/or fats containing linoleic acid increasing the activity as mentioned above or as described in the examples in plants or microorganisms is comprised.

[1732] As used herein, the language “sufficiently homologous” refers to proteins or portions thereof which have amino acid sequences which include a minimum number of identical or equivalent amino acid residues (e.g., an amino acid residue which has a similar side chain as an amino acid residue in one of the sequences of the polypeptide of the present invention) to an amino acid sequence shown in table II, application no. 6, columns 5 and 7 such that the protein or portion thereof is able to participate in the increase of the fine chemical production. For examples having the activity of a protein as shown in table II, column 3 and as described herein.

[1733] In one embodiment, the nucleic acid molecule of the present invention comprises a nucleic acid that encodes a portion of the protein of the present invention. The protein is at least about 30%, 35%, 40%, 45% or 50%, preferably at least about 55%, 60%, 65% or 70%, and more preferably at least about 75%, 80%, 85%, 90%, 91%, 92%, 93% or 94% and most preferably at least about 95%, 97%, 98%, 99% or more homologous to an entire amino acid sequence of table II, application no. 6, columns 5 and 7 and having above-mentioned activity, e.g. conferring preferably the increase of the fine chemical by for example expression either in the cytsol or in an organelle such as a plastid or mitochondria or both, preferably in plastids.

[1734] for the disclosure of the paragraphs [0168.0.0.5] and [0169.0.0.5] see paragraphs [0168.0.0.0] and [0169.0.0.0] above.

[1735] The invention further relates to nucleic acid molecules that differ from one of the nucleotide sequences shown in table I, application no. 6, columns 5 and 7 (and portions thereof) due to degeneracy of the genetic code and thus encode a polypeptide of the present invention, in particular a polypeptide having above mentioned activity, e.g. conferring an increase in the fine chemical in a organism, e.g. as that polypeptides depicted by the sequence shown in table II, application no. 6, columns 5 and 7 or the functional homologues. Advantageously, the nucleic acid molecule of the invention comprises, or in an other embodiment has, a nucleotide sequence encoding a protein comprising, or in an other embodiment having, an amino acid sequence shown in table II, application no. 6, columns 5 and 7 or the functional homologues. In a still further embodiment, the nucleic acid molecule of the invention encodes a full length protein which is substantially homologous to an amino acid sequence shown in table II, application no. 6, columns 5 and 7 or the functional homologues. However, in a preferred embodiment, the nucleic acid molecule of the present invention does not consist of the sequence shown in table I, application no. 6, columns 5 and 7, preferably as indicated in table I A, application no. 6, columns 5 and 7. Preferably the nucleic acid molecule of the invention is a functional homologue or identical to a nucleic acid molecule indicated in table I B, application no. 6, columns 5 and 7.

[1736] for the disclosure of the paragraphs [0171.0.0.5] to [0173.0.0.5] see paragraphs [0171.0.0.0] to [0173.0.0.0] above.

[1737] Accordingly, in another embodiment, a nucleic acid molecule of the invention is at least 15, 20, 25 or 30 nucleotides in length. Preferably, it hybridizes under stringent conditions to a nucleic acid molecule comprising a nucleotide sequence of the nucleic acid molecule of the present invention or used in the process of the present invention, e.g. comprising the sequence shown in table I, application no. 6, columns 5 and 7. The nucleic acid molecule is preferably at least 20, 30, 50, 100, 250 or more nucleotides in length.

[1738] for the disclosure of this paragraph see paragraph [0175.0.0.0] above.

[1739] Preferably, nucleic acid molecule of the invention that hybridizes under stringent conditions to a sequence shown in table I, application no. 6, columns 5 and 7 corresponds to a naturally-occurring nucleic acid molecule of the invention. As used herein, a “naturally-occurring” nucleic acid molecule refers to an RNA or DNA molecule having a nucleotide sequence that occurs in nature (e.g., encodes a natural protein). Preferably, the nucleic acid molecule encodes a natural protein having abovementioned activity, e.g. conferring the fine chemical increase after increasing the expression or activity thereof or the activity of a protein of the invention or used in the process of the invention by for example expression the nucleic acid sequence of the gene product in the cytsol and/or in an organelle such as a plastid or mitochondria, preferably in plastids.

[1740] for the disclosure of this paragraph see paragraph [0177.0.0.0] above.

[1741] For example, nucleotide substitutions leading to amino acid substitutions at “non-essential” amino acid residues can be made in a sequence of the nucleic acid molecule of the invention or used in the process of the invention, e.g. shown in table I, application no. 6, columns 5 and 7.

[1742] for the disclosure of the paragraphs [0179.0.0.5] and [0180.0.0.5] see paragraphs [0179.0.0.0] and [0180.0.0.0] above.

[1743] Accordingly, the invention relates to nucleic acid molecules encoding a polypeptide having above-mentioned activity, e.g. conferring an increase in the fine chemical in an organisms or parts thereof by for example expression either in the cytsol or in an organelle such as a plastid or mitochondria or both, preferably in plastids that contain changes in amino acid residues that are not essential for said activity. Such polypeptides differ in amino acid sequence from a sequence contained in the sequences shown in table II, application no. 6, columns 5 and 7, preferably shown in table II A, application no. 6, columns 5 and 7 yet retain said activity described herein. The nucleic acid molecule can comprise a nucleotide sequence encoding a polypeptide, wherein the polypeptide comprises an amino acid sequence at least about 50% identical to an amino acid sequence shown in table II, application no. 6, columns 5 and 7, preferably shown in table II A, application no. 6, columns 5 and 7 and is capable of participation in the increase of production of the fine chemical after increasing its activity, e.g. its expression by for example expression either in the cytsol or in an organelle such as a plastid or mitochondria or both, preferably in plastids. Preferably, the protein encoded by the nucleic acid molecule is at least about 60% identical to the sequence shown in table II, application no. 6, columns 5 and 7, preferably shown in table II A, application no. 6, columns 5 and 7, more preferably at least about 70% identical to one of the sequences shown in table II, application no. 6, columns 5 and 7, preferably shown in table II A, application no. 6, columns 5 and 7, even more preferably at least about 80%, 90%, 95% homologous to the sequence shown in table II, application no. 6, columns 5 and 7, preferably shown in table II A, application no. 6, columns 5 and 7, and most preferably at least about 96%, 97%, 98%, or 99% identical to the sequence shown in table II, application no. 6, columns 5 and 7, preferably shown in table II A, application no. 6, columns 5 and 7.

[1744] for the disclosure of the paragraphs [0182.0.0.5] to [0188.0.0.5] see paragraphs [0182.0.0.0] to [0188.0.0.0] above.

[1745] Functional equivalents derived from one of the polypeptides as shown in table II, application no. 6, columns 5 and 7, preferably shown in table II B, application no. 6, columns 5 and 7 resp., according to the invention by substitution, insertion or deletion have at least 30%, 35%, 40%, 45% or 50%, preferably at least 55%, 60%, 65% or 70% by preference at least 80%, especially preferably at least 85% or 90%, 91%, 92%, 93% or 94%, very especially preferably at least 95%, 97%, 98% or 99% homology with one of the polypeptides as shown in table II, application no. 6, columns 5 and 7, preferably shown in table II B, application no. 6, columns 5 and 7 resp., according to the invention and are distinguished by essentially the same properties as the polypeptide as shown in table II, application no. 6, columns 5 and 7, preferably shown in table II B, application no. 6, columns 5 and 7.

[1746] Functional equivalents derived from the nucleic acid sequence as shown in table I, application no. 6, columns 5 and 7, preferably shown in table I B, application no. 6, columns 5 and 7 resp., according to the invention by substitution, insertion or deletion have at least 30%, 35%, 40%, 45% or 50%, preferably at least 55%, 60%, 65% or 70% by preference at least 80%, especially preferably at least 85% or 90%, 91%, 92%, 93% or 94%, very especially preferably at least 95%, 97%, 98% or 99% homology with one of the polypeptides as shown in table II, application no. 6, columns 5 and 7, preferably shown in table II B, application no. 6, columns 5 and 7 resp., according to the invention and encode polypeptides having essentially the same properties as the polypeptide as shown in table II, application no. 6, columns 5 and 7, preferably shown in table II B, application no. 6, columns 5 and 7.

[1747] for the disclosure of this paragraph see paragraph [0191.0.0.0] above.

[1748] A nucleic acid molecule encoding an homologous to a protein sequence of table II, application no. 6, columns 5 and 7, preferably shown in table II B, application no. 6, columns 5 and 7 resp., can be created by introducing one or more nucleotide substitutions, additions or deletions into a nucleotide sequence of the nucleic acid molecule of the present invention, in particular of table I, application no. 6, columns 5 and 7, preferably shown in table I B, application no. 6, columns 5 and 7 resp., such that one or more amino acid substitutions, additions or deletions are introduced into the encoded protein. Mutations can be introduced into the encoding sequences of table I, application no. 6, columns 5 and 7, preferably shown in table I B, application no. 6, columns 5 and 7 resp., by standard techniques, such as site-directed mutagenesis and PCR-mediated mutagenesis.

[1749] for the disclosure of the paragraphs [0193.0.0.5] to [0196.0.0.5] see paragraphs [0193.0.0.0] to [0196.0.0.0] above.

[1750] Homologues of the nucleic acid sequences used, with the sequence shown in table I, application no. 6, columns 5 and 7, preferably shown in table I B, application no. 6, columns 5 and 7, comprise also allelic variants with at least approximately 30%, 35%, 40% or 45% homology, by preference at least approximately 50%, 60% or 70%, more preferably at least approximately 90%, 91%, 92%, 93%, 94% or 95% and even more preferably at least approximately 96%, 97%, 98%, 99% or more homology with one of the nucleotide sequences shown or the abovementioned derived nucleic acid sequences or their homologues, derivatives or analogues or parts of these. Allelic variants encompass in particular functional variants which can be obtained by deletion, insertion or substitution of nucleotides from the sequences shown, preferably from table I, application no. 6, columns 5 and 7, preferably shown in table I B, application no. 6, columns 5 and 7, or from the derived nucleic acid sequences, the intention being, however, that the enzyme activity or the biological activity of the resulting proteins synthesized is advantageously retained or increased.

[1751] In one embodiment of the present invention, the nucleic acid molecule of the invention or used in the process of the invention comprises the sequences shown in any of the table I, application no. 6, columns 5 and 7, preferably shown in table I B, application no. 6, columns 5 and 7. It is preferred that the nucleic acid molecule comprises as little as possible other nucleotides not shown in any one of table I, application no. 6, columns 5 and 7, preferably shown in table I B, application no. 6, columns 5 and 7. In one embodiment, the nucleic acid molecule comprises less than 500, 400, 300, 200, 100, 90, 80, 70, 60, 50 or 40 further nucleotides. In a further embodiment, the nucleic acid molecule comprises less than 30, 20 or 10 further nucleotides. In one embodiment, the nucleic acid molecule use in the process of the invention is identical to the sequences shown in table I, application no. 6, columns 5 and 7, preferably shown in table I B, application no. 6, columns 5 and 7.

[1752] Also preferred is that the nucleic acid molecule used in the process of the invention encodes a polypeptide comprising the sequence shown in table II, application no. 6, columns 5 and 7, preferably shown in table II B, application no. 6, columns 5 and 7. In one embodiment, the nucleic acid molecule encodes less than 150, 130, 100, 80, 60, 50, 40 or 30 further amino acids. In a further embodiment, the encoded polypeptide comprises less than 20, 15, 10, 9, 8, 7, 6 or 5 further amino acids. In one embodiment used in the inventive process, the encoded polypeptide is identical to the sequences shown in table II, application no. 6, columns 5 and 7, preferably shown in table II B, application no. 6, columns 5 and 7.

[1753] In one embodiment, the nucleic acid molecule of the invention or used in the process encodes a polypeptide comprising the sequence shown in table II, application no. 6, columns 5 and 7, preferably shown in table II B, application no. 6, columns 5 and 7 comprises less than 100 further nucleotides. In a further embodiment, said nucleic acid molecule comprises less than 30 further nucleotides. In one embodiment, the nucleic acid molecule used in the process is identical to a coding sequence of the sequences shown in table I, application no. 6, columns 5 and 7, preferably shown in table I B, application no. 6, columns 5 and 7.

[1754] Polypeptides (=proteins), which still have the essential biological or enzymatic activity of the polypeptide of the present invention conferring an increase of the fine chemical i.e. whose activity is essentially not reduced, are polypeptides with at least 10% or 20%, by preference 30% or 40%, especially preferably 50% or 60%, very especially preferably 80% or 90 or more of the wild type biological activity or enzyme activity, advantageously, the activity is essentially not reduced in comparison with the activity of a polypeptide shown in table II, application no. 6, columns 5 and 7 expressed under identical conditions.

[1755] Homologues of table I, application no. 6, columns 5 and 7 or of the derived sequences of table II, application no. 6, columns 5 and 7 also mean truncated sequences, cDNA, single-stranded DNA or RNA of the coding and noncoding DNA sequence. Homologues of said sequences are also understood as meaning derivatives, which comprise noncoding regions such as, for example, UTRs, terminators, enhancers or promoter variants. The promoters upstream of the nucleotide sequences stated can be modified by one or more nucleotide substitution(s), insertion(s) and/or deletion(s) without, however, interfering with the functionality or activity either of the promoters, the open reading frame (=ORF) or with the 3′-regulatory region such as terminators or other 3′ regulatory regions, which are far away from the ORF. It is furthermore possible that the activity of the promoters is increased by modification of their sequence, or that they are replaced completely by more active promoters, even promoters from heterologous organisms. Appropriate promoters are known to the person skilled in the art and are mentioned herein below.

[1756] for the disclosure of the paragraphs [0203.0.0.5] to [0215.0.0.5] see paragraphs [0203.0.0.0] to [0215.0.0.0] above.

[1757] Accordingly, in one embodiment, the invention relates to a nucleic acid molecule, which comprises a nucleic acid molecule selected from the group consisting of:
[1758] a) nucleic acid molecule encoding, preferably at least the mature form, of the polypeptide shown in table II, application no. 6, columns 5 and 7, preferably in table II B, application no. 6, columns 5 and 7; or a fragment thereof conferring an increase in the amount of the fine chemical in an organism or a part thereof
[1759] b) nucleic acid molecule comprising, preferably at least the mature form, of the nucleic acid molecule shown in table I, application no. 6, columns 5 and 7, preferably in table I B, application no. 6, columns 5 and 7 or a fragment thereof conferring an increase in the amount of the fine chemical in an organism or a part thereof;
[1760] c) nucleic acid molecule whose sequence can be deduced from a polypeptide sequence encoded by a nucleic acid molecule of (a) or (b) as result of the degeneracy of the genetic code and conferring an increase in the amount of the fine chemical in an organism or a part thereof;
[1761] d) nucleic acid molecule encoding a polypeptide whose sequence has at least 50% identity with the amino acid sequence of the polypeptide encoded by the nucleic acid molecule of (a) to (c) and conferring an increase in the amount of the fine chemical in an organism or a part thereof;
[1762] e) nucleic acid molecule which hybridizes with a nucleic acid molecule of (a) to (c) under stringent hybridisation conditions and conferring an increase in the amount of the fine chemical in an organism or a part thereof;
[1763] f) nucleic acid molecule encoding a polypeptide, the polypeptide being derived by substituting, deleting and/or adding one or more amino acids of the amino acid sequence of the polypeptide encoded by the nucleic acid molecules (a) to (d), preferably to (a) to (c), and conferring an increase in the amount of the fine chemical in an organism or a part thereof;
[1764] g) nucleic acid molecule encoding a fragment or an epitope of a polypeptide which is encoded by one of the nucleic acid molecules of (a) to (e), preferably to (a) to (c) and conferring an increase in the amount of the fine chemical in an organism or a part thereof;
[1765] h) nucleic acid molecule comprising a nucleic acid molecule which is obtained by amplifying a cDNA library or a genomic library using the primers in table III, application no. 6, column 7 and conferring an increase in the amount of the fine chemical in an organism or a part thereof;
[1766] i) nucleic acid molecule encoding a polypeptide which is isolated, e.g. from a expression library, with the aid of monoclonal antibodies against a polypeptide encoded by one of the nucleic acid molecules of (a) to (g), preferably to (a) to (c) and conferring an increase in the amount of the fine chemical in an organism or a part thereof;
[1767] j) nucleic acid molecule which encodes a polypeptide comprising the consensus sequence shown in table IV, application no. 6, column 7 and conferring an increase in the amount of the fine chemical in an organism or a part thereof;
[1768] k) nucleic acid molecule encoding the amino acid sequence of a polypeptide encoding a domain of the polypeptide shown in table II, application no. 6, columns 5 and 7 and conferring an increase in the amount of the fine chemical in an organism or a part thereof; and
[1769] l) nucleic acid molecule which is obtainable by screening a suitable nucleic acid library under stringent hybridization conditions with a probe comprising one of the sequences of the nucleic acid molecule of (a) to (k) or with a fragment of at least 15 nt, preferably 20 nt, 30 nt, 50 nt, 100 nt, 200 nt or 500 nt of the nucleic acid molecule characterized in (a) to (h) or of the nucleic acid molecule shown in table I, application no. 6, columns 5 and 7 or a nucleic acid molecule encoding, preferably at least the mature form of, the polypeptide shown in table II, application no. 6, columns 5 and 7, and conferring an increase in the amount of the fine chemical in an organism or a part thereof; or which encompasses a sequence which is complementary thereto;
   whereby, preferably, the nucleic acid molecule according to (a) to (l) distinguishes over the sequence depicted in table IA and/or I B, application no. 6, columns 5 and 7 by one or more nucleotides. In one embodiment, the nucleic acid molecule of the invention does not consist of the sequence shown in table I A and/or I B, application no. 6, columns 5 and 7. In an other embodiment, the nucleic acid molecule of the present invention is at least 30% identical and less than 100%, 99.999%, 99.99%, 99.9% or 99% identical to the sequence shown in table IA and/or I B, application no. 6, columns 5 and 7. In a further embodiment the nucleic acid molecule does not encode the polypeptide sequence shown in table II A and/or II B, application no. 6, columns 5 and 7. Accordingly, in one embodiment, the nucleic acid molecule of the present invention encodes in one embodiment a polypeptide which differs at least in one or more amino acids from the polypeptide shown in table II A and/or II B, application no. 6, columns 5 and 7 does not encode a protein of the sequence shown in table II A and/or II B, application no. 6, columns 5 and 7. Accordingly, in one embodiment, the protein encoded by a sequence of a nucleic acid according to (a) to (l) does not consist of the sequence shown in table I A and/or I B, application no. 6, columns 5 and 7. In a further embodiment, the protein of the present invention is at least 30% identical to protein sequence depicted in table II A and/or II B, application no. 6, columns 5 and 7 and less than 100%, preferably less than 99.999%, 99.99% or 99.9%, more preferably less than 99%, 985, 97%, 96% or 95% identical to the sequence shown in table. II A and/or II B, application no. 6, columns 5 and 7.

[1770] for the disclosure of the paragraphs [0217.0.0.5] to [0226.0.0.5] see paragraphs [0217.0.0.0] to [0226.0.0.0] above.

[1771] In general, vector systems preferably also comprise further cis-regulatory regions such as promoters and terminators and/or selection markers by means of which suitably transformed organisms can be identified. While vir genes and T-DNA sequences are located on the same vector in the case of cointegrated vector systems, binary systems are based on at least two vectors, one of which bears vir genes, but no T-DNA, while a second one bears T-DNA, but no vir gene. Owing to this fact, the last-mentioned vectors are relatively small, easy to manipulate and capable of replication in E. coli and in Agrobacterium. These binary vectors include vectors from the series pBIB-HYG, pPZP, pBecks, pGreen. Those which are preferably used in accordance with the invention are Bin19, pBI101, pBinAR, pGPTV and pCAMBIA. An overview of binary vectors and their use is given by Hellens et al, Trends in Plant Science (2000) 5, 446-451. The vectors are preferably modified in such a manner, that they already contain the nucleic acid coding for the transitpeptide and that the nucleic acids of the invention, preferentially the nucleic acid sequences encoding the polypeptides shown in table II, application no. 6, columns 5 and 7 can be cloned 3′ prime to the transitpeptide encoding sequence, leading to a functional preprotein, which is directed to the plastids and which means that the mature protein fulfills its biological activity.

[1772] for the disclosure of the paragraphs [0228.0.0.5] to [0239.0.0.5] see paragraphs [0228.0.0.0] to [0239.0.0.0] above.

[1773] The abovementioned nucleic acid molecules can be cloned into the nucleic acid constructs or vectors according to the invention in combination together with further genes, or else different genes are introduced by transforming several nucleic acid constructs or vectors (including plasmids) into a host cell, advantageously into a plant cell or a microorganisms.

In addition to the sequence mentioned in Table I, application no. 6, columns 5 and 7 or its derivatives, it is advantageous additionally to express and/or mutate further genes in the organisms. Especially advantageously, additionally at least one further gene of the fatty acid biosynthetic pathway such as for palmitate, palmitoleate, stearate and/or oleate is expressed in the organisms such as plants or microorganisms. It is also possible that the regulation of the natural genes has been modified advantageously so that the gene and/or its gene product is no longer subject to the regulatory mechanisms which exist in the organisms. This leads to an increased synthesis of the respective desired fine chemical since, for example, feedback regulations no longer exist to the same extent or not at all. In addition it might be advantageously to combine the sequences shown in Table I, application no. 6, columns 5 and 7 with genes which generally support or enhances to growth or yield of the target organism, for example genes which lead to faster growth rate of microorganisms or genes which produces stress-, pathogen, or herbicide resistant plants.

[1774] In a further embodiment of the process of the invention, therefore, organisms are grown, in which there is simultaneous overexpression of at least one nucleic acid or one of the genes which code for proteins involved in the fatty acid metabolism, in particular in fatty acid synthesis.

[1775] Further advantageous nucleic acid sequences which can be expressed in combination with the sequences used in the process and/or the abovementioned biosynthesis genes are the sequences encoding further genes of the saturated, poly unsaturated fatty acid biosynthesis such as desaturases like Δ-4-desaturases, desaturases, Δ-6-desaturases, Δ-8-desaturases, Δ-9-desaturases, Δ-12-desaturases, Δ-17-desaturases, ω-3-desaturases, elongases like Δ-5-elongases, Δ-6-elongases, Δ-9-elongases, acyl-CoA-dehydrogenases, acyl-ACP-desaturases, acyl-ACP-thioesterases, fatty acid acyl-transferases, acyl-CoA lysophospholipid-acyltransferases, acyl-CoA carboxylases, fatty acid synthases, fatty acid hydroxylases, acyl-CoA oxydases, acetylenases, lipoxygenases, triacyl-lipases etc. as described in WO 98/46765, WO 98/46763, WO 98/46764, WO 99/64616, WO 00/20603, WO 00/20602, WO 00/40705, US 20040172682, US 20020156254, U.S. Pat. No. 6,677,145 US 20040053379 or US 20030101486. These genes lead to an increased synthesis of the essential fatty acids.

[1776] In a further advantageous embodiment of the process of the invention, the organisms used in the process are those in which simultaneously a linoleic acid degrading protein is attenuated, in particular by reducing the rate of expression of the corresponding gene.

[1777] The fatty acids produced can be isolated from the organism by methods with which the skilled worker is familiar for example via extraction, salt precipitation and/or different chromatography methods. The process according to the invention can be conducted batchwise, semibatchwise or continuously. The fine chemical produced in the process according to the invention can be isolated as mentioned above from the organisms, advantageously plants, in the form of their oils, fats, lipids and/or free fatty acids. Fatty acids produced by this process can be obtained by harvesting the organisms, either from the crop in which they grow, or from the field. This can be done via pressing or extraction of the plant parts, preferably the plant seeds. Hexane is preferably used as solvent in the process, in which more than 96% of the compounds produced in the process can be isolated. Thereafter, the resulting products are processed further, i.e. degummed, refined, bleached and/or deodorized.

[1778] for the disclosure of the paragraphs [0243.0.0.5] to [0264.0.0.5] see paragraphs [0243.0.0.0] to [0264.0.0.0] above.

[1779] Other preferred sequences for use in operable linkage in gene expression constructs are targeting sequences, which are required for targeting the gene product into specific cell compartments (for a review, see Kermode, Crit. Rev. Plant Sci. 15, 4 (1996) 285-423 and references cited therein), for example into the vacuole, the nucleus, all types of plastids, such as amyloplasts, chloroplasts, chromoplasts, the extracellular space, the mitochondria, the endoplasmic reticulum, elaioplasts, peroxisomes, glycosomes, and other compartments of cells or extracellular preferred are sequences, which are involved in targeting to plastids as mentioned above. Sequences, which must be mentioned in this context are, in particular, the signal-peptide- or transit-peptide-encoding sequences which are known per se. For example, plastid-transit-peptide-encoding sequences enable the targeting of the expression product into the plastids of a plant cell. Targeting sequences are also known for eukaryotic and to a lower extent for prokaryotic organisms and can advantageously be operable linked with the nucleic acid molecule of the present invention as shown in table I, application no. 6, columns 5 and 7 and described herein to achieve an expression in one of said compartments or extracellular.

[1780] for the disclosure of the paragraphs [0266.0.0.5] to [0287.0.0.5] see paragraphs [0266.0.0.0] to [0287.0.0.0] above.

[1781] Accordingly, one embodiment of the invention relates to a vector where the nucleic acid molecule according to the invention is linked operably to regulatory sequences which permit the expression in a prokaryotic or eukaryotic or in a prokaryotic and eukaryotic host. A further preferred embodiment of the invention relates to a vector in which a nucleic acid sequence encoding one of the polypeptides shown in table II, application no. 6, columns 5 and 7 or their homologs is functionally linked to a plastidial targeting sequence. A further preferred embodiment of the invention relates to a vector in which a nucleic acid sequence encoding one of the polypeptides shown in table II, application no. 6, columns 5 and 7 or their homologs is functionally linked to a regulatory sequences which permit the expression in plastids.

[1782] for the disclosure of the paragraphs [0289.0.0.5] to [0296.0.0.5] see paragraphs [0289.0.0.0] to [0296.0.0.0] above.

[1783] Moreover, native polypeptide conferring the increase of the fine chemical in an organism or part thereof can be isolated from cells (e.g., endothelial cells), for example using the antibody of the present invention as described below, in particular, an anti-b0403, anti-b0931, anti-b1046, anti-b1933, anti-b2126, anti-b3708, anti-b3728 and/or anti-YNR012W protein antibody or an antibody against polypeptides as shown in table II, application no. 6, columns 5 and 7, which can be produced by standard techniques utilizing the polypeptide of the present invention or fragment thereof, i.e., the polypeptide of this invention. Preferred are monoclonal antibodies.

[1784] for the disclosure of this paragraph see paragraph [0298.0.0.0] above.

[1785] In one embodiment, the present invention relates to a polypeptide having the sequence shown in table II, application no. 6, columns 5 and 7 or as coded by the nucleic acid molecule shown in table I, application no. 6, columns 5 and 7 or functional homologues thereof.

[1786] In one advantageous embodiment, in the method of the present invention the activity of a polypeptide is increased comprising or consisting of the consensus sequence shown in table IV, application no. 6, columns 7 and in one another embodiment, the present invention relates to a polypeptide comprising or consisting of the consensus sequence shown in table IV, application no. 6, column 7 whereby 20 or less, preferably 15 or 10, preferably 9, 8, 7, or 6, more preferred 5 or 4, even more preferred 3, even more preferred 2, even more preferred 1, most preferred 0 of the amino acids positions indicated can be replaced by any amino acid.

[1787] for the disclosure of the paragraphs [0301.0.0.5] to [0304.0.0.5] see paragraphs [0301.0.0.0] to [0304.0.0.0] above.

[1788] In one advantageous embodiment, the method of the present invention comprises the increasing of a polypeptide comprising or consisting of plant or microorganism specific consensus sequences.

In one embodiment, said polypeptide of the invention distinguishes over the sequence shown in table II A and/or II B, application no. 6, columns 5 and 7 by one or more amino acids. In one embodiment, polypeptide distinguishes form the sequence shown in table II A and/or II B, application no. 6, columns 5 and 7 by more than 5, 6, 7, 8 or 9 amino acids, preferably by more than 10, 15, 20, 25 or 30 amino acids, even more preferred are more than 40, 50, or 60 amino acids and, preferably, the sequence of the polypeptide of the invention distinguishes from the sequence shown in table II A and/or II B, application no. 6, columns 5 and 7 by not more than 80% or 70% of the amino acids, preferably not more than 60% or 50%, more preferred not more than 40% or 30%, even more preferred not more than 20% or 10%. In an other embodiment, said polypeptide of the invention does not consist of the sequence shown in table II A and/or II B, application no. 6, columns 5 and 7.

[1789] for the disclosure of this paragraph see paragraph [0306.0.0.0] above.

[1790] In one embodiment, the invention relates to polypeptide conferring an increase in the fine chemical in an organism or part being encoded by the nucleic acid molecule of the invention or used in the process of the invention and having a sequence which distinguishes from the sequence as shown in table II A and/or II B, application no. 6, columns 5 and 7 by one or more amino acids. In another embodiment, said polypeptide of the invention does not consist of the sequence shown in table II A and/or II B, application no. 6, columns 5 and 7. In a further embodiment, said polypeptide of the present invention is less than 100%, 99.999%, 99.99%, 99.9% or 99% identical. In one embodiment, said polypeptide does not consist of the sequence encoded by the nucleic acid molecules shown in table I A and/or I B, application no. 6, columns 5 and 7.

[1791] In one embodiment, the present invention relates to a polypeptide having the activity of the protein as shown in table II A and/or II B, application no. 6, column 3., which distinguishes over the sequence depicted in table II A and/or II B, application no. 6, columns 5 and 7 by one or more amino acids, preferably by more than 5, 6, 7, 8 or 9 amino acids, preferably by more than 10, 15, 20, 25 or 30 amino acids, even more preferred are more than 40, 50, or 60 amino acids but even more preferred by less than 70% of the amino acids, more preferred by less than 50%, even more preferred my less than 30% or 25%, more preferred are 20% or 15%, even more preferred are less than 10%. In a further preferred embodiment the polypeptide of the invention takes the form of a preprotein consisting of a plastidial transitpeptide joint to a polypeptide having the activity of the protein as shown in table II A and/or II B, column 3, from which the transitpeptide is preferably cleaved off upon transport of the preprotein into the organelle for example into the, plastid or mitochondria.

[1792] for the disclosure of the paragraphs [0309.0.0.5] to [0311.0.0.5] see paragraphs [0309.0.0.0] to [0311.0.0.0] above.

[1793] A polypeptide of the invention can participate in the process of the present invention. The polypeptide or a portion thereof comprises preferably an amino acid sequence, which is sufficiently homologous to an amino acid sequence shown in table II, application no. 6, columns 5 and 7.

[1794] Further, the polypeptide can have an amino acid sequence which is encoded by a nucleotide sequence which hybridizes, preferably hybridizes under stringent conditions as described above, to a nucleotide sequence of the nucleic acid molecule of the present invention. Accordingly, the polypeptide has an amino acid sequence which is encoded by a nucleotide sequence that is at least about 35%, 40%, 45%, 50%, 55%, 60%, 65% or 70%, preferably at least about 75%, 80%, 85% or 90, and more preferably at least about 91%, 92%, 93%, 94% or 95%, and even more preferably at least about 96%, 97%, 98%, 99% or more homologous to one of the amino acid sequences as shown in table II A and/or II B, application no. 6, columns 5 and 7. The preferred polypeptide of the present invention preferably possesses at least one of the activities according to the invention and described herein. A preferred polypeptide of the present invention includes an amino acid sequence encoded by a nucleotide sequence which hybridizes, preferably hybridizes under stringent conditions, to a nucleotide sequence of table I A and/or I B, application no. 6, columns 5 and 7 or which is homologous thereto, as defined above.

[1795] Accordingly the polypeptide of the present invention can vary from the sequences shown in table II A and/or II B, application no. 6, columns 5 and 7 in amino acid sequence due to natural variation or mutagenesis, as described in detail herein. Accordingly, the polypeptide comprise an amino acid sequence which is at least about 35%, 40%, 45%, 50%, 55%, 60%, 65% or 70%, preferably at least about 75%, 80%, 85% or 90, and more preferably at least about 91%, 92%, 93%, 94% or 95%, and most preferably at least about 96%, 97%, 98%, 99% or more homologous to an entire amino acid sequence shown in table II A and/or II B, application no. 6, columns 5 and 7.

[1796] for the disclosure of this paragraph see paragraph [0315.0.0.0] above.

[1797] Biologically active portions of an polypeptide of the present invention include peptides comprising amino acid sequences derived from the amino acid sequence of the polypeptide of the present invention or used in the process of the present invention, e.g., the amino acid sequence shown in table II, application no. 6, columns 5 and 7 or the amino acid sequence of a protein homologous thereto, which include fewer amino acids than a full length polypeptide of the present invention or used in the process of the present invention or the full length protein which is homologous to an polypeptide of the present invention or used in the process of the present invention depicted herein, and exhibit at least one activity of polypeptide of the present invention or used in the process of the present invention.

[1798] for the disclosure of this paragraph see paragraph [0317.0.0.0] above.

[1799] Manipulation of the nucleic acid molecule of the invention may result in the production of a protein having differences from the wild-type protein as shown in table II, application no. 6, column 3. Differences shall mean at least one amino acid different from the sequences as shown in table II, application no. 6, column 3, preferably at least 2, 3, 4, 5, 6, 7, 8, 9 or 10 amino acids, more preferably at least 15, 20, 25, 30, 35, 40, 45 or 50 amino acids different from the sequences as shown in table II, application no. 6, column 3. These proteins may be improved in efficiency or activity, may be present in greater numbers in the cell than is usual, or may be decreased in efficiency or activity in relation to the wild type protein.

[1800] Any mutagenesis strategies for the polypeptide of the present invention or the polypeptide used in the process of the present invention to result in increasing said activity are not meant to be limiting; variations on these strategies will be readily apparent to one skilled in the art. Using such strategies, and incorporating the mechanisms disclosed herein, the nucleic acid molecule and polypeptide of the invention may be utilized to generate plants or parts thereof, expressing wildtype proteins or mutated proteins of the proteins as shown in table II, application no. 6, column 3. The nucleic acid molecules and polypeptide molecules of the invention are expressed such that the yield, production, and/or efficiency of production of a desired compound is improved.

[1801] for the disclosure of the paragraphs [0320.0.0.5] to [0322.0.0.5] see paragraphs [0320.0.0.0] to [0322.0.0.0] above.

[1802] In one embodiment, a protein (=polypeptide) as shown in table II, application no. 6, column 3 refers to a polypeptide having an amino acid sequence corresponding to the polypeptide of the invention or used in the process of the invention, whereas a “non-inventive protein or polypeptide” or “other polypeptide” refers to a polypeptide having an amino acid sequence corresponding to a protein which is not substantially homologous to a polypeptide of the invention, preferably which is not substantially homologous to a polypeptide or protein as shown in table II, application no. 6, column 3, e.g., a protein which does not confer the activity described herein and which is derived from the same or a different organism.

[1803] for the disclosure of the paragraphs [0324.0.0.5] to [0329.0.0.5] see paragraphs [0324.0.0.0] to [0329.0.0.0] above.

[1804] In an especially preferred embodiment, the polypeptide according to the invention furthermore also does not have the sequences of those proteins, which are encoded by the sequences shown in table II, application no. 6, columns 5 and 7.

[1805] for the disclosure of the paragraphs [0331.0.0.5] to [0346.0.0.5] see paragraphs [0331.0.0.0] to [0346.0.0.0] above.

[1806] Accordingly the present invention relates to any cell transgenic for any nucleic acid characterized as part of the invention, e.g. conferring the increase of the fine chemical in a cell or an organism or a part thereof, e.g. the nucleic acid molecule of the invention, the nucleic acid construct of the invention, the antisense molecule of the invention, the vector of the invention or a nucleic acid molecule encoding the polypeptide of the invention, e.g. encoding a polypeptide having an activity as the protein as shown in table II, application no. 6, column 3. Due to the above mentioned activity the fine chemical content in a cell or an organism is increased. For example, due to modulation or manipulation, the cellular activity is increased preferably in organelles such as plastids or mitochondria, e.g. due to an increased expression or specific activity or specific targeting of the subject matters of the invention in a cell or an organism or a part thereof especially in organelles such as plastids or mitochondria. Transgenic for a polypeptide having a protein or activity means herein that due to modulation or manipulation of the genome, the activity of protein as shown in table II, application no. 6, column 3 or a protein as shown in table II, application no. 6, column 3-like activity is increased in the cell or organism or part thereof especially in organelles such as plastids or mitochondria. Examples are described above in context with the process of the invention.

[1807] for the disclosure of this paragraph see paragraph [0348.0.0.0] above.

[1808] A naturally occurring expression cassette—for example the naturally occurring combination of the promoter of the gene encoding a protein as shown in table II, application no. 6, column 3 with the corresponding encoding gene—becomes a transgenic expression cassette when it is modified by non-natural, synthetic “artificial” methods such as, for example, mutagenization. Such methods have been described (U.S. Pat. No. 5,565,350; WO 00/15815; also see above).

[1809] for the disclosure of the paragraphs [0350.0.0.5] to [0358.0.0.5] see paragraphs [0350.0.0.0] to [0358.0.0.0] above.

[1810] Transgenic plants comprising the fatty acids synthesized in the process according to the invention can be marketed directly without isolation of the compounds synthesized. In the process according to the invention, plants are understood as meaning all plant parts, plant organs such as leaf, stalk, root, tubers or seeds or propagation material or harvested material or the intact plant. In this context, the seed encompasses all parts of the seed such as the seed coats, epidermal cells, seed cells, endosperm or embryonic tissue. The fatty acids produced in the process according to the invention may, however, also be isolated from the plant in the form of their free fatty acids, lipids, oils and/or fats containing said produced fatty acid, that means bound as ester such as triacylglycerides or phospholipids. Fatty acids produced by this process can be isolated by harvesting the plants either from the culture in which they grow or from the field. This can be done for example via expressing, grinding and/or extraction of the plant parts, preferably the plant seeds, plant fruits, plant tubers and the like.

[1811] for the disclosure of the paragraphs [0360.0.0.5] to [0362.0.0.5] see paragraphs [0360.0.0.0] to [0362.0.0.0] above.

[1812] In this manner, more than 50% by weight, advantageously more than 60% by weight, preferably more than 70% by weight, especially preferably more than 80% by weight, very especially preferably more than 90% by weight, of the fatty acids produced in the process can be isolated. The resulting fatty acids can, if appropriate, subsequently be further purified, if desired mixed with other active ingredients such as other fatty acids, vitamins, amino acids, carbohydrates, antibiotics and the like, and, if appropriate, formulated.

[1813] In one embodiment, the fatty acid is the fine chemical.

[1814] The fatty acids obtained in the process are suitable as starting material for the synthesis of further products of value. For example, they can be used in combination with each other or alone for the production of pharmaceuticals, foodstuffs, animal feeds or cosmetics. Accordingly, the present invention relates a method for the production of a pharmaceuticals, food stuff, animal feeds, nutrients or cosmetics comprising the steps of the process according to the invention, including the isolation of the fatty acid composition produced or the fine chemical produced if desired and formulating the product with a pharmaceutical acceptable carrier or formulating the product in a form acceptable for an application in agriculture. A further embodiment according to the invention is the use of the fatty acids produced in the process or of the transgenic organisms in animal feeds, foodstuffs, medicines, food supplements, cosmetics or pharmaceuticals.

For preparing fatty acid compound-containing fine chemicals, in particular the fine chemical, it is possible to use as fatty acid source organic compounds such as, for example, oils, fats and/or lipids comprising fatty acids such as fatty acids having a carbon back bone between C₁₀- to C₁₈-carbon atoms and/or small organic acids such acetic acid, propionic acid or butanoic acid as precursor compounds.

[1815] for the disclosure of the paragraphs [0366.0.0.5] to [0369.0.0.5] see paragraphs [0366.0.0.0] to [0369.0.0.0] above.

[1816] The fermentation broths obtained in this way, containing in particular linoleic acid, triglycerides, lipids, oils and/or fats containing linoleic acid, normally have a dry matter content of from 7.5 to 25% by weight. The fermentation broth can be processed further. Depending on requirements, the biomass can be separated, such as, for example, by centrifugation, filtration, decantation or a combination of these methods, from the fermentation broth or left completely in it. Afterwards the biomass can be extracted without any further process steps or disrupted and then extracted. If necessary the fermentation broth can be thickened or concentrated by known methods, such as, for example, with the aid of a rotary evaporator, thin-film evaporator, falling film evaporator, by reverse osmosis or by nanofiltration. This concentrated fermentation broth can then be worked up by extraction.

[1817] However, it is also possible to purify the fatty acid produced further. For this purpose, the product-containing composition is subjected for example to a thin layer chromatography on silica gel plates or to a chromatography such as a Florisil column (Bouhours J.F., J. Chromatrogr. 1979, 169, 462), in which case the desired product or the impurities are retained wholly or partly on the chromatography resin. These chromatography steps can be repeated if necessary, using the same or different chromatography resins. The skilled worker is familiar with the choice of suitable chromatography resins and their most effective use. An alternative method to purify the fatty acids is for example crystallization in the presence of urea. These methods can be combined with each other.

[1818] for the disclosure of the paragraphs [0372.0.0.5] to [0376.0.0.5], [0376.1.0.5] and [0377.0.0.5] see paragraphs [0372.0.0.0] to [0376.0.0.0], [0376.1.0.0] and [0377.0.0.0] above.

[1819] In one embodiment, the present invention relates to a method for the identification of a gene product conferring an increase in the fine chemical production in a cell, comprising the following steps:
[1820] (a) contacting, e.g. hybridising, the nucleic acid molecules of a sample, e.g. cells, tissues, plants or microorganisms or a nucleic acid library, which can contain a candidate gene encoding a gene product conferring an increase in the fine chemical after expression, with the nucleic acid molecule of the present invention;
[1821] (b) identifying the nucleic acid molecules, which hybridize under relaxed stringent conditions with the nucleic acid molecule of the present invention in particular to the nucleic acid molecule sequence shown in table I, application no. 6, columns 5 and 7, preferably in table I B, application no. 6, columns 5 and 7, and, optionally, isolating the full length cDNA clone or complete genomic clone;
[1822] (c) introducing the candidate nucleic acid molecules in host cells, preferably in a plant cell or a microorganism, appropriate for producing the fine chemical;
[1823] (d) expressing the identified nucleic acid molecules in the host cells;
[1824] (e) assaying the fine chemical level in the host cells; and
[1825] (f) identifying the nucleic acid molecule and its gene product which expression confers an increase in the fine chemical level in the host cell after expression compared to the wild type.

[1826] for the disclosure of the paragraphs [0379.0.0.5] to [0383.0.0.5] see paragraphs [0379.0.0.0] to [0383.0.0.0] above.

[1827] The screen for a gene product or an agonist conferring an increase in the fine chemical production can be performed by growth of an organism for example a microorganism in the presence of growth reducing amounts of an inhibitor of the synthesis of the fine chemical. Better growth, eg higher dividing rate or high dry mass in comparison to the control under such conditions would identify a gene or gene product or an agonist conferring an increase in fine chemical production.

One can think to screen for increased fine chemical production by for example resistance to drugs blocking fine chemical synthesis and looking whether this effect is dependent on the proteins as shown in table II, application no. 6, column 3, eg comparing near identical organisms with low and high activity of the proteins as shown in table II, application no. 6, column 3.

[1828] for the disclosure of the paragraphs [0385.0.0.5] to [0404.0.0.5] see paragraphs [0385.0.0.0] to [0404.0.0.0] above.

[1829] Accordingly, the nucleic acid of the invention, the polypeptide of the invention, the nucleic acid construct of the invention, the organisms, the host cell, the microorganisms, the plant, plant tissue, plant cell, or the part thereof the invention, the vector of the invention, the agonist identified with the method of the invention, the nucleic acid molecule identified with the method of the present invention, can be used for the production of the fine chemical or of the fine chemical and one or more other fatty acids such as palmitic acid or oleic acid.

Accordingly, the nucleic acid of the invention, or the nucleic acid molecule identified with the method of the present invention or the complement sequences thereof, the polypeptide of the invention, the nucleic acid construct of the invention, the organisms, the host cell, the microorganisms, the plant, plant tissue, plant cell, or the part thereof of the invention, the vector of the invention, the agonist identified with the method of the invention, the antibody of the present invention, can be used for the reduction of the fine chemical in a organism or part thereof, e.g. in a cell.

[1830] for the disclosure of the paragraphs [0406.0.0.5] to [0435.0.0.5] see paragraphs [0406.0.0.0] to [0435.0.0.0] above.

[1831] Linoleic acid, triglycerides, lipids, oils and/or fats containing linoleic acid production in Mortierella

The fatty acid production can be analysed as mentioned above. The proteins and nucleic acids can be analysed as mentioned below.

[1832] for the disclosure of the paragraphs [0437.0.0.5] and [0438.0.0.5] see paragraphs [0437.0.0.0] and [0438.0.0.0] above.

### Example 8

### Analysis of the Effect of the Nucleic Acid Molecule on the Production of the Fatty Acid

[1833] The effect of the genetic modification in plants, fungi, algae or ciliates on the production of a desired compound (such as a fatty acid) can be determined by growing the modified microorganisms or the modified plant under suitable conditions (such as those described above) and analyzing the medium and/or the cellular components for the elevated production of desired product (i.e. of the lipids or a fatty acid). These analytical techniques are known to the skilled worker and comprise spectroscopy, thin-layer chromatography, various types of staining methods, enzymatic and microbiological methods and analytical chromatography such as high-performance liquid chromatography (see, for example, Ullman, Encyclopedia of Industrial Chemistry, Vol. A2, p. 89-90 and p. 443-613, VCH: Weinheim (1985); Fallon, A., et al., (1987) “Applications of HPLC in Biochemistry” in: Laboratory Techniques in Biochemistry and Molecular Biology, Vol. 17; Rehm et al. (1993) Biotechnology, Vol. 3, Chapter III: “Product recovery and purification”, p. 469-714, VCH: Weinheim; Belter, P.A., et al. (1988) Bioseparations: downstream processing for Biotechnology, John Wiley and Sons; Kennedy, J. F., and Cabral, J. M. S. (1992) Recovery processes for biological Materials, John Wiley and Sons; Shaeiwitz, J. A., and Henry, J. D. (1988) Biochemical Separations, in: Ullmann's Encyclopedia of Industrial Chemistry, Vol. B3; Chapter 11, p. 1-27, VCH: Weinheim; and Dechow, F. J. (1989) Separation and purification techniques in biotechnology, Noyes Publications).

In addition to the abovementioned processes, plant lipids are extracted from plant material as described by Cahoon et al. (1999) Proc. Natl. Acad. Sci. USA 96 (22): 12935-12940 and Browse et al. (1986) Analytic Biochemistry 152:141-145. The qualitative and quantitative analysis of lipids or fatty acids is described by Christie, William W., Advances in Lipid Methodology, Ayr/Scotland: Oily Press (Oily Press Lipid Library; 2); Christie, William W., Gas Chromatography and Lipids. A Practical Guide—Ayr, Scotland: Oily Press, 1989, Repr. 1992, IX, 307 pp. (Oily Press Lipid Library; 1); “Progress in Lipid Research, Oxford: Pergamon Press, 1 (1952)-16 (1977) under the title: Progress in the Chemistry of Fats and Other Lipids CODEN.

[1834] for the disclosure of this paragraph see [0441.0.0.0] above.

### Example 9

### Purification of the Fatty Acid

[1835] One example is the analysis of fatty acids (abbreviations: FAME, fatty acid methyl ester; GC-MS, gas liquid chromatography/mass spectrometry; TAG, triacylglycerol; TLC, thin-layer chromatography).

The unambiguous detection for the presence of fatty acid products can be obtained by analyzing recombinant organisms using analytical standard methods: GC, GC-MS or TLC, as described on several occasions by Christie and the references therein (1997, in: Advances on Lipid Methodology, Fourth Edition: Christie, Oily Press, Dundee, 119-169; 1998, Gaschromatographie-Massenspektrometrie-Verfahren [Gas chromatography/mass spectrometric methods], Lipide 33:343-353).
The total fatty acids produced in the organism for example in yeasts used in the inventive process can be analysed for example according to the following procedure:
The material such as yeasts, E. coli or plants to be analyzed can be disrupted by sonication, grinding in a glass mill, liquid nitrogen and grinding or via other applicable methods. After disruption, the material must be centrifuged (1000×g, 10 min., 4° C.) and washed once with 100 mM NaHCO₃, pH 8.0 to remove residual medium and fatty acids. For preparation of the fatty acid methyl esters (FAMES) the sediment is resuspended in distilled water, heated for 10 minutes at 100° C., cooled on ice and recentrifuged, followed by extraction for one hour at 90° C. in 0.5 M sulfuric acid in methanol with 2% dimethoxypropane, which leads to hydrolyzed oil and lipid compounds, which give transmethylated lipids.
The FAMES are then extracted twice with 2 ml petrolether, washed once with 100 mM NaHCO₃, pH 8.0 and once with distilled water and dried with Na₂SO₄. The organic solvent can be evaporated under a stream of Argon and the FAMES were dissolved in 50 μl of petrolether. The samples can be separated on a ZEBRON ZB-Wax capillary column (30 m, 0.32 mm, 0.25 μm; Phenomenex) in a Hewlett Packard 6850 gas chromatograph with a flame ionisation detector. The oven temperature is programmed from 70° C. (1 min. hold) to 200° C. at a rate of 20° C./min., then to 250° C. (5 min. hold) at a rate of 5° C./min and finally to 260° C. at a rate of 5° C./min. Nitrogen is used as carrier gas (4.5 ml/min. at 70° C.). The identity of the resulting fatty acid methyl esters can be identified by comparison with retention times of FAME standards, which are available from commercial sources (i.e. Sigma).
Plant material is initially homogenized mechanically by comminuting in a pestle and mortar to make it more amenable to extraction.

[1836] This is followed by heating at 100° C. for 10 minutes and, after cooling on ice, by resedimentation. The cell sediment is hydrolyzed for one hour at 90° C. with 1 M methanolic sulfuric acid and 2% dimethoxypropane, and the lipids are transmethylated. The resulting fatty acid methyl esters (FAMEs) are extracted in petroleum ether. The extracted FAMEs are analyzed by gas liquid chromatography using a capillary column (Chrompack, WCOT Fused Silica, CP-Wax-52 CB, 25 m, 0.32 mm) and a temperature gradient of from 170° C. to 240° C. in 20 minutes and 5 minutes at 240° C. The identity of the fatty acid methyl esters is confirmed by comparison with corresponding FAME standards (Sigma). The identity and position of the double bond can be analyzed further by suitable chemical derivatization of the FAME mixtures, for example to give 4,4-dimethoxyoxazoline derivatives (Christie, 1998) by means of GC-MS.

The methodology is described for example in Napier and Michaelson, 2001, Lipids. 36(8):761-766; Sayanova et al., 2001, Journal of Experimental Botany. 52(360):1581-1585, Sperling et al., 2001, Arch. Biochem. Biophys. 388(2):293-298 and Michaelson et al., 1998, FEBS Letters. 439(3): 215-218.

[1837] If required and desired, further chromatography steps with a suitable resin may follow. Advantageously the fatty acids can be further purified with a so-called RTHPLC. As eluent different an acetonitrile/water or chloroform/acetonitrile mixtures are advantageously is used. For example canola oil can be separated said HPLC method using an RP-18-column (ET 250/3 Nucleosil 120-5 C₁₈ Macherey and Nagel, Düren, Germany). A chloroform/acetonitrile mixture (v/v 30:70) is used as eluent. The flow rate is beneficial 0.8 ml/min. For the analysis of the fatty acids an ELSD detector (evaporative light-scattering detector) is used. MPLC, dry-flash chromatography or thin layer chromatography are other beneficial chromatography methods for the purification of fatty acids. If necessary, these chromatography steps may be repeated, using identical or other chromatography resins. The skilled worker is familiar with the selection of suitable chromatography resin and the most effective use for a particular molecule to be purified.

[1838] In addition depending on the produced fine chemical purification is also possible with cristalisation or destilation. Both methods are well known to a person skilled in the art.

[1839] for the disclosure of the paragraphs [0446.0.0.5] to [0497.0.0.5] see paragraphs [0446.0.0.0] to [0497.0.0.0] above.
[1840] The results of the different plant analyses can be seen from the table, which follows:

TABLE VI

| ORF | Metabolite | Method | Min | Max |
|---|---|---|---|---|
| b0403 | Linoleic Acid | GC | 1.15 | 1.38 |
| | (C18:2 (c9,c12)) | | | |
| b0931 | Linoleic Acid | GC | 1.16 | 1.45 |
| | (C18:2 (c9,c12)) | | | |
| b1046 | Linoleic Acid | GC | 1.15 | 1.22 |
| | (C18:2 (c9,c12)) | | | |
| b1933 | Linoleic Acid | GC | 1.14 | 1.22 |
| | (C18:2 (c9,c12)) | | | |
| b2126 | Linoleic Acid | GC | 1.14 | 1.24 |
| | (C18:2 (c9,c12)) | | | |
| b3708 | Linoleic Acid | GC | 1.15 | 1.39 |
| | (C18:2 (c9,c12)) | | | |
| b3728 | Linoleic Acid | GC | 1.15 | 1.21 |
| | (C18:2 (c9,c12)) | | | |
| YNR012W | Linoleic Acid | GC | 1.15 | 1.21 |
| | (C18:2 (c9,c12)) | | | |

[1841] for the disclosure of the paragraphs [0499.0.0.5] and [0500.0.0.5] see paragraphs [0499.0.0.0] and [0500.0.0.0] above.

### Example 15a

### Engineering Ryegrass Plants by Over-Expressing YNR012W from Saccharomyces cerevisiae or Homologs of YNR012W from Other Organisms

[1842] for the disclosure of the paragraphs [0502.0.0.5] to [0508.0.0.5] see paragraphs [0502.0.0.0] to [0508.0.0.0] above.

### Example 15b

### Engineering Soybean Plants by Over-Expressing YNR012W from Saccharomyces cerevisiae or Homologs of YNR012W from Other Organisms

[1843] for the disclosure of the paragraphs [0510.0.0.5] to [0513.0.0.5] see paragraphs [0510.0.0.0] to [0513.0.0.0] above.

### Example 15c

### Engineering Corn Plants by Over-Expressing YNR012W from Saccharomyces cerevisiae or Homologs of YNR012W from Other Organisms

[1844] for the disclosure of the paragraphs [0515.0.0.5] to [0540.0.0.5] see paragraphs [0515.0.0.0] to [0540.0.0.0] above.

### Example 15d

### Engineering Wheat Plants by Over-Expressing YNR012W from Saccharomyces cerevisiae or Homologs of YNR012W from Other Organisms

[1845] for the disclosure of the paragraphs [0542.0.0.5] to [0544.0.0.5] see paragraphs [0542.0.0.0] to [0544.0.0.0] above.

### Example 15e

### Engineering Rapeseed/Canola Plants by Over-Expressing YNR012W from Saccharomyces cerevisiae or Homologs of YNR012W from Other Organisms

[1846] for the disclosure of the paragraphs [0546.0.0.5] to [0549.0.0.5] see paragraphs [0544.0.0.0] to [0549.0.0.0] above.

### Example 15f

### Engineering Alfalfa Plants by Over-Expressing YNR012W from Saccharomyces cerevisiae or Homologs of YNR012W from Other Organisms

[1847] for the disclosure of the paragraphs [0551.0.0.5] to [0554.0.0.5] see paragraphs [0551.0.0.0] to [0554.0.0.0] above.

### Example 16

### Metabolite Profiling Info from Zea mays

[1848] Zea mays plants were engineered as described in Example 15c.
The results of the different Zea mays plants analysed can be seen from table VII, which follows:

TABLE VII

| ORF_NAME | Metabolite | Min | Max |
|---|---|---|---|
| YNR012W | Linoleic acid | 1.39 | 3.53 |
| | (C18:2cis[9,12]) | | |

Table VII shows the increase in linoleic acid (C18:2cis[9,12]) in genetically modified corn plants expressing the Saccharomyces cerevisiae nucleic acid sequence YNR012W.

[1849] In one embodiment, in case the activity of the Saccharomyces cerevisiae protein YNR012W or its homologs, e.g. a “uridine kinase”, is increased in corn plants, preferably, an increase of the fine chemical linoleic acid between 39% and 253% is conferred.

[1850] for the disclosure of this paragraph see [0554.2.0.0] above.

[1851] for the disclosure of this paragraph see [0555.0.0.0] above.

[1852] for the disclosure of this paragraph see [0001.0.0.0].

[1853] for the disclosure of the paragraphs [0002.0.5.6] to [0008.0.0.5] see paragraphs [0002.0.5.5] and [0008.0.5.5] above.

[1854] As described above, the essential fatty acids are necessary for humans and many mammals, for example for livestock. Essential fatty acids, such as alphα-linolenic acid, are extremely important for healing and maintaining good health. Compounds made from alphα-linolenic acid have been shown to decrease blood clotting and decrease inflammatory processes in the body.

[1855] for the disclosure of the paragraphs [0010.0.5.6] to [0012.0.0.5] see paragraphs [0010.0.5.5] and [0012.0.5.5] above.

[1856] for the disclosure of this paragraph see [0013.0.0.0] above.

[1857] Accordingly, in a first embodiment, the invention relates to a process for the production of a fine chemical, whereby the fine chemical is α-linolenic acid or tryglycerides, lipids, oils or fats containing α-linolenic acid. Accordingly, in the present invention, the term “the fine chemical” as used herein relates to “α-linolenic acid or tryglycerides, lipids, oils or fats containing α-linolenic acid”. Further, the term “the fine chemicals” as used herein also relates to fine chemicals comprising α-linolenic acid or tryglycerides, lipids, oils or fats containing α-linolenic acid.

[1858] In one embodiment, the term “the fine chemical” or “the respective fine chemical” means α-linolenic acid or tryglycerides, lipids, oils or fats containing α-linolenic acid. Throughout the specification the term “the fine chemical” or “the respective fine chemical” means α-linolenic acid or tryglycerides, lipids, oils or fats containing α-linolenic acid, α-linolenic acid and its salts, ester, thioester or α-linolenic acid in free form or bound to other compounds such as triglycerides, glycolipids, phospholipids etc. In a preferred embodiment, the term “the fine chemical” means α-linolenic acid, in free form or its salts or bound to triglycerides. Triglycerides, lipids, oils, fats or lipid mixture thereof shall mean any triglyceride, lipid, oil and/or fat containing any bound or free α-linolenic acid for example sphingolipids, phosphoglycerides, lipids, glycolipids such as glycosphingolipids, phospholipids such as phosphatidylethanolamine, phosphatidylcholine, phosphatidylserine, phosphatidylglycerol, phosphatidylinositol or diphosphatidylglycerol, or as monoacylglyceride, diacylglyceride or triacylglyceride or other fatty acid esters such as acetyl-Coenzym A thioester, which contain further saturated or unsaturated fatty acids in the fatty acid molecule.

In one embodiment, the term “the fine chemical” and the term “the respective fine chemical” mean at least one chemical compound with an activity of the abovementioned fine chemical.

[1859] Accordingly, the present invention relates to a process for the production of α-linolenic acid, which comprises
[1860] (a) increasing or generating the activity of a protein as shown in table II, application no. 7, column 3 encoded by the nucleic acid sequences as shown in table I, application no. 7, column 5, in an organelle of a microorganism or plant, or
[1861] (b) increasing or generating the activity of a protein as shown in table II, application no. 7, column 3 encoded by the nucleic acid sequences as shown in table I, application no. 7, column 5 in the plastid of a microorganism or plant, or in one or more parts thereof; and
[1862] (b) growing the organism under conditions which permit the production of the fine chemical, thus, α-linolenic acid or fine chemicals comprising α-linolenic acid, in said organism or in the culture medium surrounding the organism.

[1863] /

[1864] In another embodiment the present invention is related to a process for the production of α-linolenic acid, which comprises
[1865] (a) increasing or generating the activity of a protein as shown in table II, application no. 7, column 3 encoded by the nucleic acid sequences as shown in table I, application no. 7, column 5, in an organelle of a non-human organism, or
[1866] (b) increasing or generating the activity of a protein as shown in table II, application no. 7, column 3 encoded by the nucleic acid sequences as shown in table I, application no. 7, column 5, which are joined to a nucleic acid sequence encoding a transit peptide in a non-human organism, or in one or more parts thereof; or
[1867] (c) increasing or generating the activity of a protein as shown in table II, application no. 7, column 3 encoded by the nucleic acid sequences as shown in table I, application no. 7, column 5, which are joined to a nucleic acid sequence encoding chloroplast localization sequence, in a non-human organism, or in one or more parts thereof, and
[1868] (d) growing the organism under conditions which permit the production of α-linolenic acid in said organism.

[1869] In another embodiment, the present invention relates to a process for the production of α-linolenic acid, which comprises
[1870] (a) increasing or generating the activity of a protein as shown in table II, application no. 7, column 3 encoded by the nucleic acid sequences as shown in table I, application no. 7, column 5, in an organelle of a microorganism or plant through the transformation of the organelle, or
[1871] (b) increasing or generating the activity of a protein as shown in table II, application no. 7, column 3 encoded by the nucleic acid sequences as shown in table I, application no. 7, column 5 in the plastid of a microorganism or plant, or in one or more parts thereof through the transformation of the plastids; and
[1872] (c) growing the organism under conditions which permit the production of the fine chemical, thus, α-linolenic acid or fine chemicals comprising α-linolenic acid, in said organism or in the culture medium surrounding the organism.

[1873] Advantageously the activity of the protein as shown in table II, application no. 7, column 3 encoded by the nucleic acid sequences as shown in table I, application no. 7, column 5 is increased or generated in the abovementioned process in the plastid of a microorganism or plant.

[1874] for the disclosure of the paragraphs [0019.0.0.6] to [0024.0.0.5] see paragraphs [0019.0.0.0] and [0024.0.0.0] above.

[1875] Even more preferred nucleic acid sequences are encoding transit peptides as disclosed by von Heijne et al. [Plant Molecular Biology Reporter, Vol. 9 (2), 1991: 104-126], which are hereby incorporated by reference. Table V shows some examples of the transit peptide sequences disclosed by von Heijne et al. According to the disclosure of the invention especially in the examples the skilled worker is able to link other nucleic acid sequences disclosed by von Heijne et al. to the nucleic acid sequences shown in table I, application no. 7, columns 5 and 7. Most preferred nucleic acid sequences encoding transit peptides are derived from the genus Spinacia such as chloroplast 30S ribosomal protein PSrp-1, root acyl carrier protein II, acyl carrier protein, ATP synthase: γ subunit, ATP synthase: δ subunit, cytochrom f, ferredoxin I, ferredoxin NADP oxidoreductase (=FNR), nitrite reductase, phosphoribulokinase, plastocyanin or carbonic anhydrase. The skilled worker will recognize that various other nucleic acid sequences encoding transit peptides can easily isolated from plastid-localized proteins, which are expressed from nuclear genes as precursors and are then targeted to plastids. Such transit peptides encoding sequences can be used for the construction of other expression constructs. The transit peptides advantageously used in the inventive process and which are part of the inventive nucleic acid sequences and proteins are typically 20 to 120 amino acids, preferably 25 to 110, 30 to 100 or 35 to 90 amino acids, more preferably 40 to 85 amino acids and most preferably 45 to 80 amino acids in length and functions post-translationally to direct the protein to the plastid preferably to the chloroplast. The nucleic acid sequences encoding such transit peptides are localized upstream of nucleic acid sequence encoding the mature protein. For the correct molecular joining of the transit peptide encoding nucleic acid and the nucleic acid encoding the protein to be targeted it is sometimes necessary to introduce additional base pairs at the joining position, which forms restriction enzyme recognition sequences useful for the molecular joining of the different nucleic acid molecules. This procedure might lead to very few additional amino acids at the N-terminal of the mature imported protein, which usually and preferably do not interfere with the protein function. In any case, the additional base pairs at the joining position which forms restriction enzyme recognition sequences have to be chosen with care, in order to avoid the formation of stop codons or codons which encode amino acids with a strong influence on protein folding, like e.g. proline. It is preferred that such additional codons encode small n.d. structural flexible amino acids such as glycine or alanine.

[1876] As mentioned above the nucleic acid sequences coding for the proteins as shown in table II, application no. 7, column 3 and its homologs as disclosed in table I, application no. 7, columns 5 and 7 are joined to a nucleic acid sequence encoding a transit peptide, This nucleic acid sequence encoding a transit peptide ensures transport of the protein to the plastid. The nucleic acid sequence of the gene to be expressed and the nucleic acid sequence encoding the transit peptide are operably linked. Therefore the transit peptide is fused in frame to the nucleic acid sequence coding for proteins as shown in table II, application no. 7, column 3 and its homologs as disclosed in table I, application no. 7, columns 5 and 7.

[1877] for the disclosure of the paragraphs [0027.0.0.6] to [0029.0.0.5] see paragraphs [0027.0.0.0] and [0029.0.0.0] above.

[1878] Alternatively, nucleic acid sequences coding for the transit peptides may be chemically synthesized either in part or wholly according to structure of transit peptide sequences disclosed in the prior aft. Said natural or chemically synthesized sequences can be directly linked to the sequences encoding the mature protein or via a linker nucleic acid sequence, which may be typically less than 500 base pairs, preferably less than 450, 400, 350, 300, 250 or 200 base pairs, more preferably less than 150, 100, 90, 80, 70, 60, 50, 40 or 30 base pairs and most preferably less than 25, 20, 15, 12, 9, 6 or 3 base pairs in length and are in frame to the coding sequence. Furthermore favorable nucleic acid sequences encoding transit peptides may comprise sequences derived from more than one biological and/or chemical source and may include a nucleic acid sequence derived from the amino-terminal region of the mature protein, which in its native state is linked to the transit peptide. In a preferred embodiment of the invention said amino-terminal region of the mature protein is typically less than 150 amino acids, preferably less than 140, 130, 120, 110, 100 or 90 amino acids, more preferably less than 80, 70, 60, 50, 40, 35, 30, 25 or 20 amino acids and most preferably less than 19, 18, 17, 16, 15, 14, 13, 12, 11 or 10 amino acids in length. But even shorter or longer stretches are also possible. In addition target sequences, which facilitate the transport of proteins to other cell compartments such as the vacuole, endoplasmic reticulum, Golgi complex, glyoxysomes, peroxisomes or mitochondria may be also part of the inventive nucleic acid sequence. The proteins translated from said inventive nucleic acid sequences are a kind of fusion proteins that means the nucleic acid sequences encoding the transit peptide for example the ones shown in table V, preferably the last one of the table are joint to the nucleic acid sequences shown in table I, application no. 7, columns 5 and 7. The person skilled in the art is able to join said sequences in a functional manner. Advantageously the transit peptide part is cleaved off from the protein part shown in table II, application no. 7, columns 5 and 7 during the transport preferably into the plastids. All products of the cleavage of the preferred transit peptide shown in the last line of table V have preferably the N-terminal amino acid sequences QIA CSS or QIA EFQLTT in front of the start methionine of the protein mentioned in table II, application no. 7, columns 5 and 7. Other short amino acid sequences of an range of 1 to 20 amino acids preferable 2 to 15 amino acids, more preferable 3 to 10 amino acids most preferably 4 to 8 amino acids are also possible in front of the start methionine of the protein mentioned in table II, application no. 7, columns 5 and 7. In case of the amino acid sequence QIA CSS the three amino acids in front of the start methionine are stemming from the LIC (=ligatation independent cloning) cassette. Said short amino acid sequence is preferred in the case of the expression of E. coli genes. In case of the amino acid sequence QIA EFQLTT the six amino acids in front of the start methionine are stemming from the LIC cassette. Said short amino acid sequence is preferred in the case of the expression of S. cerevisiae genes. The skilled worker knows that other short sequences are also useful in the expression of the genes mentioned in table I, application no. 7, columns 5 and 7. Furthermore the skilled worker is aware of the fact that there is not a need for such short sequences in the expression of the genes.

[1879] Table V: Examples of transit peptides disclosed by von Heijne et al. for the disclosure of Table V see paragraph [0030.2.0.0] above.

[1880] Alternatively to the targeting of the sequences shown in table II, application no. 7, columns 5 and 7 preferably of sequences in general encoded in the nucleus with the aid of the targeting sequences mentioned for example in table V alone or in combination with other targeting sequences preferably into the plastids, the nucleic acids of the invention can directly introduced into the plastidal genome. Therefore in a preferred embodiment the nucleic acid sequences shown in table I, application no. 7, columns 5 and 7 are directly introduced and expressed in plastids.

The term “introduced” in the context of this specification shall mean the insertion of a nucleic acid sequence into the organism by means of a “transfection”, “transduction” or preferably by “transformation”.
A plastid, such as a chloroplast, has been “transformed” by an exogenous (preferably foreign) nucleic acid sequence if nucleic acid sequence has been introduced into the plastid that means that this sequence has crossed the membrane or the membranes of the plastid. The foreign DNA may be integrated (covalently linked) into plastid DNA making up the genome of the plastid, or it may remain unintegrated (e.g., by including a chloroplast origin of replication). “Stably” integrated DNA sequences are those, which are inherited through plastid replication, thereby transferring new plastids, with the features of the integrated DNA sequence to the progeny.

[1881] for the disclosure of the paragraphs [0030.2.0.6] and [0030.3.0.6] see paragraphs [0030.2.0.0] and [0030.3.0.0] above.

[1882] For the inventive process it is of great advantage that by transforming the plastids the intraspecies specific transgene flow is blocked, because a lot of species such as corn, cotton and rice have a strict maternal inheritance of plastids. By placing the genes specified in table I, application no. 7, columns 5 and 7 or active fragments thereof in the plastids of plants, these genes will not be present in the pollen of said plants.

A further preferred embodiment of the invention relates to the use of so called “chloroplast localization sequences”, in which a first RNA sequence or molecule is capable of transporting or “chaperoning” a second RNA sequence, such as a RNA sequence transcribed from the sequences depicted in table I, application no. 7, columns 5 and 7 or a sequence encoding a protein, as depicted in table II, application no. 7, columns 5 and 7, from an external environment inside a cell or outside a plastid into a chloroplast. In one embodiment the chloroplast localization signal is substantially similar or complementary to a complete or intact viroid sequence. The chloroplast localization signal may be encoded by a DNA sequence, which is transcribed into the chloroplast localization RNA. The term “viroid” refers to a naturally occurring single stranded RNA molecule (Flores, C R Acad Sci III. 2001 October; 324(10): 943-52). Viroids usually contain about 200-500 nucleotides and generally exist as circular molecules. Examples of viroids that contain chloroplast localization signals include but are not limited to ASBVd, PLMVd, CChMVd and ELVd. The viroid sequence or a functional part of it can be fused to the sequences depicted in table I, application no. 7, columns 5 and 7 or a sequence encoding a protein, as depicted in table II, application no. 7, columns 5 and 7 in such a manner that the viroid sequence transports a sequence transcribed from a sequence as depicted in table I, application no. 7, columns 5 and 7 or a sequence encoding a protein as depicted in table II, application no. 7, columns 5 and 7 into the chloroplasts. A preferred embodiment uses a modified ASBVd (Navarro et al., Virology. 2000 Mar. 1; 268(1): 218-25).

[1883] In a further specific embodiment the protein to be expressed in the plastids such as the proteins depicted in table II, application no. 7, columns 5 and 7 are encoded by different nucleic acids. Such a method is disclosed in WO 2004/040973, which shall be incorporated by reference. WO 2004/040973 teaches a method, which relates to the translocation of an RNA corresponding to a gene or gene fragment into the chloroplast by means of a chloroplast localization sequence. The genes, which should be expressed in the plant or plants cells, are split into nucleic acid fragments, which are introduced into different compartments in the plant e.g. the nucleus, the plastids and/or mitochondria. Additionally plant cells are described in which the chloroplast contains a ribozyme fused at one end to an RNA encoding a fragment of a protein used in the inventive process such that the ribozyme can trans-splice the translocated fusion RNA to the RNA encoding the gene fragment to form and as the case may be reunite the nucleic acid fragments to an intact mRNA encoding a functional protein for example as disclosed in table II, application no. 7, columns 5 and 7.

[1884] In a preferred embodiment of the invention the nucleic acid sequences as shown in table I, application no. 7, columns 5 and 7 used in the inventive process are transformed into plastids, which are metabolical active. Those plastids should preferably maintain at a high copy number in the plant or plant tissue of interest, most preferably the chloroplasts found in green plant tissues, such as leaves or cotyledons or in seeds.

[1885] For a good expression in the plastids the nucleic acid sequences as shown in table I, application no. 7, columns 5 and 7 are introduced into an expression cassette using a preferably a promoter and terminator, which are active in plastids preferably a chloroplast promoter. Examples of such promoters include the psbA promoter from the gene from spinach or pea, the rbcL promoter, and the atpB promoter from corn.

[1886] for the disclosure of the paragraphs [0031.0.0.6] and [0032.0.0.6] see paragraphs [0031.0.0.0] and [0032.0.0.0] above.

[1887] Advantageously the process for the production of the fine chemical leads to an enhanced production of the fine chemical. The terms “enhanced” or “increase” mean at least a 10%, 20%, 30%, 40% or 50%, preferably at least 60%, 70%, 80%, 90% or 100%, more preferably 150%, 200%, 300%, 400% or 500% higher production of the fine chemical in comparison to the reference as defined below, e.g. that means in comparison to an organism without the aforementioned modification of the activity of a protein as shown in table II, application no. 7, column 3. Preferably the modification of the activity of a protein as shown in table II, application no. 7, column 3 or their combination can be achieved by joining the protein to a transit peptide.

[1888] Surprisingly it was found, that the transgenic expression of the Saccharomyces cerevisiae protein as shown in table II, application no. 7, column 3 in plastids of a plant such as Arabidopsis thaliana for example through the linkage to at least one targeting sequence for example as mentioned in table V conferred an increase in the fine chemical content of the transformed plants.

[1889] for the disclosure of this paragraph see paragraph [0035.0.0.0] above.

[1890] The sequence of b0342 (Accession number PIR:XXECTG) from Escherichia coli has been published in Blattner et al., Science 277 (5331), 1453-1474 (1997), and its activity is being defined as “thiogalactoside acetyltransferase”. Accordingly, in one embodiment, the process of the present invention comprises the use of a “thiogalactoside acetyltransferase” or its homolog, e.g. as shown herein, for the production of the fine chemical, meaning of α-linolenic acid and/or tryglycerides, lipids, oils and/or fats containing α-linolenic acid, in particular for increasing the amount of α-linolenic acid in free or bound form in an organism or a part thereof, as mentioned. In one embodiment, in the process of the present invention the activity of a b0342 protein is increased or generated, e.g. from Escherichia coli or a homolog thereof, preferably linked at least to one transit peptide as mentioned for example in table V.

In another embodiment, in the process of the present invention the activity of a b0342 protein is increased or generated in a subcellular compartment of the organism or organism cell such as in an organelle like a plastid or mitochondria.
The sequence of b0403 (Accession number PIR:C64769) from Escherichia coli has been published in Blattner et al., Science 277 (5331), 1453-1474 (1997), and its activity is being defined as “maltodextrin glucosidase”. Accordingly, in one embodiment, the process of the present invention comprises the use of a “maltodextrin glucosidase” or its homolog, e.g. as shown herein, for the production of the fine chemical, meaning of α-linolenic acid and/or tryglycerides, lipids, oils and/or fats containing α-linolenic acid, in particular for increasing the amount of α-linolenic acid in free or bound form in an organism or a part thereof, as mentioned. In one embodiment, in the process of the present invention the activity of a b0403 protein is increased or generated, e.g. from Escherichia coli or a homolog thereof, preferably linked at least to one transit peptide as mentioned for example in table V.
In another embodiment, in the process of the present invention the activity of a b0403 protein is increased or generated in a subcellular compartment of the organism or organism cell such as in an organelle like a plastid or mitochondria.
The sequence of b0931 (Accession number PIR:JQ0756) from Escherichia coli has been published in Blattner et al., Science 277 (5331), 1453-1474 (1997), and its activity is being defined as “nicotinate phosphoribosyltransferase”. Accordingly, in one embodiment, the process of the present invention comprises the use of a “nicotinate phosphoribosyltransferase” or its homolog, e.g. as shown herein, for the production of the fine chemical, meaning of α-linolenic acid and/or tryglycerides, lipids, oils and/or fats containing α-linolenic acid, in particular for increasing the amount of α-linolenic acid in free or bound form in an organism or a part thereof, as mentioned. In one embodiment, in the process of the present invention the activity of a b0931 protein is increased or generated, e.g. from Escherichia coli or a homolog thereof, preferably linked at least to one transit peptide as mentioned for example in table V.
In another embodiment, in the process of the present invention the activity of a b0931 protein is increased or generated in a subcellular compartment of the organism or organism cell such as in an organelle like a plastid or mitochondria.
The sequence of b1281 (Accession number PIR:DCECOP) from Escherichia coli has been published in Blattner et al., Science 277 (5331), 1453-1474 (1997), and its activity is being defined as “orotidine-5′-phosphate decarboxylase”. Accordingly, in one embodiment, the process of the present invention comprises the use of a “orotidine-5′-phosphate decarboxylase” or its homolog, e.g. as shown herein, for the production of the fine chemical, meaning of α-linolenic acid and/or tryglycerides, lipids, oils and/or fats containing α-linolenic acid, in particular for increasing the amount of α-linolenic acid in free or bound form in an organism or a part thereof, as mentioned. In one embodiment, in the process of the present invention the activity of a b1281 protein is increased or generated, e.g. from Escherichia coli or a homolog thereof, preferably linked at least to one transit peptide as mentioned for example in table V.
In another embodiment, in the process of the present invention the activity of a b1281 protein is increased or generated in a subcellular compartment of the organism or organism cell such as in an organelle like a plastid or mitochondria.
The sequence of b1625 (Accession number PIR:C64919) from Escherichia coli has been published in Blattner et al., Science 277 (5331), 1453-1474 (1997), and its activity is being defined as “putative hemolysin expression modulating protein HHA domain”. Accordingly, in one embodiment, the process of the present invention comprises the use of a “putative hemolysin expression modulating protein HHA domain” or its homolog, e.g. as shown herein, for the production of the fine chemical, meaning of α-linolenic acid and/or tryglycerides, lipids, oils and/or fats containing α-linolenic acid, in particular for increasing the amount of α-linolenic acid in free or bound form in an organism or a part thereof, as mentioned. In one embodiment, in the process of the present invention the activity of a b1625 protein is increased or generated, e.g. from Escherichia coli or a homolog thereof, preferably linked at least to one transit peptide as mentioned for example in table V.
In another embodiment, in the process of the present invention the activity of a b1625 protein is increased or generated in a subcellular compartment of the organism or organism cell such as in an organelle like a plastid or mitochondria.
The sequence of b2156 (Accession number NP_{—}416661) from Escherichia coli has been published in Blattner et al., Science 277 (5331), 1453-1474 (1997), and its activity is being defined as “lysine-specific permease”. Accordingly, in one embodiment, the process of the present invention comprises the use of a “lysine-specific permease” or its homolog, e.g. as shown herein, for the production of the fine chemical, meaning of α-linolenic acid and/or tryglycerides, lipids, oils and/or fats containing α-linolenic acid, in particular for increasing the amount of α-linolenic acid in free or bound form in an organism or a part thereof, as mentioned. In one embodiment, in the process of the present invention the activity of a b2156 protein is increased or generated, e.g. from Escherichia coli or a homolog thereof, preferably linked at least to one transit peptide as mentioned for example in table V.
In another embodiment, in the process of the present invention the activity of a b2156 protein is increased or generated in a subcellular compartment of the organism or organism cell such as in an organelle like a plastid or mitochondria.
The sequence of b2827 (Accession number PIR:SYECT) from Escherichia coli has been published in Blattner et al., Science 277 (5331), 1453-1474 (1997), and its activity is being defined as “thymidylate synthetase”. Accordingly, in one embodiment, the process of the present invention comprises the use of a “thymidylate synthetase” or its homolog, e.g. as shown herein, for the production of the fine chemical, meaning of α-linolenic acid and/or tryglycerides, lipids, oils and/or fats containing α-linolenic acid, in particular for increasing the amount of α-linolenic acid in free or bound form in an organism or a part thereof, as mentioned. In one embodiment, in the process of the present invention the activity of a b2827 protein is increased or generated, e.g. from Escherichia coli or a homolog thereof, preferably linked at least to one transit peptide as mentioned for example in table V.
In another embodiment, in the process of the present invention the activity of a b2827 protein is increased or generated in a subcellular compartment of the organism or organism cell such as in an organelle like a plastid or mitochondria.
The sequence of b3429 (Accession number NP_{—}417887) from Escherichia coli has been published in Blattner et al., Science 277 (5331), 1453-1474 (1997), and its activity is being defined as “glycogen synthase (starch synthase)”. Accordingly, in one embodiment, the process of the present invention comprises the use of a “glycogen synthase (starch synthase)” or its homolog, e.g. as shown herein, for the production of the fine chemical, meaning of α-linolenic acid and/or tryglycerides, lipids, oils and/or fats containing α-linolenic acid, in particular for increasing the amount of α-linolenic acid in free or bound form in an organism or a part thereof, as mentioned. In one embodiment, in the process of the present invention the activity of a b3429 protein is increased or generated, e.g. from Escherichia coli or a homolog thereof, preferably linked at least to one transit peptide as mentioned for example in table V.
In another embodiment, in the process of the present invention the activity of a b3429 protein is increased or generated in a subcellular compartment of the organism or organism cell such as in an organelle like a plastid or mitochondria. The sequence of YNL241C (Accession number NP_{—}014158) from Saccharomyces cerevisiae has been published in Goffeau et al., Science 274 (5287), 546-547, 1996 and Philippsen et al., Nature 387 (6632 Suppl), 93-98 (1997), and its activity is being defined as “glucose-6-phosphate dehydrogenase”. Accordingly, in one embodiment, the process of the present invention comprises the use of a “glucose-6-phosphate dehydrogenase” or its homolog, e.g. as shown herein, for the production of the fine chemical, meaning of α-linolenic acid and/or tryglycerides, lipids, oils and/or fats containing α-linolenic acid, in particular for increasing the amount of α-linolenic acid in free or bound form in an organism or a part thereof, as mentioned. In one embodiment, in the process of the present invention the activity of a YNL241C protein is increased or generated, e.g. from Saccharomyces cerevisiae or a homolog thereof, preferably linked at least to one transit peptide as mentioned for example in table V.
In another embodiment, in the process of the present invention the activity of an YNL241C protein is increased or generated in a subcellular compartment of the organism or organism cell such as in an organelle like a plastid or mitochondria.

[1891] In one embodiment, the homolog of the YNL241C, is a homolog having said activity and being derived from Eukaryot. In one embodiment, the homolog of the b0342, b0403, b0931, b1281, b1625, b2156, b2827 and/or b3429 is a homolog having said activity and being derived from bacteria. In one embodiment, the homolog of the YNL241C is a homolog having said activity and being derived from Fungi. In one embodiment, the homolog of the b0342, b0403, b0931, b1281, b1625, b2156, b2827 and/or b3429 is a homolog having said activity and being derived from Proteobacteria. In one embodiment, the homolog of the YNL241C is a homolog having said activity and being derived from Ascomycota. In one embodiment, the homolog of the b0342, b0403, b0931, b1281, b1625, b2156, b2827 and/or b3429 is a homolog having said activity and being derived from Gammaproteobacteria. In one embodiment, the homolog of the YNL241C is a homolog having said activity and being derived from Saccharomycotina. In one embodiment, the homolog of the b0342, b0403, b0931, b1281, b1625, b2156, b2827 and/or b3429 is a homolog having said activity and being derived from Enterobacteriales. In one embodiment, the homolog of the YNL241C is a homolog having said activity and being derived from Saccharomycetes. In one embodiment, the homolog of the b0342, b0403, b0931, b1281, b1625, b2156, b2827 and/or b3429 is a homolog having said activity and being derived from Enterobacteriaceae. In one embodiment, the homolog of the YNL241C is a homolog having said activity and being derived from Saccharomycetales. In one embodiment, the homolog of the b0342, b0403, b0931, b1281, b1625, b2156, b2827 and/or b3429 is a homolog having said activity and being derived from Escherichia, preferably from Escherichia coli. In one embodiment, the homolog of the YNL241C is a homolog having said activity and being derived from Saccharomycetaceae. In one embodiment, the homolog of the YNL241C is a homolog having said activity and being derived from Saccharomycetes, preferably from Saccharomyces cerevisiae.

[1892] for the disclosure of this paragraph see paragraph [0038.0.0.0] above.

[1893] In accordance with the invention, a protein or polypeptide has the “activity of an protein as shown in table II, application no. 7, column 3” if its de novo activity, or its increased expression directly or indirectly leads to an increased in the fine chemical level in the organism or a part thereof, preferably in a cell of said organism, more preferably in an organelle such as a plastid or mitochondria of said organism and the protein has the above mentioned activities of a protein as shown in table II, application no. 7, column 3, preferably in the event the nucleic acid sequences encoding said proteins is functionally joined to the nucleic acid sequence of a transit peptide. Throughout the specification the activity or preferably the biological activity of such a protein or polypeptide or an nucleic acid molecule or sequence encoding such protein or polypeptide is identical or similar if it still has the biological or enzymatic activity of a protein as shown in table II, application no. 7, column 3, or which has at least 10% of the original enzymatic activity, preferably 20%, particularly preferably 30%, most particularly preferably 40% in comparison to a protein as shown in table II, application no. 7, column 3 of Saccharomyces cerevisiae.

[1894] for the disclosure of the paragraphs [0040.0.0.6] to [0047.0.0.5] see paragraphs [0040.0.0.0] to [0047.0.0.0] above.

[1895] Preferably, the reference, control or wild type differs form the subject of the present invention only in the cellular activity, preferably of the plastidial activity of the polypeptide of the invention, e.g. as result of an increase in the level of the nucleic acid molecule of the present invention or an increase of the specific activity of the polypeptide of the invention, e.g. by or in the expression level or activity of an protein having the activity of a protein as shown in table II, application no. 7, column 3 its biochemical or genetical causes and the increased amount of the fine chemical.

[1896] for the disclosure of the paragraphs [0049.0.0.6] to [0051.0.0.5] see paragraphs [0049.0.0.0] to [0051.0.0.0] above.

[1897] For example, the molecule number or the specific activity of the polypeptide or the nucleic acid molecule may be increased. Larger amounts of the fine chemical can be produced if the polypeptide or the nucleic acid of the invention is expressed de novo in an organism lacking the activity of said protein, preferably the nucleic acid molecules as mentioned in table I, application no. 7, columns 5 and 7 alone or preferably in combination with a transit peptide for example as mentioned in table V or in another embodiment by introducing said nucleic acid molecules into an organelle such as an plastid or mitochondria in the transgenic organism. However, it is also possible to modify the expression of the gene which is naturally present in the organisms, for example by integrating a nucleic acid sequence, encoding a plastidic targeting sequence in front (5 prime) of the coding sequence, leading to a functional preprotein, which is directed for example to the plastids.

[1898] for the disclosure of the paragraphs [0053.0.0.6] to [0058.0.0.5] see paragraphs [0053.0.0.0] to [0058.0.0.0] above.

[1899] In case the activity of the Escherichia coli protein b0342 or its homologs, e.g. a “thiogalactoside acetyltransferase” is increased advantageously in an organelle such as a plastid or mitochondria, preferably, in one embodiment an increase of the fine chemical, preferably of α-linolenic acid and/or tryglycerides, lipids, oils and/or fats containing α-linolenic acid between 12% and 59% or more is conferred.

In case the activity of the Escherichia coli protein b0403 or its homologs, e.g. a “maltodextrin glucosidase” is increased advantageously in an organelle such as a plastid or mitochondria, preferably, in one embodiment an increase of the fine chemical, preferably of α-linolenic acid and/or tryglycerides, lipids, oils and/or fats containing α-linolenic acid between 12% and 41% or more is conferred.
In case the activity of the Escherichia coli protein b0931 or its homologs, e.g. a “nicotinate phosphoribosyltransferase” is increased advantageously in an organelle such as a plastid or mitochondria, preferably, in one embodiment an increase of the fine chemical, preferably of α-linolenic acid and/or tryglycerides, lipids, oils and/or fats containing α-linolenic acid between 11% and 40% or more is conferred.
In case the activity of the Escherichia coli protein b1281 or its homologs, e.g. a “orotidine-5′-phosphate decarboxylase” is increased advantageously in an organelle such as a plastid or mitochondria, preferably, in one embodiment an increase of the fine chemical, preferably of α-linolenic acid and/or tryglycerides, lipids, oils and/or fats containing α-linolenic acid between 12% and 23% or more is conferred.
In case the activity of the Escherichia coli protein b1625 or its homologs, e.g. a “putative hemolysin expression modulating protein HHA domain” is increased advantageously in an organelle such as a plastid or mitochondria, preferably, in one embodiment an increase of the fine chemical, preferably of α-linolenic acid and/or tryglycerides, lipids, oils and/or fats containing α-linolenic acid between 13% and 23% or more is conferred.
In case the activity of the Escherichia coli protein b2156 or its homologs, e.g. a “lysine-specific permease” is increased advantageously in an organelle such as a plastid or mitochondria, preferably, in one embodiment an increase of the fine chemical, preferably of α-linolenic acid and/or tryglycerides, lipids, oils and/or fats containing α-linolenic acid between 17% and 56% or more is conferred.
In case the activity of the Escherichia coli protein b2827 or its homologs, e.g. a “thymidylate synthetase” is increased advantageously in an organelle such as a plastid or mitochondria, preferably, in one embodiment an increase of the fine chemical, preferably of α-linolenic acid and/or tryglycerides, lipids, oils and/or fats containing α-linolenic acid between 14% and 19% or more is conferred.
In case the activity of the Escherichia coli protein b3429 or its homologs, e.g. a “glycogen synthase (starch synthase)” is increased advantageously in an organelle such as a plastid or mitochondria, preferably, in one embodiment an increase of the fine chemical, preferably of α-linolenic acid and/or tryglycerides, lipids, oils and/or fats containing α-linolenic acid between 12% and 27% or more is conferred.
In case the activity of the Saccharomyces cerevisiae protein YNL241C or its homologs, e.g. a “glucose-6-phosphate dehydrogenase” is increased advantageously in an organelle such as a plastid or mitochondria, preferably, in one embodiment an increase of the fine chemical, preferably of α-linolenic acid and/or tryglycerides, lipids, oils and/or fats containing α-linolenic acid between 12% and 13% or more is conferred.

[1900] In case the activity of the Escherichia coli proteins b0342, b0403, b0931, b1281, b1625, b2156, b2827 or b3429 or their homologs,” are increased advantageously in an organelle such as a plastid or mitochondria, preferably an increase of the fine chemical α-linolenic acid and/or tryglycerides, lipids, oils and/or fats containing α-linolenic acid is conferred.

In case the activity of the Saccharomyces cerevisiae protein YNL241C or its homologs, e.g. a “glucose-6-phosphate dehydrogenase” is increased advantageously in an organelle such as a plastid or mitochondria, preferably an increase of the fine chemical α-linolenic acid and/or tryglycerides, lipids, oils and/or fats containing α-linolenic acid is conferred.

[1901] for the disclosure of the paragraphs [0061.0.0.6] and [0062.0.0.6] see paragraphs [0061.0.0.0] and [0062.0.0.0] above.

[1902] A protein having an activity conferring an increase in the amount or level of the fine chemical, preferably upon targeting to the plastids preferably has the structure of the polypeptide described herein, in particular of the polypeptides comprising the consensus sequence shown in table IV, application no. 7, column 7 or of the polypeptide as shown in the amino acid sequences as disclosed in table II, application no. 7, columns 5 and 7 or the functional homologues thereof as described herein, or is encoded by the nucleic acid molecule characterized herein or the nucleic acid molecule according to the invention, for example by the nucleic acid molecule as shown in table I, application no. 7, columns 5 and 7 or its herein described functional homologues and has the herein mentioned activity.

[1903] For the purposes of the present invention, the term “α-linolenic acid” also encompasses the corresponding salts, such as, for example, the potassium or sodium salts of α-linolenic acid or the salts of α-linolenic acid with amines such as diethylamine as well as tryglycerides, lipids, oils and/or fats containing α-linolenic acid.

[1904] for the disclosure of the paragraphs [0065.0.0.6] and [0066.0.0.6] see paragraphs [0065.0.0.0] and [0066.0.0.0] above.

[1905] In one embodiment, the process of the present invention comprises one or more of the following steps
[1906] a) stabilizing a protein conferring the increased expression of a protein encoded by the nucleic acid molecule of the invention or of the polypeptide of the invention, e.g. of a polypeptide having the activity of a protein as indicated in table II, application no. 7, columns 5 and 7 or its homologs activity having herein-mentioned α-linolenic acid increasing activity; and/or
[1907] b) stabilizing a mRNA conferring the increased expression of a protein encoded by the nucleic acid molecule of the invention, which is in the sense of the invention a fusion of a nucleic acid sequence encoding a transit peptide and of a nucleic acid sequence as shown in table I, application no. 7, columns 5 and 7, e.g. a nucleic acid sequence encoding a polypeptide having the activity of a protein as indicated in table II, application no. 7, columns 5 and 7 or its homologs activity or of a mRNA encoding the polypeptide of the present invention having herein-mentioned α-linolenic acid increasing activity; and/or
[1908] c) increasing the specific activity of a protein conferring the increased expression of a protein encoded by the nucleic acid molecule of the invention or of the polypeptide of the present invention having herein-mentioned α-linolenic acid increasing activity, e.g. of a polypeptide having the activity of a protein as indicated in table II, application no. 7, columns 5 and 7 or its homologs activity, or decreasing the inhibitory regulation of the polypeptide of the invention; and/or
[1909] d) generating or increasing the expression of an endogenous or artificial transcription factor mediating the expression of a protein conferring the increased expression of a protein encoded by the nucleic acid molecule of the invention or of the polypeptide of the invention having herein-mentioned α-linolenic acid increasing activity, e.g. of a polypeptide having the activity of a protein as indicated in table II, application no. 7, columns 5 and 7 or its homologs activity; and/or
[1910] e) stimulating activity of a protein conferring the increased expression of a protein encoded by the nucleic acid molecule of the present invention or a polypeptide of the present invention having herein-mentioned α-linolenic acid increasing activity, e.g. of a polypeptide having the activity of a protein as indicated in table II, application no. 7, columns 5 and 7 or its homologs activity, by adding one or more exogenous inducing factors to the organisms or parts thereof; and/or
[1911] f) expressing a transgenic gene encoding a protein conferring the increased expression of a polypeptide encoded by the nucleic acid molecule of the present invention or a polypeptide of the present invention, having herein-mentioned α-linolenic acid increasing activity, e.g. of a polypeptide having the activity of a protein as indicated in table II, application no. 7, columns 5 and 7 or its homologs activity, and/or
[1912] g) increasing the copy number of a gene conferring the increased expression of a nucleic acid molecule encoding a polypeptide encoded by the nucleic acid molecule of the invention or the polypeptide of the invention having herein-mentioned α-linolenic acid increasing activity, e.g. of a polypeptide having the activity of a protein as indicated in table II, application no. 7, columns 5 and 7 or its homologs activity; and/or
[1913] h) increasing the expression of the endogenous gene encoding the polypeptide of the invention, e.g. a polypeptide having the activity of a protein as indicated in table II, application no. 7, columns 5 and 7 or its homologs activity, by adding positive expression or removing negative expression elements, e.g. homologous recombination can be used to either introduce positive regulatory elements like for plants the 35S enhancer into the promoter or to remove repressor elements form regulatory regions. Further gene conversion methods can be used to disrupt repressor elements or to enhance to activity of positive elements. Positive elements can be randomly introduced in plants by T-DNA or transposon mutagenesis and lines can be identified in which the positive elements have be integrated near to a gene of the invention, the expression of which is thereby enhanced; and/or
[1914] i) modulating growth conditions of an organism in such a manner, that the expression or activity of the gene encoding the protein of the invention or the protein itself is enhanced for example microorganisms or plants can be grown for example under a higher temperature regime leading to an enhanced expression of heat shock proteins, which can lead an enhanced fine chemical production; and/or
[1915] j) selecting of organisms with especially high activity of the proteins of the invention from natural or from mutagenized resources and breeding them into the target organisms, eg the elite crops; and/or
[1916] k) directing a protein encoded by the nucleic acid molecule of the invention or of the polypeptide of the present invention having herein-mentioned α-linolenic acid increasing activity, e.g. of polypeptide having the activity of a protein as indicated in table II, application no. 7, columns 5 and 7 or its homologs activity, to the plastids by the addition of a plastidial targeting sequence; and/or
[1917] l) generating the expression of a protein encoded by the nucleic acid molecule of the invention or of the polypeptide of the present invention having herein-mentioned α-linolenic acid increasing activity, e.g. of a polypeptide having the activity of a protein as indicated in table II, application no. 7, columns 5 and 7 or its homologs activity in plastids by the stable or transient transformation advantageously stable transformation of organelles preferably plastids with an inventive nucleic acid sequence preferably in form of an expression cassette containing said sequence leading to the plastidial expression of the nucleic acids or polypeptides of the invention; and/or
[1918] m) generating the expression of a protein encoded by the nucleic acid molecule of the invention or of the polypeptide of the present invention having herein-mentioned α-linolenic acid increasing activity, e.g. of a polypeptide having the activity of a protein as indicated in table II, application no. 7, columns 5 and 7 or its homologs activity in plastids by integration of a nucleic acid of the invention into the plastidal genome under control of preferable a plastidial promoter.

[1919] Preferably, said mRNA is the nucleic acid molecule of the present invention and/or the protein conferring the increased expression of a protein encoded by the nucleic acid molecule of the present invention alone or link to a transit nucleic acid sequence or transit peptide encoding nucleic acid sequence or the polypeptide having the herein mentioned activity, e.g. conferring the increase of the fine chemical after increasing the expression or activity of the encoded polypeptide preferably in organelles such as plastids or having the activity of a polypeptide having an activity as the protein as shown in table II, application no. 7, column 3 or its homologs. Preferably the increase of the fine chemical takes place in plastids.

[1920] for the disclosure of the paragraphs [0069.0.0.6] to [0079.0.0.6] see paragraphs [0069.0.0.0] to [0079.0.0.0] above.

[1921] The activation of an endogenous polypeptide having above-mentioned activity, e.g. having the activity of a protein as shown in table II, application no. 7, column 3 or of the polypeptide of the invention, e.g. conferring the increase of the fine chemical after increase of expression or activity in the cytsol and/or in an organelle like a plastid, preferentially in the plastid, can also be increased by introducing a synthetic transcription factor, which binds close to the coding region of the gene encoding the protein as shown in table II, application no. 7, column 3 and activates its transcription. A chimeric zinc finger protein can be constructed, which comprises a specific DNA-binding domain and an activation domain as e.g. the VP16 domain of Herpes Simplex virus. The specific binding domain can bind to the regulatory region of the gene encoding the protein as shown in table II, application no. 7, column 3. The expression of the chimeric transcription factor in a organism, in particular in a plant, leads to a specific expression of the protein as shown in table II, application no. 7, column 3, see e.g. in WO01/52620, Oriz, Proc. Natl. Acad. Sci. USA, 2002, Vol. 99, 13290 or Guan, Proc. Natl. Acad. Sci. USA, 2002, Vol. 99, 13296.

[1922] for the disclosure of the paragraphs [0081.0.0.6] to [0084.0.0.6] see paragraphs [0081.0.0.0] to [0084.0.0.0] above.

[1923] Owing to the introduction of a gene or a plurality of genes conferring the expression of the nucleic acid molecule of the invention or the nucleic acid molecule used in the method of the invention or the polypeptide of the invention or the polypeptide used in the method of the invention as described below, for example the nucleic acid construct mentioned below into an organism alone or in combination with other genes, it is possible not only to increase the biosynthetic flux towards the end product, but also to increase, modify or create de novo an advantageous, preferably novel metabolites composition in the organism, e.g. an advantageous fatty acid composition comprising a higher content of (from a viewpoint of nutritional physiology limited) fatty acids, like palmitate, palmitoleate, stearate and/or oleate.

[1924] for the disclosure of this paragraph see paragraph [0086.0.0.0] above.

[1925] By influencing the metabolism thus, it is possible to produce, in the process according to the invention, further advantageous compounds. Examples of such compounds are, in addition to α-linolenic acid, triglycerides, lipids, oils and/or fats containing α-linolenic acid compounds such as palmitate, palmitoleate, stearate, oleate and/or linoleate.

[1926] Accordingly, in one embodiment, the process according to the invention relates to a process, which comprises:
[1927] a) providing a non-human organism, preferably a microorganism, a non-human animal, a plant or animal cell, a plant or animal tissue or a plant, more preferably a microorganism, a plant or a plant tissue;
[1928] b) increasing the activity of a protein as shown in table II, application no. 7, column 3 or of a polypeptide being encoded by the nucleic acid molecule of the present invention and described below, e.g. conferring an increase of the fine chemical in the organism, preferably in the microorganism, the non-human animal, the plant or animal cell, the plant or animal tissue or the plant, more preferably a microorganism, a plant or a plant tissue, in the cytsol or in the plastids, preferentially in the plastids,
[1929] c) growing the organism, preferably the microorganism, the non-human animal, the plant or animal cell, the plant or animal tissue or the plant under conditions which permit the production of the fine chemical in the organism, preferably the microorganism, the plant cell, the plant tissue or the plant; and
[1930] d) if desired, recovering, optionally isolating, the free and/or bound the fine chemical and, optionally further free and/or bound amino acids synthesized by the organism, the microorganism, the non-human animal, the plant or animal cell, the plant or animal tissue or the plant.

[1931] The organism, in particular the microorganism, non-human animal, the plant or animal cell, the plant or animal tissue or the plant is advantageously grown in such a way that it is not only possible to recover, if desired isolate the free or bound the fine chemical or the free and bound the fine chemical but as option it is also possible to produce, recover and, if desired isolate, other free or/and bound fatty acids, in particular oleic acid and/or linoleic acid.

[1932] for the disclosure of the paragraphs [0090.0.0.6] to [0097.0.0.6] see paragraphs [0090.0.0.0] to [0097.0.0.0] above.

[1933] With regard to the nucleic acid sequence as depicted a nucleic acid construct which contains a nucleic acid sequence mentioned herein or an organism (=transgenic organism) which is transformed with said nucleic acid sequence or said nucleic acid construct, “transgene” means all those constructs which have been brought about by genetic manipulation methods, preferably in which either
[1934] a) the nucleic acid sequence as shown in table I, application no. 7, columns 5 and 7 or a derivative thereof, or
[1935] b) a genetic regulatory element, for example a promoter, which is functionally linked to the nucleic acid sequence as shown table I, application no. 7, columns 5 and 7 or a derivative thereof, or
[1936] c) (a) and (b)
   is/are not present in its/their natural genetic environment or has/have been modified by means of genetic manipulation methods, it being possible for the modification to be, by way of example, a substitution, addition, deletion, inversion or insertion of one or more nucleotide. “Natural genetic environment” means the natural chromosomal locus in the organism of origin or the presence in a genomic library. In the case of a genomic library, the natural, genetic environment of the nucleic acid sequence is preferably at least partially still preserved. The environment flanks the nucleic acid sequence at least on one side and has a sequence length of at least 50 bp, preferably at least 500 bp, particularly preferably at least 1000 bp, very particularly preferably at least 5000 bp.

[1937] The use of the nucleic acid sequence according to the invention or of the nucleic acid construct according to the invention for the generation of transgenic plants is therefore also subject matter of the invention. As mentioned above the inventive nucleic acid sequence consists advantageously of the nucleic acid sequences as depicted in the sequence protocol and disclosed in table I, application no. 7, columns 5 and 7 joined to a nucleic acid sequence encoding a transit peptide, or a targeting nucleic acid sequence which directs the nucleic acid sequences disclosed in table I, application no. 7, columns 5 and 7 to the organelle preferentially the plastids. Alternatively the inventive nucleic acids sequences consist advantageously of the nucleic acid sequences as depicted in the sequence protocol and disclosed in table I, application no. 7, columns 5 and 7 joined preferably to a nucleic acids sequence mediating the stable integration of nucleic acids into the plastidial genome and optionally sequences mediating the transcription of the sequence in the plastidial compartment. A transient expression is in principal also desirable and possible.

[1938] for the disclosure of this paragraph see paragraph [0100.0.0.0] above.

[1939] In an advantageous embodiment of the invention, the organism takes the form of a plant whose fatty acid content is modified advantageously owing to the nucleic acid molecule of the present invention expressed. This is important for plant breeders since, for example, the nutritional value of plants for poultry is dependent on the abovementioned essential fatty acids and the general amount of fatty acids as energy source in feed. After the activity of the protein as shown in table II, application no. 7, column 3 has been increased or generated, or after the expression of nucleic acid molecule or polypeptide according to the invention has been generated or increased, the transgenic plant generated thus is grown on or in a nutrient medium or else in the soil and subsequently harvested.

[1940] for the disclosure of the paragraphs [0102.0.0.6] to [0110.0.0.6] see paragraphs [0102.0.0.0] to [0110.0.0.0] above.

[1941] In a preferred embodiment, the fine chemical (α-linolenic acid) is produced in accordance with the invention and, if desired, is isolated. The production of further fatty acids such as palmitic acid, stearic acid, palmitoleic acid, oleic acid and/or linoleic acid mixtures thereof or mixtures of other fatty acids by the process according to the invention is advantageous. It may be advantageous to increase the pool of free fatty acids in the transgenic organisms by the process according to the invention in order to isolate high amounts of the pure fine chemical.

[1942] In another preferred embodiment of the invention a combination of the increased expression of the nucleic acid sequence or the protein of the invention together with the transformation of a nucleic acid encoding a protein or polypeptide for example a fatty acid transporter protein or a compound, which functions as a sink for the desired fatty acid for example for α-linolenic acid in the organism is useful to increase the production of the respective fine chemical (see Bao and Ohlrogge, Plant Physiol. 1999 August; 120 (4): 1057-1062). Such fatty acid transporter protein may serve as a link between the location of fatty acid synthesis and the so called sink tissue, in which fatty acids, triglycerides, oils and fats are stored.

[1943] for the disclosure of the paragraphs [0113.0.5.6] to [0115.0.0.6] see paragraphs [0113.0.5.5] to [0115.0.5.5] above.

[1944] In a preferred embodiment, the present invention relates to a process for the production of the fine chemical comprising or generating in an organism or a part thereof, preferably in a cell compartment such as a plastid or mitochondria, the expression of at least one nucleic acid molecule comprising a nucleic acid molecule selected from the group consisting of:
[1945] a) nucleic acid molecule encoding, preferably at least the mature form, of the polypeptide shown in table II, application no. 7, columns 5 and 7 or a fragment thereof, which confers an increase in the amount of the fine chemical in an organism or a part thereof;
[1946] b) nucleic acid molecule comprising, preferably at least the mature form, of the nucleic acid molecule shown in table I, application no. 7, columns 5 and 7;
[1947] c) nucleic acid molecule whose sequence can be deduced from a polypeptide sequence encoded by a nucleic acid molecule of (a) or (b) as result of the degeneracy of the genetic code and conferring an increase in the amount of the fine chemical in an organism or a part thereof;
[1948] d) nucleic acid molecule encoding a polypeptide which has at least 50% identity with the amino acid sequence of the polypeptide encoded by the nucleic acid molecule of (a) to (c) and conferring an increase in the amount of the fine chemical in an organism or a part thereof;
[1949] e) nucleic acid molecule which hybridizes with a nucleic acid molecule of (a) to (c) under stringent hybridisation conditions and conferring an increase in the amount of the fine chemical in an organism or a part thereof;
[1950] f) nucleic acid molecule encoding a polypeptide, the polypeptide being derived by substituting, deleting and/or adding one or more amino acids of the amino acid sequence of the polypeptide encoded by the nucleic acid molecules (a) to (d), preferably to (a) to (c) and conferring an increase in the amount of the fine chemical in an organism or a part thereof;
[1951] g) nucleic acid molecule encoding a fragment or an epitope of a polypeptide which is encoded by one of the nucleic acid molecules of (a) to (e), preferably to (a) to (c) and conferring an increase in the amount of the fine chemical in an organism or a part thereof;
[1952] h) nucleic acid molecule comprising a nucleic acid molecule which is obtained by amplifying nucleic acid molecules from a cDNA library or a genomic library using the primers shown in table III, application no. 7, column 7 and conferring an increase in the amount of the fine chemical in an organism or a part thereof;
[1953] i) nucleic acid molecule encoding a polypeptide which is isolated, e.g. from an expression library, with the aid of monoclonal antibodies against a polypeptide encoded by one of the nucleic acid molecules of (a) to (h), preferably to (a) to (c), and conferring an increase in the amount of the fine chemical in an organism or a part thereof;
[1954] j) nucleic acid molecule which encodes a polypeptide comprising the consensus sequence shown in table IV, application no. 7, column 7 and conferring an increase in the amount of the fine chemical in an organism or a part thereof;
[1955] k) nucleic acid molecule comprising one or more of the nucleic acid molecule encoding the amino acid sequence of a polypeptide encoding a domain of the polypeptide shown in table II, application no. 7, columns 5 and 7 and conferring an increase in the amount of the fine chemical in an organism or a part thereof; and
[1956] l) nucleic acid molecule which is obtainable by screening a suitable library under stringent conditions with a probe comprising one of the sequences of the nucleic acid molecule of (a) to (k), preferably to (a) to (c), or with a fragment of at least 15 nt, preferably 20 nt, 30 nt, 50 nt, 100 nt, 200 nt or 500 nt of the nucleic acid molecule characterized in (a) to (k), preferably to (a) to (c), and conferring an increase in the amount of the fine chemical in an organism or a part thereof;
   or which comprises a sequence which is complementary thereto.

[1957] In one embodiment, the nucleic acid molecule used in the process of the invention distinguishes over the sequence indicated in table I A, application no. 7, columns 5 and 7 by one or more nucleotides. In one embodiment, the nucleic acid molecule used in the process of the invention does not consist of the sequence indicated in table I A, application no. 7, columns 5 and 7. In one embodiment, the nucleic acid molecule used in the process of the invention is less than 100%, 99.999%, 99.99%, 99.9% or 99% identical to a sequence indicated in table I A, application no. 7, columns 5 and 7. In another embodiment, the nucleic acid molecule does not encode a polypeptide of a sequence indicated in table II A, application no. 7, columns 5 and 7.

[1958] In one embodiment, the nucleic acid molecule used in the process of the invention distinguishes over the sequence indicated in table I B, application no. 7, columns 5 and 7, by one or more nucleotides. In one embodiment, the nucleic acid molecule used in the process of the invention does not consist of the sequence indicated in table I B, application no. 7, columns 5 and 7. In one embodiment, the nucleic acid molecule used in the process of the invention is less than 100%, 99.999%, 99.99%, 99.9% or 99% identical to a sequence indicated in table I B, application no. 7, columns 5 and 7. In another embodiment, the nucleic acid molecule does not encode a polypeptide of a sequence indicated in table II B, application no. 7, columns 5 and 7.

[1959] In one embodiment, the nucleic acid molecule used in the process distinguishes over the sequence shown in table I, application no. 7, columns 5 and 7 by one or more nucleotides or does not consist of the sequence shown in table I, application no. 7, columns 5 and 7. In one embodiment, the nucleic acid molecule of the present invention is less than 100%, 99.999%, 99.99%, 99.9% or 99% identical to the sequence shown in table I, application no. 7, columns 5 and 7. In another embodiment, the nucleic acid molecule does not encode a polypeptide of the sequence shown in table II, application no. 7, columns 5 and 7.

[1960] for the disclosure of the paragraphs [0118.0.0.6] to [0120.0.0.6] see paragraphs [0118.0.0.0] to [0120.0.0.0] above.

[1961] Nucleic acid molecules with the sequence shown in table I, application no. 7, columns 5 and 7, nucleic acid molecules which are derived from the amino acid sequences shown in table II, application no. 7, columns 5 and 7 or from polypeptides comprising the consensus sequence shown in table IV, application no. 7, column 7, or their derivatives or homologues encoding polypeptides with the enzymatic or biological activity of a protein as shown in table II, application no. 7, column 3 or conferring the fine chemical increase after increasing its expression or activity are advantageously increased in the process according to the invention by expression either in the cytsol or in an organelle such as a plastid or mitochondria or both, preferably in plastids.

[1962] for the disclosure of this paragraph see paragraph [0122.0.0.0] above.

[1963] Nucleic acid molecules, which are advantageous for the process according to the invention and which encode polypeptides with the activity of a protein as shown in table II, application no. 7, column 3 can be determined from generally accessible databases.

[1964] for the disclosure of this paragraph see paragraph [0124.0.0.0] above.

[1965] The nucleic acid molecules used in the process according to the invention take the form of isolated nucleic acid sequences, which encode polypeptides with the activity of the proteins as shown in table II, application no. 7, column 3 and conferring the fine chemical increase by expression either in the cytsol or in an organelle such as a plastid or mitochondria or both, preferably in plastids.

[1966] for the disclosure of the paragraphs [0126.0.0.6] to [0133.0.0.6] see paragraphs [0126.0.0.0] to [0133.0.0.0] above.

[1967] However, it is also possible to use artificial sequences, which differ in one or more bases from the nucleic acid sequences found in organisms, or in one or more amino acid molecules from polypeptide sequences found in organisms, in particular from the polypeptide sequences shown in table II, application no. 7, columns 5 and 7 or the functional homologues thereof as described herein, preferably conferring above-mentioned activity, i.e. conferring the fine chemical increase after increasing its activity, e.g. after increasing the activity of a protein as shown in table II, application no. 7, column 3 by for example expression either in the cytsol or in an organelle such as a plastid or mitochondria or both, preferably in plastids.

[1968] for the disclosure of the paragraphs [0135.0.0.6] to [0140.0.0.6] see paragraphs [0135.0.0.0] to [0140.0.0.0] above.

[1969] Synthetic oligonucleotide primers for the amplification, e.g. as shown in table III, application no. 7, column 7, by means of polymerase chain reaction can be generated on the basis of a sequence shown herein, for example the sequence shown in table I, application no. 7, columns 5 and 7 or the sequences derived from table II, application no. 7, columns 5 and 7.

[1970] Moreover, it is possible to identify conserved regions from various organisms by carrying out protein sequence alignments with the polypeptide used in the process of the invention, in particular with sequences of the polypeptide of the invention, from which conserved regions, and in turn, degenerate primers can be derived. Conserved regions are those, which show a very little variation in the amino acid in one particular position of several homologs from different origin. The consensus sequence shown in table IV, application no. 7, column 7 is derived from said alignments.

[1971] Degenerated primers can then be utilized by PCR for the amplification of fragments of novel proteins having above-mentioned activity, e.g. conferring the increase of the fine chemical after increasing the expression or activity or having the activity of a protein as shown in table II, application no. 7, column 3 or further functional homologs of the polypeptide of the invention from other organisms.

[1972] for the disclosure of the paragraphs [0144.0.0.6] to [0151.0.0.6] see paragraphs [0144.0.0.0] to [0151.0.0.0] above.

[1973] Polypeptides having above-mentioned activity, i.e. conferring the fine chemical increase, derived from other organisms, can be encoded by other DNA sequences which hybridize to the sequences shown in table I, application no. 7, columns 5 and 7, preferably of table I B, application no. 7, columns 5 and 7 under relaxed hybridization conditions and which code on expression for peptides having the α-linolenic acid, triglycerides, lipids, oils and/or fats containing α-linolenic acid increasing activity.

[1974] for the disclosure of the paragraphs [0153.0.0.6] to [0159.0.0.6] see paragraphs [0153.0.0.0] to [0159.0.0.0] above.

[1975] Further, the nucleic acid molecule of the invention comprises a nucleic acid molecule, which is a complement of one of the nucleotide sequences of above mentioned nucleic acid molecules or a portion thereof. A nucleic acid molecule which is complementary to one of the nucleotide sequences shown in table I, application no. 7, columns 5 and 7, preferably shown in table I B, application no. 7, columns 5 and 7 is one which is sufficiently complementary to one of the nucleotide sequences shown in table I, application no. 7, columns 5 and 7, preferably shown in table I B, application no. 7, columns 5 and 7 such that it can hybridize to one of the nucleotide sequences shown in table I, application no. 7, columns 5 and 7, preferably shown in table I B, application no. 7, columns 5 and 7, thereby forming a stable duplex. Preferably, the hybridisation is performed under stringent hybridization conditions. However, a complement of one of the herein disclosed sequences is preferably a sequence complement thereto according to the base pairing of nucleic acid molecules well known to the skilled person. For example, the bases A and G undergo base pairing with the bases T and U or C, resp. and visa versa. Modifications of the bases can influence the base-pairing partner.

[1976] The nucleic acid molecule of the invention comprises a nucleotide sequence which is at least about 30%, 35%, 40% or 45%, preferably at least about 50%, 55%, 60% or 65%, more preferably at least about 70%, 80%, or 90%, and even more preferably at least about 95%, 97%, 98%, 99% or more homologous to a nucleotide sequence shown in table I, application no. 7, columns 5 and 7, preferably shown in table I B, application no. 7, columns 5 and 7, or a portion thereof and preferably has above mentioned activity, in particular having a fine chemical increasing activity after increasing the activity or an activity of a gene product as shown in table II, application no. 7, column 3 by for example expression either in the cytsol or in an organelle such as a plastid or mitochondria or both, preferably in plastids.

[1977] The nucleic acid molecule of the invention comprises a nucleotide sequence which hybridizes, preferably hybridizes under stringent conditions as defined herein, to one of the nucleotide sequences shown in table I, application no. 7, columns 5 and 7, preferably shown in table I B, application no. 7, columns 5 and 7, or a portion thereof and encodes a protein having above-mentioned activity, e.g. conferring of a α-linolenic acid, triglycerides, lipids, oils and/or fats containing α-linolenic acid increase by for example expression either in the cytsol or in an organelle such as a plastid or mitochondria or both, preferably in plastids, and optionally, the activity of a protein as shown in table II, application no. 7, column 3.

[1978] Moreover, the nucleic acid molecule of the invention can comprise only a portion of the coding region of one of the sequences shown in table I, application no. 7, columns 5 and 7, preferably shown in table I B, application no. 7, columns 5 and 7, for example a fragment which can be used as a probe or primer or a fragment encoding a biologically active portion of the polypeptide of the present invention or of a polypeptide used in the process of the present invention, i.e. having above-mentioned activity, e.g. conferring an increase of the fine chemical if its activity is increased by for example expression either in the cytsol or in an organelle such as a plastid or mitochondria or both, preferably in plastids. The nucleotide sequences determined from the cloning of the present protein-according-to-the-invention-encoding gene allows for the generation of probes and primers designed for use in identifying and/or cloning its homologues in other cell types and organisms. The probe/primer typically comprises substantially purified oligonucleotide. The oligonucleotide typically comprises a region of nucleotide sequence that hybridizes under stringent conditions to at least about 12, 15 preferably about 20 or 25, more preferably about 40, 50 or 75 consecutive nucleotides of a sense strand of one of the sequences set forth, e.g., in table I, application no. 7, columns 5 and 7, an anti-sense sequence of one of the sequences, e.g., set forth in table I, application no. 7, columns 5 and 7, preferably shown in table I B, application no. 7, columns 5 and 7, or naturally occurring mutants thereof. Primers based on a nucleotide of invention can be used in PCR reactions to clone homologues of the polypeptide of the invention or of the polypeptide used in the process of the invention, e.g. as the primers described in the examples of the present invention, e.g. as shown in the examples. A PCR with the primers shown in table III, application no. 7, column 7 will result in a fragment of the gene product as shown in table II, column 3.

[1979] for the disclosure of this paragraph see paragraph [0164.0.0.0] above.

[1980] The nucleic acid molecule of the invention encodes a polypeptide or portion thereof which includes an amino acid sequence which is sufficiently homologous to the amino acid sequence shown in table II, application no. 7, columns 5 and 7 such that the protein or portion thereof maintains the ability to participate in the fine chemical production, in particular a α-linolenic acid, triglycerides, lipids, oils and/or fats containing α-linolenic acid increasing the activity as mentioned above or as described in the examples in plants or microorganisms is comprised.

[1981] As used herein, the language “sufficiently homologous” refers to proteins or portions thereof which have amino acid sequences which include a minimum number of identical or equivalent amino acid residues (e.g., an amino acid residue which has a similar side chain as an amino acid residue in one of the sequences of the polypeptide of the present invention) to an amino acid sequence shown in table II, application no. 7, columns 5 and 7 such that the protein or portion thereof is able to participate in the increase of the fine chemical production. For examples having the activity of a protein as shown in table II, column 3 and as described herein.

[1982] In one embodiment, the nucleic acid molecule of the present invention comprises a nucleic acid that encodes a portion of the protein of the present invention. The protein is at least about 30%, 35%, 40%, 45% or 50%, preferably at least about 55%, 60%, 65% or 70%, and more preferably at least about 75%, 80%, 85%, 90%, 91%, 92%, 93% or 94% and most preferably at least about 95%, 97%, 98%, 99% or more homologous to an entire amino acid sequence of table II, application no. 7, columns 5 and 7 and having above-mentioned activity, e.g. conferring preferably the increase of the fine chemical by for example expression either in the cytsol or in an organelle such as a plastid or mitochondria or both, preferably in plastids.

[1983] for the disclosure of the paragraphs [0168.0.0.6] and [0169.0.0.6] see paragraphs [0168.0.0.0] and [0169.0.0.0] above.

[1984] The invention further relates to nucleic acid molecules that differ from one of the nucleotide sequences shown in table I, application no. 7, columns 5 and 7 (and portions thereof) due to degeneracy of the genetic code and thus encode a polypeptide of the present invention, in particular a polypeptide having above mentioned activity, e.g. conferring an increase in the fine chemical in a organism, e.g. as that polypeptides depicted by the sequence shown in table II, application no. 7, columns 5 and 7 or the functional homologues. Advantageously, the nucleic acid molecule of the invention comprises, or in an other embodiment has, a nucleotide sequence encoding a protein comprising, or in an other embodiment having, an amino acid sequence shown in table II, application no. 7, columns 5 and 7 or the functional homologues. In a still further embodiment, the nucleic acid molecule of the invention encodes a full length protein which is substantially homologous to an amino acid sequence shown in table II, application no. 7, columns 5 and 7 or the functional homologues. However, in a preferred embodiment, the nucleic acid molecule of the present invention does not consist of the sequence shown in table I, application no. 7, columns 5 and 7, preferably as indicated in table I A, application no. 7, columns 5 and 7. Preferably the nucleic acid molecule of the invention is a functional homologue or identical to a nucleic acid molecule indicated in table I B, application no. 7, columns 5 and 7.

[1985] for the disclosure of the paragraphs [0171.0.0.6] to [0173.0.0.6] see paragraphs [0171.0.0.0] to [0173.0.0.0] above.

[1986] Accordingly, in another embodiment, a nucleic acid molecule of the invention is at least 15, 20, 25 or 30 nucleotides in length. Preferably, it hybridizes under stringent conditions to a nucleic acid molecule comprising a nucleotide sequence of the nucleic acid molecule of the present invention or used in the process of the present invention, e.g. comprising the sequence shown in table I, application no. 7, columns 5 and 7. The nucleic acid molecule is preferably at least 20, 30, 50, 100, 250 or more nucleotides in length.

[1987] for the disclosure of this paragraph see paragraph [0175.0.0.0] above.

[1988] Preferably, nucleic acid molecule of the invention that hybridizes under stringent conditions to a sequence shown in table I, application no. 7, columns 5 and 7 corresponds to a naturally-occurring nucleic acid molecule of the invention. As used herein, a “naturally-occurring” nucleic acid molecule refers to an RNA or DNA molecule having a nucleotide sequence that occurs in nature (e.g., encodes a natural protein). Preferably, the nucleic acid molecule encodes a natural protein having abovementioned activity, e.g. conferring the fine chemical increase after increasing the expression or activity thereof or the activity of a protein of the invention or used in the process of the invention by for example expression the nucleic acid sequence of the gene product in the cytsol and/or in an organelle such as a plastid or mitochondria, preferably in plastids.

[1989] for the disclosure of this paragraph see paragraph [0177.0.0.0] above.

[1990] For example, nucleotide substitutions leading to amino acid substitutions at “non-essential” amino acid residues can be made in a sequence of the nucleic acid molecule of the invention or used in the process of the invention, e.g. shown in table I, application no. 7, columns 5 and 7.

[1991] for the disclosure of the paragraphs [0179.0.0.6] and [0180.0.0.6] see paragraphs [0179.0.0.0] and [0180.0.0.0] above.

[1992] Accordingly, the invention relates to nucleic acid molecules encoding a polypeptide having above-mentioned activity, e.g. conferring an increase in the fine chemical in an organisms or parts thereof by for example expression either in the cytsol or in an organelle such as a plastid or mitochondria or both, preferably in plastids that contain changes in amino acid residues that are not essential for said activity. Such polypeptides differ in amino acid sequence from a sequence contained in the sequences shown in table II, application no. 7, columns 5 and 7, preferably shown in table II A, application no. 7, columns 5 and 7 yet retain said activity described herein. The nucleic acid molecule can comprise a nucleotide sequence encoding a polypeptide, wherein the polypeptide comprises an amino acid sequence at least about 50% identical to an amino acid sequence shown in table II, application no. 7, columns 5 and 7, preferably shown in table II A, application no. 7, columns 5 and 7 and is capable of participation in the increase of production of the fine chemical after increasing its activity, e.g. its expression by for example expression either in the cytsol or in an organelle such as a plastid or mitochondria or both, preferably in plastids. Preferably, the protein encoded by the nucleic acid molecule is at least about 60% identical to the sequence shown in table II, application no. 7, columns 5 and 7, preferably shown in table II A, application no. 7, columns 5 and 7, more preferably at least about 70% identical to one of the sequences shown in table II, application no. 7, columns 5 and 7, preferably shown in table II A, application no. 7, columns 5 and 7, even more preferably at least about 80%, 90%, 95% homologous to the sequence shown in table II, application no. 7, columns 5 and 7, preferably shown in table II A, application no. 7, columns 5 and 7, and most preferably at least about 96%, 97%, 98%, or 99% identical to the sequence shown in table II, application no. 7, columns 5 and 7, preferably shown in table II A, application no. 7, columns 5 and 7.

[1993] for the disclosure of the paragraphs [0182.0.0.6] to [0188.0.0.6] see paragraphs [0182.0.0.0] to [0188.0.0.0] above.

[1994] Functional equivalents derived from one of the polypeptides as shown in table II, application no. 7, columns 5 and 7, preferably shown in table II B, application no. 7, columns 5 and 7 resp., according to the invention by substitution, insertion or deletion have at least 30%, 35%, 40%, 45% or 50%, preferably at least 55%, 60%, 65% or 70% by preference at least 80%, especially preferably at least 85% or 90%, 91%, 92%, 93% or 94%, very especially preferably at least 95%, 97%, 98% or 99% homology with one of the polypeptides as shown in table II, application no. 7, columns 5 and 7, preferably shown in table II B, application no. 7, columns 5 and 7 resp., according to the invention and are distinguished by essentially the same properties as the polypeptide as shown in table II, application no. 7, columns 5 and 7, preferably shown in table II B, application no. 7, columns 5 and 7.

[1995] Functional equivalents derived from the nucleic acid sequence as shown in table I, application no. 7, columns 5 and 7, preferably shown in table I B, application no. 7, columns 5 and 7 resp., according to the invention by substitution, insertion or deletion have at least 30%, 35%, 40%, 45% or 50%, preferably at least 55%, 60%, 65% or 70% by preference at least 80%, especially preferably at least 85% or 90%, 91%, 92%, 93% or 94%, very especially preferably at least 95%, 97%, 98% or 99% homology with one of the polypeptides as shown in table II, application no. 7, columns 5 and 7, preferably shown in table II B, application no. 7, columns 5 and 7 resp., according to the invention and encode polypeptides having essentially the same properties as the polypeptide as shown in table II, application no. 7, columns 5 and 7, preferably shown in table II B, application no. 7, columns 5 and 7.

[1996] for the disclosure of this paragraph see paragraph [0191.0.0.0] above.

[1997] A nucleic acid molecule encoding an homologous to a protein sequence of table II, application no. 7, columns 5 and 7, preferably shown in table II B, application no. 7, columns 5 and 7 resp., can be created by introducing one or more nucleotide substitutions, additions or deletions into a nucleotide sequence of the nucleic acid molecule of the present invention, in particular of table I, application no. 7, columns 5 and 7, preferably shown in table I B, application no. 7, columns 5 and 7 resp., such that one or more amino acid substitutions, additions or deletions are introduced into the encoded protein. Mutations can be introduced into the encoding sequences of table I, application no. 7, columns 5 and 7, preferably shown in table I B, application no. 7, columns 5 and 7 resp., by standard techniques, such as site-directed mutagenesis and PCR-mediated mutagenesis.

[1998] for the disclosure of the paragraphs [0193.0.0.6] to [0196.0.0.6] see paragraphs [0193.0.0.0] to [0196.0.0.0] above.

[1999] Homologues of the nucleic acid sequences used, with the sequence shown in table I, application no. 7, columns 5 and 7, preferably shown in table I B, application no. 7, columns 5 and 7, comprise also allelic variants with at least approximately 30%, 35%, 40% or 45% homology, by preference at least approximately 50%, 60% or 70%, more preferably at least approximately 90%, 91%, 92%, 93%, 94% or 95% and even more preferably at least approximately 96%, 97%, 98%, 99% or more homology with one of the nucleotide sequences shown or the abovementioned derived nucleic acid sequences or their homologues, derivatives or analogues or parts of these. Allelic variants encompass in particular functional variants which can be obtained by deletion, insertion or substitution of nucleotides from the sequences shown, preferably from table I, application no. 7, columns 5 and 7, preferably shown in table I B, application no. 7, columns 5 and 7, or from the derived nucleic acid sequences, the intention being, however, that the enzyme activity or the biological activity of the resulting proteins synthesized is advantageously retained or increased.

[2000] In one embodiment of the present invention, the nucleic acid molecule of the invention or used in the process of the invention comprises the sequences shown in any of the table I, application no. 7, columns 5 and 7, preferably shown in table I B, application no. 7, columns 5 and 7. It is preferred that the nucleic acid molecule comprises as little as possible other nucleotides not shown in any one of table I, application no. 7, columns 5 and 7, preferably shown in table I B, application no. 7, columns 5 and 7. In one embodiment, the nucleic acid molecule comprises less than 500, 400, 300, 200, 100, 90, 80, 70, 60, 50 or 40 further nucleotides. In a further embodiment, the nucleic acid molecule comprises less than 30, 20 or 10 further nucleotides. In one embodiment, the nucleic acid molecule use in the process of the invention is identical to the sequences shown in table I, application no. 7, columns 5 and 7, preferably shown in table I B, application no. 7, columns 5 and 7.

[2001] Also preferred is that the nucleic acid molecule used in the process of the invention encodes a polypeptide comprising the sequence shown in table II, application no. 7, columns 5 and 7, preferably shown in table II B, application no. 7, columns 5 and 7. In one embodiment, the nucleic acid molecule encodes less than 150, 130, 100, 80, 60, 50, 40 or 30 further amino acids. In a further embodiment, the encoded polypeptide comprises less than 20, 15, 10, 9, 8, 7, 6 or 5 further amino acids. In one embodiment used in the inventive process, the encoded polypeptide is identical to the sequences shown in table II, application no. 7, columns 5 and 7, preferably shown in table II B, application no. 7, columns 5 and 7.

[2002] In one embodiment, the nucleic acid molecule of the invention or used in the process encodes a polypeptide comprising the sequence shown in table II, application no. 7, columns 5 and 7, preferably shown in table II B, application no. 7, columns 5 and 7 comprises less than 100 further nucleotides. In a further embodiment, said nucleic acid molecule comprises less than 30 further nucleotides. In one embodiment, the nucleic acid molecule used in the process is identical to a coding sequence of the sequences shown in table I, application no. 7, columns 5 and 7, preferably shown in table I B, application no. 7, columns 5 and 7.

[2003] Polypeptides (=proteins), which still have the essential biological or enzymatic activity of the polypeptide of the present invention conferring an increase of the fine chemical i.e. whose activity is essentially not reduced, are polypeptides with at least 10% or 20%, by preference 30% or 40%, especially preferably 50% or 60%, very especially preferably 80% or 90 or more of the wild type biological activity or enzyme activity, advantageously, the activity is essentially not reduced in comparison with the activity of a polypeptide shown in table II, application no. 7, columns 5 and 7 expressed under identical conditions.

[2004] Homologues of table I, application no. 7, columns 5 and 7 or of the derived sequences of table II, application no. 7, columns 5 and 7 also mean truncated sequences, cDNA, single-stranded DNA or RNA of the coding and noncoding DNA sequence. Homologues of said sequences are also understood as meaning derivatives, which comprise noncoding regions such as, for example, UTRs, terminators, enhancers or promoter variants. The promoters upstream of the nucleotide sequences stated can be modified by one or more nucleotide substitution(s), insertion(s) and/or deletion(s) without, however, interfering with the functionality or activity either of the promoters, the open reading frame (=ORF) or with the 3′-regulatory region such as terminators or other 3′ regulatory regions, which are far away from the ORF. It is furthermore possible that the activity of the promoters is increased by modification of their sequence, or that they are replaced completely by more active promoters, even promoters from heterologous organisms. Appropriate promoters are known to the person skilled in the art and are mentioned herein below.

[2005] for the disclosure of the paragraphs [0203.0.0.6] to [0215.0.0.6] see paragraphs [0203.0.0.0] to [0215.0.0.0] above.

[2006] Accordingly, in one embodiment, the invention relates to a nucleic acid molecule, which comprises a nucleic acid molecule selected from the group consisting of:
[2007] a) nucleic acid molecule encoding, preferably at least the mature form, of the polypeptide shown in table II, application no. 7, columns 5 and 7, preferably in table II B, application no. 7, columns 5 and 7; or a fragment thereof conferring an increase in the amount of the fine chemical in an organism or a part thereof
[2008] b) nucleic acid molecule comprising, preferably at least the mature form, of the nucleic acid molecule shown in table I, application no. 7, columns 5 and 7, preferably in table I B, application no. 7, columns 5 and 7 or a fragment thereof conferring an increase in the amount of the fine chemical in an organism or a part thereof;
[2009] c) nucleic acid molecule whose sequence can be deduced from a polypeptide sequence encoded by a nucleic acid molecule of (a) or (b) as result of the degeneracy of the genetic code and conferring an increase in the amount of the fine chemical in an organism or a part thereof;
[2010] d) nucleic acid molecule encoding a polypeptide whose sequence has at least 50% identity with the amino acid sequence of the polypeptide encoded by the nucleic acid molecule of (a) to (c) and conferring an increase in the amount of the fine chemical in an organism or a part thereof;
[2011] e) nucleic acid molecule which hybridizes with a nucleic acid molecule of (a) to (c) under stringent hybridisation conditions and conferring an increase in the amount of the fine chemical in an organism or a part thereof;
[2012] f) nucleic acid molecule encoding a polypeptide, the polypeptide being derived by substituting, deleting and/or adding one or more amino acids of the amino acid sequence of the polypeptide encoded by the nucleic acid molecules (a) to (d), preferably to (a) to (c), and conferring an increase in the amount of the fine chemical in an organism or a part thereof;
[2013] g) nucleic acid molecule encoding a fragment or an epitope of a polypeptide which is encoded by one of the nucleic acid molecules of (a) to (e), preferably to (a) to (c) and conferring an increase in the amount of the fine chemical in an organism or a part thereof;
[2014] h) nucleic acid molecule comprising a nucleic acid molecule which is obtained by amplifying a cDNA library or a genomic library using the primers in table Ill, application no. 7, column 7 and conferring an increase in the amount of the fine chemical in an organism or a part thereof;
[2015] i) nucleic acid molecule encoding a polypeptide which is isolated, e.g. from a expression library, with the aid of monoclonal antibodies against a polypeptide encoded by one of the nucleic acid molecules of (a) to (g), preferably to (a) to (c) and conferring an increase in the amount of the fine chemical in an organism or a part thereof;
[2016] j) nucleic acid molecule which encodes a polypeptide comprising the consensus sequence shown in table IV, application no. 7, column 7 and conferring an increase in the amount of the fine chemical in an organism or a part thereof;
[2017] k) nucleic acid molecule encoding the amino acid sequence of a polypeptide encoding a domain of the polypeptide shown in table II, application no. 7, columns 5 and 7 and conferring an increase in the amount of the fine chemical in an organism or a part thereof; and
[2018] l) nucleic acid molecule which is obtainable by screening a suitable nucleic acid library under stringent hybridization conditions with a probe comprising one of the sequences of the nucleic acid molecule of (a) to (k) or with a fragment of at least 15 nt, preferably 20 nt, 30 nt, 50 nt, 100 nt, 200 nt or 500 nt of the nucleic acid molecule characterized in (a) to (h) or of the nucleic acid molecule shown in table I, application no. 7, columns 5 and 7 or a nucleic acid molecule encoding, preferably at least the mature form of, the polypeptide shown in table II, application no. 7, columns 5 and 7, and conferring an increase in the amount of the fine chemical in an organism or a part thereof; or which encompasses a sequence which is complementary thereto;
   whereby, preferably, the nucleic acid molecule according to (a) to (l) distinguishes over the sequence depicted in table I A and/or I B, application no. 7, columns 5 and 7 by one or more nucleotides. In one embodiment, the nucleic acid molecule of the invention does not consist of the sequence shown in table I A and/or I B, application no. 7, columns 5 and 7. In another embodiment, the nucleic acid molecule of the present invention is at least 30% identical and less than 100%, 99.999%, 99.99%, 99.9% or 99% identical to the sequence shown in table I A and/or I B, application no. 7, columns 5 and 7. In a further embodiment the nucleic acid molecule does not encode the polypeptide sequence shown in table II A and/or II B, application no. 7, columns 5 and 7. Accordingly, in one embodiment, the nucleic acid molecule of the present invention encodes in one embodiment a polypeptide which differs at least in one or more amino acids from the polypeptide shown in table II A and/or II B, application no. 7, columns 5 and 7 does not encode a protein of the sequence shown in table II A and/or II B, application no. 7, columns 5 and 7. Accordingly, in one embodiment, the protein encoded by a sequence of a nucleic acid according to (a) to (l) does not consist of the sequence shown in table I A and/or I B, application no. 7, columns 5 and 7. In a further embodiment, the protein of the present invention is at least 30% identical to protein sequence depicted in table II A and/or II B, application no. 7, columns 5 and 7 and less than 100%, preferably less than 99.999%, 99.99% or 99.9%, more preferably less than 99%, 985, 97%, 96% or 95% identical to the sequence shown in table II A and/or II B, application no. 7, columns 5 and 7.

[2019] for the disclosure of the paragraphs [0217.0.0.6] to [0226.0.0.6] see paragraphs [0217.0.0.0] to [0226.0.0.0] above.

[2020] In general, vector systems preferably also comprise further cis-regulatory regions such as promoters and terminators and/or selection markers by means of which suitably transformed organisms can be identified. While vir genes and T-DNA sequences are located on the same vector in the case of cointegrated vector systems, binary systems are based on at least two vectors, one of which bears vir genes, but no T-DNA, while a second one bears T-DNA, but no vir gene. Owing to this fact, the last-mentioned vectors are relatively small, easy to manipulate and capable of replication in E. coli and in Agrobacterium. These binary vectors include vectors from the series pBIB-HYG, pPZP, pBecks, pGreen. Those which are preferably used in accordance with the invention are Bin19, pBI101, pBinAR, pGPTV and pCAMBIA. An overview of binary vectors and their use is given by Hellens et al, Trends in Plant Science (2000) 5, 446-451. The vectors are preferably modified in such a manner, that they already contain the nucleic acid coding for the transitpeptide and that the nucleic acids of the invention, preferentially the nucleic acid sequences encoding the polypeptides shown in table II, application no. 7, columns 5 and 7 can be cloned 3″ prime to the transitpeptide encoding sequence, leading to a functional preprotein, which is directed to the plastids and which means that the mature protein fulfills its biological activity.

[2021] for the disclosure of the paragraphs [0228.0.0.6] to [0239.0.0.6] see paragraphs [0228.0.0.0] to [0239.0.0.0] above.

[2022] The abovementioned nucleic acid molecules can be cloned into the nucleic acid constructs or vectors according to the invention in combination together with further genes, or else different genes are introduced by transforming several nucleic acid constructs or vectors (including plasmids) into a host cell, advantageously into a plant cell or a microorganisms.

In addition to the sequence mentioned in Table I, application no. 7, columns 5 and 7 or its derivatives, it is advantageous additionally to express and/or mutate further genes in the organisms. Especially advantageously, additionally at least one further gene of the fatty acid biosynthetic pathway such as for palmitate, palmitoleate, stearate and/or oleate is expressed in the organisms such as plants or microorganisms. It is also possible that the regulation of the natural genes has been modified advantageously so that the gene and/or its gene product is no longer subject to the regulatory mechanisms which exist in the organisms. This leads to an increased synthesis of the respective desired fine chemical since, for example, feedback regulations no longer exist to the same extent or not at all. In addition it might be advantageously to combine the sequences shown in Table I, application no. 7, columns 5 and 7 with genes which generally support or enhances to growth or yield of the target organism, for example genes which lead to faster growth rate of microorganisms or genes which produces stress-, pathogen, or herbicide resistant plants.

[2023] for the disclosure of the paragraphs [0241.0.5.6] and [0242.0.5.6] see paragraphs [0241.0.5.5] and [0242.0.5.5] above.

[2024] In a further advantageous embodiment of the process of the invention, the organisms used in the process are those in which simultaneously a α-linolenic acid degrading protein is attenuated, in particular by reducing the rate of expression of the corresponding gene.

[2025] for the disclosure of this paragraph see paragraph [0242.2.5.5] above.

[2026] for the disclosure of the paragraphs [0243.0.0.6] to [0264.0.0.6] see paragraphs [0243.0.0.0] to [0264.0.0.0] above.

[2027] Other preferred sequences for use in operable linkage in gene expression constructs are targeting sequences, which are required for targeting the gene product into specific cell compartments (for a review, see Kermode, Crit. Rev. Plant Sci. 15, 4 (1996) 285-423 and references cited therein), for example into the vacuole, the nucleus, all types of plastids, such as amyloplasts, chloroplasts, chromoplasts, the extracellular space, the mitochondria, the endoplasmic reticulum, elaioplasts, peroxisomes, glycosomes, and other compartments of cells or extracellular preferred are sequences, which are involved in targeting to plastids as mentioned above. Sequences, which must be mentioned in this context are, in particular, the signal-peptide- or transit-peptide-encoding sequences which are known per se. For example, plastid-transit-peptide-encoding sequences enable the targeting of the expression product into the plastids of a plant cell. Targeting sequences are also known for eukaryotic and to a lower extent for prokaryotic organisms and can advantageously be operable linked with the nucleic acid molecule of the present invention as shown in table I, application no. 7, columns 5 and 7 and described herein to achieve an expression in one of said compartments or extracellular.

[2028] for the disclosure of the paragraphs [0266.0.0.6] to [0287.0.0.6] see paragraphs [0266.0.0.0] to [0287.0.0.0] above.

[2029] Accordingly, one embodiment of the invention relates to a vector where the nucleic acid molecule according to the invention is linked operably to regulatory sequences which permit the expression in a prokaryotic or eukaryotic or in a prokaryotic and eukaryotic host. A further preferred embodiment of the invention relates to a vector in which a nucleic acid sequence encoding one of the polypeptides shown in table II, application no. 7, columns 5 and 7 or their homologs is functionally linked to a plastidial targeting sequence. A further preferred embodiment of the invention relates to a vector in which a nucleic acid sequence encoding one of the polypeptides shown in table II, application no. 7, columns 5 and 7 or their homologs is functionally linked to a regulatory sequences which permit the expression in plastids.

[2030] for the disclosure of the paragraphs [0289.0.0.6] to [0296.0.0.6] see paragraphs [0289.0.0.0] to [0296.0.0.0] above.

[2031] Moreover, native polypeptide conferring the increase of the fine chemical in an organism or part thereof can be isolated from cells (e.g., endothelial cells), for example using the antibody of the present invention as described below, in particular, an anti-b0342, anti-b0403, anti-b0931, anti-b1281, anti-b1625, anti-b2156, anti-b2827, anti-b3429 and/or anti-YNL241C protein antibody or an antibody against polypeptides as shown in table II, application no. 7, columns 5 and 7, which can be produced by standard techniques utilizing the polypeptide of the present invention or fragment thereof, i.e., the polypeptide of this invention. Preferred are monoclonal antibodies.

[2032] for the disclosure of this paragraph see paragraph [0298.0.0.0] above.

[2033] In one embodiment, the present invention relates to a polypeptide having the sequence shown in table II, application no. 7, columns 5 and 7 or as coded by the nucleic acid molecule shown in table I, application no. 7, columns 5 and 7 or functional homologues thereof.

[2034] In one advantageous embodiment, in the method of the present invention the activity of a polypeptide is increased comprising or consisting of the consensus sequence shown in table IV, application no. 7, columns 7 and in one another embodiment, the present invention relates to a polypeptide comprising or consisting of the consensus sequence shown in table IV, application no. 7, column 7 whereby 20 or less, preferably 15 or 10, preferably 9, 8, 7, or 6, more preferred 5 or 4, even more preferred 3, even more preferred 2, even more preferred 1, most preferred 0 of the amino acids positions indicated can be replaced by any amino acid.

[2035] for the disclosure of the paragraphs [0301.0.0.6] to [0304.0.0.6] see paragraphs [0301.0.0.0] to [0304.0.0.0] above.

[2036] In one advantageous embodiment, the method of the present invention comprises the increasing of a polypeptide comprising or consisting of plant or microorganism specific consensus sequences.

In one embodiment, said polypeptide of the invention distinguishes over the sequence shown in table II A and/or II B, application no. 7, columns 5 and 7 by one or more amino acids. In one embodiment, polypeptide distinguishes form the sequence shown in table II A and/or II B, application no. 7, columns 5 and 7 by more than 5, 6, 7, 8 or 9 amino acids, preferably by more than 10, 15, 20, 25 or 30 amino acids, even more preferred are more than 40, 50, or 60 amino acids and, preferably, the sequence of the polypeptide of the invention distinguishes from the sequence shown in table II A and/or II B, application no. 7, columns 5 and 7 by not more than 80% or 70% of the amino acids, preferably not more than 60% or 50%, more preferred not more than 40% or 30%, even more preferred not more than 20% or 10%. In an other embodiment, said polypeptide of the invention does not consist of the sequence shown in table II A and/or II B, application no. 7, columns 5 and 7.

[2037] for the disclosure of this paragraph see paragraph [0306.0.0.0] above.

[2038] In one embodiment, the invention relates to polypeptide conferring an increase in the fine chemical in an organism or part being encoded by the nucleic acid molecule of the invention or used in the process of the invention and having a sequence which distinguishes from the sequence as shown in table II A and/or II B, application no. 7, columns 5 and 7 by one or more amino acids. In another embodiment, said polypeptide of the invention does not consist of the sequence shown in table II A and/or II B, application no. 7, columns 5 and 7. In a further embodiment, said polypeptide of the present invention is less than 100%, 99.999%, 99.99%, 99.9% or 99% identical. In one embodiment, said polypeptide does not consist of the sequence encoded by the nucleic acid molecules shown in table I A and/or I B, application no. 7, columns 5 and 7.

[2039] In one embodiment, the present invention relates to a polypeptide having the activity of the protein as shown in table II A and/or II B, application no. 7, column 3, which distinguishes over the sequence depicted in table II A and/or II B, application no. 7, columns 5 and 7 by one or more amino acids, preferably by more than 5, 6, 7, 8 or 9 amino acids, preferably by more than 10, 15, 20, 25 or 30 amino acids, even more preferred are more than 40, 50, or 60 amino acids but even more preferred by less than 70% of the amino acids, more preferred by less than 50%, even more preferred my less than 30% or 25%, more preferred are 20% or 15%, even more preferred are less than 10%. In a further preferred embodiment the polypeptide of the invention takes the form of a preprotein consisting of a plastidial transitpeptide joint to a polypeptide having the activity of the protein as shown in table II A and/or II B, column 3, from which the transitpeptide is preferably cleaved off upon transport of the preprotein into the organelle for example into the plastid or mitochondria.

[2040] for the disclosure of the paragraphs [0309.0.0.6] to [0311.0.0.6] see paragraphs [0309.0.0.0] to [0311.0.0.0] above.

[2041] A polypeptide of the invention can participate in the process of the present invention. The polypeptide or a portion thereof comprises preferably an amino acid sequence, which is sufficiently homologous to an amino acid sequence shown in table II, application no. 7, columns 5 and 7.

[2042] Further, the polypeptide can have an amino acid sequence which is encoded by a nucleotide sequence which hybridizes, preferably hybridizes under stringent conditions as described above, to a nucleotide sequence of the nucleic acid molecule of the present invention. Accordingly, the polypeptide has an amino acid sequence which is encoded by a nucleotide sequence that is at least about 35%, 40%, 45%, 50%, 55%, 60%, 65% or 70%, preferably at least about 75%, 80%, 85% or 90, and more preferably at least about 91%, 92%, 93%, 94% or 95%, and even more preferably at least about 96%, 97%, 98%, 99% or more homologous to one of the amino acid sequences as shown in table II A and/or II B, application no. 7, columns 5 and 7. The preferred polypeptide of the present invention preferably possesses at least one of the activities according to the invention and described herein. A preferred polypeptide of the present invention includes an amino acid sequence encoded by a nucleotide sequence which hybridizes, preferably hybridizes under stringent conditions, to a nucleotide sequence of table I A and/or I B, application no. 7, columns 5 and 7 or which is homologous thereto, as defined above.

[2043] Accordingly the polypeptide of the present invention can vary from the sequences shown in table II A and/or II B, application no. 7, columns 5 and 7 in amino acid sequence due to natural variation or mutagenesis, as described in detail herein. Accordingly, the polypeptide comprise an amino acid sequence which is at least about 35%, 40%, 45%, 50%, 55%, 60%, 65% or 70%, preferably at least about 75%, 80%, 85% or 90, and more preferably at least about 91%, 92%, 93%, 94% or 95%, and most preferably at least about 96%, 97%, 98%, 99% or more homologous to an entire amino acid sequence shown in table II A and/or II B, application no. 7, columns 5 and 7.

[2044] for the disclosure of this paragraph see paragraph [0315.0.0.0] above.

[2045] Biologically active portions of an polypeptide of the present invention include peptides comprising amino acid sequences derived from the amino acid sequence of the polypeptide of the present invention or used in the process of the present invention, e.g., the amino acid sequence shown in table II, application no. 7, columns 5 and 7 or the amino acid sequence of a protein homologous thereto, which include fewer amino acids than a full length polypeptide of the present invention or used in the process of the present invention or the full length protein which is homologous to an polypeptide of the present invention or used in the process of the present invention depicted herein, and exhibit at least one activity of polypeptide of the present invention or used in the process of the present invention.

[2046] for the disclosure of this paragraph see paragraph [0317.0.0.0] above.

[2047] Manipulation of the nucleic acid molecule of the invention may result in the production of a protein having differences from the wild-type protein as shown in table II, application no. 7, column 3. Differences shall mean at least one amino acid different from the sequences as shown in table II, application no. 7, column 3, preferably at least 2, 3, 4, 5, 6, 7, 8, 9 or 10 amino acids, more preferably at least 15, 20, 25, 30, 35, 40, 45 or 50 amino acids different from the sequences as shown in table II, application no. 7, column 3. These proteins may be improved in efficiency or activity, may be present in greater numbers in the cell than is usual, or may be decreased in efficiency or activity in relation to the wild type protein.

[2048] Any mutagenesis strategies for the polypeptide of the present invention or the polypeptide used in the process of the present invention to result in increasing said activity are not meant to be limiting; variations on these strategies will be readily apparent to one skilled in the art. Using such strategies, and incorporating the mechanisms disclosed herein, the nucleic acid molecule and polypeptide of the invention may be utilized to generate plants or parts thereof, expressing wildtype proteins or mutated proteins of the proteins as shown in table II, application no. 7, column 3. The nucleic acid molecules and polypeptide molecules of the invention are expressed such that the yield, production, and/or efficiency of production of a desired compound is improved.

[2049] for the disclosure of the paragraphs [0320.0.0.6] to [0322.0.0.6] see paragraphs [0320.0.0.0] to [0322.0.0.0] above.

[2050] In one embodiment, a protein (=polypeptide) as shown in table II, application no. 7, column 3 refers to a polypeptide having an amino acid sequence corresponding to the polypeptide of the invention or used in the process of the invention, whereas a “non-inventive protein or polypeptide” or “other polypeptide” refers to a polypeptide having an amino acid sequence corresponding to a protein which is not substantially homologous to a polypeptide of the invention, preferably which is not substantially homologous to a polypeptide or protein as shown in table II, application no. 7, column 3, e.g., a protein which does not confer the activity described herein and which is derived from the same or a different organism.

[2051] for the disclosure of the paragraphs [0324.0.0.6] to [0329.0.0.6] see paragraphs [0324.0.0.0] to [0329.0.0.0] above.

[2052] In an especially preferred embodiment, the polypeptide according to the invention furthermore also does not have the sequences of those proteins, which are encoded by the sequences shown in table II, application no. 7, columns 5 and 7.

[2053] for the disclosure of the paragraphs [0331.0.0.6] to [0346.0.0.6] see paragraphs [0331.0.0.0] to [0346.0.0.0] above.

[2054] Accordingly the present invention relates to any cell transgenic for any nucleic acid characterized as part of the invention, e.g. conferring the increase of the fine chemical in a cell or an organism or a part thereof, e.g. the nucleic acid molecule of the invention, the nucleic acid construct of the invention, the antisense molecule of the invention, the vector of the invention or a nucleic acid molecule encoding the polypeptide of the invention, e.g. encoding a polypeptide having an activity as the protein as shown in table II, application no. 7, column 3. Due to the above mentioned activity the fine chemical content in a cell or an organism is increased. For example, due to modulation or manipulation, the cellular activity is increased preferably in organelles such as plastids or mitochondria, e.g. due to an increased expression or specific activity or specific targeting of the subject matters of the invention in a cell or an organism or a part thereof especially in organelles such as plastids or mitochondria. Transgenic for a polypeptide having a protein or activity means herein that due to modulation or manipulation of the genome, the activity of protein as shown in table II, application no. 7, column 3 or a protein as shown in table II, application no. 7, column 3-like activity is increased in the cell or organism or part thereof especially in organelles such as plastids or mitochondria. Examples are described above in context with the process of the invention.

[2055] for the disclosure of this paragraph see paragraph [0348.0.0.0] above.

[2056] A naturally occurring expression cassette—for example the naturally occurring combination of the promoter of the gene encoding a protein as shown in table II, application no. 7, column 3 with the corresponding encoding gene—becomes a transgenic expression cassette when it is modified by non-natural, synthetic “artificial” methods such as, for example, mutagenization. Such methods have been described (U.S. Pat. No. 5,565,350; WO 00/15815; also see above).

[2057] for the disclosure of the paragraphs [0350.0.0.6] to [0358.0.0.6] see paragraphs [0350.0.0.0] to [0358.0.0.0] above.

[2058] for the disclosure of the paragraphs [0350.0.0.6] to [0358.0.0.6] and [0359.0.5.6] see paragraphs [0350.0.0.0] to [0358.0.0.0] and [0359.0.5.5] above.

[2059] for the disclosure of the paragraphs [0360.0.0.6] to [0362.0.0.6] see paragraphs [0360.0.0.0] to [0362.0.0.0] above.

[2060] for the disclosure of the paragraphs [0363.0.5.6] to [0365.0.5.6] see paragraphs [0363.0.5.5] to [0365.0.5.5] above.

[2061] for the disclosure of the paragraphs [0366.0.0.6] to [0369.0.0.6] see paragraphs [0366.0.0.0] to [0369.0.0.0] above.

[2062] The fermentation broths obtained in this way, containing in particular α-linolenic acid, triglycerides, lipids, oils and/or fats containing α-linolenic acid, normally have a dry matter content of from 7.5 to 25% by weight. The fermentation broth can be processed further. Depending on requirements, the biomass can be separated, such as, for example, by centrifugation, filtration, decantation or a combination of these methods, from the fermentation broth or left completely in it. Afterwards the biomass can be extracted without any further process steps or disrupted and then extracted. If necessary the fermentation broth can be thickened or concentrated by known methods, such as, for example, with the aid of a rotary evaporator, thin-film evaporator, falling film evaporator, by reverse osmosis or by nanofiltration. This concentrated fermentation broth can then be worked up by extraction.

[2063] for the disclosure of this paragraph see paragraph [0371.0.5.5] above. for the disclosure of the paragraphs [0372.0.0.6] to [0376.0.0.6], [0376.1.0.6] and [0377.0.0.6] see paragraphs [0372.0.0.0] to [0376.0.0.0], [0376.1.0.0] and [0377.0.0.0] above.

[2064] In one embodiment, the present invention relates to a method for the identification of a gene product conferring an increase in the fine chemical production in a cell, comprising the following steps:
[2065] (a) contacting e.g. hybridising, the nucleic acid molecules of a sample, e.g. cells, tissues, plants or microorganisms or a nucleic acid library, which can contain a candidate gene encoding a gene product conferring an increase in the fine chemical after expression, with the nucleic acid molecule of the present invention;
[2066] (b) identifying the nucleic acid molecules, which hybridize under relaxed stringent conditions with the nucleic acid molecule of the present invention in particular to the nucleic acid molecule sequence shown in table I, application no. 7, columns 5 and 7, preferably in table I B, application no. 7, columns 5 and 7, and, optionally, isolating the full length cDNA clone or complete genomic clone;
[2067] (c) introducing the candidate nucleic acid molecules in host cells, preferably in a plant cell or a microorganism, appropriate for producing the fine chemical;
[2068] (d) expressing the identified nucleic acid molecules in the host cells;
[2069] (e) assaying the fine chemical level in the host cells; and
[2070] (f) identifying the nucleic acid molecule and its gene product which expression confers an increase in the fine chemical level in the host cell after expression compared to the wild type.

[2071] for the disclosure of the paragraphs [0379.0.0.6] to [0383.0.0.6] see paragraphs [0379.0.0.0] to [0383.0.0.0] above.

[2072] The screen for a gene product or an agonist conferring an increase in the fine chemical production can be performed by growth of an organism for example a microorganism in the presence of growth reducing amounts of an inhibitor of the synthesis of the fine chemical. Better growth, eg higher dividing rate or high dry mass in comparison to the control under such conditions would identify a gene or gene product or an agonist conferring an increase in fine chemical production.

One can think to screen for increased fine chemical production by for example resistance to drugs blocking fine chemical synthesis and looking whether this effect is dependent on the proteins as shown in table II, application no. 7, column 3, eg comparing near identical organisms with low and high activity of the proteins as shown in table II, application no. 7, column 3.

[2073] for the disclosure of the paragraphs [0385.0.0.6] to [0404.0.0.6] see paragraphs [0385.0.0.0] to [0404.0.0.0] above.

[2074] for the disclosure of this paragraph see paragraph [0405.0.5.5] above.

[2075] for the disclosure of the paragraphs [0406.0.0.6] to [0435.0.0.6] see paragraphs [0406.0.0.0] to [0435.0.0.0] above.

[2076] α-linolenic acid, triglycerides, lipids, oils and/or fats containing α-linolenic acid production in Mortierella

The fatty acid production can be analysed as mentioned above. The proteins and nucleic acids can be analysed as mentioned below.

[2077] for the disclosure of the paragraphs [0437.0.0.6] and [0438.0.0.6] see paragraphs [0437.0.0.0] and [0438.0.0.0] above.

[2078] for the disclosure of the paragraphs [0439.0.5.6] and [0440.0.5.6] see paragraphs [0439.0.5.5] and [0440.0.5.5] above.

[2079] for the disclosure of this paragraph see [0441.0.0.0] above.

[2080] for the disclosure of the paragraphs [0442.0.5.6] and [0445.0.5.6] see paragraphs [0442.0.5.5] and [0445.0.5.5] above.

[2081] for the disclosure of the paragraphs [0446.0.0.6] to [0497.0.0.6] see paragraphs [0446.0.0.0] to [0497.0.0.0] above.
[2082] The results of the different plant analyses can be seen from the table, which follows:

TABLE VI

| ORF | Metabolite | Method | Min | Max |
|---|---|---|---|---|
| b0342 | α-Linolenic Acid, | GC | 1.12 | 1.59 |
| | C18:3 (c9,c12,c15) | | | |
| b0403 | α-Linolenic Acid, | GC | 1.12 | 1.41 |
| | C18:3 (c9,c12,c15) | | | |
| b0931 | α-Linolenic Acid, | GC | 1.11 | 1.40 |
| | C18:3 (c9,c12,c15) | | | |
| b1281 | α-Linolenic Acid, | GC | 1.12 | 1.23 |
| | C18:3 (c9,c12,c15) | | | |
| b1625 | α-Linolenic Acid, | GC | 1.13 | 1.23 |
| | C18:3 (c9,c12,c15) | | | |
| b2156 | α-Linolenic Acid, | GC | 1.17 | 1.56 |
| | C18:3 (c9,c12,c15) | | | |
| b2827 | α-Linolenic Acid, | GC | 1.14 | 1.19 |
| | C18:3 (c9,c12,c15) | | | |
| b3429 | α-Linolenic Acid, | GC | 1.12 | 1.27 |
| | C18:3 (c9,c12,c15) | | | |
| YNL241C | α-Linolenic Acid, | GC | 1.12 | 1.13 |
| | C18:3 (c9,c12,c15) | | | |

[2083] for the disclosure of the paragraphs [0499.0.0.6] and [0500.0.0.6] see paragraphs [0499.0.0.0] and [0500.0.0.0] above.

### Example 15a

### Engineering Ryegrass Plants by Over-Expressing YNL241C from Saccharomyces cerevisiae or Homologs of YNL241C from Other Organisms

[2084] for the disclosure of the paragraphs [0502.0.0.6] to [0508.0.0.6] see paragraphs [0502.0.0.0] to [0508.0.0.0] above.

### Example 15b

### Engineering Soybean Plants by Over-Expressing YNL241C from Saccharomyces cerevisiae or Homologs of YNL241C from Other Organisms

[2085] for the disclosure of the paragraphs [0510.0.0.6] to [0513.0.0.6] see paragraphs [0510.0.0.0] to [0513.0.0.0] above.

### Example 15c

### Engineering Corn Plants by Over-Expressing YNL241C from Saccharomyces cerevisiae or Homologs of YNL241C from Other Organisms

[2086] for the disclosure of the paragraphs [0515.0.0.6] to [0540.0.0.6] see paragraphs [0515.0.0.0] to [0540.0.0.0] above.

### Example 15d

### Engineering Wheat Plants by Over-Expressing YNL241C from Saccharomyces cerevisiae or Homologs of YNL241C from Other Organisms

[2087] for the disclosure of the paragraphs [0542.0.0.6] to [0544.0.0.6] see paragraphs [0542.0.0.0] to [0544.0.0.0] above.

### Example 15e

### Engineering Rapeseed/Canola Plants by Over-Expressing YNL241C from Saccharomyces cerevisiae or Homologs of YNL241C from Other Organisms

[2088] for the disclosure of the paragraphs [0546.0.0.6] to [0549.0.0.6] see paragraphs [0544.0.0.0] to [0549.0.0.0] above.

### Example 15f

### Engineering Alfalfa Plants by Over-Expressing YNL241C from Saccharomyces cerevisiae or Homologs of YNL241C from Other Organisms

[2089] for the disclosure of the paragraphs [0551.0.0.6] to [0554.0.0.6] see paragraphs [0551.0.0.0] to [0554.0.0.0] above.

### Example 16

### Metabolite Profiling Info from Zea mays

[2090] Zea mays plants were engineered as described in Example 15c.
Metabolic results were either obtained from regenerated primary transformants (T0) or from the following progeny generation (T1) in comparison to appropriate control plants. The results are shown in table VII

TABLE VII

| ORF_NAME | Metabolite | MIN | MAX |
|---|---|---|---|
| b3429 | α-Linolenic Acid, C18:3 | 1.31 | 1.67 |
| | (c9,c12,c15) | | |
| YNL241C | α-Linolenic Acid, C18:3 | 1.33 | 1.82 |
| | (c9,c12,c15) | | |

Table VII shows the increase in α-Linolenic Acid, C18:3 (c9,c12,c15) in genetically modified corn plants expressing the Saccharomyces cerevisiae nucleic acid sequence YNL241C and the E. coli nucleic acid sequence b3429.
In one embodiment, in case the activity of the Saccharomyces cerevisiae protein YNL241C or its homologs, e.g. a “glucose-6-phosphate dehydrogenase”, is increased in corn plants, preferably, an increase of the fine chemical α-linolenic acid between 33% and 82% is conferred.
In one embodiment, in case the activity of the Escherichia coli protein b3429 or its homologs, e.g. a “glycogen synthase (starch synthase)”, is increased in corn plants, preferably, an increase of the fine chemical α-linolenic acid between 31% and 67% is conferred.

[2091] for the disclosure of this paragraph see [0554.2.0.0] above.

[2092] for the disclosure of this paragraph see [0555.0.0.0] above.

[2093] for the disclosure of this paragraph see [0001.0.0.0].

[2094] Fatty acids and triglycerides have numerous applications in the food and feed industry, in cosmetics and in the drug sector. Depending on whether they are free saturated or unsaturated fatty acids or triglycerides with an increased content of saturated or unsaturated fatty acids, they are suitable for the most varied applications; thus, for example, polyunsaturated fatty acids (=PUFAs) are added to infant formula to increase its nutritional value. The various fatty acids and triglycerides are mainly obtained from microorganisms such as fungi or from oil-producing plants including phytoplankton and algae, such as soybean, oilseed rape, sunflower and others, where they are usually obtained in the form of their triacylglycerides.

[2095] Stearic acid (=octadecanoic acid) is one of the many useful types of saturated fatty acids that come from many animal and vegetable fats and oils. It is a waxy solid that melts at around 70° C. Commonly stearic acid is either prepared by treating animal fat with water at a high pressure and temperature or starting with vegetable oils by hydrogenation of said oils. It is useful as an ingredient in making candles, soaps, and cosmetics and for softening rubber.

[2096] Principally microorganisms such as Mortierella or oil producing plants such as soybean, rapeseed or sunflower or algae such as Crytocodinium or Phaeodactylum are a common source for oils containing fatty acids, where they are usually obtained in the form of their triacyl glycerides. Alternatively, they are obtained advantageously from animals, such as fish. The free fatty acids are prepared advantageously by hydrolysis with a strong base such as potassium or sodium hydroxide.

[2097] for the disclosure of this paragraph see [0005.0.5.5] above.

[2098] Unlike most saturated fats, stearic acid does not seem to increase cholesterol levels in the blood, because liver enzymes convert it to an unsaturated fat during digestion.

[2099] Stearic acid is the most common one of the long-chain fatty acids. It is found in many foods, such as beef fat, and cocoa butter. It is widely used as mentioned above as a lubricant, in soaps, cosmetics, food packaging, deodorant sticks, toothpastes, and as a softener in rubber.

[2100] Encouraging research shows that stearic acid; one of the components of the fat found in the cocoa butter of chocolate, may have some positive effects on platelets. The mechanism believed to be responsible for the potential platelet activation by stearic acid involves Arachidonic metabolism, which includes thromboxane A2, a potent aggregating compound, and prostaglandin 12, a potent anti-aggregating compound.

[2101] As described above, fatty acids are used in a lot of different applications, for example in cosmetics, pharmaceuticals and in feed and food.

[2102] Therefore improving the productivity of such fatty acids and improving the quality of foodstuffs and animal feeds is an important task of the different industries.

[2103] To ensure a high productivity of certain fatty acids in plants or microorganism, it is necessary to manipulate the natural biosynthesis of fatty acids in said organism.

[2104] Accordingly, there is still a great demand for new and more suitable genes which encode enzymes which participate in the biosynthesis of fatty acids and make it possible to produce certain fatty acids specifically on an industrial scale without unwanted byproducts forming. In the selection of genes for biosynthesis two characteristics above all are particularly important. On the one hand, there is as ever a need for improved processes for obtaining the highest possible contents of fatty acids on the other hand as less as possible byproducts should be produced in the production process.

[2105] for the disclosure of this paragraph see [0013.0.0.0] above.

[2106] Accordingly, in a first embodiment, the invention relates to a process for the production of a fine chemical, whereby the fine chemical is stearic acid or tryglycerides, lipids, oils or fats containing stearic acid. Accordingly, in the present invention, the term “the fine chemical” as used herein relates to “stearic acid or tryglycerides, lipids, oils or fats containing stearic acid”. Further, the term “the fine chemicals” as used herein also relates to fine chemicals comprising stearic acid or tryglycerides, lipids, oils or fats containing stearic acid.

[2107] In one embodiment, the term “the fine chemical” or “the respective fine chemical” means stearic acid or tryglycerides, lipids, oils or fats containing stearic acid. Throughout the specification the term “the fine chemical” or “the respective fine chemical” means stearic acid or tryglycerides, lipids, oils or fats containing stearic acid, stearic acid and its salts, ester, thioester or stearic acid in free form or bound to other compounds such as triglycerides, glycolipids, phospholipids etc. In a preferred embodiment, the term “the fine chemical” means stearic acid, in free form or its salts or bound to triglycerides. Triglycerides, lipids, oils, fats or lipid mixture thereof shall mean any triglyceride, lipid, oil and/or fat containing any bound or free stearic acid for example sphingolipids, phosphoglycerides, lipids, glycolipids such as glycosphingolipids, phospholipids such as phosphatidylethanolamine, phosphatidylcholine, phosphatidylserine, phosphatidylglycerol, phosphatidylinositol or diphosphatidylglycerol, or as monoacylglyceride, diacylglyceride or triacylglyceride or other fatty acid esters such as acetyl-Coenzym A thioester, which contain further saturated or unsaturated fatty acids in the fatty acid molecule.

In one embodiment, the term “the fine chemical” and the term “the respective fine chemical” mean at least one chemical compound with an activity of the abovementioned fine chemical.

[2108] Accordingly, the present invention relates to a process for the production of stearic acid, which comprises
[2109] (a) increasing or generating the activity of a protein as shown in table II, application no. 8, column 3 encoded by the nucleic acid sequences as shown in table I, application no. 8, column 5, in an organelle of a microorganism or plant, or
[2110] (b) increasing or generating the activity of a protein as shown in table II, application no. 8, column 3 encoded by the nucleic acid sequences as shown in table I, application no. 8, column 5 in the plastid of a microorganism or plant, or in one or more parts thereof; and
[2111] (b) growing the organism under conditions which permit the production of the fine chemical, thus, stearic acid or fine chemicals comprising stearic acid, in said organism or in the culture medium surrounding the organism.

[2112] /

[2113] In another embodiment the present invention is related to a process for the production of stearic acid, which comprises
[2114] (a) increasing or generating the activity of a protein as shown in table II, application no. 8, column 3 encoded by the nucleic acid sequences as shown in table I, application no. 8, column 5, in an organelle of a non-human organism, or
[2115] (b) increasing or generating the activity of a protein as shown in table II, application no. 8, column 3 encoded by the nucleic acid sequences as shown in table I, application no. 8, column 5, which are joined to a nucleic acid sequence encoding a transit peptide in a non-human organism, or in one or more parts thereof; or
[2116] (c) increasing or generating the activity of a protein as shown in table II, application no. 8, column 3 encoded by the nucleic acid sequences as shown in table I, application no. 8, column 5, which are joined to a nucleic acid sequence encoding chloroplast localization sequence, in a non-human organism, or in one or more parts thereof, and
[2117] (d) growing the organism under conditions which permit the production of stearic acid in said organism.

[2118] In another embodiment, the present invention relates to a process for the production of stearic acid, which comprises
[2119] (a) increasing or generating the activity of a protein as shown in table II, application no. 8, column 3 encoded by the nucleic acid sequences as shown in table I, application no. 8, column 5, in an organelle of a microorganism or plant through the transformation of the organelle, or
[2120] (b) increasing or generating the activity of a protein as shown in table II, application no. 8, column 3 encoded by the nucleic acid sequences as shown in table I, application no. 8, column 5 in the plastid of a microorganism or plant, or in one or more parts thereof through the transformation of the plastids; and
[2121] (c) growing the organism under conditions which permit the production of the fine chemical, thus, stearic acid or fine chemicals comprising stearic acid, in said organism or in the culture medium surrounding the organism.

[2122] Advantageously the activity of the protein as shown in table II, application no. 8, column 3 encoded by the nucleic acid sequences as shown in table I, application no. 8, column 5 is increased or generated in the abovementioned process in the plastid of a microorganism or plant.

[2123] for the disclosure of the paragraphs [0019.0.0.7] to [0024.0.0.6] see paragraphs [0019.0.0.0] and [0024.0.0.0] above.

[2124] Even more preferred nucleic acid sequences are encoding transit peptides as disclosed by von Heijne et al. [Plant Molecular Biology Reporter, Vol. 9 (2), 1991: 104-126], which are hereby incorporated by reference. Table V shows some examples of the transit peptide sequences disclosed by von Heijne et al. According to the disclosure of the invention especially in the examples the skilled worker is able to link other nucleic acid sequences disclosed by von Heijne et al. to the nucleic acid sequences shown in table I, application no. 8, columns 5 and 7. Most preferred nucleic acid sequences encoding transit peptides are derived from the genus Spinacia such as chloroplast 30S ribosomal protein PSrp-1, root acyl carrier protein II, acyl carrier protein, ATP synthase: γ subunit, ATP synthase: δ subunit, cytochrom f, ferredoxin I, ferredoxin NADP oxidoreductase (=FNR), nitrite reductase, phosphoribulokinase, plastocyanin or carbonic anhydrase. The skilled worker will recognize that various other nucleic acid sequences encoding transit peptides can easily isolated from plastid-localized proteins, which are expressed from nuclear genes as precursors and are then targeted to plastids. Such transit peptides encoding sequences can be used for the construction of other expression constructs. The transit peptides advantageously used in the inventive process and which are part of the inventive nucleic acid sequences and proteins are typically 20 to 120 amino acids, preferably 25 to 110, 30 to 100 or 35 to 90 amino acids, more preferably 40 to 85 amino acids and most preferably 45 to 80 amino acids in length and functions post-translationally to direct the protein to the plastid preferably to the chloroplast. The nucleic acid sequences encoding such transit peptides are localized upstream of nucleic acid sequence encoding the mature protein. For the correct molecular joining of the transit peptide encoding nucleic acid and the nucleic acid encoding the protein to be targeted it is sometimes necessary to introduce additional base pairs at the joining position, which forms restriction enzyme recognition sequences useful for the molecular joining of the different nucleic acid molecules. This procedure might lead to very few additional amino acids at the N-terminal of the mature imported protein, which usually and preferably do not interfere with the protein function. In any case, the additional base pairs at the joining position which forms restriction enzyme recognition sequences have to be chosen with care, in order to avoid the formation of stop codons or codons which encode amino acids with a strong influence on protein folding, like e.g. proline. It is preferred that such additional codons encode small n.d. structural flexible amino acids such as glycine or alanine.

[2125] As mentioned above the nucleic acid sequences coding for the proteins as shown in table II, application no. 8, column 3 and its homologs as disclosed in table I, application no. 8, columns 5 and 7 are joined to a nucleic acid sequence encoding a transit peptide, This nucleic acid sequence encoding a transit peptide ensures transport of the protein to the plastid. The nucleic acid sequence of the gene to be expressed and the nucleic acid sequence encoding the transit peptide are operably linked. Therefore the transit peptide is fused in frame to the nucleic acid sequence coding for proteins as shown in table II, application no. 8, column 3 and its homologs as disclosed in table I, application no. 8, columns 5 and 7.

[2126] for the disclosure of the paragraphs [0027.0.0.7] to [0029.0.0.7] see paragraphs [0027.0.0.0] and [0029.0.0.0] above.

[2127] Alternatively, nucleic acid sequences coding for the transit peptides may be chemically synthesized either in part or wholly according to structure of transit peptide sequences disclosed in the prior art. Said natural or chemically synthesized sequences can be directly linked to the sequences encoding the mature protein or via a linker nucleic acid sequence, which may be typically less than 500 base pairs, preferably less than 450, 400, 350, 300, 250 or 200 base pairs, more preferably less than 150, 100, 90, 80, 70, 60, 50, 40 or 30 base pairs and most preferably less than 25, 20, 15, 12, 9, 6 or 3 base pairs in length and are in frame to the coding sequence. Furthermore favorable nucleic acid sequences encoding transit peptides may comprise sequences derived from more than one biological and/or chemical source and may include a nucleic acid sequence derived from the amino-terminal region of the mature protein, which in its native state is linked to the transit peptide. In a preferred embodiment of the invention said amino-terminal region of the mature protein is typically less than 150 amino acids, preferably less than 140, 130, 120, 110, 100 or 90 amino acids, more preferably less than 80, 70, 60, 50, 40, 35, 30, 25 or 20 amino acids and most preferably less than 19, 18, 17, 16, 15, 14, 13, 12, 11 or 10 amino acids in length. But even shorter or longer stretches are also possible. In addition target sequences, which facilitate the transport of proteins to other cell compartments such as the vacuole, endoplasmic reticulum, Golgi complex, glyoxysomes, peroxisomes or mitochondria may be also part of the inventive nucleic acid sequence. The proteins translated from said inventive nucleic acid sequences are a kind of fusion proteins that means the nucleic acid sequences encoding the transit peptide for example the ones shown in table V, preferably the last one of the table are joint to the nucleic acid sequences shown in table I, application no. 8, columns 5 and 7. The person skilled in the art is able to join said sequences in a functional manner. Advantageously the transit peptide part is cleaved off from the protein part shown in table II, application no. 8, columns 5 and 7 during the transport preferably into the plastids. All products of the cleavage of the preferred transit peptide shown in the last line of table V have preferably the N-terminal amino acid sequences QIA CSS or QIA EFQLTT in front of the start methionine of the protein mentioned in table II, application no. 8, columns 5 and 7. Other short amino acid sequences of an range of 1 to 20 amino acids preferable 2 to 15 amino acids, more preferable 3 to 10 amino acids most preferably 4 to 8 amino acids are also possible in front of the start methionine of the protein mentioned in table II, application no. 8, columns 5 and 7. In case of the amino acid sequence QIA CSS the three amino acids in front of the start methionine are stemming from the LIC (=ligatation independent cloning) cassette. Said short amino acid sequence is preferred in the case of the expression of E. coli genes. In case of the amino acid sequence QIA EFQLTT the six amino acids in front of the start methionine are stemming from the LIC cassette. Said short amino acid sequence is preferred in the case of the expression of S. cerevisiae genes. The skilled worker knows that other short sequences are also useful in the expression of the genes mentioned in table I, application no. 8, columns 5 and 7. Furthermore the skilled worker is aware of the fact that there is not a need for such short sequences in the expression of the genes.

[2128] Table V: Examples of transit peptides disclosed by von Heijne et al. for the disclosure of Table V see paragraph [0030.2.0.0] above.

[2129] Alternatively to the targeting of the sequences shown in table II, application no. 8, columns 5 and 7 preferably of sequences in general encoded in the nucleus with the aid of the targeting sequences mentioned for example in table V alone or in combination with other targeting sequences preferably into the plastids, the nucleic acids of the invention can directly introduced into the plastidal genome. Therefore in a preferred embodiment the nucleic acid sequences shown in table I, application no. 8, columns 5 and 7 are directly introduced and expressed in plastids.

The term “introduced” in the context of this specification shall mean the insertion of a nucleic acid sequence into the organism by means of a “transfection”, “transduction” or preferably by “transformation”.
A plastid, such as a chloroplast, has been “transformed” by an exogenous (preferably foreign) nucleic acid sequence if nucleic acid sequence has been introduced into the plastid that means that this sequence has crossed the membrane or the membranes of the plastid. The foreign DNA may be integrated (covalently linked) into plastid DNA making up the genome of the plastid, or it may remain unintegrated (e.g., by including a chloroplast origin of replication). “Stably” integrated DNA sequences are those, which are inherited through plastid replication, thereby transferring new plastids, with the features of the integrated DNA sequence to the progeny.

[2130] for the disclosure of the paragraphs [0030.2.0.7] and [0030.3.0.7] see paragraphs [0030.2.0.0] and [0030.3.0.0] above.

[2131] For the inventive process it is of great advantage that by transforming the plastids the intraspecies specific transgene flow is blocked, because a lot of species such as corn, cotton and rice have a strict maternal inheritance of plastids. By placing the genes specified in table I, application no. 8, columns 5 and 7 or active fragments thereof in the plastids of plants, these genes will not be present in the pollen of said plants.

A further preferred embodiment of the invention relates to the use of so called “chloroplast localization sequences”, in which a first RNA sequence or molecule is capable of transporting or “chaperoning” a second RNA sequence, such as a RNA sequence transcribed from the sequences depicted in table I, application no. 8, columns 5 and 7 or a sequence encoding a protein, as depicted in table II, application no. 8, columns 5 and 7, from an external environment inside a cell or outside a plastid into a chloroplast. In one embodiment the chloroplast localization signal is substantially similar or complementary to a complete or intact viroid sequence. The chloroplast localization signal may be encoded by a DNA sequence, which is transcribed into the chloroplast localization RNA. The term “viroid” refers to a naturally occurring single stranded RNA molecule (Flores, C R Acad Sci III. 2001 October; 324(10): 943-52). Viroids usually contain about 200-500 nucleotides and generally exist as circular molecules. Examples of viroids that contain chloroplast localization signals include but are not limited to ASBVd, PLMVd, CChMVd and ELVd. The viroid sequence or a functional part of it can be fused to the sequences depicted in table I, application no. 8, columns 5 and 7 or a sequence encoding a protein, as depicted in table II, application no. 8, columns 5 and 7 in such a manner that the viroid sequence transports a sequence transcribed from a sequence as depicted in table I, application no. 8, columns 5 and 7 or a sequence encoding a protein as depicted in table II, application no. 8, columns 5 and 7 into the chloroplasts. A preferred embodiment uses a modified ASBVd (Navarro et al., Virology. 2000 Mar. 1; 268(1): 218-25).
In a further specific embodiment the protein to be expressed in the plastids such as the proteins depicted in table II, application no. 8, columns 5 and 7 are encoded by different nucleic acids. Such a method is disclosed in WO 2004/040973, which shall be incorporated by reference. WO 2004/040973 teaches a method, which relates to the translocation of an RNA corresponding to a gene or gene fragment into the chloroplast by means of a chloroplast localization sequence. The genes, which should be expressed in the plant or plants cells, are split into nucleic acid fragments, which are introduced into different compartments in the plant e.g. the nucleus, the plastids and/or mitochondria. Additionally plant cells are described in which the chloroplast contains a ribozyme fused at one end to an RNA encoding a fragment of a protein used in the inventive process such that the ribozyme can trans-splice the translocated fusion RNA to the RNA encoding the gene fragment to form and as the case may be reunite the nucleic acid fragments to an intact mRNA encoding a functional protein for example as disclosed in table II, application no. 8, columns 5 and 7.

[2132] In a preferred embodiment of the invention the nucleic acid sequences as shown in table I, application no. 8, columns 5 and 7 used in the inventive process are transformed into plastids, which are metabolical active. Those plastids should preferably maintain at a high copy number in the plant or plant tissue of interest, most preferably the chloroplasts found in green plant tissues, such as leaves or cotyledons or in seeds.

[2133] For a good expression in the plastids the nucleic acid sequences as shown in table I, application no. 8, columns 5 and 7 are introduced into an expression cassette using a preferably a promoter and terminator, which are active in plastids preferably a chloroplast promoter. Examples of such promoters include the psbA promoter from the gene from spinach or pea, the rbcL promoter, and the atpB promoter from corn.

[2134] for the disclosure of the paragraphs [0031.0.0.7] and [0032.0.0.7] see paragraphs [0031.0.0.0] and [0032.0.0.0] above.

[2135] Advantageously the process for the production of the fine chemical leads to an enhanced production of the fine chemical. The terms “enhanced” or “increase” mean at least a 10%, 20%, 30%, 40% or 50%, preferably at least 60%, 70%, 80%, 90% or 100%, more preferably 150%, 200%, 300%, 400% or 500% higher production of the fine chemical in comparison to the reference as defined below, e.g. that means in comparison to an organism without the aforementioned modification of the activity of a protein as shown in table II, application no. 8, column 3. Preferably the modification of the activity of a protein as shown in table II, application no. 8, column 3 or their combination can be achieved by joining the protein to a transit peptide.

[2136] Surprisingly it was found, that the transgenic expression of the Saccharomyces cerevisiae protein as shown in table II, application no. 8, column 3 in plastids of a plant such as Arabidopsis thaliana for example through the linkage to at least one targeting sequence for example as mentioned in table V conferred an increase in the fine chemical content of the transformed plants.

[2137] for the disclosure of this paragraph see paragraph [0035.0.0.0] above.

[2138] The sequence of b1556 (Accession number NP_{—}416074) from Escherichia coli has been published in Blattner et al., Science 277 (5331), 1453-1474 (1997), and its activity is being defined as “Qin prophage”. Accordingly, in one embodiment, the process of the present invention comprises the use of a “Qin prophage” or its homolog, e.g. as shown herein, for the production of the fine chemical, meaning of stearic acid and/or tryglycerides, lipids, oils and/or fats containing stearic acid, in particular for increasing the amount of stearic acid in free or bound form in an organism or a part thereof, as mentioned. In one embodiment, in the process of the present invention the activity of a b1556 protein is increased or generated, e.g. from Escherichia coli or a homolog thereof, preferably linked at least to one transit peptide as mentioned for example in table V.

In another embodiment, in the process of the present invention the activity of a b1556 protein is increased or generated in a subcellular compartment of the organism or organism cell such as in an organelle like a plastid or mitochondria.
The sequence of b1700 (Accession number NP_{—}416215) from Escherichia coli has been published in Blattner et al., Science 277 (5331), 1453-1474 (1997), and its activity is being defined as “putative 4Fe-4S ferredoxin-type protein”. Accordingly, in one embodiment, the process of the present invention comprises the use of a “putative 4Fe-4S ferredoxin-type protein” or its homolog, e.g. as shown herein, for the production of the fine chemical, meaning of stearic acid and/or tryglycerides, lipids, oils and/or fats containing stearic acid, in particular for increasing the amount of stearic acid in free or bound form in an organism or a part thereof, as mentioned. In one embodiment, in the process of the present invention the activity of a b1700 protein is increased or generated, e.g. from Escherichia coli or a homolog thereof, preferably linked at least to one transit peptide as mentioned for example in table V.
In another embodiment, in the process of the present invention the activity of a b1700 protein is increased or generated in a subcellular compartment of the organism or organism cell such as in an organelle like a plastid or mitochondria.
The sequence of b1704 (Accession number NP_{—}416219) from Escherichia coli has been published in Blattner et al., Science 277 (5331), 1453-1474 (1997), and its activity is being defined as “3-deoxy-D-arabinoheptulosonate-7-phosphate synthase (DAHP synthetase)”. Accordingly, in one embodiment, the process of the present invention comprises the use of a “3-deoxy-D-arabinoheptulosonate-7-phosphate synthase (DAHP synthetase)” or its homolog, e.g. as shown herein, for the production of the fine chemical, meaning of stearic acid and/or tryglycerides, lipids, oils and/or fats containing stearic acid, in particular for increasing the amount of stearic acid in free or bound form in an organism or a part thereof, as mentioned. In one embodiment, in the process of the present invention the activity of a b1704 protein is increased or generated, e.g. from Escherichia coli or a homolog thereof, preferably linked at least to one transit peptide as mentioned for example in table V.
In another embodiment, in the process of the present invention the activity of a b1704 protein is increased or generated in a subcellular compartment of the organism or organism cell such as in an organelle like a plastid or mitochondria.
The sequence of YLR099C (Accession number NP_{—}013200) from Saccharomyces cerevisiae has been published in Goffeau et al., Science 274 (5287), 546-547, 1996, and its activity is being defined as “putative lipase”. Accordingly, in one embodiment, the process of the present invention comprises the use of a “putative lipase” or its homolog, e.g. as shown herein, for the production of the fine chemical, meaning of stearic acid and/or tryglycerides, lipids, oils and/or fats containing stearic acid, in particular for increasing the amount of stearic acid in free or bound form in an organism or a part thereof, as mentioned. In one embodiment, in the process of the present invention the activity of a YLR099C protein is increased or generated, e.g. from Saccharomyces cerevisiae or a homolog thereof, preferably linked at least to one transit peptide as mentioned for example in table V.
In another embodiment, in the process of the present invention the activity of an YLR099C protein is increased or generated in a subcellular compartment of the organism or organism cell such as in an organelle like a plastid or mitochondria.

[2139] In one embodiment, the homolog of the YLR099C, is a homolog having said activity and being derived from Eukaryot. In one embodiment, the homolog of the b1556, b1700 and/or b1704 is a homolog having said activity and being derived from bacteria. In one embodiment, the homolog of the YLR099C is a homolog having said activity and being derived from Fungi. In one embodiment, the homolog of the b1556, b1700 and/or b1704 is a homolog having said activity and being derived from Proteobacteria. In one embodiment, the homolog of the YLR099C is a homolog having said activity and being derived from Ascomycota. In one embodiment, the homolog of the b1556, b1700 and/or b1704 is a homolog having said activity and being derived from Gammaproteobacteria. In one embodiment, the homolog of the YLR099C is a homolog having said activity and being derived from Saccharomycotina. In one embodiment, the homolog of the b1556, b1700 and/or b1704 is a homolog having said activity and being derived from Enterobacteriales. In one embodiment, the homolog of the YLR099C is a homolog having said activity and being derived from Saccharomycetes. In one embodiment, the homolog of the b1556, b1700 and/or b1704 is a homolog having said activity and being derived from Enterobacteriaceae. In one embodiment, the homolog of the YLR099C is a homolog having said activity and being derived from Saccharomycetales. In one embodiment, the homolog of the b1556, b1700 and/or b1704 is a homolog having said activity and being derived from Escherichia, preferably from Escherichia coli. In one embodiment, the homolog of the YLR099C is a homolog having said activity and being derived from Saccharomycetaceae. In one embodiment, the homolog of the YLR099C is a homolog having said activity and being derived from Saccharomycetes, preferably from Saccharomyces cerevisiae.

[2140] for the disclosure of this paragraph see paragraph [0038.0.0.0] above.

[2141] In accordance with the invention, a protein or polypeptide has the “activity of an protein as shown in table II, application no. 8, column 3” if its de novo activity, or its increased expression directly or indirectly leads to an increased in the fine chemical level in the organism or a part thereof, preferably in a cell of said organism, more preferably in an organelle such as a plastid or mitochondria of said organism and the protein has the above mentioned activities of a protein as shown in table II, application no. 8, column 3, preferably in the event the nucleic acid sequences encoding said proteins is functionally joined to the nucleic acid sequence of a transit peptide. Throughout the specification the activity or preferably the biological activity of such a protein or polypeptide or an nucleic acid molecule or sequence encoding such protein or polypeptide is identical or similar if it still has the biological or enzymatic activity of a protein as shown in table II, application no. 8, column 3, or which has at least 10% of the original enzymatic activity, preferably 20%, particularly preferably 30%, most particularly preferably 40% in comparison to a protein as shown in table II, application no. 7, column 3 of Saccharomyces cerevisiae.

[2142] for the disclosure of the paragraphs [0040.0.0.7] to [0047.0.0.7] see paragraphs [0040.0.0.0] to [0047.0.0.0] above.

[2143] Preferably, the reference, control or wild type differs form the subject of the present invention only in the cellular activity, preferably of the plastidial activity of the polypeptide of the invention, e.g. as result of an increase in the level of the nucleic acid molecule of the present invention or an increase of the specific activity of the polypeptide of the invention, e.g. by or in the expression level or activity of an protein having the activity of a protein as shown in table II, application no. 8, column 3 its biochemical or genetical causes and the increased amount of the fine chemical.

[2144] for the disclosure of the paragraphs [0049.0.0.7] to [0051.0.0.7] see paragraphs [0049.0.0.0] to [0051.0.0.0] above.

[2145] For example, the molecule number or the specific activity of the polypeptide or the nucleic acid molecule may be increased. Larger amounts of the fine chemical can be produced if the polypeptide or the nucleic acid of the invention is expressed de novo in an organism lacking the activity of said protein, preferably the nucleic acid molecules as mentioned in table I, application no. 8, columns 5 and 7 alone or preferably in combination with a transit peptide for example as mentioned in table V or in another embodiment by introducing said nucleic acid molecules into an organelle such as an plastid or mitochondria in the transgenic organism. However, it is also possible to modify the expression of the gene which is naturally present in the organisms, for example by integrating a nucleic acid sequence, encoding a plastidic targeting sequence in front (5 prime) of the coding sequence, leading to a functional preprotein, which is directed for example to the plastids.

[2146] for the disclosure of the paragraphs [0053.0.0.7] to [0058.0.0.7] see paragraphs [0053.0.0.0] to [0058.0.0.0] above.

[2147] In case the activity of the Escherichia coli protein b1556 or its homologs, e.g. a “Qin prophage” is increased advantageously in an organelle such as a plastid or mitochondria, preferably, in one embodiment an increase of the fine chemical, preferably of stearic acid and/or tryglycerides, lipids, oils and/or fats containing stearic acid between 18% and 37% or more is conferred.

In case the activity of the Escherichia coli protein b1700 or its homologs, e.g. a “putative 4Fe-4S ferredoxin-type protein” is increased advantageously in an organelle such as a plastid or mitochondria, preferably, in one embodiment an increase of the fine chemical, preferably of stearic acid and/or tryglycerides, lipids, oils and/or fats containing stearic acid between 29% and 113% or more is conferred.
In case the activity of the Escherichia coli protein b1704 or its homologs, e.g. a “3-deoxy-D-arabinoheptulosonate-7-phosphate synthase (DAHP synthetase)” is increased advantageously in an organelle such as a plastid or mitochondria, preferably, in one embodiment an increase of the fine chemical, preferably of stearic acid and/or tryglycerides, lipids, oils and/or fats containing stearic acid between 25% and 153% or more is conferred.
In case the activity of the Saccharomyces cerevisiae protein YLR099C or its homologs, e.g. a “putative lipase” is increased advantageously in an organelle such as a plastid or mitochondria, preferably, in one embodiment an increase of the fine chemical, preferably of stearic acid and/or tryglycerides, lipids, oils and/or fats containing stearic acid between 16% and 37% or more is conferred.

[2148] In case the activity of the Escherichia coli proteins b1556, b1700 or b1704 or their homologs,” are increased advantageously in an organelle such as a plastid or mitochondria, preferably an increase of the fine chemical stearic acid and/or tryglycerides, lipids, oils and/or fats containing stearic acid is conferred.

In case the activity of the Saccharomyces cerevisiae protein YLR099C or its homologs, e.g. a “putative lipase” is increased advantageously in an organelle such as a plastid or mitochondria, preferably an increase of the fine chemical stearic acid and/or tryglycerides, lipids, oils and/or fats containing stearic acid is conferred.

[2149] for the disclosure of the paragraphs [0061.0.0.7] and [0062.0.0.7] see paragraphs [0061.0.0.0] and [0062.0.0.0] above.

[2150] A protein having an activity conferring an increase in the amount or level of the fine chemical, preferably upon targeting to the plastids preferably has the structure of the polypeptide described herein, in particular of the polypeptides comprising the consensus sequence shown in table IV, application no. 8, column 7 or of the polypeptide as shown in the amino acid sequences as disclosed in table II, application no. 8, columns 5 and 7 or the functional homologues thereof as described herein, or is encoded by the nucleic acid molecule characterized herein or the nucleic acid molecule according to the invention, for example by the nucleic acid molecule as shown in table I, application no. 8, columns 5 and 7 or its herein described functional homologues and has the herein mentioned activity.

[2151] For the purposes of the present invention, the term “stearic acid” also encompasses the corresponding salts, such as, for example, the potassium or sodium salts of stearic acid or the salts of stearic acid with amines such as diethylamine as well as tryglycerides, lipids, oils and/or fats containing stearic acid.

[2152] for the disclosure of the paragraphs [0065.0.0.7] and [0066.0.0.7] see paragraphs [0065.0.0.0] and [0066.0.0.0] above.

[2153] In one embodiment, the process of the present invention comprises one or more of the following steps
[2154] a) stabilizing a protein conferring the increased expression of a protein encoded by the nucleic acid molecule of the invention or of the polypeptide of the invention, e.g. of a polypeptide having the activity of a protein as indicated in table II, application no. 8, columns 5 and 7 or its homologs activity having herein-mentioned stearic acid increasing activity; and/or
[2155] b) stabilizing a mRNA conferring the increased expression of a protein encoded by the nucleic acid molecule of the invention, which is in the sense of the invention a fusion of a nucleic acid sequence encoding a transit peptide and of a nucleic acid sequence as shown in table I, application no. 8, columns 5 and 7, e.g. a nucleic acid sequence encoding a polypeptide having the activity of a protein as indicated in table II, application no. 8, columns 5 and 7 or its homologs activity or of a mRNA encoding the polypeptide of the present invention having herein-mentioned stearic acid increasing activity; and/or
[2156] c) increasing the specific activity of a protein conferring the increased expression of a protein encoded by the nucleic acid molecule of the invention or of the polypeptide of the present invention having herein-mentioned stearic acid increasing activity, e.g. of a polypeptide having the activity of a protein as indicated in table II, application no. 8, columns 5 and 7 or its homologs activity, or decreasing the inhibitory regulation of the polypeptide of the invention; and/or
[2157] d) generating or increasing the expression of an endogenous or artificial transcription factor mediating the expression of a protein conferring the increased expression of a protein encoded by the nucleic acid molecule of the invention or of the polypeptide of the invention having herein-mentioned stearic acid increasing activity, e.g. of a polypeptide having the activity of a protein as indicated in table II, application no. 8, columns 5 and 7 or its homologs activity; and/or
[2158] e) stimulating activity of a protein conferring the increased expression of a protein encoded by the nucleic acid molecule of the present invention or a polypeptide of the present invention having herein-mentioned stearic acid increasing activity, e.g. of a polypeptide having the activity of a protein as indicated in table II, application no. 8, columns 5 and 7 or its homologs activity, by adding one or more exogenous inducing factors to the organisms or parts thereof; and/or
[2159] f) expressing a transgenic gene encoding a protein conferring the increased expression of a polypeptide encoded by the nucleic acid molecule of the present invention or a polypeptide of the present invention, having herein-mentioned stearic acid increasing activity, e.g. of a polypeptide having the activity of a protein as indicated in table II, application no. 8, columns 5 and 7 or its homologs activity, and/or
[2160] g) increasing the copy number of a gene conferring the increased expression of a nucleic acid molecule encoding a polypeptide encoded by the nucleic acid molecule of the invention or the polypeptide of the invention having herein-mentioned stearic acid increasing activity, e.g. of a polypeptide having the activity of a protein as indicated in table II, application no. 8, columns 5 and 7 or its homologs activity; and/or
[2161] h) increasing the expression of the endogenous gene encoding the polypeptide of the invention, e.g. a polypeptide having the activity of a protein as indicated in table II, application no. 8, columns 5 and 7 or its homologs activity, by adding positive expression or removing negative expression elements, e.g. homologous recombination can be used to either introduce positive regulatory elements like for plants the 35S enhancer into the promoter or to remove repressor elements form regulatory regions. Further gene conversion methods can be used to disrupt repressor elements or to enhance to activity of positive elements. Positive elements can be randomly introduced in plants by T-DNA or transposon mutagenesis and lines can be identified in which the positive elements have be integrated near to a gene of the invention, the expression of which is thereby enhanced; and/or
[2162] i) modulating growth conditions of an organism in such a manner, that the expression or activity of the gene encoding the protein of the invention or the protein itself is enhanced for example microorganisms or plants can be grown for example under a higher temperature regime leading to an enhanced expression of heat shock proteins, which can lead an enhanced fine chemical production; and/or
[2163] j) selecting of organisms with especially high activity of the proteins of the invention from natural or from mutagenized resources and breeding them into the target organisms, eg the elite crops; and/or
[2164] k) directing a protein encoded by the nucleic acid molecule of the invention or of the polypeptide of the present invention having herein-mentioned stearic acid increasing activity, e.g. of polypeptide having the activity of a protein as indicated in table II, application no. 8, columns 5 and 7 or its homologs activity, to the plastids by the addition of a plastidial targeting sequence; and/or
[2165] l) generating the expression of a protein encoded by the nucleic acid molecule of the invention or of the polypeptide of the present invention having herein-mentioned stearic acid increasing activity, e.g. of a polypeptide having the activity of a protein as indicated in table II, application no. 8, columns 5 and 7 or its homologs activity in plastids by the stable or transient transformation advantageously stable transformation of organelles preferably plastids with an inventive nucleic acid sequence preferably in form of an expression cassette containing said sequence leading to the plastidial expression of the nucleic acids or polypeptides of the invention; and/or
[2166] m) generating the expression of a protein encoded by the nucleic acid molecule of the invention or of the polypeptide of the present invention having herein-mentioned stearic acid increasing activity, e.g. of a polypeptide having the activity of a protein as indicated in table II, application no. 8, columns 5 and 7 or its, homologs activity in plastids by integration of a nucleic acid of the invention into the plastidal genome under control of preferable a plastidial promoter.

[2167] Preferably, said mRNA is the nucleic acid molecule of the present invention and/or the protein conferring the increased expression of a protein encoded by the nucleic acid molecule of the present invention alone or link to a transit nucleic acid sequence or transit peptide encoding nucleic acid sequence or the polypeptide having the herein mentioned activity, e.g. conferring the increase of the fine chemical after increasing the expression or activity of the encoded polypeptide preferably in organelles such as plastids or having the activity of a polypeptide having an activity as the protein as shown in table II, application no. 8, column 3 or its homologs. Preferably the increase of the fine chemical takes place in plastids.

[2168] for the disclosure of the paragraphs [0069.0.0.7] to [0079.0.0.7] see paragraphs [0069.0.0.0] to [0079.0.0.0] above.

[2169] The activation of an endogenous polypeptide having above-mentioned activity, e.g. having the activity of a protein as shown in table II, application no. 8, column 3 or of the polypeptide of the invention, e.g. conferring the increase of the fine chemical after increase of expression or activity in the cytsol and/or in an organelle like a plastid, preferentially in the plastid, can also be increased by introducing a synthetic transcription factor, which binds close to the coding region of the gene encoding the protein as shown in table II, application no. 8, column 3 and activates its transcription. A chimeric zinc finger protein can be constructed, which comprises a specific DNA-binding domain and an activation domain as e.g. the VP16 domain of Herpes Simplex virus. The specific binding domain can bind to the regulatory region of the gene encoding the protein as shown in table II, application no. 8, column 3. The expression of the chimeric transcription factor in a organism, in particular in a plant, leads to a specific expression of the protein as shown in table II, application no. 8, column 3, see e.g. in WO01/52620, Oriz, Proc. Natl. Acad. Sci. USA, 2002, Vol. 99, 13290 or Guan, Proc. Natl. Acad. Sci. USA, 2002, Vol. 99, 13296.

[2170] for the disclosure of the paragraphs [0081.0.0.7] to [0084.0.0.6] see paragraphs [0081.0.0.0] to [0084.0.0.0] above.

[2171] Owing to the introduction of a gene or a plurality of genes conferring the expression of the nucleic acid molecule of the invention or the nucleic acid molecule used in the method of the invention or the polypeptide of the invention or the polypeptide used in the method of the invention as described below, for example the nucleic acid construct mentioned below into an organism alone or in combination with other genes, it is possible not only to increase the biosynthetic flux towards the end product, but also to increase, modify or create de novo an advantageous, preferably novel metabolites composition in the organism, e.g. an advantageous fatty acid composition comprising a higher content of (from a viewpoint of nutritional physiology limited) fatty acids, like palmitate and/or palmitoleate.

[2172] for the disclosure of this paragraph see paragraph [0086.0.0.0] above.

[2173] By influencing the metabolism thus, it is possible to produce, in the process according to the invention, further advantageous compounds. Examples of such compounds are, in addition to stearic acid, triglycerides, lipids, oils and/or fats containing stearic acid compounds such as palmitate and/or palmitoleate.

[2174] Accordingly, in one embodiment, the process according to the invention relates to a process, which comprises:
[2175] a) providing a non-human organism, preferably a microorganism, a non-human animal, a plant or animal cell, a plant or animal tissue or a plant, more preferably a microorganism, a plant or a plant tissue;
[2176] b) increasing the activity of a protein as shown in table II, application no. 8, column 3 or of a polypeptide being encoded by the nucleic acid molecule of the present invention and described below, e.g. conferring an increase of the fine chemical in the organism, preferably in the microorganism, the non-human animal, the plant or animal cell, the plant or animal tissue or the plant, more preferably a microorganism, a plant or a plant tissue, in the cytsol or in the plastids, preferentially in the plastids,
[2177] c) growing the organism, preferably the microorganism, the non-human animal, the plant or animal cell, the plant or animal tissue or the plant under conditions which permit the production of the fine chemical in the organism, preferably the microorganism, the plant cell, the plant tissue or the plant; and
[2178] d) if desired, recovering, optionally isolating, the free and/or bound the fine chemical and, optionally further free and/or bound amino acids synthesized by the organism, the microorganism, the non-human animal, the plant or animal cell, the plant or animal tissue or the plant.

[2179] The organism, in particular the microorganism, non-human animal, the plant or animal cell, the plant or animal tissue or the plant is advantageously grown in such a way that it is not only possible to recover, if desired isolate the free or bound the fine chemical or the free and bound the fine chemical but as option it is also possible to produce, recover and, if desired isolate, other free or/and bound fatty acids, in particular palmitic acid.

[2180] for the disclosure of the paragraphs [0090.0.0.7] to [0097.0.0.7] see paragraphs [0090.0.0.0] to [0097.0.0.0] above.

[2181] With regard to the nucleic acid sequence as depicted a nucleic acid construct which contains a nucleic acid sequence mentioned herein or an organism (=transgenic organism) which is transformed with said nucleic acid sequence or said nucleic acid construct, “transgene” means all those constructs which have been brought about by genetic manipulation methods, preferably in which either
[2182] a) the nucleic acid sequence as shown in table I, application no. 8, columns 5 and 7 or a derivative thereof, or
[2183] b) a genetic regulatory element, for example a promoter, which is functionally linked to the nucleic acid sequence as shown table I, application no. 8, columns 5 and 7 or a derivative thereof, or
[2184] c) (a) and (b)
   is/are not present in its/their natural genetic environment or has/have been modified by means of genetic manipulation methods, it being possible for the modification to be, by way of example, a substitution, addition, deletion, inversion or insertion of one or more nucleotide. “Natural genetic environment” means the natural chromosomal locus in the organism of origin or the presence in a genomic library. In the case of a genomic library, the natural, genetic environment of the nucleic acid sequence is preferably at least partially still preserved. The environment flanks the nucleic acid sequence at least on one side and has a sequence length of at least 50 bp, preferably at least 500 bp, particularly preferably at least 1000 bp, very particularly preferably at least 5000 bp.

[2185] The use of the nucleic acid sequence according to the invention or of the nucleic acid construct according to the invention for the generation of transgenic plants is therefore also subject matter of the invention. As mentioned above the inventive nucleic acid sequence consists advantageously of the nucleic acid sequences as depicted in the sequence protocol and disclosed in table I, application no. 8, columns 5 and 7 joined to a nucleic acid sequence encoding a transit peptide, or a targeting nucleic acid sequence which directs the nucleic acid sequences disclosed in table I, application no. 8, columns 5 and 7 to the organelle preferentially the plastids. Alternatively the inventive nucleic acids sequences consist advantageously of the nucleic acid sequences as depicted in the sequence protocol and disclosed in table I, application no. 8, columns 5 and 7 joined preferably to a nucleic acids sequence mediating the stable integration of nucleic acids into the plastidial genome and optionally sequences mediating the transcription of the sequence in the plastidial compartment. A transient expression is in principal also desirable and possible.

[2186] for the disclosure of this paragraph see paragraph [0100.0.0.0] above.

[2187] In an advantageous embodiment of the invention, the organism takes the form of a plant whose fatty acid content is modified advantageously owing to the nucleic acid molecule of the present invention expressed. This is important for plant breeders since, for example, the nutritional value of plants for poultry is dependent on the abovementioned essential fatty acids and the general amount of fatty acids as energy source in feed. After the activity of the protein as shown in table II, application no. 8, column 3 has been increased or generated, or after the expression of nucleic acid molecule or polypeptide according to the invention has been generated or increased, the transgenic plant generated thus is grown on or in a nutrient medium or else in the soil and subsequently harvested.

[2188] for the disclosure of the paragraphs [0102.0.0.7] to [0110.0.0.7] see paragraphs [0102.0.0.0] to [0110.0.0.0] above.

[2189] In a preferred embodiment, the fine chemical (stearic acid) is produced in accordance with the invention and, if desired, is isolated. The production of further fatty acids such as palmitic acid and/or palmitoleic acid and/or mixtures thereof or mixtures of other fatty acids by the process according to the invention is advantageous. It may be advantageous to increase the pool of free fatty acids in the transgenic organisms by the process according to the invention in order to isolate high amounts of the pure fine chemical.

[2190] In another preferred embodiment of the invention a combination of the increased expression of the nucleic acid sequence or the protein of the invention together with the transformation of a nucleic acid encoding a protein or polypeptide for example a fatty acid transporter protein or a compound, which functions as a sink for the desired fatty acid for example for stearic acid in the organism is useful to increase the production of the respective fine chemical (see Bao and Ohlrogge, Plant Physiol. 1999 August; 120 (4): 1057-1062). Such fatty acid transporter protein may serve as a link between the location of fatty acid synthesis and the so called sink tissue, in which fatty acids, triglycerides, oils and fats are stored.

[2191] for the disclosure of the paragraphs [0113.0.5.7] to [0115.0.0.7] see paragraphs [0113.0.5.5] to [0115.0.5.5] above.

[2192] In a preferred embodiment, the present invention relates to a process for the production of the fine chemical comprising or generating in an organism or a part thereof, preferably in a cell compartment such as a plastid or mitochondria, the expression of at least one nucleic acid molecule comprising a nucleic acid molecule selected from the group consisting of:
[2193] a) nucleic acid molecule encoding, preferably at least the mature form, of the polypeptide shown in table II, application no. 8, columns 5 and 7 or a fragment thereof, which confers an increase in the amount of the fine chemical in an organism or a part thereof;
[2194] b) nucleic acid molecule comprising, preferably at least the mature form, of the nucleic acid molecule shown in table I, application no. 8, columns 5 and 7;
[2195] c) nucleic acid molecule whose sequence can be deduced from a polypeptide sequence encoded by a nucleic acid molecule of (a) or (b) as result of the degeneracy of the genetic code and conferring an increase in the amount of the fine chemical in an organism or a part thereof;
[2196] d) nucleic acid molecule encoding a polypeptide which has at least 50% identity with the amino acid sequence of the polypeptide encoded by the nucleic acid molecule of (a) to (c) and conferring an increase in the amount of the fine chemical in an organism or a part thereof;
[2197] e) nucleic acid molecule which hybridizes with a nucleic acid molecule of (a) to (c) under stringent hybridisation conditions and conferring an increase in the amount of the fine chemical in an organism or a part thereof;
[2198] f) nucleic acid molecule encoding a polypeptide, the polypeptide being derived by substituting, deleting and/or adding one or more amino acids of the amino acid sequence of the polypeptide encoded by the nucleic acid molecules (a) to (d), preferably to (a) to (c) and conferring an increase in the amount of the fine chemical in an organism or a part thereof;
[2199] g) nucleic acid molecule encoding a fragment or an epitope of a polypeptide which is encoded by one of the nucleic acid molecules of (a) to (e), preferably to (a) to (c) and conferring an increase in the amount of the fine chemical in an organism or a part thereof;
[2200] h) nucleic acid molecule comprising a nucleic acid molecule which is obtained by amplifying nucleic acid molecules from a cDNA library or a genomic library using the primers shown in table III, application no. 8, column 7 and conferring an increase in the amount of the fine chemical in an organism or a part thereof;
[2201] i) nucleic acid molecule encoding a polypeptide which is isolated, e.g. from an expression library, with the aid of monoclonal antibodies against a polypeptide encoded by one of the nucleic acid molecules of (a) to (h), preferably to (a) to (c), and conferring an increase in the amount of the fine chemical in an organism or a part thereof;
[2202] j) nucleic acid molecule which encodes a polypeptide comprising the consensus sequence shown in table IV, application no. 8, column 7 and conferring an increase in the amount of the fine chemical in an organism or a part thereof;
[2203] k) nucleic acid molecule comprising one or more of the nucleic acid molecule encoding the amino acid sequence of a polypeptide encoding a domain of the polypeptide shown in table II, application no. 8, columns 5 and 7 and conferring an increase in the amount of the fine chemical in an organism or a part thereof; and
[2204] l) nucleic acid molecule which is obtainable by screening a suitable library under stringent conditions with a probe comprising one of the sequences of the nucleic acid molecule of (a) to (k), preferably to (a) to (c), or with a fragment of at least 15 nt, preferably 20 nt, 30 nt, 50 nt, 100 nt, 200 nt or 500 nt of the nucleic acid molecule characterized in (a) to (k), preferably to (a) to (c), and conferring an increase in the amount of the fine chemical in an organism or a part thereof;
   or which comprises a sequence which is complementary thereto.

[2205] In one embodiment, the nucleic acid molecule used in the process of the invention distinguishes over the sequence indicated in table I A, application no. 8, columns 5 and 7 by one or more nucleotides. In one embodiment, the nucleic acid molecule used in the process of the invention does not consist of the sequence indicated in table I A, application no. 8, columns 5 and 7. In one embodiment, the nucleic acid molecule used in the process of the invention is less than 100%, 99.999%, 99.99%, 99.9% or 99% identical to a sequence indicated in table I A, application no. 8, columns 5 and 7. In another embodiment, the nucleic acid molecule does not encode a polypeptide of a sequence indicated in table II A, application no. 8, columns 5 and 7.

[2206] In one embodiment, the nucleic acid molecule used in the process of the invention distinguishes over the sequence indicated in table I B, application no. 8, columns 5 and 7, by one or more nucleotides. In one embodiment, the nucleic acid molecule used in the process of the invention does not consist of the sequence indicated in table I B, application no. 8, columns 5 and 7. In one embodiment, the nucleic acid molecule used in the process of the invention is less than 100%, 99.999%, 99.99%, 99.9% or 99% identical to a sequence indicated in table I B, application no. 8, columns 5 and 7. In another embodiment, the nucleic acid molecule does not encode a polypeptide of a sequence indicated in table II B, application no. 8, columns 5 and 7.

[2207] In one embodiment, the nucleic acid molecule used in the process distinguishes over the sequence shown in table I, application no. 8, columns 5 and 7 by one or more nucleotides or does not consist of the sequence shown in table I, application no. 8, columns 5 and 7. In one embodiment, the nucleic acid molecule of the present invention is less than 100%, 99.999%, 99.99%, 99.9% or 99% identical to the sequence shown in table I, application no. 8, columns 5 and 7. In another embodiment, the nucleic acid molecule does not encode a polypeptide of the sequence shown in table II, application no. 8, columns 5 and 7.

[2208] for the disclosure of the paragraphs [0118.0.0.7] to [0120.0.0.7] see paragraphs [0118.0.0.0] to [0120.0.0.0] above.

[2209] Nucleic acid molecules with the sequence shown in table I, application no. 8, columns 5 and 7, nucleic acid molecules which are derived from the amino acid sequences shown in table II, application no. 8, columns 5 and 7 or from polypeptides comprising the consensus sequence shown in table IV, application no. 8, column 7, or their derivatives or homologues encoding polypeptides with the enzymatic or biological activity of a protein as shown in table II, application no. 8, column 3 or conferring the fine chemical increase after increasing its expression or activity are advantageously increased in the process according to the invention by expression either in the cytsol or in an organelle such as a plastid or mitochondria or both, preferably in plastids.

[2210] for the disclosure of this paragraph see paragraph [0122.0.0.0] above.

[2211] Nucleic acid molecules, which are advantageous for the process according to the invention and which encode polypeptides with the activity of a protein as shown in table II, application no. 8, column 3 can be determined from generally accessible databases.

[2212] for the disclosure of this paragraph see paragraph [0124.0.0.0] above.

[2213] The nucleic acid molecules used in the process according to the invention take the form of isolated nucleic acid sequences, which encode polypeptides with the activity of the proteins as shown in table II, application no. 8, column 3 and conferring the fine chemical increase by expression either in the cytsol or in an organelle such as a plastid or mitochondria or both, preferably in plastids.

[2214] for the disclosure of the paragraphs [0126.0.0.7] to [0133.0.0.7] see paragraphs [0126.0.0.0] to [0133.0.0.0] above.

[2215] However, it is also possible to use artificial sequences, which differ in one or more bases from the nucleic acid sequences found in organisms, or in one or more amino acid molecules from polypeptide sequences found in organisms, in particular from the polypeptide sequences shown in table II, application no. 8, columns 5 and 7 or the functional homologues thereof as described herein, preferably conferring above-mentioned activity, i.e. conferring the fine chemical increase after increasing its activity, e.g. after increasing the activity of a protein as shown in table II, application no. 8, column 3 by for example expression either in the cytsol or in an organelle such as a plastid or mitochondria or both, preferably in plastids.

[2216] for the disclosure of the paragraphs [0135.0.0.7] to [0140.0.0.7] see paragraphs [0135.0.0.0] to [0140.0.0.0] above.

[2217] Synthetic oligonucleotide primers for the amplification, e.g. as shown in table Ill, application no. 8, column 7, by means of polymerase chain reaction can be generated on the basis of a sequence shown herein, for example the sequence shown in table I, application no. 8, columns 5 and 7 or the sequences derived from table II, application no. 8, columns 5 and 7.

[2218] Moreover, it is possible to identify conserved regions from various organisms by carrying out protein sequence alignments with the polypeptide used in the process of the invention, in particular with sequences of the polypeptide of the invention, from which conserved regions, and in turn, degenerate primers can be derived. Conserved regions are those, which show a very little variation in the amino acid in one particular position of several homologs from different origin. The consensus sequence shown in table IV, application no. 8, column 7 is derived from said alignments.

[2219] Degenerated primers can then be utilized by PCR for the amplification of fragments of novel proteins having above-mentioned activity, e.g. conferring the increase of the fine chemical after increasing the expression or activity or having the activity of a protein as shown in table II, application no. 8, column 3 or further functional homologs of the polypeptide of the invention from other organisms.

[2220] for the disclosure of the paragraphs [0144.0.0.7] to [0151.0.0.7] see paragraphs [0144.0.0.0] to [0151.0.0.0] above.

[2221] Polypeptides having above-mentioned activity, i.e. conferring the fine chemical increase, derived from other organisms, can be encoded by other DNA sequences which hybridize to the sequences shown in table I, application no. 8, columns 5 and 7, preferably of table I B, application no. 8, columns 5 and 7 under relaxed hybridization conditions and which code on expression for peptides having the stearic acid, triglycerides, lipids, oils and/or fats containing stearic acid increasing activity.

[2222] for the disclosure of the paragraphs [0153.0.0.7] to [0159.0.0.7] see paragraphs [0153.0.0.0] to [0159.0.0.0] above.

[2223] Further, the nucleic acid molecule of the invention comprises a nucleic acid molecule, which is a complement of one of the nucleotide sequences of above mentioned nucleic acid molecules or a portion thereof. A nucleic acid molecule which is complementary to one of the nucleotide sequences shown in table I, application no. 8, columns 5 and 7, preferably shown in table I B, application no. 8, columns 5 and 7 is one which is sufficiently complementary to one of the nucleotide sequences shown in table I, application no. 8, columns 5 and 7, preferably shown in table I B, application no. 8, columns 5 and 7 such that it can hybridize to one of the nucleotide sequences shown in table I, application no. 8, columns 5 and 7, preferably shown in table I B, application no. 8, columns 5 and 7, thereby forming a stable duplex. Preferably, the hybridisation is performed under stringent hybridization conditions. However, a complement of one of the herein disclosed sequences is preferably a sequence complement thereto according to the base pairing of nucleic acid molecules well known to the skilled person. For example, the bases A and G undergo base pairing with the bases T and U or C, resp. and visa versa. Modifications of the bases can influence the base-pairing partner.

[2224] The nucleic acid molecule of the invention comprises a nucleotide sequence which is at least about 30%, 35%, 40% or 45%, preferably at least about 50%, 55%, 60% or 65%, more preferably at least about 70%, 80%, or 90%, and even more preferably at least about 95%, 97%, 98%, 99% or more homologous to a nucleotide sequence shown in table I, application no. 8, columns 5 and 7, preferably shown in table I B, application no. 8, columns 5 and 7, or a portion thereof and preferably has above mentioned activity, in particular having a fine chemical increasing activity after increasing the activity or an activity of a gene product as shown in table II, application no. 8, column 3 by for example expression either in the cytsol or in an organelle such as a plastid or mitochondria or both, preferably in plastids.

[2225] The nucleic acid molecule of the invention comprises a nucleotide sequence which hybridizes, preferably hybridizes under stringent conditions as defined herein, to one of the nucleotide sequences shown in table I, application no. 8, columns 5 and 7, preferably shown in table I B, application no. 8, columns 5 and 7, or a portion thereof and encodes a protein having above-mentioned activity, e.g. conferring of a stearic acid, triglycerides, lipids, oils and/or fats containing stearic acid increase by for example expression either in the cytsol or in an organelle such as a plastid or mitochondria or both, preferably in plastids, and optionally, the activity of a protein as shown in table II, application no. 8, column 3.

[2226] Moreover, the nucleic acid molecule of the invention can comprise only a portion of the coding region of one of the sequences shown in table I, application no. 8, columns 5 and 7, preferably shown in table I B, application no. 8, columns 5 and 7, for example a fragment which can be used as a probe or primer or a fragment encoding a biologically active portion of the polypeptide of the present invention or of a polypeptide used in the process of the present invention, i.e. having above-mentioned activity, e.g. conferring an increase of the fine chemical if its activity is increased by for example expression either in the cytsol or in an organelle such as a plastid or mitochondria or both, preferably in plastids. The nucleotide sequences determined from the cloning of the present protein-according-to-the-invention-encoding gene allows for the generation of probes and primers designed for use in identifying and/or cloning its homologues in other cell types and organisms. The probe/primer typically comprises substantially purified oligonucleotide. The oligonucleotide typically comprises a region of nucleotide sequence that hybridizes under stringent conditions to at least about 12, 15 preferably about 20 or 25, more preferably about 40, 50 or 75 consecutive nucleotides of a sense strand of one of the sequences set forth, e.g., in table I, application no. 8, columns 5 and 7, an anti-sense sequence of one of the sequences, e.g., set forth in table I, application no. 8, columns 5 and 7, preferably shown in table I B, application no. 8, columns 5 and 7, or naturally occurring mutants thereof. Primers based on a nucleotide of invention can be used in PCR reactions to clone homologues of the polypeptide of the invention or of the polypeptide used in the process of the invention, e.g. as the primers described in the examples of the present invention, e.g. as shown in the examples. A PCR with the primers shown in table III, application no. 8, column 7 will result in a fragment of the gene product as shown in table II, column 3.

[2227] for the disclosure of this paragraph see paragraph [0164.0.0.0] above.

[2228] The nucleic acid molecule of the invention encodes a polypeptide or portion thereof which includes an amino acid sequence which is sufficiently homologous to the amino acid sequence shown in table II, application no. 8, columns 5 and 7 such that the protein or portion thereof maintains the ability to participate in the fine chemical production, in particular a stearic acid, triglycerides, lipids, oils and/or fats containing stearic acid increasing the activity as mentioned above or as described in the examples in plants or microorganisms is comprised.

[2229] As used herein, the language “sufficiently homologous” refers to proteins or portions thereof which have amino acid sequences which include a minimum number of identical or equivalent amino acid residues (e.g., an amino acid residue which has a similar side chain as an amino acid residue in one of the sequences of the polypeptide of the present invention) to an amino acid sequence shown in table II, application no. 8, columns 5 and 7 such that the protein or portion thereof is able to participate in the increase of the fine chemical production. For examples having the activity of a protein as shown in table II, column 3 and as described herein.

[2230] In one embodiment, the nucleic acid molecule of the present invention comprises a nucleic acid that encodes a portion of the protein of the present invention. The protein is at least about 30%, 35%, 40%, 45% or 50%, preferably at least about 55%, 60%, 65% or 70%, and more preferably at least about 75%, 80%, 85%, 90%, 91%, 92%, 93% or 94% and most preferably at least about 95%, 97%, 98%, 99% or more homologous to an entire amino acid sequence of table II, application no. 8, columns 5 and 7 and having above-mentioned activity, e.g. conferring preferably the increase of the fine chemical by for example expression either in the cytsol or in an organelle such as a plastid or mitochondria or both, preferably in plastids.

[2231] for the disclosure of the paragraphs [0168.0.0.7] and [0169.0.0.7] see paragraphs [0168.0.0.0] and [0169.0.0.0] above.

[2232] The invention further relates to nucleic acid molecules that differ from one of the nucleotide sequences shown in table I, application no. 8, columns 5 and 7 (and portions thereof) due to degeneracy of the genetic code and thus encode a polypeptide of the present invention, in particular a polypeptide having above mentioned activity, e.g. conferring an increase in the fine chemical in a organism, e.g. as that polypeptides depicted by the sequence shown in table II, application no. 8, columns 5 and 7 or the functional homologues. Advantageously, the nucleic acid molecule of the invention comprises, or in an other embodiment has, a nucleotide sequence encoding a protein comprising, or in an other embodiment having, an amino acid sequence shown in table II, application no. 8, columns 5 and 7 or the functional homologues. In a still further embodiment, the nucleic acid molecule of the invention encodes a full length protein which is substantially homologous to an amino acid sequence shown in table II, application no. 8, columns 5 and 7 or the functional homologues. However, in a preferred embodiment, the nucleic acid molecule of the present invention does not consist of the sequence shown in table I, application no. 8, columns 5 and 7, preferably as indicated in table I A, application no. 8, columns 5 and 7. Preferably the nucleic acid molecule of the invention is a functional homologue or identical to a nucleic acid molecule indicated in table I B, application no. 8, columns 5 and 7.

[2233] for the disclosure of the paragraphs [0171.0.0.7] to [0173.0.0.7] see paragraphs [0171.0.0.0] to [0173.0.0.0] above.

[2234] Accordingly, in another embodiment, a nucleic acid molecule of the invention is at least 15, 20, 25 or 30 nucleotides in length. Preferably, it hybridizes under stringent conditions to a nucleic acid molecule comprising a nucleotide sequence of the nucleic acid molecule of the present invention or used in the process of the present invention, e.g. comprising the sequence shown in table I, application no. 8, columns 5 and 7. The nucleic acid molecule is preferably at least 20, 30, 50, 100, 250 or more nucleotides in length.

[2235] for the disclosure of this paragraph see paragraph [0175.0.0.0] above.

[2236] Preferably, nucleic acid molecule of the invention that hybridizes under stringent conditions to a sequence shown in table I, application no. 8, columns 5 and 7 corresponds to a naturally-occurring nucleic acid molecule of the invention. As used herein, a “naturally-occurring” nucleic acid molecule refers to an RNA or DNA molecule having a nucleotide sequence that occurs in nature (e.g., encodes a natural protein). Preferably, the nucleic acid molecule encodes a natural protein having abovementioned activity, e.g. conferring the fine chemical increase after increasing the expression or activity thereof or the activity of a protein of the invention or used in the process of the invention by for example expression the nucleic acid sequence of the gene product in the cytsol and/or in an organelle such as a plastid or mitochondria, preferably in plastids.

[2237] for the disclosure of this paragraph see paragraph [0177.0.0.0] above.

[2238] For example, nucleotide substitutions leading to amino acid substitutions at “non-essential” amino acid residues can be made in a sequence of the nucleic acid molecule of the invention or used in the process of the invention, e.g. shown in table I, application no. 8, columns 5 and 7.

[2239] for the disclosure of the paragraphs [0179.0.0.7] and [0180.0.0.7] see paragraphs [0179.0.0.0] and [0180.0.0.0] above.

[2240] Accordingly, the invention relates to nucleic acid molecules encoding a polypeptide having above-mentioned activity, e.g. conferring an increase in the fine chemical in an organisms or parts thereof by for example expression either in the cytsol or in an organelle such as a plastid or mitochondria or both, preferably in plastids that contain changes in amino acid residues that are not essential for said activity. Such polypeptides differ in amino acid sequence from a sequence contained in the sequences shown in table II, application no. 8, columns 5 and 7, preferably shown in table II A, application no. 8, columns 5 and 7 yet retain said activity described herein. The nucleic acid molecule can comprise a nucleotide sequence encoding a polypeptide, wherein the polypeptide comprises an amino acid sequence at least about 50% identical to an amino acid sequence shown in table II, application no. 8, columns 5 and 7, preferably shown in table II A, application no. 8, columns 5 and 7 and is capable of participation in the increase of production of the fine chemical after increasing its activity, e.g. its expression by for example expression either in the cytsol or in an organelle such as a plastid or mitochondria or both, preferably in plastids. Preferably, the protein encoded by the nucleic acid molecule is at least about 60% identical to the sequence shown in table II, application no. 8, columns 5 and 7, preferably shown in table II A, application no. 8, columns 5 and 7, more preferably at least about 70% identical to one of the sequences shown in table II, application no. 8, columns 5 and 7, preferably shown in table II A, application no. 8, columns 5 and 7, even more preferably at least about 80%, 90%, 95% homologous to the sequence shown in table II, application no. 8, columns 5 and 7, preferably shown in table II A, application no. 8, columns 5 and 7, and most preferably at least about 96%, 97%, 98%, or 99% identical to the sequence shown in table II, application no. 8, columns 5 and 7, preferably shown in table II A, application no. 8, columns 5 and 7.

[2241] for the disclosure of the paragraphs [0182.0.0.7] to [0188.0.0.7] see paragraphs [0182.0.0.0] to [0188.0.0.0] above.

[2242] Functional equivalents derived from one of the polypeptides as shown in table II, application no. 8, columns 5 and 7, preferably shown in table II B, application no. 8, columns 5 and 7 resp., according to the invention by substitution, insertion or deletion have at least 30%, 35%, 40%, 45% or 50%, preferably at least 55%, 60%, 65% or 70% by preference at least 80%, especially preferably at least 85% or 90%, 91%, 92%, 93% or 94%, very especially preferably at least 95%, 97%, 98% or 99% homology with one of the polypeptides as shown in table II, application no. 8, columns 5 and 7, preferably shown in table II B, application no. 8, columns 5 and 7 resp., according to the invention and are distinguished by essentially the same properties as the polypeptide as shown in table II, application no. 8, columns 5 and 7, preferably shown in table II B, application no. 8, columns 5 and 7.

[2243] Functional equivalents derived from the nucleic acid sequence as shown in table I, application no. 8, columns 5 and 7, preferably shown in table I B, application no. 8, columns 5 and 7 resp., according to the invention by substitution, insertion or deletion have at least 30%, 35%, 40%, 45% or 50%, preferably at least 55%, 60%, 65% or 70% by preference at least 80%, especially preferably at least 85% or 90%, 91%, 92%, 93% or 94%, very especially preferably at least 95%, 97%, 98% or 99% homology with one of the polypeptides as shown in table II, application no. 8, columns 5 and 7, preferably shown in table II B, application no. 8, columns 5 and 7 resp., according to the invention and encode polypeptides having essentially the same properties as the polypeptide as shown in table II, application no. 8, columns 5 and 7, preferably shown in table II B, application no. 8, columns 5 and 7.

[2244] for the disclosure of this paragraph see paragraph [0191.0.0.0] above.

[2245] A nucleic acid molecule encoding an homologous to a protein sequence of table II, application no. 8, columns 5 and 7, preferably shown in table II B, application no. 8, columns 5 and 7 resp., can be created by introducing one or more nucleotide substitutions, additions or deletions into a nucleotide sequence of the nucleic acid molecule of the present invention, in particular of table I, application no. 8, columns 5 and 7, preferably shown in table I B, application no. 8, columns 5 and 7 resp., such that one or more amino acid substitutions, additions or deletions are introduced into the encoded protein. Mutations can be introduced into the encoding sequences of table I, application no. 8, columns 5 and 7, preferably shown in table I B, application no. 8, columns 5 and 7 resp., by standard techniques, such as site-directed mutagenesis and PCR-mediated mutagenesis.

[2246] for the disclosure of the paragraphs [0193.0.0.7] to [0196.0.0.7] see paragraphs [0193.0.0.0] to [0196.0.0.0] above.

[2247] Homologues of the nucleic acid sequences used, with the sequence shown in table I, application no. 8, columns 5 and 7, preferably shown in table I B, application no. 8, columns 5 and 7, comprise also allelic variants with at least approximately 30%, 35%, 40% or 45% homology, by preference at least approximately 50%, 60% or 70%, more preferably at least approximately 90%, 91%, 92%, 93%, 94% or 95% and even more preferably at least approximately 96%, 97%, 98%, 99% or more homology with one of the nucleotide sequences shown or the abovementioned derived nucleic acid sequences or their homologues, derivatives or analogues or parts of these. Allelic variants encompass in particular functional variants which can be obtained by deletion, insertion or substitution of nucleotides from the sequences shown, preferably from table I, application no. 8, columns 5 and 7, preferably shown in table I B, application no. 8, columns 5 and 7, or from the derived nucleic acid sequences, the intention being, however, that the enzyme activity or the biological activity of the resulting proteins synthesized is advantageously retained or increased.

[2248] In one embodiment of the present invention, the nucleic acid molecule of the invention or used in the process of the invention comprises the sequences shown in any of the table I, application no. 8, columns 5 and 7, preferably shown in table I B, application no. 8, columns 5 and 7. It is preferred that the nucleic acid molecule comprises as little as possible other nucleotides not shown in any one of table I, application no. 8, columns 5 and 7, preferably shown in table I B, application no. 8, columns 5 and 7. In one embodiment, the nucleic acid molecule comprises less than 500, 400, 300, 200, 100, 90, 80, 70, 60, 50 or 40 further nucleotides. In a further embodiment, the nucleic acid molecule comprises less than 30, 20 or 10 further nucleotides. In one embodiment, the nucleic acid molecule use in the process of the invention is identical to the sequences shown in table I, application no. 8, columns 5 and 7, preferably shown in table I B, application no. 8, columns 5 and 7.

[2249] Also preferred is that the nucleic acid molecule used in the process of the invention encodes a polypeptide comprising the sequence shown in table II, application no. 8, columns 5 and 7, preferably shown in table II B, application no. 8, columns 5 and 7. In one embodiment, the nucleic acid molecule encodes less than 150, 130, 100, 80, 60, 50, 40 or 30 further amino acids. In a further embodiment, the encoded polypeptide comprises less than 20, 15, 10, 9, 8, 7, 6 or 5 further amino acids. In one embodiment used in the inventive process, the encoded polypeptide is identical to the sequences shown in table II, application no. 8, columns 5 and 7, preferably shown in table II B, application no. 8, columns 5 and 7.

[2250] In one embodiment, the nucleic acid molecule of the invention or used in the process encodes a polypeptide comprising the sequence shown in table II, application no. 8, columns 5 and 7, preferably shown in table II B, application no. 8, columns 5 and 7 comprises less than 100 further nucleotides. In a further embodiment, said nucleic acid molecule comprises less than 30 further nucleotides. In one embodiment, the nucleic acid molecule used in the process is identical to a coding sequence of the sequences shown in table I, application no. 8, columns 5 and 7, preferably shown in table I B, application no. 8, columns 5 and 7.

[2251] Polypeptides (=proteins), which still have the essential biological or enzymatic activity of the polypeptide of the present invention conferring an increase of the fine chemical i.e. whose activity is essentially not reduced, are polypeptides with at least 10% or 20%, by preference 30% or 40%, especially preferably 50% or 60%, very especially preferably 80% or 90 or more of the wild type biological activity or enzyme activity, advantageously, the activity is essentially not reduced in comparison with the activity of a polypeptide shown in table II, application no. 8, columns 5 and 7 expressed under identical conditions.

[2252] Homologues of table I, application no. 8, columns 5 and 7 or of the derived sequences of table II, application no. 8, columns 5 and 7 also mean truncated sequences, cDNA, single-stranded DNA or RNA of the coding and noncoding DNA sequence. Homologues of said sequences are also understood as meaning derivatives, which comprise noncoding regions such as, for example, UTRs, terminators, enhancers or promoter variants. The promoters upstream of the nucleotide sequences stated can be modified by one or more nucleotide substitution(s), insertion(s) and/or deletion(s) without, however, interfering with the functionality or activity either of the promoters, the open reading frame (=ORF) or with the 3′-regulatory region such as terminators or other 3′ regulatory regions, which are far away from the ORF. It is furthermore possible that the activity of the promoters is increased by modification of their sequence, or that they are replaced completely by more active promoters, even promoters from heterologous organisms. Appropriate promoters are known to the person skilled in the art and are mentioned herein below.

[2253] for the disclosure of the paragraphs [0203.0.0.7] to [0215.0.0.7] see paragraphs [0203.0.0.0] to [0215.0.0.0] above.

[2254] Accordingly, in one embodiment, the invention relates to a nucleic acid molecule, which comprises a nucleic acid molecule selected from the group consisting of:
[2255] a) nucleic acid molecule encoding, preferably at least the mature form, of the polypeptide shown in table II, application no. 8, columns 5 and 7, preferably in table II B, application no. 8, columns 5 and 7; or a fragment thereof conferring an increase in the amount of the fine chemical in an organism or a part thereof
[2256] b) nucleic acid molecule comprising, preferably at least the mature form, of the nucleic acid molecule shown in table I, application no. 8, columns 5 and 7, preferably in table I B, application no. 8, columns 5 and 7 or a fragment thereof conferring an increase in the amount of the fine chemical in an organism or a part thereof;
[2257] c) nucleic acid molecule whose sequence can be deduced from a polypeptide sequence encoded by a nucleic acid molecule of (a) or (b) as result of the degeneracy of the genetic code and conferring an increase in the amount of the fine chemical in an organism or a part thereof;
[2258] d) nucleic acid molecule encoding a polypeptide whose sequence has at least 50% identity with the amino acid sequence of the polypeptide encoded by the nucleic acid molecule of (a) to (c) and conferring an increase in the amount of the fine chemical in an organism or a part thereof;
[2259] e) nucleic acid molecule which hybridizes with a nucleic acid molecule of (a) to (c) under stringent hybridisation conditions and conferring an increase in the amount of the fine chemical in an organism or a part thereof;
[2260] f) nucleic acid molecule encoding a polypeptide, the polypeptide being derived by substituting, deleting and/or adding one or more amino acids of the amino acid sequence of the polypeptide encoded by the nucleic acid molecules (a) to (d), preferably to (a) to (c), and conferring an increase in the amount of the fine chemical in an organism or a part thereof;
[2261] g) nucleic acid molecule encoding a fragment or an epitope of a polypeptide which is encoded by one of the nucleic acid molecules of (a) to (e), preferably to (a) to (c) and conferring an increase in the amount of the fine chemical in an organism or a part thereof;
[2262] h) nucleic acid molecule comprising a nucleic acid molecule which is obtained by amplifying a cDNA library or a genomic library using the primers in table III, application no. 8, column 7 and conferring an increase in the amount of the fine chemical in an organism or a part thereof;
[2263] i) nucleic acid molecule encoding a polypeptide which is isolated, e.g. from a expression library, with the aid of monoclonal antibodies against a polypeptide encoded by one of the nucleic acid molecules of (a) to (g), preferably to (a) to (c) and conferring an increase in the amount of the fine chemical in an organism or a part thereof;
[2264] j) nucleic acid molecule which encodes a polypeptide comprising the consensus sequence shown in table IV, application no. 8, column 7 and conferring an increase in the amount of the fine chemical in an organism or a part thereof;
[2265] k) nucleic acid molecule encoding the amino acid sequence of a polypeptide encoding a domain of the polypeptide shown in table II, application no. 8, columns 5 and 7 and conferring an increase in the amount of the fine chemical in an organism or a part thereof; and
[2266] l) nucleic acid molecule which is obtainable by screening a suitable nucleic acid library under stringent hybridization conditions with a probe comprising one of the sequences of the nucleic acid molecule of (a) to (k) or with a fragment of at least 15 nt, preferably 20 nt, 30 nt, 50 nt, 100 nt, 200 nt or 500 nt of the nucleic acid molecule characterized in (a) to (h) or of the nucleic acid molecule shown in table I, application no. 8, columns 5 and 7 or a nucleic acid molecule encoding, preferably at least the mature form of, the polypeptide shown in table II, application no. 8, columns 5 and 7, and conferring an increase in the amount of the fine chemical in an organism or a part thereof; or which encompasses a sequence which is complementary thereto;
   whereby, preferably, the nucleic acid molecule according to (a) to (l) distinguishes over the sequence depicted in table IA and/or I B, application no. 8, columns 5 and 7 by one or more nucleotides. In one embodiment, the nucleic acid molecule of the invention does not consist of the sequence shown in table IA and/or I B, application no. 8, columns 5 and 7. In another embodiment, the nucleic acid molecule of the present invention is at least 30% identical and less than 100%, 99.999%, 99.99%, 99.9% or 99% identical to the sequence shown in table IA and/or I B, application no. 8, columns 5 and 7. In a further embodiment the nucleic acid molecule does not encode the polypeptide sequence shown in table II A and/or II B, application no. 8, columns 5 and 7. Accordingly, in one embodiment, the nucleic acid molecule of the present invention encodes in one embodiment a polypeptide which differs at least in one or more amino acids from the polypeptide shown in table II A and/or II B, application no. 8, columns 5 and 7 does not encode a protein of the sequence shown in table II A and/or II B, application no. 8, columns 5 and 7. Accordingly, in one embodiment, the protein encoded by a sequence of a nucleic acid according to (a) to (l) does not consist of the sequence shown in table IA and/or I B, application no. 8, columns 5 and 7. In a further embodiment, the protein of the present invention is at least 30% identical to protein sequence depicted in table II A and/or II B, application no. 8, columns 5 and 7 and less than 100%, preferably less than 99.999%, 99.99% or 99.9%, more preferably less than 99%, 985, 97%, 96% or 95% identical to the sequence shown in table II A and/or II B, application no. 8, columns 5 and 7.

[2267] for the disclosure of the paragraphs [0217.0.0.7] to [0226.0.0.7] see paragraphs [0217.0.0.0] to [0226.0.0.0] above.

[2268] In general, vector systems preferably also comprise further cis-regulatory regions such as promoters and terminators and/or selection markers by means of which suitably transformed organisms can be identified. While vir genes and T-DNA sequences are located on the same vector in the case of cointegrated vector systems, binary systems are based on at least two vectors, one of which bears vir genes, but no T-DNA, while a second one bears T-DNA, but no vir gene. Owing to this fact, the last-mentioned vectors are relatively small, easy to manipulate and capable of replication in E. coli and in Agrobacterium. These binary vectors include vectors from the series pBIB-HYG, pPZP, pBecks, pGreen. Those which are preferably used in accordance with the invention are Bin19, pBI101, pBinAR, pGPTV and pCAMBIA. An overview of binary vectors and their use is given by Hellens et al, Trends in Plant Science (2000) 5, 446-451. The vectors are preferably modified in such a manner, that they already contain the nucleic acid coding for the transitpeptide and that the nucleic acids of the invention, preferentially the nucleic acid sequences encoding the polypeptides shown in table II, application no. 8, columns 5 and 7 can be cloned 3″ prime to the transitpeptide encoding sequence, leading to a functional preprotein, which is directed to the plastids and which means that the mature protein fulfills its biological activity.

[2269] for the disclosure of the paragraphs [0228.0.0.7] to [0239.0.0.7] see paragraphs [0228.0.0.0] to [0239.0.0.0] above.

[2270] The abovementioned nucleic acid molecules can be cloned into the nucleic acid constructs or vectors according to the invention in combination together with further genes, or else different genes are introduced by transforming several nucleic acid constructs or vectors (including plasmids) into a host cell, advantageously into a plant cell or a microorganisms.

In addition to the sequence mentioned in Table I, application no. 8, columns 5 and 7 or its derivatives, it is advantageous additionally to express and/or mutate further genes in the organisms. Especially advantageously, additionally at least one further gene of the fatty acid biosynthetic pathway such as for palmitate, palmitoleate, stearate and/or oleate is expressed in the organisms such as plants or microorganisms. It is also possible that the regulation of the natural genes has been modified advantageously so that the gene and/or its gene product is no longer subject to the regulatory mechanisms which exist in the organisms. This leads to an increased synthesis of the respective desired fine chemical since, for example, feedback regulations no longer exist to the same extent or not at all. In addition it might be advantageously to combine the sequences shown in Table I, application no. 8, columns 5 and 7 with genes which generally support or enhances to growth or yield of the target organism, for example genes which lead to faster growth rate of microorganisms or genes which produces stress-, pathogen, or herbicide resistant plants.

[2271] for the disclosure of the paragraphs [0241.0.5.7] and [0242.0.5.7] see paragraphs [0241.0.5.5] and [0242.0.5.5] above.

[2272] In a further advantageous embodiment of the process of the invention, the organisms used in the process are those in which simultaneously a stearic acid degrading protein is attenuated, in particular by reducing the rate of expression of the corresponding gene.

[2273] for the disclosure of this paragraph see paragraph [0242.2.5.5] above.

[2274] for the disclosure of the paragraphs [0243.0.0.7] to [0267.0.0.7] see paragraphs [0243.0.0.0] to [0264.0.0.0] above.

[2275] Other preferred sequences for use in operable linkage in gene expression constructs are targeting sequences, which are required for targeting the gene product into specific cell compartments (for a review, see Kermode, Crit. Rev. Plant Sci. 15, 4 (1996) 285-423 and references cited therein), for example into the vacuole, the nucleus, all types of plastids, such as amyloplasts, chloroplasts, chromoplasts, the extracellular space, the mitochondria, the endoplasmic reticulum, elaioplasts, peroxisomes, glycosomes, and other compartments of cells or extracellular preferred are sequences, which are involved in targeting to plastids as mentioned above. Sequences, which must be mentioned in this context are, in particular, the signal-peptide- or transit-peptide-encoding sequences which are known per se. For example, plastid-transit-peptide-encoding sequences enable the targeting of the expression product into the plastids of a plant cell. Targeting sequences are also known for eukaryotic and to a lower extent for prokaryotic organisms and can advantageously be operable linked with the nucleic acid molecule of the present invention as shown in table I, application no. 8, columns 5 and 7 and described herein to achieve an expression in one of said compartments or extracellular.

[2276] for the disclosure of the paragraphs [0266.0.0.7] to [0287.0.0.7] see paragraphs [0266.0.0.0] to [0287.0.0.0] above.

[2277] Accordingly, one embodiment of the invention relates to a vector where the nucleic acid molecule according to the invention is linked operably to regulatory sequences which permit the expression in a prokaryotic or eukaryotic or in a prokaryotic and eukaryotic host. A further preferred embodiment of the invention relates to a vector in which a nucleic acid sequence encoding one of the polypeptides shown in table II, application no. 8, columns 5 and 7 or their homologs is functionally linked to a plastidial targeting sequence. A further preferred embodiment of the invention relates to a vector in which a nucleic acid sequence encoding one of the polypeptides shown in table II, application no. 8, columns 5 and 7 or their homologs is functionally linked to a regulatory sequences which permit the expression in plastids.

[2278] for the disclosure of the paragraphs [0289.0.0.7] to [0296.0.0.7] see paragraphs [0289.0.0.0] to [0296.0.0.0] above.

[2279] Moreover, native polypeptide conferring the increase of the fine chemical in an organism or part thereof can be isolated from cells (e.g., endothelial cells), for example using the antibody of the present invention as described below, in particular, an anti-b1556, anti-b1700, anti-b1704 and/or anti-YLR099C protein antibody or an antibody against polypeptides as shown in table II, application no. 8, columns 5 and 7, which can be produced by standard techniques utilizing the polypeptide of the present invention or fragment thereof, i.e., the polypeptide of this invention. Preferred are monoclonal antibodies.

[2280] for the disclosure of this paragraph see paragraph [0298.0.0.0] above.

[2281] In one embodiment, the present invention relates to a polypeptide having the sequence shown in table II, application no. 8, columns 5 and 7 or as coded by the nucleic acid molecule shown in table I, application no. 8, columns 5 and 7 or functional homologues thereof.

[2282] In one advantageous embodiment, in the method of the present invention the activity of a polypeptide is increased comprising or consisting of the consensus sequence shown in table IV, application no. 8, columns 7 and in one another embodiment, the present invention relates to a polypeptide comprising or consisting of the consensus sequence shown in table IV, application no. 8, column 7 whereby 20 or less, preferably 15 or 10, preferably 9, 8, 7, or 6, more preferred 5 or 4, even more preferred 3, even more preferred 2, even more preferred 1, most preferred 0 of the amino acids positions indicated can be replaced by any amino acid.

[2283] for the disclosure of the paragraphs [0301.0.0.7] to [0304.0.0.7] see paragraphs [0301.0.0.0] to [0304.0.0.0] above.

[2284] In one advantageous embodiment, the method of the present invention comprises the increasing of a polypeptide comprising or consisting of plant or microorganism specific consensus sequences.

In one embodiment, said polypeptide of the invention distinguishes over the sequence shown in table II A and/or II B, application no. 8, columns 5 and 7 by one or more amino acids. In one embodiment, polypeptide distinguishes form the sequence shown in table II A and/or II B, application no. 8, columns 5 and 7 by more than 5, 6, 7, 8 or 9 amino acids, preferably by more than 10, 15, 20, 25 or 30 amino acids, even more preferred are more than 40, 50, or 60 amino acids and, preferably, the sequence of the polypeptide of the invention distinguishes from the sequence shown in table II A and/or II B, application no. 8, columns 5 and 7 by not more than 80% or 70% of the amino acids, preferably not more than 60% or 50%, more preferred not more than 40% or 30%, even more preferred not more than 20% or 10%. In an other embodiment, said polypeptide of the invention does not consist of the sequence shown in table II A and/or II B, application no. 8, columns 5 and 7.

[2285] for the disclosure of this paragraph see paragraph [0306.0.0.0] above.

[2286] In one embodiment, the invention relates to polypeptide conferring an increase in the fine chemical in an organism or part being encoded by the nucleic acid molecule of the invention or used in the process of the invention and having a sequence which distinguishes from the sequence as shown in table II A and/or II B, application no. 8, columns 5 and 7 by one or more amino acids. In another embodiment, said polypeptide of the invention does not consist of the sequence shown in table II A and/or II B, application no. 8, columns 5 and 7. In a further embodiment, said polypeptide of the present invention is less than 100%, 99.999%, 99.99%, 99.9% or 99% identical. In one embodiment, said polypeptide does not consist of the sequence encoded by the nucleic acid molecules shown in table I A and/or I B, application no. 8, columns 5 and 7.

[2287] In one embodiment, the present invention relates to a polypeptide having the activity of the protein as shown in table II A and/or II B, application no. 8, column 3, which distinguishes over the sequence depicted in table II A and/or II B, application no. 8, columns 5 and 7 by one or more amino acids, preferably by more than 5, 6, 7, 8 or 9 amino acids, preferably by more than 10, 15, 20, 25 or 30 amino acids, even more preferred are more than 40, 50, or 60 amino acids but even more preferred by less than 70% of the amino acids, more preferred by less than 50%, even more preferred my less than 30% or 25%, more preferred are 20% or 15%, even more preferred are less than 10%. In a further preferred embodiment the polypeptide of the invention takes the form of a preprotein consisting of a plastidial transitpeptide joint to a polypeptide having the activity of the protein as shown in table II A and/or II B, column 3, from which the transitpeptide is preferably cleaved off upon transport of the preprotein into the organelle for example into the plastid or mitochondria.

[2288] for the disclosure of the paragraphs [0309.0.0.7] to [0311.0.0.7] see paragraphs [0309.0.0.0] to [0311.0.0.0] above.

[2289] A polypeptide of the invention can participate in the process of the present invention. The polypeptide or a portion thereof comprises preferably an amino acid sequence, which is sufficiently homologous to an amino acid sequence shown in table II, application no. 8, columns 5 and 7.

[2290] Further, the polypeptide can have an amino acid sequence which is encoded by a nucleotide sequence which hybridizes, preferably hybridizes under stringent conditions as described above, to a nucleotide sequence of the nucleic acid molecule of the present invention. Accordingly, the polypeptide has an amino acid sequence which is encoded by a nucleotide sequence that is at least about 35%, 40%, 45%, 50%, 55%, 60%, 65% or 70%, preferably at least about 75%, 80%, 85% or 90, and more preferably at least about 91%, 92%, 93%, 94% or 95%, and even more preferably at least about 96%, 97%, 98%, 99% or more homologous to one of the amino acid sequences as shown in table II A and/or II B, application no. 8, columns 5 and 7. The preferred polypeptide of the present invention preferably possesses at least one of the activities according to the invention and described herein. A preferred polypeptide of the present invention includes an amino acid sequence encoded by a nucleotide sequence which hybridizes, preferably hybridizes under stringent conditions, to a nucleotide sequence of table I A and/or I B, application no. 8, columns 5 and 7 or which is homologous thereto, as defined above.

[2291] Accordingly the polypeptide of the present invention can vary from the sequences shown in table II A and/or II B, application no. 8, columns 5 and 7 in amino acid sequence due to natural variation or mutagenesis, as described in detail herein. Accordingly, the polypeptide comprise an amino acid sequence which is at least about 35%, 40%, 45%, 50%, 55%, 60%, 65% or 70%, preferably at least about 75%, 80%, 85% or 90, and more preferably at least about 91%, 92%, 93%, 94% or 95%, and most preferably at least about 96%, 97%, 98%, 99% or more homologous to an entire amino acid sequence shown in table II A and/or II B, application no. 8, columns 5 and 7.

[2292] for the disclosure of this paragraph see paragraph [0315.0.0.0] above.

[2293] Biologically active portions of an polypeptide of the present invention include peptides comprising amino acid sequences derived from the amino acid sequence of the polypeptide of the present invention or used in the process of the present invention, e.g., the amino acid sequence shown in table II, application no. 8, columns 5 and 7 or the amino acid sequence of a protein homologous thereto, which include fewer amino acids than a full length polypeptide of the present invention or used in the process of the present invention or the full length protein which is homologous to an polypeptide of the present invention or used in the process of the present invention depicted herein, and exhibit at least one activity of polypeptide of the present invention or used in the process of the present invention.

[2294] for the disclosure of this paragraph see paragraph [0317.0.0.0] above.

[2295] Manipulation of the nucleic acid molecule of the invention may result in the production of a protein having differences from the wild-type protein as shown in table II, application no. 8, column 3. Differences shall mean at least one amino acid different from the sequences as shown in table II, application no. 8, column 3, preferably at least 2, 3, 4, 5, 6, 7, 8, 9 or 10 amino acids, more preferably at least 15, 20, 25, 30, 35, 40, 45 or 50 amino acids different from the sequences as shown in table II, application no. 8, column 3. These proteins may be improved in efficiency or activity, may be present in greater numbers in the cell than is usual, or may be decreased in efficiency or activity in relation to the wild type protein.

[2296] Any mutagenesis strategies for the polypeptide of the present invention or the polypeptide used in the process of the present invention to result in increasing said activity are not meant to be limiting; variations on these strategies will be readily apparent to one skilled in the art. Using such strategies, and incorporating the mechanisms disclosed herein, the nucleic acid molecule and polypeptide of the invention may be utilized to generate plants or parts thereof, expressing wildtype proteins or mutated proteins of the proteins as shown in table II, application no. 8, column 3. The nucleic acid molecules and polypeptide molecules of the invention are expressed such that the yield, production, and/or efficiency of production of a desired compound is improved.

[2297] for the disclosure of the paragraphs [0320.0.0.7] to [0322.0.0.7] see paragraphs [0320.0.0.0] to [0322.0.0.0] above.

[2298] In one embodiment, a protein (=polypeptide) as shown in table II, application no. 8, column 3 refers to a polypeptide having an amino acid sequence corresponding to the polypeptide of the invention or used in the process of the invention, whereas a “non-inventive protein or polypeptide” or “other polypeptide” refers to a polypeptide having an amino acid sequence corresponding to a protein which is not substantially homologous to a polypeptide of the invention, preferably which is not substantially homologous to a polypeptide or protein as shown in table II, application no. 8, column 3, e.g., a protein which does not confer the activity described herein and which is derived from the same or a different organism.

[2299] for the disclosure of the paragraphs [0324.0.0.7] to [0329.0.0.7] see paragraphs [0324.0.0.0] to [0329.0.0.0] above.

[2300] In an especially preferred embodiment, the polypeptide according to the invention furthermore also does not have the sequences of those proteins, which are encoded by the sequences shown in table II, application no. 8, columns 5 and 7.

[2301] for the disclosure of the paragraphs [0331.0.0.7] to [0346.0.0.7] see paragraphs [0331.0.0.0] to [0346.0.0.0] above.

[2302] Accordingly the present invention relates to any cell transgenic for any nucleic acid characterized as part of the invention, e.g. conferring the increase of the fine chemical in a cell or an organism or a part thereof, e.g. the nucleic acid molecule of the invention, the nucleic acid construct of the invention, the antisense molecule of the invention, the vector of the invention or a nucleic acid molecule encoding the polypeptide of the invention, e.g. encoding a polypeptide having an activity as the protein as shown in table II, application no. 8, column 3. Due to the above mentioned activity the fine chemical content in a cell or an organism is increased. For example, due to modulation or manipulation, the cellular activity is increased preferably in organelles such as plastids or mitochondria, e.g. due to an increased expression or specific activity or specific targeting of the subject matters of the invention in a cell or an organism or a part thereof especially in organelles such as plastids or mitochondria. Transgenic for a polypeptide having a protein or activity means herein that due to modulation or manipulation of the genome, the activity of protein as shown in table II, application no. 8, column 3 or a protein as shown in table II, application no. 8, column 3-like activity is increased in the cell or organism or part thereof especially in organelles such as plastids or mitochondria. Examples are described above in context with the process of the invention.

[2303] for the disclosure of this paragraph see paragraph [0348.0.0.0] above.

[2304] A naturally occurring expression cassette—for example the naturally occurring combination of the promoter of the gene encoding a protein as shown in table II, application no. 8, column 3 with the corresponding encoding gene—becomes a transgenic expression cassette when it is modified by non-natural, synthetic “artificial” methods such as, for example, mutagenization. Such methods have been described (U.S. Pat. No. 5,565,350; WO 00/15815; also see above).

[2305] for the disclosure of the paragraphs [0350.0.0.7] to [0358.0.0.7] and [0359.0.5.7] see paragraphs [0350.0.0.0] to and [0359.0.5.5] above.

[2306] for the disclosure of the paragraphs [0360.0.0.7] to [0362.0.0.7] see paragraphs [0360.0.0.0] to [0362.0.0.0] above.

[2307] for the disclosure of the paragraphs [0363.0.5.7] to [0365.0.0.7] see paragraphs [0363.0.5.5] to [0365.0.5.5] above.

[2308] for the disclosure of the paragraphs [0366.0.0.7] to [0369.0.0.7] see paragraphs [0366.0.0.0] to [0369.0.0.0] above.

[2309] The fermentation broths obtained in this way, containing in particular stearic acid, triglycerides, lipids, oils and/or fats containing stearic acid, normally have a dry matter content of from 7.5 to 25% by weight. The fermentation broth can be processed further. Depending on requirements, the biomass can be separated, such as, for example, by centrifugation, filtration, decantation or a combination of these methods, from the fermentation broth or left completely in it. Afterwards the biomass can be extracted without any further process steps or disrupted and then extracted. If necessary the fermentation broth can be thickened or concentrated by known methods, such as, for example, with the aid of a rotary evaporator, thin-film evaporator, falling film evaporator, by reverse osmosis or by nanofiltration. This concentrated fermentation broth can then be worked up by extraction.

[2310] for the disclosure of this paragraph see paragraph [0371.0.5.5] above. for the disclosure of the paragraphs [0372.0.0.7] to [0376.0.0.7], [0376.1.0.7] and [0377.0.0.7] see paragraphs [0372.0.0.0] to [0376.0.0.0], [0376.1.0.0] and [0377.0.0.0] above.

[2311] In one embodiment, the present invention relates to a method for the identification of a gene product conferring an increase in the fine chemical production in a cell, comprising the following steps:
[2312] (a) contacting e.g. hybridising, the nucleic acid molecules of a sample, e.g. cells, tissues, plants or microorganisms or a nucleic acid library, which can contain a candidate gene encoding a gene product conferring an increase in the fine chemical after expression, with the nucleic acid molecule of the present invention;
[2313] (b) identifying the nucleic acid molecules, which hybridize under relaxed stringent conditions with the nucleic acid molecule of the present invention in particular to the nucleic acid molecule sequence shown in table I, application no. 8, columns 5 and 7, preferably in table I B, application no. 8, columns 5 and 7, and, optionally, isolating the full length cDNA clone or complete genomic clone;
[2314] (c) introducing the candidate nucleic acid molecules in host cells, preferably in a plant cell or a microorganism, appropriate for producing the fine chemical;
[2315] (d) expressing the identified nucleic acid molecules in the host cells;
[2316] (e) assaying the fine chemical level in the host cells; and
[2317] (f) identifying the nucleic acid molecule and its gene product which expression confers an increase in the fine chemical level in the host cell after expression compared to the wild type.

[2318] for the disclosure of the paragraphs [0379.0.0.7] to [0383.0.0.7] see paragraphs [0379.0.0.0] to [0383.0.0.0] above.

[2319] The screen for a gene product or an agonist conferring an increase in the fine chemical production can be performed by growth of an organism for example a microorganism in the presence of growth reducing amounts of an inhibitor of the synthesis of the fine chemical. Better growth, eg higher dividing rate or high dry mass in comparison to the control under such conditions would identify a gene or gene product or an agonist conferring an increase in fine chemical production.

One can think to screen for increased fine chemical production by for example resistance to drugs blocking fine chemical synthesis and looking whether this effect is dependent on the proteins as shown in table II, application no. 8, column 3, eg comparing near identical organisms with low and high activity of the proteins as shown in table II, application no. 8, column 3.

[2320] for the disclosure of the paragraphs [0385.0.0.7] to [0404.0.0.7] see paragraphs [0385.0.0.0] to [0404.0.0.0] above.

[2321] for the disclosure of this paragraph see paragraph [0405.0.5.5] above.

[2322] for the disclosure of the paragraphs [0406.0.0.7] to [0435.0.0.7] see paragraphs [0406.0.0.0] to [0435.0.0.0] above.

[2323] stearic acid, triglycerides, lipids, oils and/or fats containing stearic acid production in Mortierella

The fatty acid production can be analysed as mentioned above. The proteins and nucleic acids can be analysed as mentioned below.

[2324] for the disclosure of the paragraphs [0437.0.0.7] and [0438.0.0.7] see paragraphs [0437.0.0.0] and [0438.0.0.0] above.

[2325] for the disclosure of the paragraphs [0439.0.5.7] and [0440.0.5.7] see paragraphs [0439.0.5.5] and [0440.0.5.5] above.

[2326] for the disclosure of this paragraph see [0441.0.0.0] above.

[2327] for the disclosure of the paragraphs [0442.0.5.7] and [0445.0.5.7] see paragraphs [0442.0.5.5] and [0445.0.5.5] above.

[2328] for the disclosure of the paragraphs [0446.0.0.7] to [0497.0.0.7] see paragraphs [0446.0.0.0] to [0497.0.0.0] above.
[2329] The results of the different plant analyses can be seen from the table, which follows:

TABLE VI

| ORF | Metabolite | Method | Min | Max |
|---|---|---|---|---|
| b1556 | stearic acid (C18:0) | GC | 1.18 | 1.37 |
| b1700 | stearic acid (C18:0) | GC | 1.29 | 2.13 |
| b1704 | stearic acid (C18:0) | GC | 1.25 | 2.53 |
| YLR099C | stearic acid (C18:0) | GC | 1.16 | 1.37 |

[2330] for the disclosure of the paragraphs [0499.0.0.7] and [0500.0.0.7] see paragraphs [0499.0.0.0] and [0500.0.0.0] above.

### Example 15a

### Engineering Ryegrass Plants by Over-Expressing YLR099C from Saccharomyces cerevisiae or Homologs of YLR099C from Other Organisms

[2331] for the disclosure of the paragraphs [0502.0.0.7] to [0508.0.0.7] see paragraphs [0502.0.0.0] to [0508.0.0.0] above.

### Example 15b

### Engineering Soybean Plants by Over-Expressing YLR099C from Saccharomyces cerevisiae or Homologs of YLR099C from Other Organisms

[2332] for the disclosure of the paragraphs [0510.0.0.7] to [0513.0.0.7] see paragraphs [0510.0.0.0] to [0513.0.0.0] above.

### Example 15c

### Engineering Corn Plants by Over-Expressing YLR099C from Saccharomyces cerevisiae or Homologs of YLR099C from Other Organisms

[2333] for the disclosure of the paragraphs [0515.0.0.7] to [0540.0.0.7] see paragraphs [0515.0.0.0] to [0540.0.0.0] above.

### Example 15d

### Engineering Wheat Plants by Over-Expressing YLR099C from Saccharomyces cerevisiae or Homologs of YLR099C from Other Organisms

[2334] for the disclosure of the paragraphs [0542.0.0.7] to [0544.0.0.7] see paragraphs [0542.0.0.0] to [0544.0.0.0] above.

### Example 15e

### Engineering Rapeseed/Canola Plants by Over-Expressing YLR099C from Saccharomyces cerevisiae or Homologs of YLR099C from Other Organisms

[2335] for the disclosure of the paragraphs [0546.0.0.7] to [0549.0.0.7] see paragraphs [0544.0.0.0] to [0549.0.0.0] above.

### Example 15f

### Engineering Alfalfa Plants by Over-Expressing YLR099C from Saccharomyces cerevisiae or Homologs of YLR099C from Other Organisms

[2336] for the disclosure of the paragraphs [0551.0.0.7] to [0554.0.0.7] see paragraphs [0551.0.0.0] to [0554.0.0.0] above.

[2337] %

[2338] for the disclosure of this paragraph see [0554.2.0.0] above.

[2339] for the disclosure of this paragraph see [0555.0.0.0] above.

[2340] for the disclosure of this paragraph see [0001.0.0.0].

[2341] for the disclosure of this paragraph see [0002.0.7.7] above.

[2342] Palmitic acid is a major component for manufacturing of soaps, lubricating oils and waterproofing materials. Furthermore it is used for the synthesis of metallic palmitates. Additional applications are as food additive and in the synthesis of food-grade additives; as a constituent of cosmetic formulations. Palmitic acid is a major component of many natural fats and oils in the form of a glyceryl ester, e.g. palm oil, and in most commercial-grade stearic acid products.

[2343] for the disclosure of the paragraph [0004.0.7.8] see paragraph [0004.0.7.7] above.

[2344] for the disclosure of this paragraph see [0005.0.5.5] above.

[2345] Palmitic acid is as mentioned above the major fat in meat and dairy products.

[2346] Further uses or palmitic acid are as food ingredients raw material for emulsifiers or personal care emulsifier for facial creams and lotions. Palmitic acid is also used in shaving cream formulations, waxes or fruit wax formulations.

[2347] Palmitic acid is also used in shaving cream formulations, waxes or fruit wax formulations.

[2348] for the disclosure of the paragraphs [0009.0.7.8] to [0012.0.7.8] see paragraphs [0009.0.7.7] and [0012.0.7.7] above

[2349] for the disclosure of this paragraph see [0013.0.0.0] above.

[2350] Accordingly, in a first embodiment, the invention relates to a process for the production of a fine chemical, whereby the fine chemical is palmitic acid or tryglycerides, lipids, oils or fats containing palmitic acid. Accordingly, in the present invention, the term “the fine chemical” as used herein relates to “palmitic acid or tryglycerides, lipids, oils or fats containing palmitic acid”. Further, the term “the fine chemicals” as used herein also relates to fine chemicals comprising palmitic acid or tryglycerides, lipids, oils or fats containing palmitic acid.

[2351] In one embodiment, the term “the fine chemical” or “the respective fine chemical” means palmitic acid or tryglycerides, lipids, oils or fats containing palmitic acid. Throughout the specification the term “the fine chemical” or “the respective fine chemical” means palmitic acid or tryglycerides, lipids, oils or fats containing palmitic acid, palmitic acid and its salts, ester, thioester or palmitic acid in free form or bound to other compounds such as triglycerides, glycolipids, phospholipids etc. In a preferred embodiment, the term “the fine chemical” means palmitic acid, in free form or its salts or bound to triglycerides. Triglycerides, lipids, oils, fats or lipid mixture thereof shall mean any triglyceride, lipid, oil and/or fat containing any bound or free palmitic acid for example sphingolipids, phosphoglycerides, lipids, glycolipids such as glycosphingolipids, phospholipids such as phosphatidylethanolamine, phosphatidylcholine, phosphatidylserine, phosphatidylglycerol, phosphatidylinositol or diphosphatidylglycerol, or as monoacylglyceride, diacylglyceride or triacylglyceride or other fatty acid esters such as acetyl-Coenzyme A thioester, which contain further saturated or unsaturated fatty acids in the fatty acid molecule.

In one embodiment, the term “the fine chemical” and the term “the respective fine chemical” mean at least one chemical compound with an activity of the abovementioned fine chemical.

[2352] Accordingly, the present invention relates to a process for the production of palmitic acid, which comprises
[2353] (a) increasing or generating the activity of a protein as shown in table II, application no. 9, column 3 encoded by the nucleic acid sequences as shown in table I, application no. 9, column 5, in an organelle of a microorganism or plant, or
[2354] (b) increasing or generating the activity of a protein as shown in table II, application no. 9, column 3 encoded by the nucleic acid sequences as shown in table I, application no. 9, column 5 in the plastid of a microorganism or plant, or in one or more parts thereof; and
[2355] (b) growing the organism under conditions which permit the production of the fine chemical, thus, palmitic acid or fine chemicals comprising palmitic acid, in said organism or in the culture medium surrounding the organism.

[2356] /

[2357] In another embodiment the present invention is related to a process for the production of palmitic acid, which comprises
[2358] (a) increasing or generating the activity of a protein as shown in table II, application no. 9, column 3 encoded by the nucleic acid sequences as shown in table I, application no. 9, column 5, in an organelle of a non-human organism, or
[2359] (b) increasing or generating the activity of a protein as shown in table II, application no. 9, column 3 encoded by the nucleic acid sequences as shown in table I, application no. 9, column 5, which are joined to a nucleic acid sequence encoding a transit peptide in a non-human organism, or in one or more parts thereof; or
[2360] (c) increasing or generating the activity of a protein as shown in table II, application no. 9, column 3 encoded by the nucleic acid sequences as shown in table I, application no. 9, column 5, which are joined to a nucleic acid sequence encoding chloroplast localization sequence, in a non-human organism, or in one or more parts thereof, and
[2361] (d) growing the organism under conditions which permit the production of palmitic acid in said organism.

[2362] In another embodiment, the present invention relates to a process for the production of palmitic acid, which comprises
[2363] (a) increasing or generating the activity of a protein as shown in table II, application no. 9, column 3 encoded by the nucleic acid sequences as shown in table I, application no. 9, column 5, in an organelle of a microorganism or plant through the transformation of the organelle, or
[2364] (b) increasing or generating the activity of a protein as shown in table II, application no. 9, column 3 encoded by the nucleic acid sequences as shown in table I, application no. 9, column 5 in the plastid of a microorganism or plant, or in one or more parts thereof through the transformation of the plastids; and
[2365] (c) growing the organism under conditions which permit the production of the fine chemical, thus, palmitic acid or fine chemicals comprising palmitic acid, in said organism or in the culture medium surrounding the organism.

[2366] Advantageously the activity of the protein as shown in table II, application no. 9, column 3 encoded by the nucleic acid sequences as shown in table I, application no. 9, column 5 is increased or generated in the abovementioned process in the plastid of a microorganism or plant.

[2367] for the disclosure of the paragraphs [0019.0.0.8] to [0024.0.0.8] see paragraphs [0019.0.0.0] and [0024.0.0.0] above.

[2368] Even more preferred nucleic acid sequences are encoding transit peptides as disclosed by von Heijne et al. [Plant Molecular Biology Reporter, Vol. 9 (2), 1991: 104-126], which are hereby incorporated by reference. Table V shows some examples of the transit peptide sequences disclosed by von Heijne et al. According to the disclosure of the invention especially in the examples the skilled worker is able to link other nucleic acid sequences disclosed by von Heijne et al. to the nucleic acid sequences shown in table I, application no. 9, columns 5 and 7. Most preferred nucleic acid sequences encoding transit peptides are derived from the genus Spinacia such as chloroplast 30S ribosomal protein PSrp-1, root acyl carrier protein II, acyl carrier protein, ATP synthase: γ subunit, ATP synthase: δ subunit, cytochrom f, ferredoxin I, ferredoxin NADP oxidoreductase (=FNR), nitrite reductase, phosphoribulokinase, plastocyanin or carbonic anhydrase. The skilled worker will recognize that various other nucleic acid sequences encoding transit peptides can easily isolated from plastid-localized proteins, which are expressed from nuclear genes as precursors and are then targeted to plastids. Such transit peptides encoding sequences can be used for the construction of other expression constructs. The transit peptides advantageously used in the inventive process and which are part of the inventive nucleic acid sequences and proteins are typically 20 to 120 amino acids, preferably 25 to 110, 30 to 100 or 35 to 90 amino acids, more preferably 40 to 85 amino acids and most preferably 45 to 80 amino acids in length and functions post-translationally to direct the protein to the plastid preferably to the chloroplast. The nucleic acid sequences encoding such transit peptides are localized upstream of nucleic acid sequence encoding the mature protein. For the correct molecular joining of the transit peptide encoding nucleic acid and the nucleic acid encoding the protein to be targeted it is sometimes necessary to introduce additional base pairs at the joining position, which forms restriction enzyme recognition sequences useful for the molecular joining of the different nucleic acid molecules. This procedure might lead to very few additional amino acids at the N-terminal of the mature imported protein, which usually and preferably do not interfere with the protein function. In any case, the additional base pairs at the joining position which forms restriction enzyme recognition sequences have to be chosen with care, in order to avoid the formation of stop codons or codons which encode amino acids with a strong influence on protein folding, like e.g. proline. It is preferred that such additional codons encode small n.d. structural flexible amino acids such as glycine or alanine.

[2369] As mentioned above the nucleic acid sequences coding for the proteins as shown in table II, application no. 9, column 3 and its homologs as disclosed in table I, application no. 9, columns 5 and 7 are joined to a nucleic acid sequence encoding a transit peptide, This nucleic acid sequence encoding a transit peptide ensures transport of the protein to the plastid. The nucleic acid sequence of the gene to be ex pressed and the nucleic acid sequence encoding the transit peptide are operably linked. Therefore the transit peptide is fused in frame to the nucleic acid sequence coding for proteins as shown in table II, application no. 9, column 3 and its homologs as disclosed in table I, application no. 9, columns 5 and 7.

[2370] for the disclosure of the paragraphs [0027.0.0.8] to [0029.0.0.8] see paragraphs [0027.0.0.0] and [0029.0.0.0] above.

[2371] Alternatively, nucleic acid sequences coding for the transit peptides may be chemically synthesized either in part or wholly according to structure of transit peptide sequences disclosed in the prior art. Said natural or chemically synthesized sequences can be directly linked to the sequences encoding the mature protein or via a linker nucleic acid sequence, which may be typically less than 500 base pairs, preferably less than 450, 400, 350, 300, 250 or 200 base pairs, more preferably less than 150, 100, 90, 80, 70, 60, 50, 40 or 30 base pairs and most preferably less than 25, 20, 15, 12, 9, 6 or 3 base pairs in length and are in frame to the coding sequence. Furthermore favorable nucleic acid sequences encoding transit peptides may comprise sequences derived from more than one biological and/or chemical source and may include a nucleic acid sequence derived from the amino-terminal region of the mature protein, which in its native state is linked to the transit peptide. In a preferred embodiment of the invention said amino-terminal region of the mature protein is typically less than 150 amino acids, preferably less than 140, 130, 120, 110, 100 or 90 amino acids, more preferably less than 80, 70, 60, 50, 40, 35, 30, 25 or 20 amino acids and most preferably less than 19, 18, 17, 16, 15, 14, 13, 12, 11 or 10 amino acids in length. But even shorter or longer stretches are also possible. In addition target sequences, which facilitate the transport of proteins to other cell compartments such as the vacuole, endoplasmic reticulum, Golgi complex, glyoxysomes, peroxisomes or mitochondria may be also part of the inventive nucleic acid sequence. The proteins translated from said inventive nucleic acid sequences are a kind of fusion proteins that means the nucleic acid sequences encoding the transit peptide for example the ones shown in table V, preferably the last one of the table are joint to the nucleic acid sequences shown in table I, application no. 9, columns 5 and 7. The person skilled in the art is able to join said sequences in a functional manner. Advantageously the transit peptide part is cleaved off from the protein part shown in table II, application no. 9, columns 5 and 7 during the transport preferably into the plastids. All products of the cleavage of the preferred transit peptide shown in the last line of table V have preferably the N-terminal amino acid sequences QIA CSS or QIA EFQLTT in front of the start methionine of the protein mentioned in table II, application no. 9, columns 5 and 7. Other short amino acid sequences of an range of 1 to 20 amino acids preferable 2 to 15 amino acids, more preferable 3 to 10 amino acids most preferably 4 to 8 amino acids are also possible in front of the start methionine of the protein mentioned in table II, application no. 9, columns 5 and 7. In case of the amino acid sequence QIA CSS the three amino acids in front of the start methionine are stemming from the LIC (=ligatation independent cloning) cassette. Said short amino acid sequence is preferred in the case of the expression of E. coli genes. In case of the amino acid sequence QIA EFQLTT the six amino acids in front of the start methionine are stemming from the LIC cassette. Said short amino acid sequence is preferred in the case of the expression of S. cerevisiae genes. The skilled worker knows that other short sequences are also useful in the expression of the genes mentioned in table I, application no. 9, columns 5 and 7. Furthermore the skilled worker is aware of the fact that there is not a need for such short sequences in the expression of the genes.

[2372] Table V: Examples of transit peptides disclosed by von Heijne et al. for the disclosure of Table V see paragraph [0030.2.0.0] above.

[2373] Alternatively to the targeting of the sequences shown in table II, application no. 9, columns 5 and 7 preferably of sequences in general encoded in the nucleus with the aid of the targeting sequences mentioned for example in table V alone or in combination with other targeting sequences preferably into the plastids, the nucleic acids of the invention can directly introduced into the plastidal genome. Therefore in a preferred embodiment the nucleic acid sequences shown in table I, application no. 9, columns 5 and 7 are directly introduced and expressed in plastids.

The term “introduced” in the context of this specification shall mean the insertion of a nucleic acid sequence into the organism by means of a “transfection”, “transduction” or preferably by “transformation”.
A plastid, such as a chloroplast, has been “transformed” by an exogenous (preferably foreign) nucleic acid sequence if nucleic acid sequence has been introduced into the plastid that means that this sequence has crossed the membrane or the membranes of the plastid. The foreign DNA may be integrated (covalently linked) into plastid DNA making up the genome of the plastid, or it may remain unintegrated (e.g., by including a chloroplast origin of replication). “Stably” integrated DNA sequences are those, which are inherited through plastid replication, thereby transferring new plastids, with the features of the integrated DNA sequence to the progeny.

[2374] for the disclosure of the paragraphs [0030.2.0.8] and [0030.3.0.8] see paragraphs [0030.2.0.0] and [0030.3.0.0] above.

[2375] For the inventive process it is of great advantage that by transforming the plastids the intraspecies specific transgene flow is blocked, because a lot of species such as corn, cotton and rice have a strict maternal inheritance of plastids. By placing the genes specified in table I, application no. 9, columns 5 and 7 or active fragments thereof in the plastids of plants, these genes will not be present in the pollen of said plants.

A further preferred embodiment of the invention relates to the use of so called “chloroplast localization sequences”, in which a first RNA sequence or molecule is capable of transporting or “chaperoning” a second RNA sequence, such as a RNA sequence transcribed from the sequences depicted in table I, application no. 9, columns 5 and 7 or a sequence encoding a protein, as depicted in table II, application no. 9, columns 5 and 7, from an external environment inside a cell or outside a plastid into a chloroplast. In one embodiment the chloroplast localization signal is substantially similar or complementary to a complete or intact viroid sequence. The chloroplast localization signal may be encoded by a DNA sequence, which is transcribed into the chloroplast localization RNA. The term “viroid” refers to a naturally occurring single stranded RNA molecule (Flores, C R Acad Sci III. 2001 October; 324(10): 943-52). Viroids usually contain about 200-500 nucleotides and generally exist as circular molecules. Examples of viroids that contain chloroplast localization signals include but are not limited to ASBVd, PLMVd, CChMVd and ELVd. The viroid sequence or a functional part of it can be fused to the sequences depicted in table I, application no. 9, columns 5 and 7 or a sequence encoding a protein, as depicted in table II, application no. 9, columns 5 and 7 in such a manner that the viroid sequence transports a sequence transcribed from a sequence as depicted in table I, application no. 9, columns 5 and 7 or a sequence encoding a protein as depicted in table II, application no. 9, columns 5 and 7 into the chloroplasts. A preferred embodiment uses a modified ASBVd (Navarro et al., Virology. 2000 Mar. 1; 268(1): 218-25).
In a further specific embodiment the protein to be expressed in the plastids such as the proteins depicted in table II, application no. 9, columns 5 and 7 are encoded by different nucleic acids. Such a method is disclosed in WO 2004/040973, which shall be incorporated by reference. WO 2004/040973 teaches a method, which relates to the translocation of an RNA corresponding to a gene or gene fragment into the chloroplast by means of a chloroplast localization sequence. The genes, which should be expressed in the plant or plants cells, are split into nucleic acid fragments, which are introduced into different compartments in the plant e.g. the nucleus, the plastids and/or mitochondria. Additionally plant cells are described in which the chloroplast contains a ribozyme fused at one end to an RNA encoding a fragment of a protein used in the inventive process such that the ribozyme can trans-splice the translocated fusion RNA to the RNA encoding the gene fragment to form and as the case may be reunite the nucleic acid fragments to an intact mRNA encoding a functional protein for example as disclosed in table II, application no. 9, columns 5 and 7.

[2376] In a preferred embodiment of the invention the nucleic acid sequences as shown in table I, application no. 9, columns 5 and 7 used in the inventive process are transformed into plastids, which are metabolical active. Those plastids should preferably maintain at a high copy number in the plant or plant tissue of interest, most preferably the chloroplasts found in green plant tissues, such as leaves or cotyledons or in seeds.

[2377] For a good expression in the plastids the nucleic acid sequences as shown in table I, application no. 9, columns 5 and 7 are introduced into an expression cassette using a preferably a promoter and terminator, which are active in plastids preferably a chloroplast promoter. Examples of such promoters include the psbA promoter from the gene from spinach or pea, the rbcL promoter, and the atpB promoter from corn.

[2378] for the disclosure of the paragraphs [0031.0.0.8] and [0032.0.0.8] see paragraphs [0031.0.0.0] and [0032.0.0.0] above.

[2379] Advantageously the process for the production of the fine chemical leads to an enhanced production of the fine chemical. The terms “enhanced” or “increase” mean at least a 10%, 20%, 30%, 40% or 50%, preferably at least 60%, 70%, 80%, 90% or 100%, more preferably 150%, 200%, 300%, 400% or 500% higher production of the fine chemical in comparison to the reference as defined below, e.g. that means in comparison to an organism without the aforementioned modification of the activity of a protein as shown in table II, application no. 9, column 3. Preferably the modification of the activity of a protein as shown in table II, application no. 9, column 3 or their combination can be achieved by joining the protein to a transit peptide.

[2380] Surprisingly it was found, that the transgenic expression of the Saccharomyces cerevisiae protein as shown in table II, application no. 9, column 3 in plastids of a plant such as Arabidopsis thaliana for example through the linkage to at least one targeting sequence for example as mentioned in table V conferred an increase in the fine chemical content of the transformed plants.

[2381] for the disclosure of this paragraph see paragraph [0035.0.0.0] above.

[2382] The sequence of b0403 (Accession numberPIR:C64769) from Escherichia coli has been published in Blattner et al., Science 277 (5331), 1453-1474 (1997), and its activity is being defined as “maltodextrin glucosidase”. Accordingly, in one embodiment, the process of the present invention comprises the use of a “maltodextrin glucosidase” or its homolog, e.g. as shown herein, for the production of the fine chemical, meaning of palmitic acid and/or tryglycerides, lipids, oils and/or fats containing palmitic acid, in particular for increasing the amount of palmitic acid in free or bound form in an organism or a part thereof, as mentioned. In one embodiment, in the process of the present invention the activity of a b0403 protein is increased or generated, e.g. from Escherichia coli or a homolog thereof, preferably linked at least to one transit peptide as mentioned for example in table V.

In another embodiment, in the process of the present invention the activity of a b0403 protein is increased or generated in a subcellular compartment of the organism or organism cell such as in an organelle like a plastid or mitochondria.
The sequence of b0488 (Accession number NP_{—}415021) from Escherichia coli has been published in Blattner et al., Science 277 (5331), 1453-1474 (1997). Accordingly, in one embodiment, the process of the present invention comprises the use of its homolog, e.g. as shown herein, for the production of the fine chemical, meaning of palmitic acid and/or tryglycerides, lipids, oils and/or fats containing palmitic acid, in particular for increasing the amount of palmitic acid in free or bound form in an organism or a part thereof, as mentioned. In one embodiment, in the process of the present invention the activity of a b0488 protein is increased or generated, e.g. from Escherichia coli or a homolog thereof, preferably linked at least to one transit peptide as mentioned for example in table V.
In another embodiment, in the process of the present invention the activity of a b0488 protein is increased or generated in a subcellular compartment of the organism or organism cell such as in an organelle like a plastid or mitochondria.
The sequence of b1095 (Accession number NP_{—}415613) from Escherichia coli has been published in Blattner et al., Science 277 (5331), 1453-1474 (1997), and its activity is being defined as “3-oxoacyl-[acyl-carrier-protein] synthase II”. Accordingly, in one embodiment, the process of the present invention comprises the use of a “3-oxoacyl[acyl-carrier-protein] synthase II” or its homolog, e.g. as shown herein, for the production of the fine chemical, meaning of palmitic acid and/or tryglycerides, lipids, oils and/or fats containing palmitic acid, in particular for increasing the amount of palmitic acid in free or bound form in an organism or a part thereof, as mentioned. In one embodiment, in the process of the present invention the activity of a b1095 protein is increased or generated, e.g. from Escherichia coli or a homolog thereof, preferably linked at least to one transit peptide as mentioned for example in table V.
In another embodiment, in the process of the present invention the activity of a b1095 protein is increased or generated in a subcellular compartment of the organism or organism cell such as in an organelle like a plastid or mitochondria.
The sequence of b1410 (Accession number NP 415928) from Escherichia coli has been published in Blattner et al., Science 277 (5331), 1453-1474 (1997), and its activity is being defined as “putative methylase with S-adenosyl-L-methionine-dependent methyltransferase domain and alpha/beta-hydrolase domain”. Accordingly, in one embodiment, the process of the present invention comprises the use of a “putative methylase with S-adenosyl-L-methionine-dependent methyltransferase domain and alpha/beta-hydrolase domain” or its homolog, e.g. as shown herein, for the production of the fine chemical, meaning of palmitic acid and/or tryglycerides, lipids, oils and/or fats containing palmitic acid, in particular for increasing the amount of palmitic acid in free or bound form in an organism or a part thereof, as mentioned. In one embodiment, in the process of the present invention the activity of a b1410 protein is increased or generated, e.g. from Escherichia coli or a homolog thereof, preferably linked at least to one transit peptide as mentioned for example in table V.
In another embodiment, in the process of the present invention the activity of a b1410 protein is increased or generated in a subcellular compartment of the organism or organism cell such as in an organelle like a plastid or mitochondria.
The sequence of b1627 (Accession number: NP_{—}416144) from Escherichia coli has been published in Blattner et al., Science 277 (5331), 1453-1474 (1997), and its activity is being defined as “putative oxidoreductase, inner membrane protein”. Accordingly, in one embodiment, the process of the present invention comprises the use of a “putative oxidoreductase, inner membrane protein” or its homolog, e.g. as shown herein, for the production of the fine chemical, meaning of palmitic acid and/or tryglycerides, lipids, oils and/or fats containing palmitic acid, in particular for increasing the amount of palmitic acid in free or bound form in an organism or a part thereof, as mentioned. In one embodiment, in the process of the present invention the activity of a b1627 protein is increased or generated, e.g. from Escherichia coli or a homolog thereof, preferably linked at least to one transit peptide as mentioned for example in table V.
In another embodiment, in the process of the present invention the activity of a b1627 protein is increased or generated in a subcellular compartment of the organism or organism cell such as in an organelle like a plastid or mitochondria.
The sequence of b1758 (Accession number NP 416272) from Escherichia coli has been published in Blattner et al., Science 277 (5331), 1453-1474 (1997), and its activity is being defined as “putative cytochrome oxidase”. Accordingly, in one embodiment, the process of the present invention comprises the use of a “putative cytochrome oxidase” or its homolog, e.g. as shown herein, for the production of the fine chemical, meaning of palmitic acid and/or tryglycerides, lipids, oils and/or fats containing palmitic acid, in particular for increasing the amount of palmitic acid in free or bound form in an organism or a part thereof, as mentioned. In one embodiment, in the process of the present invention the activity of a b1758 protein is increased or generated, e.g. from Escherichia coli or a homolog thereof, preferably linked at least to one transit peptide as mentioned for example in table V.
In another embodiment, in the process of the present invention the activity of a b1758 protein is increased or generated in a subcellular compartment of the organism or organism cell such as in an organelle like a plastid or mitochondria.
The sequence of b1980 (Accession number F64962) from Escherichia coli has been published in Blattner et al., Science 277 (5331), 1453-1474 (1997), and its activity is being defined as “putative transport protein”. Accordingly, in one embodiment, the process of the present invention comprises the use of a “putative transport protein” or its homolog, e.g. as shown herein, for the production of the fine chemical, meaning of palmitic acid and/or tryglycerides, lipids, oils and/or fats containing palmitic acid, in particular for increasing the amount of palmitic acid in free or bound form in an organism or a part thereof, as mentioned. In one embodiment, in the process of the present invention the activity of a b1980 protein is increased or generated, e.g. from Escherichia coli or a homolog thereof, preferably linked at least to one transit peptide as mentioned for example in table V.
In another embodiment, in the process of the present invention the activity of a b1980 protein is increased or generated in a subcellular compartment of the organism or organism cell such as in an organelle like a plastid or mitochondria.
The sequence of b2066 (Accession number NP_{—}416570) from Escherichia coli has been published in Blattner et al., Science 277 (5331), 1453-1474 (1997), and its activity is being defined as “uridine/cytidine kinase”. Accordingly, in one embodiment, the process of the present invention comprises the use of a “uridine/cytidine kinase” or its homolog, e.g. as shown herein, for the production of the fine chemical, meaning of palmitic acid and/or tryglycerides, lipids, oils and/or fats containing palmitic acid, in particular for increasing the amount of palmitic acid in free or bound form in an organism or a part thereof, as mentioned. In one embodiment, in the process of the present invention the activity of a b2066 protein is increased or generated, e.g. from Escherichia coli or a homolog thereof, preferably linked at least to one transit peptide as mentioned for example in table V.
In another embodiment, in the process of the present invention the activity of a b2066 protein is increased or generated in a subcellular compartment of the organism or organism cell such as in an organelle like a plastid or mitochondria.
The sequence of b2223 (Accession number NP_{—}416727) from Escherichia coli has been published in Blattner et al., Science 277 (5331), 1453-1474 (1997), and its activity is being defined as “short chain fatty acid transporter”. Accordingly, in one embodiment, the process of the present invention comprises the use of a “short chain fatty acid transporter” or its homolog, e.g. as shown herein, for the production of the fine chemical, meaning of palmitic acid and/or tryglycerides, lipids, oils and/or fats containing palmitic acid, in particular for increasing the amount of palmitic acid in free or bound form in an organism or a part thereof, as mentioned. In one embodiment, in the process of the present invention the activity of a b2223 protein is increased or generated, e.g. from Escherichia coli or a homolog thereof, preferably linked at least to one transit peptide as mentioned for example in table V.
In another embodiment, in the process of the present invention the activity of a b2223 protein is increased or generated in a subcellular compartment of the organism or organism cell such as in an organelle like a plastid or mitochondria.
The sequence of YLR099C (Accession number NP_{—}013200 NP_{—}014158) from Saccharomyces cerevisiae has been published in Goffeau et al., Science 274 (5287), 546-547, 1996, and its activity is being defined as “putative lipase”. Accordingly, in one embodiment, the process of the present invention comprises the use of a “putative lipase” or its homolog, e.g. as shown herein, for the production of the fine chemical, meaning of palmitic acid and/or tryglycerides, lipids, oils and/or fats containing palmitic acid, in particular for increasing the amount of palmitic acid in free or bound form in an organism or a part thereof, as mentioned. In one embodiment, in the process of the present invention the activity of a YLR099C protein is increased or generated, e.g. from Saccharomyces cerevisiae or a homolog thereof, preferably linked at least to one transit peptide as mentioned for example in table V.
In another embodiment, in the process of the present invention the activity of an YLR099C protein is increased or generated in a subcellular compartment of the organism or organism cell such as in an organelle like a plastid or mitochondria.
The sequence of YPR035W (Accession number NP_{—}015360) from Saccharomyces cerevisiae has been published in Goffeau et al., Science 274 (5287), 546-547, 1996, and its activity is being defined as “glutamine synthetase”. Accordingly, in one embodiment, the process of the present invention comprises the use of a “glutamine synthetase” or its homolog, e.g. as shown herein, for the production of the fine chemical, meaning of palmitic acid and/or tryglycerides, lipids, oils and/or fats containing palmitic acid, in particular for increasing the amount of palmitic acid in free or bound form in an organism or a part thereof, as mentioned. In one embodiment, in the process of the present invention the activity of a YPR035W protein is increased or generated, e.g. from Saccharomyces cerevisiae or a homolog thereof, preferably linked at least to one transit peptide as mentioned for example in table V.
In another embodiment, in the process of the present invention the activity of an YPR035W protein is increased or generated in a subcellular compartment of the organism or organism cell such as in an organelle like a plastid or mitochondria.

[2383] In one embodiment, the homolog of the YLR099C or YPR035W, is a homolog having said activity and being derived from Eukaryot. In one embodiment, the homolog of the b0403, b0488, b1410, b1627, b1758, b1980, b2066, b2223 and/or b1095 is a homolog having said activity and being derived from bacteria. In one embodiment, the homolog of the YLR099C or YPR035W is a homolog having said activity and being derived from Fungi. In one embodiment, the homolog of the b0403, b0488, b1410, b1627, b1758, b1980, b2066, b2223 and/or b1095 is a homolog having said activity and being derived from Proteobacteria. In one embodiment, the homolog of the YLR099C or YPR035W is a homolog having said activity and being derived from Ascomycota. In one embodiment, the homolog of the b0403, b0488, b1410, b1627, b1758, b1980, b2066, b2223 and/or b1095 is a homolog having said activity and being derived from Gammaproteobacteria. In one embodiment, the homolog of the YLR099C or YPR035W is a homolog having said activity and being derived from Saccharomycotina. In one embodiment, the homolog of the b0403, b0488, b1410, b1627, b1758, b1980, b2066, b2223 and/or b1095 is a homolog having said activity and being derived from Enterobacteriales. In one embodiment, the homolog of the YLR099C or YPR035W is a homolog having said activity and being derived from Saccharomycetes. In one embodiment, the homolog of the b0403, b0488, b1410, b1627, b1758, b1980, b2066, b2223 and/or b1095 is a homolog having said activity and being derived from Enterobacteriaceae. In one embodiment, the homolog of the YLR099C or YPR035W is a homolog having said activity and being derived from Saccharomycetales. In one embodiment, the homolog of the b0403, b0488, b1410, b1627, b1758, b1980, b2066, b2223 and/or b1095 is a homolog having said activity and being derived from Escherichia, preferably from Escherichia coli. In one embodiment, the homolog of the YLR099C or YPR035W is a homolog having said activity and being derived from Saccharomycetaceae. In one embodiment, the homolog of the YLR099C or YPR035W is a homolog having said activity and being derived from Saccharomycetes, preferably from Saccharomyces cerevisiae.

[2384] for the disclosure of this paragraph see paragraph [0038.0.0.0] above.

[2385] In accordance with the invention, a protein or polypeptide has the “activity of an protein as shown in table II, application no. 9, column 3” if its de novo activity, or its increased expression directly or indirectly leads to an increased in the fine chemical level in the organism or a part thereof, preferably in a cell of said organism, more preferably in an organelle such as a plastid or mitochondria of said organism and the protein has the above mentioned activities of a protein as shown in table II, application no. 9, column 3, preferably in the event the nucleic acid sequences encoding said proteins is functionally joined to the nucleic acid sequence of a transit peptide. Throughout the specification the activity or preferably the biological activity of such a protein or polypeptide or an nucleic acid molecule or sequence encoding such protein or polypeptide is identical or similar if it still has the biological or enzymatic activity of a protein as shown in table II, application no. 9, column 3, or which has at least 10% of the original enzymatic activity, preferably 20%, particularly preferably 30%, most particularly preferably 40% in comparison to a protein as shown in table II, application no. 7, column 3 of Saccharomyces cerevisiae.

[2386] for the disclosure of the paragraphs [0040.0.0.8] to [0047.0.0.8] see paragraphs [0040.0.0.0] to [0047.0.0.0] above.

[2387] Preferably, the reference, control or wild type differs form the subject of the present invention only in the cellular activity, preferably of the plastidial activity of the polypeptide of the invention, e.g. as result of an increase in the level of the nucleic acid molecule of the present invention or an increase of the specific activity of the polypeptide of the invention, e.g. by or in the expression level or activity of an protein having the activity of a protein as shown in table II, application no. 9, column 3 its biochemical or genetical causes and the increased amount of the fine chemical.

[2388] for the disclosure of the paragraphs [0049.0.0.8] to [0051.0.0.8] see paragraphs [0049.0.0.0] to [0051.0.0.0] above.

[2389] For example, the molecule number or the specific activity of the polypeptide or the nucleic acid molecule may be increased. Larger amounts of the fine chemical can be produced if the polypeptide or the nucleic acid of the invention is expressed de novo in an organism lacking the activity of said protein, preferably the nucleic acid molecules as mentioned in table I, application no. 9, columns 5 and 7 alone or preferably in combination with a transit peptide for example as mentioned in table V or in another embodiment by introducing said nucleic acid molecules into an organelle such as an plastid or mitochondria in the transgenic organism. However, it is also possible to modify the expression of the gene which is naturally present in the organisms, for example by integrating a nucleic acid sequence, encoding a plastidic targeting sequence in front (5 prime) of the coding sequence, leading to a functional preprotein, which is directed for example to the plastids.

[2390] for the disclosure of the paragraphs [0053.0.0.8] to [0058.0.0.8] see paragraphs [0053.0.0.0] to [0058.0.0.0] above.

[2391] In case the activity of the Escherichia coli protein b0403 or its homologs, e.g. a “maltodextrin glucosidase” is increased advantageously in an organelle such as a plastid or mitochondria, preferably, in one embodiment an increase of the fine chemical, preferably of palmitic acid and/or tryglycerides, lipids, oils and/or fats containing palmitic acid between 21% and 40% or more is conferred.

In case the activity of the Escherichia coli protein b0488 or its homologs is increased advantageously in an organelle such as a plastid or mitochondria, preferably, in one embodiment an increase of the fine chemical, preferably of palmitic acid and/or tryglycerides, lipids, oils and/or fats containing palmitic acid between 16% and 43% or more is conferred.
In case the activity of the Escherichia coli protein b1095 or its homologs, e.g. a “3-oxoacyl-[acyl-carrier-protein] synthase II” is increased advantageously in an organelle such as a plastid or mitochondria, preferably, in one embodiment an increase of the fine chemical, preferably of palmitic acid and/or tryglycerides, lipids, oils and/or fats containing palmitic acid between 16% and 47% or more is conferred.
In case the activity of the Escherichia coli protein b1410 or its homologs, e.g. a “putative methylase with S-adenosyl-L-methionine-dependent methyltransferase domain and alpha/beta-hydrolase domain” is increased advantageously in an organelle such as a plastid or mitochondria, preferably, in one embodiment an increase of the fine chemical, preferably of palmitic acid and/or tryglycerides, lipids, oils and/or fats containing palmitic acid between 28% and 41% or more is conferred.
In case the activity of the Escherichia coli protein b1627 or its homologs, e.g. a “putative oxidoreductase, inner membrane protein” is increased advantageously in an organelle such as a plastid or mitochondria, preferably, in one embodiment an increase of the fine chemical, preferably of palmitic acid and/or tryglycerides, lipids, oils and/or fats containing palmitic acid between 16% and 24% or more is conferred.
In case the activity of the Escherichia coli protein b1758 or its homologs, e.g. a “putative cytochrome oxidase” is increased advantageously in an organelle such as a plastid or mitochondria, preferably, in one embodiment an increase of the fine chemical, preferably of palmitic acid and/or tryglycerides, lipids, oils and/or fats containing palmitic acid between 16% and 29% or more is conferred.
In case the activity of the Escherichia coli protein b1980 or its homologs, e.g. a “putative transport protein” is increased advantageously in an organelle such as a plastid or mitochondria, preferably, in one embodiment an increase of the fine chemical, preferably of palmitic acid and/or tryglycerides, lipids, oils and/or fats containing palmitic acid between 16% and 33% or more is conferred.
In case the activity of the Escherichia coli protein b2066 or its homologs, e.g. a “uridine/cytidine kinase” is increased advantageously in an organelle such as a plastid or mitochondria, preferably, in one embodiment an increase of the fine chemical, preferably of palmitic acid and/or tryglycerides, lipids, oils and/or fats containing palmitic acid between 19% and 46% or more is conferred.
In case the activity of the Escherichia coli protein b2233 or its homologs, e.g. a “short chain fatty acid transporter” is increased advantageously in an organelle such as a plastid or mitochondria, preferably, in one embodiment an increase of the fine chemical, preferably of palmitic acid and/or tryglycerides, lipids, oils and/or fats containing palmitic acid between 17% and 89% or more is conferred.
In case the activity of the Saccharomyces cerevisiae protein YLR099C or its homologs, e.g. a putative lipase” is increased advantageously in an organelle such as a plastid or mitochondria, preferably, in one embodiment an increase of the fine chemical, preferably of palmitic acid and/or tryglycerides, lipids, oils and/or fats containing palmitic acid between 15% and 50% or more is conferred.
In case the activity of the Saccharomyces cerevisiae protein YPR035W or its homologs, e.g. a “glutamine synthetase” is increased advantageously in an organelle such as a plastid or mitochondria, preferably, in one embodiment an increase of the fine chemical, preferably of palmitic acid and/or tryglycerides, lipids, oils and/or fats containing palmitic acid between 25% and 60% or more is conferred.

[2392] In case the activity of the Escherichia coli proteins b0403, b0488, b1410, b1627, b1758, b1980, b2066, b2223 or b1095 or their homologs,” are increased advantageously in an organelle such as a plastid or mitochondria, preferably an increase of the fine chemical palmitic acid and/or tryglycerides, lipids, oils and/or fats containing palmitic acid is conferred.

In case the activity of the Saccharomyces cerevisiae protein YLR099C or YPR035W or its homologs is increased advantageously in an organelle such as a plastid or mitochondria, preferably an increase of the fine chemical palmitic acid and/or tryglycerides, lipids, oils and/or fats containing palmitic acid is conferred.

[2393] for the disclosure of the paragraphs [0061.0.0.8] and [0062.0.0.8] see paragraphs [0061.0.0.0] and [0062.0.0.0] above.

[2394] A protein having an activity conferring an increase in the amount or level of the fine chemical, preferably upon targeting to the plastids preferably has the structure of the polypeptide described herein, in particular of the polypeptides comprising the consensus sequence shown in table IV, application no. 9, column 7 or of the polypeptide as shown in the amino acid sequences as disclosed in table II, application no. 9, columns 5 and 7 or the functional homologues thereof as described herein, or is encoded by the nucleic acid molecule characterized herein or the nucleic acid molecule according to the invention, for example by the nucleic acid molecule as shown in table I, application no. 9, columns 5 and 7 or its herein described functional homologues and has the herein mentioned activity.

[2395] For the purposes of the present invention, the term “palmitic acid” also encompasses the corresponding salts, such as, for example, the potassium or sodium salts of palmitic acid or the salts of palmitic acid with amines such as diethylamine as well as tryglycerides, lipids, oils and/or fats containing palmitic acid.

[2396] for the disclosure of the paragraphs [0065.0.0.8] and [0066.0.0.8] see paragraphs [0065.0.0.0] and [0066.0.0.0] above.

[2397] In one embodiment, the process of the present invention comprises one or more of the following steps
[2398] a) stabilizing a protein conferring the increased expression of a protein encoded by the nucleic acid molecule of the invention or of the polypeptide of the invention, e.g. of a polypeptide having the activity of a protein as indicated in table II, application no. 9, columns 5 and 7 or its homologs activity having herein-mentioned palmitic acid increasing activity; and/or
[2399] b) stabilizing a mRNA conferring the increased expression of a protein encoded by the nucleic acid molecule of the invention, which is in the sense of the invention a fusion of a nucleic acid sequence encoding a transit peptide and of a nucleic acid sequence as shown in table I, application no. 9, columns 5 and 7, e.g. a nucleic acid sequence encoding a polypeptide having the activity of a protein as indicated in table II, application no. 9, columns 5 and 7 or its homologs activity or of a mRNA encoding the polypeptide of the present invention having herein-mentioned palmitic acid increasing activity; and/or
[2400] c) increasing the specific activity of a protein conferring the increased expression of a protein encoded by the nucleic acid molecule of the invention or of the polypeptide of the present invention having herein-mentioned palmitic acid increasing activity, e.g. of a polypeptide having the activity of a protein as indicated in table II, application no. 9, columns 5 and 7 or its homologs activity, or decreasing the inhibitory regulation of the polypeptide of the invention; and/or
[2401] d) generating or increasing the expression of an endogenous or artificial transcription factor mediating the expression of a protein conferring the increased expression of a protein encoded by the nucleic acid molecule of the invention or of the polypeptide of the invention having herein-mentioned palmitic acid increasing activity, e.g. of a polypeptide having the activity of a protein as indicated in table II, application no. 9, columns 5 and 7 or its homologs activity; and/or
[2402] e) stimulating activity of a protein conferring the increased expression of a protein encoded by the nucleic acid molecule of the present invention or a polypeptide of the present invention having herein-mentioned palmitic acid increasing activity, e.g. of a polypeptide having the activity of a protein as indicated in table II, application no. 9, columns 5 and 7 or its homologs activity, by adding one or more exogenous inducing factors to the organisms or parts thereof; and/or
[2403] f) expressing a transgenic gene encoding a protein conferring the increased expression of a polypeptide encoded by the nucleic acid molecule of the present invention or a polypeptide of the present invention, having herein-mentioned palmitic acid increasing activity, e.g. of a polypeptide having the activity of a protein as indicated in table II, application no. 9, columns 5 and 7 or its homologs activity, and/or
[2404] g) increasing the copy number of a gene conferring the increased expression of a nucleic acid molecule encoding a polypeptide encoded by the nucleic acid molecule of the invention or the polypeptide of the invention having herein-mentioned palmitic acid increasing activity, e.g. of a polypeptide having the activity of a protein as indicated in table II, application no. 9, columns 5 and 7 or its homologs activity; and/or
[2405] h) increasing the expression of the endogenous gene encoding the polypeptide of the invention, e.g. a polypeptide having the activity of a protein as indicated in table II, application no. 9, columns 5 and 7 or its homologs activity, by adding positive expression or removing negative expression elements, e.g. homologous recombination can be used to either introduce positive regulatory elements like for plants the 35S enhancer into the promoter or to remove repressor elements form regulatory regions. Further gene conversion methods can be used to disrupt repressor elements or to enhance to activity of positive elements. Positive elements can be randomly introduced in plants by T-DNA or transposon mutagenesis and lines can be identified in which the positive elements have be integrated near to a gene of the invention, the expression of which is thereby enhanced; and/or
[2406] i) modulating growth conditions of an organism in such a manner, that the expression or activity of the gene encoding the protein of the invention or the protein itself is enhanced for example microorganisms or plants can be grown for example under a higher temperature regime leading to an enhanced expression of heat shock proteins, which can lead an enhanced fine chemical production; and/or
[2407] j) selecting of organisms with especially high activity of the proteins of the invention from natural or from mutagenized resources and breeding them into the target organisms, eg the elite crops; and/or
[2408] k) directing a protein encoded by the nucleic acid molecule of the invention or of the polypeptide of the present invention having herein-mentioned palmitic acid increasing activity, e.g. of polypeptide having the activity of a protein as indicated in table II, application no. 9, columns 5 and 7 or its homologs activity, to the plastids by the addition of a plastidial targeting sequence; and/or
[2409] l) generating the expression of a protein encoded by the nucleic acid molecule of the invention or of the polypeptide of the present invention having herein-mentioned palmitic acid increasing activity, e.g. of a polypeptide having the activity of a protein as indicated in table II, application no. 9, columns 5 and 7 or its homologs activity in plastids by the stable or transient transformation advantageously stable transformation of organelles preferably plastids with an inventive nucleic acid sequence preferably in form of an expression cassette containing said sequence leading to the plastidial expression of the nucleic acids or polypeptides of the invention; and/or
[2410] m) generating the expression of a protein encoded by the nucleic acid molecule of the invention or of the polypeptide of the present invention having herein-mentioned palmitic acid increasing activity, e.g. of a polypeptide having the activity of a protein as indicated in table II, application no. 9, columns 5 and 7 or its homologs activity in plastids by integration of a nucleic acid of the invention into the plastidal genome under control of preferable a plastidial promoter.

[2411] Preferably, said mRNA is the nucleic acid molecule of the present invention and/or the protein conferring the increased expression of a protein encoded by the nucleic acid molecule of the present invention alone or link to a transit nucleic acid sequence or transit peptide encoding nucleic acid sequence or the polypeptide having the herein mentioned activity, e.g. conferring the increase of the fine chemical after increasing the expression or activity of the encoded polypeptide preferably in organelles such as plastids or having the activity of a polypeptide having an activity as the protein as shown in table II, application no. 9, column 3 or its homologs. Preferably the increase of the fine chemical takes place in plastids.

[2412] for the disclosure of the paragraphs [0069.0.0.8] to [0079.0.0.8] see paragraphs [0069.0.0.0] to [0079.0.0.0] above.

[2413] The activation of an endogenous polypeptide having above-mentioned activity, e.g. having the activity of a protein as shown in table II, application no. 9, column 3 or of the polypeptide of the invention, e.g. conferring the increase of the fine chemical after increase of expression or activity in the cytsol and/or in an organelle like a plastid, preferentially in the plastid, can also be increased by introducing a synthetic transcription factor, which binds close to the coding region of the gene encoding the protein as shown in table II, application no. 9, column 3 and activates its transcription. A chimeric zinc finger protein can be constructed, which comprises a specific DNA-binding domain and an activation domain as e.g. the VP16 domain of Herpes Simplex virus. The specific binding domain can bind to the regulatory region of the gene encoding the protein as shown in table II, application no. 9, column 3. The expression of the chimeric transcription factor in a organism, in particular in a plant, leads to a specific expression of the protein as shown in table II, application no. 9, column 3, see e.g. in WO01/52620, Oriz, Proc. Natl. Acad. Sci. USA, 2002, Vol. 99, 13290 or Guan, Proc. Natl. Acad. Sci. USA, 2002, Vol. 99, 13296.

[2414] for the disclosure of the paragraphs [0081.0.0.8] to [0084.0.0.8] see paragraphs [0081.0.0.0] to [0084.0.0.0] above.

[2415] Owing to the introduction of a gene or a plurality of genes conferring the expression of the nucleic acid molecule of the invention or the nucleic acid molecule used in the method of the invention or the polypeptide of the invention or the polypeptide used in the method of the invention as described below, for example the nucleic acid construct mentioned below into an organism alone or in combination with other genes, it is possible not only to increase the biosynthetic flux towards the end product, but also to increase, modify or create de novo an advantageous, preferably novel metabolites composition in the organism, e.g. an advantageous fatty acid composition comprising a higher content of (from a viewpoint of nutritional physiology limited) fatty acids, like palmitate and/or palmitoleate.

[2416] for the disclosure of this paragraph see paragraph [0086.0.0.0] above.

[2417] By influencing the metabolism thus, it is possible to produce, in the process according to the invention, further advantageous compounds. Examples of such compounds are, in addition to palmitic acid, triglycerides, lipids, oils and/or fats containing palmitic acid compounds such as palmitate and/or palmitoleate.

[2418] Accordingly, in one embodiment, the process according to the invention relates to a process, which comprises:
[2419] a) providing a non-human organism, preferably a microorganism, a non-human animal, a plant or animal cell, a plant or animal tissue or a plant, more preferably a microorganism, a plant or a plant tissue;
[2420] b) increasing the activity of a protein as shown in table II, application no. 9, column 3 or of a polypeptide being encoded by the nucleic acid molecule of the present invention and described below, e.g. conferring an increase of the fine chemical in the organism, preferably in the microorganism, the non-human animal, the plant or animal cell, the plant or animal tissue or the plant, more preferably a microorganism, a plant or a plant tissue, in the cytsol or in the plastids, preferentially in the plastids,
[2421] c) growing the organism, preferably the microorganism, the non-human animal, the plant or animal cell, the plant or animal tissue or the plant under conditions which permit the production of the fine chemical in the organism, preferably the microorganism, the plant cell, the plant tissue or the plant; and
[2422] d) if desired, recovering, optionally isolating, the free and/or bound the fine chemical and, optionally further free and/or bound amino acids synthesized by the organism, the microorganism, the non-human animal, the plant or animal cell, the plant or animal tissue or the plant.

[2423] The organism, in particular the microorganism, non-human animal, the plant or animal cell, the plant or animal tissue or the plant is advantageously grown in such a way that it is not only possible to recover, if desired isolate the free or bound the fine chemical or the free and bound the fine chemical but as option it is also possible to produce, recover and, if desired isolate, other free or/and bound fatty acids, in particular palmitic acid, palmitate, palmitoleic acid and/or palmitoleate.

[2424] for the disclosure of the paragraphs [0090.0.0.8] to [0097.0.0.8] see paragraphs [0090.0.0.0] to [0097.0.0.0] above.

[2425] With regard to the nucleic acid sequence as depicted a nucleic acid construct which contains a nucleic acid sequence mentioned herein or an organism (=transgenic organism) which is transformed with said nucleic acid sequence or said nucleic acid construct, “transgene” means all those constructs which have been brought about by genetic manipulation methods, preferably in which either
[2426] a) the nucleic acid sequence as shown in table I, application no. 9, columns 5 and 7 or a derivative thereof, or
[2427] b) a genetic regulatory element, for example a promoter, which is functionally linked to the nucleic acid sequence as shown table I, application no. 9, columns 5 and 7 or a derivative thereof, or
[2428] c) (a) and (b)
   is/are not present in its/their natural genetic environment or has/have been modified by means of genetic manipulation methods, it being possible for the modification to be, by way of example, a substitution, addition, deletion, inversion or insertion of one or more nucleotide. “Natural genetic environment” means the natural Chromosomal locus in the organism of origin or the presence in a genomic library. In the case of a genomic library, the natural, genetic environment of the nucleic acid sequence is preferably at least partially still preserved. The environment flanks the nucleic acid sequence at least on one side and has a sequence length of at least 50 bp, preferably at least 500 bp, particularly preferably at least 1000 bp, very particularly preferably at least 5000 bp.

[2429] The use of the nucleic acid sequence according to the invention or of the nucleic acid construct according to the invention for the generation of transgenic plants is therefore also subject matter of the invention. As mentioned above the inventive nucleic acid sequence consists advantageously of the nucleic acid sequences as depicted in the sequence protocol and disclosed in table I, application no. 9, columns 5 and 7 joined to a nucleic acid sequence encoding a transit peptide, or a targeting nucleic acid sequence which directs the nucleic acid sequences disclosed in table I, application no. 9, columns 5 and 7 to the organelle preferentially the plastids. Alternatively the inventive nucleic acids sequences consist advantageously of the nucleic acid sequences as depicted in the sequence protocol and disclosed in table I, application no. 9, columns 5 and 7 joined preferably to a nucleic acids sequence mediating the stable integration of nucleic acids into the plastidial genome and optionally sequences mediating the transcription of the sequence in the plastidial compartment. A transient expression is in principal also desirable and possible.

[2430] for the disclosure of this paragraph see paragraph [0100.0.0.0] above.

[2431] In an advantageous embodiment of the invention, the organism takes the form of a plant whose fatty acid content is modified advantageously owing to the nucleic acid molecule of the present invention expressed. This is important for plant breeders since, for example, the nutritional value of plants for poultry is dependent on the abovementioned essential fatty acids and the general amount of fatty acids as energy source in feed. After the activity of the protein as shown in table II, application no. 9, column 3 has been increased or generated, or after the expression of nucleic acid molecule or polypeptide according to the invention has been generated or increased, the transgenic plant generated thus is grown on or in a nutrient medium or else in the soil and subsequently harvested.

[2432] for the disclosure of the paragraphs [0102.0.0.8] to [0110.0.0.8] see paragraphs [0102.0.0.0] to [0110.0.0.0] above.

[2433] In a preferred embodiment, the fine chemical (palmitic acid) is produced in accordance with the invention and, if desired, is isolated. The production of further fatty acids such as palmitoleic acid and/or mixtures thereof or mixtures of other fatty acids by the process according to the invention is advantageous. It may be advantageous to increase the pool of free fatty acids in the transgenic organisms by the process according to the invention in order to isolate high amounts of the pure fine chemical.

[2434] In another preferred embodiment of the invention a combination of the increased expression of the nucleic acid sequence or the protein of the invention together with the transformation of a nucleic acid encoding a protein or polypeptide for example a fatty acid transporter protein or a compound, which functions as a sink for the desired fatty acid for example for palmitic acid in the organism is useful to increase the production of the respective fine chemical (see Bao and Ohlrogge, Plant Physiol. 1999 August; 120 (4): 1057-1062). Such fatty acid transporter protein may serve as a link between the location of fatty acid synthesis and the so called sink tissue, in which fatty acids, triglycerides, oils and fats are stored.

[2435] for the disclosure of the paragraphs [0113.0.5.8] to [0115.0.0.8] see paragraphs [0113.0.5.5] to [0115.0.5.5] above.

[2436] In a preferred embodiment, the present invention relates to a process for the production of the fine chemical comprising or generating in an organism or a part thereof, preferably in a cell compartment such as a plastid or mitochondria, the expression of at least one nucleic acid molecule comprising a nucleic acid molecule selected from the group consisting of:
[2437] a) nucleic acid molecule encoding, preferably at least the mature form, of the polypeptide shown in table II, application no. 9, columns 5 and 7 or a fragment thereof, which confers an increase in the amount of the fine chemical in an organism or a part thereof;
[2438] b) nucleic acid molecule comprising, preferably at least the mature form, of the nucleic acid molecule shown in table I, application no. 9, columns 5 and 7;
[2439] c) nucleic acid molecule whose sequence can be deduced from a polypeptide sequence encoded by a nucleic acid molecule of (a) or (b) as result of the degeneracy of the genetic code and conferring an increase in the amount of the fine chemical in an organism or a part thereof;
[2440] d) nucleic acid molecule encoding a polypeptide which has at least 50% identity with the amino acid sequence of the polypeptide encoded by the nucleic acid molecule of (a) to (c) and conferring an increase in the amount of the fine chemical in an organism or a part thereof;
[2441] e) nucleic acid molecule which hybridizes with a nucleic acid molecule of (a) to (c) under stringent hybridisation conditions and conferring an increase in the amount of the fine chemical in an organism or a part thereof;
[2442] f) nucleic acid molecule encoding a polypeptide, the polypeptide being derived by substituting, deleting and/or adding one or more amino acids of the amino acid sequence of the polypeptide encoded by the nucleic acid molecules (a) to (d), preferably to (a) to (c) and conferring an increase in the amount of the fine chemical in an organism or a part thereof;
[2443] g) nucleic acid molecule encoding a fragment or an epitope of a polypeptide which is encoded by one of the nucleic acid molecules of (a) to (e), preferably to (a) to (c) and conferring an increase in the amount of the fine chemical in an organism or a part thereof;
[2444] h) nucleic acid molecule comprising a nucleic acid molecule which is obtained by amplifying nucleic acid molecules from a cDNA library or a genomic library using the primers shown in table Ill, application no. 9, column 7 and conferring an increase in the amount of the fine chemical in an organism or a part thereof;
[2445] i) nucleic acid molecule encoding a polypeptide which is isolated, e.g. from an expression library, with the aid of monoclonal antibodies against a polypeptide encoded by one of the nucleic acid molecules of (a) to (h), preferably to (a) to (c), and conferring an increase in the amount of the fine chemical in an organism or a part thereof;
[2446] j) nucleic acid molecule which encodes a polypeptide comprising the consensus sequence shown in table IV, application no. 9, column 7 and conferring an increase in the amount of the fine chemical in an organism or a part thereof;
[2447] k) nucleic acid molecule comprising one or more of the nucleic acid molecule encoding the amino acid sequence of a polypeptide encoding a domain of the polypeptide shown in table II, application no. 9, columns 5 and 7 and conferring an increase in the amount of the fine chemical in an organism or a part thereof; and
[2448] l) nucleic acid molecule which is obtainable by screening a suitable library under stringent conditions with a probe comprising one of the sequences of the nucleic acid molecule of (a) to (k), preferably to (a) to (c), or with a fragment of at least 15 nt, preferably 20 nt, 30 nt, 50 nt, 100 nt, 200 nt or 500 nt of the nucleic acid molecule characterized in (a) to (k), preferably to (a) to (c), and conferring an increase in the amount of the fine chemical in an organism or a part thereof;
   or which comprises a sequence which is complementary thereto.

[2449] In one embodiment, the nucleic acid molecule used in the process of the invention distinguishes over the sequence indicated in table I A, application no. 9, columns 5 and 7 by one or more nucleotides. In one embodiment, the nucleic acid molecule used in the process of the invention does not consist of the sequence indicated in table I A, application no. 9, columns 5 and 7. In one embodiment, the nucleic acid molecule used in the process of the invention is less than 100%, 99.999%, 99.99%, 99.9% or 99% identical to a sequence indicated in table I A, application no. 9, columns 5 and 7. In another embodiment, the nucleic acid molecule does not encode a polypeptide of a sequence indicated in table II A, application no. 9, columns 5 and 7.

[2450] In one embodiment, the nucleic acid molecule used in the process of the invention distinguishes over the sequence indicated in table I B, application no. 9, columns 5 and 7, by one or more nucleotides. In one embodiment, the nucleic acid molecule used in the process of the invention does not consist of the sequence indicated in table I B, application no. 9, columns 5 and 7. In one embodiment, the nucleic acid molecule used in the process of the invention is less than 100%, 99.999%, 99.99%, 99.9% or 99% identical to a sequence indicated in table I B, application no. 9, columns 5 and 7. In another embodiment, the nucleic acid molecule does not encode a polypeptide of a sequence indicated in table II B, application no. 9, columns 5 and 7.

[2451] In one embodiment, the nucleic acid molecule used in the process distinguishes over the sequence shown in table I, application no. 9, columns 5 and 7 by one or more nucleotides or does not consist of the sequence shown in table I, application no. 9, columns 5 and 7. In one embodiment, the nucleic acid molecule of the present invention is less than 100%, 99.999%, 99.99%, 99.9% or 99% identical to the sequence shown in table I, application no. 9, columns 5 and 7. In another embodiment, the nucleic acid molecule does not encode a polypeptide of the sequence shown in table II, application no. 9, columns 5 and 7.

[2452] for the disclosure of the paragraphs [0118.0.0.8] to [0120.0.0.8] see paragraphs [0118.0.0.0] to [0120.0.0.0] above.

[2453] Nucleic acid molecules with the sequence shown in table I, application no. 9, columns 5 and 7, nucleic acid molecules which are derived from the amino acid sequences shown in table II, application no. 9, columns 5 and 7 or from polypeptides comprising the consensus sequence shown in table IV, application no. 9, column 7, or their derivatives or homologues encoding polypeptides with the enzymatic or biological activity of a protein as shown in table II, application no. 9, column 3 or conferring the fine chemical increase after increasing its expression or activity are advantageously increased in the process according to the invention by expression either in the cytsol or in an organelle such as a plastid or mitochondria or both, preferably in plastids.

[2454] for the disclosure of this paragraph see paragraph [0122.0.0.0] above.

[2455] Nucleic acid molecules, which are advantageous for the process according to the invention and which encode polypeptides with the activity of a protein as shown in table II, application no. 9, column 3 can be determined from generally accessible databases.

[2456] for the disclosure of this paragraph see paragraph [0124.0.0.0] above.

[2457] The nucleic acid molecules used in the process according to the invention take the form of isolated nucleic acid sequences, which encode polypeptides with the activity of the proteins as shown in table II, application no. 9, column 3 and conferring the fine chemical increase by expression either in the cytsol or in an organelle such as a plastid or mitochondria or both, preferably in plastids.

[2458] for the disclosure of the paragraphs [0126.0.0.8] to [0133.0.0.8] see paragraphs [0126.0.0.0] to [0133.0.0.0] above.

[2459] However, it is also possible to use artificial sequences, which differ in one or more bases from the nucleic acid sequences found in organisms, or in one or more amino acid molecules from polypeptide sequences found in organisms, in particular from the polypeptide sequences shown in table II, application no. 9, columns 5 and 7 or the functional homologues thereof as described herein, preferably conferring above-mentioned activity, i.e. conferring the fine chemical increase after increasing its activity, e.g. after increasing the activity of a protein as shown in table II, application no. 9, column 3 by for example expression either in the cytsol or in an organelle such as a plastid or mitochondria or both, preferably in plastids.

[2460] for the disclosure of the paragraphs [0135.0.0.8] to [0140.0.0.8] see paragraphs [0135.0.0.0] to [0140.0.0.0] above.

[2461] Synthetic oligonucleotide primers for the amplification, e.g. as shown in table III, application no. 9, column 7, by means of polymerase chain reaction can be generated on the basis of a sequence shown herein, for example the sequence shown in table I, application no. 9, columns 5 and 7 or the sequences derived from table II, application no. 9, columns 5 and 7.

[2462] Moreover, it is possible to identify conserved regions from various organisms by carrying out protein sequence alignments with the polypeptide used in the process of the invention, in particular with sequences of the polypeptide of the invention, from which conserved regions, and in turn, degenerate primers can be derived. Conserved regions are those, which show a very little variation in the amino acid in one particular position of several homologs from different origin. The consensus sequence shown in table IV, application no. 9, column 7 is derived from said alignments.

[2463] Degenerated primers can then be utilized by PCR for the amplification of fragments of novel proteins having above-mentioned activity, e.g. conferring the increase of the fine chemical after increasing the expression or activity or having the activity of a protein as shown in table II, application no. 9, column 3 or further functional homologs of the polypeptide of the invention from other organisms.

[2464] for the disclosure of the paragraphs [0144.0.0.8] to [0151.0.0.8] see paragraphs [0144.0.0.0] to [0151.0.0.0] above.

[2465] Polypeptides having above-mentioned activity, i.e. conferring the fine chemical increase, derived from other organisms, can be encoded by other DNA sequences which hybridize to the sequences shown in table I, application no. 9, columns 5 and 7, preferably of table I B, application no. 9, columns 5 and 7 under relaxed hybridization conditions and which code on expression for peptides having the palmitic acid, triglycerides, lipids, oils and/or fats containing palmitic acid increasing activity.

[2466] for the disclosure of the paragraphs [0153.0.0.8] to [0159.0.0.8] see paragraphs [0153.0.0.0] to [0159.0.0.0] above.

[2467] Further, the nucleic acid molecule of the invention comprises a nucleic acid molecule, which is a complement of one of the nucleotide sequences of above mentioned nucleic acid molecules or a portion thereof. A nucleic acid molecule which is complementary to one of the nucleotide sequences shown in table I, application no. 9, columns 5 and 7, preferably shown in table I B, application no. 9, columns 5 and 7 is one which is sufficiently complementary to one of the nucleotide sequences shown in table I, application no. 9, columns 5 and 7, preferably shown in table I B, application no. 9, columns 5 and 7 such that it can hybridize to one of the nucleotide sequences shown in table I, application no. 9, columns 5 and 7, preferably shown in table I B, application no. 9, columns 5 and 7, thereby forming a stable duplex. Preferably, the hybridisation is performed under stringent hybridization conditions. However, a complement of one of the herein disclosed sequences is preferably a sequence complement thereto according to the base pairing of nucleic acid molecules well known to the skilled person. For example, the bases A and G undergo base pairing with the bases T and U or C, resp. and visa versa. Modifications of the bases can influence the base-pairing partner.

[2468] The nucleic acid molecule of the invention comprises a nucleotide sequence which is at least about 30%, 35%, 40% or 45%, preferably at least about 50%, 55%, 60% or 65%, more preferably at least about 70%, 80%, or 90%, and even more preferably at least about 95%, 97%, 98%, 99% or more homologous to a nucleotide sequence shown in table I, application no. 9, columns 5 and 7, preferably shown in table I B, application no. 9, columns 5 and 7, or a portion thereof and preferably has above mentioned activity, in particular having a fine chemical increasing activity after increasing the activity or an activity of a gene product as shown in table II, application no. 9, column 3 by for example expression either in the cytsol or in an organelle such as a plastid or mitochondria or both, preferably in plastids.

[2469] The nucleic acid molecule of the invention comprises a nucleotide sequence which hybridizes, preferably hybridizes under stringent conditions as defined herein, to one of the nucleotide sequences shown in table I, application no. 9, columns 5 and 7, preferably shown in table I B, application no. 9, columns 5 and 7, or a portion thereof and encodes a protein having above-mentioned activity, e.g. conferring of a palmitic acid, triglycerides, lipids, oils and/or fats containing palmitic acid increase by for example expression either in the cytsol or in an organelle such as a plastid or mitochondria or both, preferably in plastids, and optionally, the activity of a protein as shown in table II, application no. 9, column 3.

[2470] Moreover, the nucleic acid molecule of the invention can comprise only a portion of the coding region of one of the sequences shown in table I, application no. 9, columns 5 and 7, preferably shown in table I B, application no. 9, columns 5 and 7, for example a fragment which can be used as a probe or primer or a fragment encoding a biologically active portion of the polypeptide of the present invention or of a polypeptide used in the process of the present invention, i.e. having above-mentioned activity, e.g. conferring an increase of the fine chemical if its activity is increased by for example expression either in the cytsol or in an organelle such as a plastid or mitochondria or both, preferably in plastids. The nucleotide sequences determined from the cloning of the present protein-according-to-the-invention-encoding gene allows for the generation of probes and primers designed for use in identifying and/or cloning its homologues in other cell types and organisms. The probe/primer typically comprises substantially purified oligonucleotide. The oligonucleotide typically comprises a region of nucleotide sequence that hybridizes under stringent conditions to at least about 12, 15 preferably about 20 or 25, more preferably about 40, 50 or 75 consecutive nucleotides of a sense strand of one of the sequences set forth, e.g., in table I, application no. 9, columns 5 and 7, an anti-sense sequence of one of the sequences, e.g., set forth in table I, application no. 9, columns 5 and 7, preferably shown in table I B, application no. 9, columns 5 and 7, or naturally occurring mutants thereof. Primers based on a nucleotide of invention can be used in PCR reactions to clone homologues of the polypeptide of the invention or of the polypeptide used in the process of the invention, e.g. as the primers described in the examples of the present invention, e.g. as shown in the examples. A PCR with the primers shown in table III, application no. 9, column 7 will result in a fragment of the gene product as shown in table II, column 3.

[2471] for the disclosure of this paragraph see paragraph [0164.0.0.0] above.

[2472] The nucleic acid molecule of the invention encodes a polypeptide or portion thereof which includes an amino acid sequence which is sufficiently homologous to the amino acid sequence shown in table II, application no. 9, columns 5 and 7 such that the protein or portion thereof maintains the ability to participate in the fine chemical production, in particular a palmitic acid, triglycerides, lipids, oils and/or fats containing palmitic acid increasing the activity as mentioned above or as described in the examples in plants or microorganisms is comprised.

[2473] As used herein, the language “sufficiently homologous” refers to proteins or portions thereof which have amino acid sequences which include a minimum number of identical or equivalent amino acid residues (e.g., an amino acid residue which has a similar side chain as an amino acid residue in one of the sequences of the polypeptide of the present invention) to an amino acid sequence shown in table II, application no. 9, columns 5 and 7 such that the protein or portion thereof is able to participate in the increase of the fine chemical production. For examples having the activity of a protein as shown in table II, column 3 and as described herein.

[2474] In one embodiment, the nucleic acid molecule of the present invention comprises a nucleic acid that encodes a portion of the protein of the present invention. The protein is at least about 30%, 35%, 40%, 45% or 50%, preferably at least about 55%, 60%, 65% or 70%, and more preferably at least about 75%, 80%, 85%, 90%, 91%, 92%, 93% or 94% and most preferably at least about 95%, 97%, 98%, 99% or more homologous to an entire amino acid sequence of table II, application no. 9, columns 5 and 7 and having above-mentioned activity, e.g. conferring preferably the increase of the fine chemical by for example expression either in the cytsol or in an organelle such as a plastid or mitochondria or both, preferably in plastids.

[2475] for the disclosure of the paragraphs [0168.0.0.8] and [0169.0.0.8] see paragraphs [0168.0.0.0] and [0169.0.0.0] above.

[2476] The invention further relates to nucleic acid molecules that differ from one of the nucleotide sequences shown in table I, application no. 9, columns 5 and 7 (and portions thereof) due to degeneracy of the genetic code and thus encode a polypeptide of the present invention, in particular a polypeptide having above mentioned activity, e.g. conferring an increase in the fine chemical in a organism, e.g. as that polypeptides depicted by the sequence shown in table II, application no. 9, columns 5 and 7 or the functional homologues. Advantageously, the nucleic acid molecule of the invention comprises, or in an other embodiment has, a nucleotide sequence encoding a protein comprising, or in an other embodiment having, an amino acid sequence shown in table II, application no. 9, columns 5 and 7 or the functional homologues. In a still further embodiment, the nucleic acid molecule of the invention encodes a full length protein which is substantially homologous to an amino acid sequence shown in table II, application no. 9, columns 5 and 7 or the functional homologues. However, in a preferred embodiment, the nucleic acid molecule of the present invention does not consist of the sequence shown in table I, application no. 9, columns 5 and 7, preferably as indicated in table I A, application no. 9, columns 5 and 7. Preferably the nucleic acid molecule of the invention is a functional homologue or identical to a nucleic acid molecule indicated in table I B, application no. 9, columns 5 and 7.

[2477] for the disclosure of the paragraphs [0171.0.0.8] to [0173.0.0.8] see paragraphs [0171.0.0.0] to [0173.0.0.0] above.

[2478] Accordingly, in another embodiment, a nucleic acid molecule of the invention is at least 15, 20, 25 or 30 nucleotides in length. Preferably, it hybridizes under stringent conditions to a nucleic acid molecule comprising a nucleotide sequence of the nucleic acid molecule of the present invention or used in the process of the present invention, e.g. comprising the sequence shown in table I, application no. 9, columns 5 and 7. The nucleic acid molecule is preferably at least 20, 30, 50, 100, 250 or more nucleotides in length.

[2479] for the disclosure of this paragraph see paragraph [0175.0.0.0] above.

[2480] Preferably, nucleic acid molecule of the invention that hybridizes under stringent conditions to a sequence shown in table I, application no. 9, columns 5 and 7 corresponds to a naturally-occurring nucleic acid molecule of the invention. As used herein, a “naturally-occurring” nucleic acid molecule refers to an RNA or DNA molecule having a nucleotide sequence that occurs in nature (e.g., encodes a natural protein). Preferably, the nucleic acid molecule encodes a natural protein having abovementioned activity, e.g. conferring the fine chemical increase after increasing the expression or activity thereof or the activity of a protein of the invention or used in the process of the invention by for example expression the nucleic acid sequence of the gene product in the cytsol and/or in an organelle such as a plastid or mitochondria, preferably in plastids.

[2481] for the disclosure of this paragraph see paragraph [0177.0.0.0] above.

[2482] For example, nucleotide substitutions leading to amino acid substitutions at “non-essential” amino acid residues can be made in a sequence of the nucleic acid molecule of the invention or used in the process of the invention, e.g. shown in table I, application no. 9, columns 5 and 7.

[2483] for the disclosure of the paragraphs [0179.0.0.8] and [0180.0.0.8] see paragraphs [0179.0.0.0] and [0180.0.0.0] above.

[2484] Accordingly, the invention relates to nucleic acid molecules encoding a polypeptide having above-mentioned activity, e.g. conferring an increase in the fine chemical in an organisms or parts thereof by for example expression either in the cytsol or in an organelle such as a plastid or mitochondria or both, preferably in plastids that contain changes in amino acid residues that are not essential for said activity. Such polypeptides differ in amino acid sequence from a sequence contained in the sequences shown in table II, application no. 9, columns 5 and 7, preferably shown in table II A, application no. 9, columns 5 and 7 yet retain said activity described herein. The nucleic acid molecule can comprise a nucleotide sequence encoding a polypeptide, wherein the polypeptide comprises an amino acid sequence at least about 50% identical to an amino acid sequence shown in table II, application no. 9, columns 5 and 7, preferably shown in table II A, application no. 9, columns 5 and 7 and is capable of participation in the increase of production of the fine chemical after increasing its activity, e.g. its expression by for example expression either in the cytsol or in an organelle such as a plastid or mitochondria or both, preferably in plastids. Preferably, the protein encoded by the nucleic acid molecule is at least about 60% identical to the sequence shown in table II, application no. 9, columns 5 and 7, preferably shown in table II A, application no. 9, columns 5 and 7, more preferably at least about 70% identical to one of the sequences shown in table II, application no. 9, columns 5 and 7, preferably shown in table II A, application no. 9, columns 5 and 7, even more preferably at least about 80%, 90%, 95% homologous to the sequence shown in table II, application no. 9, columns 5 and 7, preferably shown in table II A, application no. 9, columns 5 and 7, and most preferably at least about 96%, 97%, 98%, or 99% identical to the sequence shown in table II, application no. 9, columns 5 and 7, preferably shown in table II A, application no. 9, columns 5 and 7.

[2485] for the disclosure of the paragraphs [0182.0.0.8] to [0188.0.0.8] see paragraphs [0182.0.0.0] to [0188.0.0.0] above.

[2486] Functional equivalents derived from one of the polypeptides as shown in table II, application no. 9, columns 5 and 7, preferably shown in table II B, application no. 9, columns 5 and 7 resp., according to the invention by substitution, insertion or deletion have at least 30%, 35%, 40%, 45% or 50%, preferably at least 55%, 60%, 65% or 70% by preference at least 80%, especially preferably at least 85% or 90%, 91%, 92%, 93% or 94%, very especially preferably at least 95%, 97%, 98% or 99% homology with one of the polypeptides as shown in table II, application no. 9, columns 5 and 7, preferably shown in table II B, application no. 9, columns 5 and 7 resp., according to the invention and are distinguished by essentially the same properties as the polypeptide as shown in table II, application no. 9, columns 5 and 7, preferably shown in table II B, application no. 9, columns 5 and 7.

[2487] Functional equivalents derived from the nucleic acid sequence as shown in table I, application no. 9, columns 5 and 7, preferably shown in table I B, application no. 9, columns 5 and 7 resp., according to the invention by substitution, insertion or deletion have at least 30%, 35%, 40%, 45% or 50%, preferably at least 55%, 60%, 65% or 70% by preference at least 80%, especially preferably at least 85% or 90%, 91%, 92%, 93% or 94%, very especially preferably at least 95%, 97%, 98% or 99% homology with one of the polypeptides as shown in table II, application no. 9, columns 5 and 7, preferably shown in table II B, application no. 9, columns 5 and 7 resp., according to the invention and encode polypeptides having essentially the same properties as the polypeptide as shown in table II, application no. 9, columns 5 and 7, preferably shown in table II B, application no. 9, columns 5 and 7.

[2488] for the disclosure of this paragraph see paragraph [0191.0.0.0] above.

[2489] A nucleic acid molecule encoding an homologous to a protein sequence of table II, application no. 9, columns 5 and 7, preferably shown in table II B, application no. 9, columns 5 and 7 resp., can be created by introducing one or more nucleotide substitutions, additions or deletions into a nucleotide sequence of the nucleic acid molecule of the present invention, in particular of table I, application no. 9, columns 5 and 7, preferably shown in table I B, application no. 9, columns 5 and 7 resp., such that one or more amino acid substitutions, additions or deletions are introduced into the encoded protein. Mutations can be introduced into the encoding sequences of table I, application no. 9, columns 5 and 7, preferably shown in table I B, application no. 9, columns 5 and 7 resp., by standard techniques, such as site-directed mutagenesis and PCR-mediated mutagenesis.

[2490] for the disclosure of the paragraphs [0193.0.0.8] to [0196.0.0.8] see paragraphs [0193.0.0.0] to [0196.0.0.0] above.

[2491] Homologues of the nucleic acid sequences used, with the sequence shown in table I, application no. 9, columns 5 and 7, preferably shown in table I B, application no. 9, columns 5 and 7, comprise also allelic variants with at least approximately 30%, 35%, 40% or 45% homology, by preference at least approximately 50%, 60% or 70%, more preferably at least approximately 90%, 91%, 92%, 93%, 94% or 95% and even more preferably at least approximately 96%, 97%, 98%, 99% or more homology with one of the nucleotide sequences shown or the abovementioned derived nucleic acid sequences or their homologues, derivatives or analogues or parts of these. Allelic variants encompass in particular functional variants which can be obtained by deletion, insertion or substitution of nucleotides from the sequences shown, preferably from table I, application no. 9, columns 5 and 7, preferably shown in table I B, application no. 9, columns 5 and 7, or from the derived nucleic acid sequences, the intention being, however, that the enzyme activity or the biological activity of the resulting proteins synthesized is advantageously retained or increased.

[2492] In one embodiment of the present invention, the nucleic acid molecule of the invention or used in the process of the invention comprises the sequences shown in any of the table I, application no. 9, columns 5 and 7, preferably shown in table I B, application no. 9, columns 5 and 7. It is preferred that the nucleic acid molecule comprises as little as possible other nucleotides not shown in any one of table I, application no. 9, columns 5 and 7, preferably shown in table I B, application no. 9, columns 5 and 7. In one embodiment, the nucleic acid molecule comprises less than 500, 400, 300, 200, 100, 90, 80, 70, 60, 50 or 40 further nucleotides. In a further embodiment, the nucleic acid molecule comprises less than 30, 20 or 10 further nucleotides. In one embodiment, the nucleic acid molecule use in the process of the invention is identical to the sequences shown in table I, application no. 9, columns 5 and 7, preferably shown in table I B, application no. 9, columns 5 and 7.

[2493] Also preferred is that the nucleic acid molecule used in the process of the invention encodes a polypeptide comprising the sequence shown in table II, application no. 9, columns 5 and 7, preferably shown in table II B, application no. 9, columns 5 and 7. In one embodiment, the nucleic acid molecule encodes less than 150, 130, 100, 80, 60, 50, 40 or 30 further amino acids. In a further embodiment, the encoded polypeptide comprises less than 20, 15, 10, 9, 8, 7, 6 or 5 further amino acids. In one embodiment used in the inventive process, the encoded polypeptide is identical to the sequences shown in table II, application no. 9, columns 5 and 7, preferably shown in table II B, application no. 9, columns 5 and 7.

[2494] In one embodiment, the nucleic acid molecule of the invention or used in the process encodes a polypeptide comprising the sequence shown in table II, application no. 9, columns 5 and 7, preferably shown in table II B, application no. 9, columns 5 and 7 comprises less than 100 further nucleotides. In a further embodiment, said nucleic acid molecule comprises less than 30 further nucleotides. In one embodiment, the nucleic acid molecule used in the process is identical to a coding sequence of the sequences shown in table I, application no. 9, columns 5 and 7, preferably shown in table I B, application no. 9, columns 5 and 7.

[2495] Polypeptides (=proteins), which still have the essential biological or enzymatic activity of the polypeptide of the present invention conferring an increase of the fine chemical i.e. whose activity is essentially not reduced, are polypeptides with at least 10% or 20%, by preference 30% or 40%, especially preferably 50% or 60%, very especially preferably 80% or 90 or more of the wild type biological activity or enzyme activity, advantageously, the activity is essentially not reduced in comparison with the activity of a polypeptide shown in table II, application no. 9, columns 5 and 7 expressed under identical conditions.

[2496] Homologues of table I, application no. 9, columns 5 and 7 or of the derived sequences of table II, application no. 9, columns 5 and 7 also mean truncated sequences, cDNA, single-stranded DNA or RNA of the coding and noncoding DNA sequence. Homologues of said sequences are also understood as meaning derivatives, which comprise noncoding regions such as, for example, UTRs, terminators, enhancers or promoter variants. The promoters upstream of the nucleotide sequences stated can be modified by one or more nucleotide substitution(s), insertion(s) and/or deletion(s) without, however, interfering with the functionality or activity either of the promoters, the open reading frame (=ORF) or with the 3′-regulatory region such as terminators or other 3′ regulatory regions, which are far away from the ORF. It is furthermore possible that the activity of the promoters is increased by modification of their sequence, or that they are replaced completely by more active promoters, even promoters from heterologous organisms. Appropriate promoters are known to the person skilled in the art and are mentioned herein below.

[2497] for the disclosure of the paragraphs [0203.0.0.8] to [0215.0.0.8] see paragraphs [0203.0.0.0] to [0215.0.0.0] above.

[2498] Accordingly, in one embodiment, the invention relates to a nucleic acid molecule, which comprises a nucleic acid molecule selected from the group consisting of:
[2499] a) nucleic acid molecule encoding, preferably at least the mature form, of the polypeptide shown in table II, application no. 9, columns 5 and 7, preferably in table II

[2500] B, application no. 9, columns 5 and 7; or a fragment thereof conferring an increase in the amount of the fine chemical in an organism or a part thereof
[2501] b) nucleic acid molecule comprising, preferably at least the mature form, of the nucleic acid molecule shown in table I, application no. 9, columns 5 and 7, preferably in table I B, application no. 9, columns 5 and 7 or a fragment thereof conferring an increase in the amount of the fine chemical in an organism or a part thereof;
[2502] c) nucleic acid molecule whose sequence can be deduced from a polypeptide sequence encoded by a nucleic acid molecule of (a) or (b) as result of the degeneracy of the genetic code and conferring an increase in the amount of the fine chemical in an organism or a part thereof;
[2503] d) nucleic acid molecule encoding a polypeptide whose sequence has at least 50% identity with the amino acid sequence of the polypeptide encoded by the nucleic acid molecule of (a) to (c) and conferring an increase in the amount of the fine chemical in an organism or a part thereof;
[2504] e) nucleic acid molecule which hybridizes with a nucleic acid molecule of (a) to (c) under stringent hybridisation conditions and conferring an increase in the amount of the fine chemical in an organism or a part thereof;
[2505] f) nucleic acid molecule encoding a polypeptide, the polypeptide being derived by substituting, deleting and/or adding one or more amino acids of the amino acid sequence of the polypeptide encoded by the nucleic acid molecules (a) to (d), preferably to (a) to (c), and conferring an increase in the amount of the fine chemical in an organism or a part thereof;
[2506] g) nucleic acid molecule encoding a fragment or an epitope of a polypeptide which is encoded by one of the nucleic acid molecules of (a) to (e), preferably to (a) to (c) and conferring an increase in the amount of the fine chemical in an organism or a part thereof;
[2507] h) nucleic acid molecule comprising a nucleic acid molecule which is obtained by amplifying a cDNA library or a genomic library using the primers in table III, application no. 9, column 7 and conferring an increase in the amount of the fine chemical in an organism or a part thereof;
[2508] i) nucleic acid molecule encoding a polypeptide which is isolated, e.g. from a expression library, with the aid of monoclonal antibodies against a polypeptide encoded by one of the nucleic acid molecules of (a) to (g), preferably to (a) to (c) and conferring an increase in the amount of the fine chemical in an organism or a part thereof;
[2509] j) nucleic acid molecule which encodes a polypeptide comprising the consensus sequence shown in table IV, application no. 9, column 7 and conferring an increase in the amount of the fine chemical in an organism or a part thereof;
[2510] k) nucleic acid molecule encoding the amino acid sequence of a polypeptide encoding a domain of the polypeptide shown in table II, application no. 9, columns 5 and 7 and conferring an increase in the amount of the fine chemical in an organism or a part thereof; and
[2511] l) nucleic acid molecule which is obtainable by screening a suitable nucleic acid library under stringent hybridization conditions with a probe comprising one of the sequences of the nucleic acid molecule of (a) to (k) or with a fragment of at least 15 nt, preferably 20 nt, 30 nt, 50 nt, 100 nt, 200 nt or 500 nt of the nucleic acid molecule characterized in (a) to (h) or of the nucleic acid molecule shown in table I, application no. 9, columns 5 and 7 or a nucleic acid molecule encoding, preferably at least the mature form of, the polypeptide shown in table II, application no. 9, columns 5 and 7, and conferring an increase in the amount of the fine chemical in an organism or a part thereof; or which encompasses a sequence which is complementary thereto;
   whereby, preferably, the nucleic acid molecule according to (a) to (l) distinguishes over the sequence depicted in table I A and/or I B, application no. 9, columns 5 and 7 by one or more nucleotides. In one embodiment, the nucleic acid molecule of the invention does not consist of the sequence shown in table I A and/or I B, application no. 9, columns 5 and 7. In another embodiment, the nucleic acid molecule of the present invention is at least 30% identical and less than 100%, 99.999%, 99.99%, 99.9% or 99% identical to the sequence shown in table I A and/or I B, application no. 9, columns 5 and 7. In a further embodiment the nucleic acid molecule does not encode the polypeptide sequence shown in table II A and/or II B, application no. 9, columns 5 and 7. Accordingly, in one embodiment, the nucleic acid molecule of the present invention encodes in one embodiment a polypeptide which differs at least in one or more amino acids from the polypeptide shown in table II A and/or II B, application no. 9, columns 5 and 7 does not encode a protein of the sequence shown in table II A and/or II B, application no. 9, columns 5 and 7. Accordingly, in one embodiment, the protein encoded by a sequence of a nucleic acid according to (a) to (l) does not consist of the sequence shown in table IA and/or I B, application no. 9, columns 5 and 7. In a further embodiment, the protein of the present invention is at least 30% identical to protein sequence depicted in table II A and/or II B, application no. 9, columns 5 and 7 and less than 100%, preferably less than 99.999%, 99.99% or 99.9%, more preferably less than 99%, 985, 97%, 96% or 95% identical to the sequence shown in table II A and/or II B, application no. 9, columns 5 and 7.

[2512] for the disclosure of the paragraphs [0217.0.0.8] to [0226.0.0.8] see paragraphs [0217.0.0.0] to [0226.0.0.0] above.

[2513] In general, vector systems preferably also comprise further cis-regulatory regions such as promoters and terminators and/or selection markers by means of which suitably transformed organisms can be identified. While vir genes and T-DNA sequences are located on the same vector in the case of cointegrated vector systems, binary systems are based on at least two vectors, one of which bears vir genes, but no T-DNA, while a second one bears T-DNA, but no vir gene. Owing to this fact, the last-mentioned vectors are relatively small, easy to manipulate and capable of replication in E. coli and in Agrobacterium. These binary vectors include vectors from the series pBIB-HYG, pPZP, pBecks, pGreen. Those which are preferably used in accordance with the invention are Bin19, pBI101, pBinAR, pGPTV and pCAMBIA. An overview of binary vectors and their use is given by Hellens et al, Trends in Plant Science (2000) 5, 446-451. The vectors are preferably modified in such a manner, that they already contain the nucleic acid coding for the transitpeptide and that the nucleic acids of the invention, preferentially the nucleic acid sequences encoding the polypeptides shown in table II, application no. 9, columns 5 and 7 can be cloned 3″ prime to the transitpeptide encoding sequence, leading to a functional preprotein, which is directed to the plastids and which means that the mature protein fulfills its biological activity.

[2514] for the disclosure of the paragraphs [0228.0.0.8] to [0239.0.0.8] see paragraphs [0228.0.0.0] to [0239.0.0.0] above.

[2515] The abovementioned nucleic acid molecules can be cloned into the nucleic acid constructs or vectors according to the invention in combination together with further genes, or else different genes are introduced by transforming several nucleic acid constructs or vectors (including plasmids) into a host cell, advantageously into a plant cell or a microorganisms.

In addition to the sequence mentioned in Table I, application no. 9, columns 5 and 7 or its derivatives, it is advantageous additionally to express and/or mutate further genes in the organisms. Especially advantageously, additionally at least one further gene of the fatty acid biosynthetic pathway such as for palmitate, palmitoleate, stearate and/or oleate is expressed in the organisms such as plants or microorganisms. It is also possible that the regulation of the natural genes has been modified advantageously so that the gene and/or its gene product is no longer subject to the regulatory mechanisms which exist in the organisms. This leads to an increased synthesis of the respective desired fine chemical since, for example, feedback regulations no longer exist to the same extent or not at all. In addition it might be advantageously to combine the sequences shown in Table I, application no. 9, columns 5 and 7 with genes which generally support or enhances to growth or yield of the target organism, for example genes which lead to faster growth rate of microorganisms or genes which produces stress-, pathogen, or herbicide resistant plants.

[2516] for the disclosure of the paragraphs [0241.0.5.8] and [0242.0.0.8] see paragraphs [0241.0.5.5] and [0242.0.5.5] above.

[2517] In a further advantageous embodiment of the process of the invention, the organisms used in the process are those in which simultaneously a palmitic acid degrading protein is attenuated, in particular by reducing the rate of expression of the corresponding gene.

[2518] for the disclosure of this paragraph see paragraph [0242.2.5.5] above.

[2519] for the disclosure of the paragraphs [0243.0.0.8] to [0264.0.0.8] see paragraphs [0243.0.0.0] to [0264.0.0.0] above.

[2520] Other preferred sequences for use in operable linkage in gene expression constructs are targeting sequences, which are required for targeting the gene product into specific cell compartments (for a review, see Kermode, Crit. Rev. Plant Sci. 15, 4 (1996) 285-423 and references cited therein), for example into the vacuole, the nucleus, all types of plastids, such as amyloplasts, chloroplasts, chromoplasts, the extracellular space, the mitochondria, the endoplasmic reticulum, elaioplasts, peroxisomes, glycosomes, and other compartments of cells or extracellular preferred are sequences, which are involved in targeting to plastids as mentioned above. Sequences, which must be mentioned in this context are, in particular, the signal-peptide- or transit-peptide-encoding sequences which are known per se. For example, plastid-transit-peptide-encoding sequences enable the targeting of the expression product into the plastids of a plant cell. Targeting sequences are also known for eukaryotic and to a lower extent for prokaryotic organisms and can advantageously be operable linked with the nucleic acid molecule of the present invention as shown in table I, application no. 9, columns 5 and 7 and described herein to achieve an expression in one of said compartments or extracellular.

[2521] for the disclosure of the paragraphs [0266.0.0.8] to [0287.0.0.8] see paragraphs [0266.0.0.0] to [0287.0.0.0] above.

[2522] Accordingly, one embodiment of the invention relates to a vector where the nucleic acid molecule according to the invention is linked operably to regulatory sequences which permit the expression in a prokaryotic or eukaryotic or in a prokaryotic and eukaryotic host. A further preferred embodiment of the invention relates to a vector in which a nucleic acid sequence encoding one of the polypeptides shown in table II, application no. 9, columns 5 and 7 or their homologs is functionally linked to a plastidial targeting sequence. A further preferred embodiment of the invention relates to a vector in which a nucleic acid sequence encoding one of the polypeptides shown in table II, application no. 9, columns 5 and 7 or their homologs is functionally linked to a regulatory sequences which permit the expression in plastids.

[2523] for the disclosure of the paragraphs [0289.0.0.8] to [0296.0.0.8] see paragraphs [0289.0.0.0] to [0296.0.0.0] above.

[2524] Moreover, native polypeptide conferring the increase of the fine chemical in an organism or part thereof can be isolated from cells (e.g., endothelial cells), for example using the antibody of the present invention as described below, in particular, an anti-b0403, anti-b0488, anti-b1410, anti-b1627, anti-b1758, anti-b1980, anti-b2066, anti-b2223, anti-b1095, ant-YPR035W and/or anti-YLR099C protein antibody or an antibody against polypeptides as shown in table II, application no. 9, columns 5 and 7, which can be produced by standard techniques utilizing the polypeptid of the present invention or fragment thereof, i.e., the polypeptide of this invention. Preferred are monoclonal antibodies.

[2525] for the disclosure of this paragraph see paragraph [0298.0.0.0] above.

[2526] In one embodiment, the present invention relates to a polypeptide having the sequence shown in table II, application no. 9, columns 5 and 7 or as coded by the nucleic acid molecule shown in table I, application no. 9, columns 5 and 7 or functional homologues thereof.

[2527] In one advantageous embodiment, in the method of the present invention the activity of a polypeptide is increased comprising or consisting of the consensus sequence shown in table IV, application no. 9, columns 7 and in one another embodiment, the present invention relates to a polypeptide comprising or consisting of the consensus sequence shown in table IV, application no. 9, column 7 whereby 20 or less, preferably 15 or 10, preferably 9, 8, 7, or 6, more preferred 5 or 4, even more preferred 3, even more preferred 2, even more preferred 1, most preferred 0 of the amino acids positions indicated can be replaced by any amino acid.

[2528] for the disclosure of the paragraphs [0301.0.0.8] to [0304.0.0.8] see paragraphs [0301.0.0.0] to [0304.0.0.0] above.

[2529] In one advantageous embodiment, the method of the present invention comprises the increasing of a polypeptide comprising or consisting of plant or microorganism specific consensus sequences.

In one embodiment, said polypeptide of the invention distinguishes over the sequence shown in table II A and/or II B, application no. 9, columns 5 and 7 by one or more amino acids. In one embodiment, polypeptide distinguishes form the sequence shown in table II A and/or II B, application no. 9, columns 5 and 7 by more than 5, 6, 7, 8 or 9 amino acids, preferably by more than 10, 15, 20, 25 or 30 amino acids, even more preferred are more than 40, 50, or 60 amino acids and, preferably, the sequence of the polypeptide of the invention distinguishes from the sequence shown in table II A and/or II B, application no. 9, columns 5 and 7 by not more than 80% or 70% of the amino acids, preferably not more than 60% or 50%, more preferred not more than 40% or 30%, even more preferred not more than 20% or 10%. In an other embodiment, said polypeptide of the invention does not consist of the sequence shown in table II A and/or II B, application no. 9, columns 5 and 7.

[2530] for the disclosure of this paragraph see paragraph [0306.0.0.0] above.

[2531] In one embodiment, the invention relates to polypeptide conferring an increase in the fine chemical in an organism or part being encoded by the nucleic acid molecule of the invention or used in the process of the invention and having a sequence which distinguishes from the sequence as shown in table II A and/or II B, application no. 9, columns 5 and 7 by one or more amino acids. In another embodiment, said polypeptide of the invention does not consist of the sequence shown in table II A and/or II B, application no. 9, columns 5 and 7. In a further embodiment, said polypeptide of the present invention is less than 100%, 99.999%, 99.99%, 99.9% or 99% identical. In one embodiment, said polypeptide does not consist of the sequence encoded by the nucleic acid molecules shown in table I A and/or I B, application no. 9, columns 5 and 7.

[2532] In one embodiment, the present invention relates to a polypeptide having the activity of the protein as shown in table II A and/or II B, application no. 9, column 3, which distinguishes over the sequence depicted in table II A and/or II B, application no. 9, columns 5 and 7 by one or more amino acids, preferably by more than 5, 6, 7, 8 or 9 amino acids, preferably by more than 10, 15, 20, 25 or 30 amino acids, even more preferred are more than 40, 50, or 60 amino acids but even more preferred by less than 70% of the amino acids, more preferred by less than 50%, even more preferred my less than 30% or 25%, more preferred are 20% or 15%, even more preferred are less than 10%. In a further preferred embodiment the polypeptide of the invention takes the form of a preprotein consisting of a plastidial transitpeptide joint to a polypeptide having the activity of the protein as shown in table II A and/or II B, column 3, from which the transitpeptide is preferably cleaved off upon transport of the preprotein into the organelle for example into the plastid or mitochondria.

[2533] for the disclosure of the paragraphs [0309.0.0.8] to [0311.0.0.8] see paragraphs [0309.0.0.0] to [0311.0.0.0] above.

[2534] A polypeptide of the invention can participate in the process of the present invention. The polypeptide or a portion thereof comprises preferably an amino acid sequence, which is sufficiently homologous to an amino acid sequence shown in table II, application no. 9, columns 5 and 7.

[2535] Further, the polypeptide can have an amino acid sequence which is encoded by a nucleotide sequence which hybridizes, preferably hybridizes under stringent conditions as described above, to a nucleotide sequence of the nucleic acid molecule of the present invention. Accordingly, the polypeptide has an amino acid sequence which is encoded by a nucleotide sequence that is at least about 35%, 40%, 45%, 50%, 55%, 60%, 65% or 70%, preferably at least about 75%, 80%, 85% or 90, and more preferably at least about 91%, 92%, 93%, 94% or 95%, and even more preferably at least about 96%, 97%, 98%, 99% or more homologous to one of the amino acid sequences as shown in table II A and/or II B, application no. 9, columns 5 and 7. The preferred polypeptide of the present invention preferably possesses at least one of the activities according to the invention and described herein. A preferred polypeptide of the present invention includes an amino acid sequence encoded by a nucleotide sequence which hybridizes, preferably hybridizes under stringent conditions, to a nucleotide sequence of table I A and/or I B, application no. 9, columns 5 and 7 or which is homologous thereto, as defined above.

[2536] Accordingly the polypeptide of the present invention can vary from the sequences shown in table II A and/or II B, application no. 9, columns 5 and 7 in amino acid sequence due to natural variation or mutagenesis, as described in detail herein. Accordingly, the polypeptide comprise an amino acid sequence which is at least about 35%, 40%, 45%, 50%, 55%, 60%, 65% or 70%, preferably at least about 75%, 80%, 85% or 90, and more preferably at least about 91%, 92%, 93%, 94% or 95%, and most preferably at least about 96%, 97%, 98%, 99% or more homologous to an entire amino acid sequence shown in table II A and/or II B, application no. 9, columns 5 and 7.

[2537] for the disclosure of this paragraph see paragraph [0315.0.0.0] above.

[2538] Biologically active portions of an polypeptide of the present invention include peptides comprising amino acid sequences derived from the amino acid sequence of the polypeptide of the present invention or used in the process of the present invention, e.g., the amino acid sequence shown in table II, application no. 9, columns 5 and 7 or the amino acid sequence of a protein homologous thereto, which include fewer amino acids than a full length polypeptide of the present invention or used in the process of the present invention or the full length protein which is homologous to an polypeptide of the present invention or used in the process of the present invention depicted herein, and exhibit at least one activity of polypeptide of the present invention or used in the process of the present invention.

[2539] for the disclosure of this paragraph see paragraph [0317.0.0.0] above.

[2540] Manipulation of the nucleic acid molecule of the invention may result in the production of a protein having differences from the wild-type protein as shown in table II, application no. 9, column 3. Differences shall mean at least one amino acid different from the sequences as shown in table II, application no. 9, column 3, preferably at least 2, 3, 4, 5, 6, 7, 8, 9 or 10 amino acids, more preferably at least 15, 20, 25, 30, 35, 40, 45 or 50 amino acids different from the sequences as shown in table II, application no. 9, column 3. These proteins may be improved in efficiency or activity, may be present in greater numbers in the cell than is usual, or may be decreased in efficiency or activity in relation to the wild type protein.

[2541] Any mutagenesis strategies for the polypeptide of the present invention or the polypeptide used in the process of the present invention to result in increasing said activity are not meant to be limiting; variations on these strategies will be readily apparent to one skilled in the art. Using such strategies, and incorporating the mechanisms disclosed herein, the nucleic acid molecule and polypeptide of the invention may be utilized to generate plants or parts thereof, expressing wildtype proteins or mutated proteins of the proteins as shown in table II, application no. 9, column 3. The nucleic acid molecules and polypeptide molecules of the invention are expressed such that the yield, production, and/or efficiency of production of a desired compound is improved.

[2542] for the disclosure of the paragraphs [0320.0.0.8] to [0322.0.0.8] see paragraphs [0320.0.0.0] to [0322.0.0.0] above.

[2543] In one embodiment, a protein (=polypeptide) as shown in table II, application no. 9, column 3 refers to a polypeptide having an amino acid sequence corresponding to the polypeptide of the invention or used in the process of the invention, whereas a “non-inventive protein or polypeptide” or “other polypeptide” refers to a polypeptide having an amino acid sequence corresponding to a protein which is not substantially homologous to a polypeptide of the invention, preferably which is not substantially homologous to a polypeptide or protein as shown in table II, application no. 9, column 3, e.g., a protein which does not confer the activity described herein and which is derived from the same or a different organism.

[2544] for the disclosure of the paragraphs [0324.0.0.8] to [0329.0.0.8] see paragraphs [0324.0.0.0] to [0329.0.0.0] above.

[2545] In an especially preferred embodiment, the polypeptide according to the invention furthermore also does not have the sequences of those proteins, which are encoded by the sequences shown in table II, application no. 9, columns 5 and 7.

[2546] for the disclosure of the paragraphs [0331.0.0.8] to [0346.0.0.8] see paragraphs [0331.0.0.0] to [0346.0.0.0] above.

[2547] Accordingly the present invention relates to any cell transgenic for any nucleic acid characterized as part of the invention, e.g. conferring the increase of the fine chemical in a cell or an organism or a part thereof, e.g. the nucleic acid molecule of the invention, the nucleic acid construct of the invention, the antisense molecule of the invention, the vector of the invention or a nucleic acid molecule encoding the polypeptide of the invention, e.g. encoding a polypeptide having an activity as the protein as shown in table II, application no. 9, column 3. Due to the above mentioned activity the fine chemical content in a cell or an organism is increased. For example, due to modulation or manipulation, the cellular activity is increased preferably in organelles such as plastids or mitochondria, e.g. due to an increased expression or specific activity or specific targeting of the subject matters of the invention in a cell or an organism or a part thereof especially in organelles such as plastids or mitochondria. Transgenic for a polypeptide having a protein or activity means herein that due to modulation or manipulation of the genome, the activity of protein as shown in table II, application no. 9, column 3 or a protein as shown in table II, application no. 9, column 3-like activity is increased in the cell or organism or part thereof especially in organelles such as plastids or mitochondria. Examples are described above in context with the process of the invention.

[2548] for the disclosure of this paragraph see paragraph [0348.0.0.0] above.

[2549] A naturally occurring expression cassette—for example the naturally occurring combination of the promoter of the gene encoding a protein as shown in table II, application no. 9, column 3 with the corresponding encoding gene—becomes a transgenic expression cassette when it is modified by non-natural, synthetic “artificial” methods such as, for example, mutagenization. Such methods have been described (U.S. Pat. No. 5,565,350; WO 00/15815; also see above).

[2550] for the disclosure of the paragraphs [0350.0.0.8] to [0358.0.0.8] see paragraphs [0350.0.0.0] to [0358.0.0.0] above.

[2551] for the disclosure of the paragraph [0359.0.5.8] see paragraph [0359.0.5.5] above.

[2552] for the disclosure of the paragraphs [0360.0.0.8] to [0362.0.0.8] see paragraphs [0360.0.0.0] to [0362.0.0.0] above.

[2553] for the disclosure of the paragraphs [0363.0.5.8] to [0365.0.5.8] see paragraphs [0363.0.5.5] to [0365.0.5.5] above.

[2554] for the disclosure of the paragraphs [0366.0.0.8] to [0369.0.0.8] see paragraphs [0366.0.0.0] to [0369.0.0.0] above.

[2555] The fermentation broths obtained in this way, containing in particular palmitic acid, triglycerides, lipids, oils and/or fats containing palmitic acid, normally have a dry matter content of from 7.5 to 25% by weight. The fermentation broth can be processed further. Depending on requirements, the biomass can be seperated, such as, for example, by centrifugation, filtration, decantation or a combination of these methods, from the fermentation broth or left completely in it. Afterwards the biomass can be extracted without any further process steps or disrupted and then extracted. If necessary the fermentation broth can be thickened or concentrated by known methods, such as, for example, with the aid of a rotary evaporator, thin-film evaporator, falling film evaporator, by reverse osmosis or by nanofiltration. This concentrated fermentation broth can then be worked up by extraction.

[2556] for the disclosure of this paragraph see paragraph [0371.0.5.5] above.

[2557] for the disclosure of the paragraphs [0372.0.0.8] to [0376.0.0.8], [0376.1.0.8] and [0377.0.0.8] see paragraphs [0372.0.0.0] to [0376.0.0.0], [0376.1.0.0] and [0377.0.0.0] above.

[2558] for the disclosure of the paragraph [0376.1.0.8] see paragraph [0376.1.0.0] above.

[2559] for the disclosure of the paragraph [0377.0.0.8] see paragraphs [0372.0.0.0] to [0376.0.0.0], [0376.1.0.0] and [0377.0.0.0] above.

[2560] In one embodiment, the present invention relates to a method for the identification of a gene product conferring an increase in the fine chemical production in a cell, comprising the following steps:
[2561] (a) contacting e.g. hybridising, the nucleic acid molecules of a sample, e.g. cells, tissues, plants or microorganisms or a nucleic acid library, which can contain a candidate gene encoding a gene product conferring an increase in the fine chemical after expression, with the nucleic acid molecule of the present invention;
[2562] (b) identifying the nucleic acid molecules, which hybridize under relaxed stringent conditions with the nucleic acid molecule of the present invention in particular to the nucleic acid molecule sequence shown in table I, application no. 9, columns 5 and 7, preferably in table I B, application no. 9, columns 5 and 7, and, optionally, isolating the full length cDNA clone or complete genomic clone;
[2563] (c) introducing the candidate nucleic acid molecules in host cells, preferably in a plant cell or a microorganism, appropriate for producing the fine chemical;
[2564] (d) expressing the identified nucleic acid molecules in the host cells;
[2565] (e) assaying the fine chemical level in the host cells; and
[2566] (f) identifying the nucleic acid molecule and its gene product which expression confers an increase in the fine chemical level in the host cell after expression compared to the wild type.

[2567] for the disclosure of the paragraphs [0379.0.0.8] to [0383.0.0.8] see paragraphs [0379.0.0.0] to [0383.0.0.0] above.

[2568] The screen for a gene product or an agonist conferring an increase in the fine chemical production can be performed by growth of an organism for example a microorganism in the presence of growth reducing amounts of an inhibitor of the synthesis of the fine chemical. Better growth, eg higher dividing rate or high dry mass in comparison to the control under such conditions would identify a gene or gene product or an agonist conferring an increase in fine chemical production.

One can think to screen for increased fine chemical production by for example resistance to drugs blocking fine chemical synthesis and looking whether this effect is dependent on the proteins as shown in table II, application no. 9, column 3, eg comparing near identical organisms with low and high activity of the proteins as shown in table II, application no. 9, column 3.

[2569] for the disclosure of the paragraphs [0385.0.0.8] to [0404.0.0.8] see paragraphs [0385.0.0.0] to [0404.0.0.0] above.

[2570] for the disclosure of this paragraph see paragraph [0405.0.5.5] above.

[2571] for the disclosure of the paragraphs [0406.0.0.8], to [0435.0.0.8] see paragraphs [0406.0.0.0] to [0435.0.0.0] above.

[2572] Palmitic acid or triglycerides, lipids, oils and/or fats containing palmitic acid production in Mortierella

The fatty acid production can be analysed as mentioned above. The proteins and nucleic acids can be analysed as mentioned below.

[2573] for the disclosure of the paragraphs [0437.0.0.8] and [0438.0.0.8] see paragraphs [0437.0.0.0] and [0438.0.0.0] above.

[2574] for the disclosure of the paragraphs [0439.0.5.8] and [0440.0.5.8] see paragraphs [0439.0.5.5] and [0440.0.5.5] above.

[2575] for the disclosure of this paragraph see [0441.0.0.0] above.

[2576] for the disclosure of the paragraphs [0442.0.5.8] and [0445.0.5.8] see paragraphs [0442.0.5.5] and [0445.0.5.5] above.

[2577] for the disclosure of the paragraphs [0446.0.0.8] to [0497.0.0.8] see paragraphs [0446.0.0.0] to [0497.0.0.0] above.
[2578] The results of the different plant analyses can be seen from the table, which follows:

TABLE VI

| | | Method/ | Min.- | Max.- |
|---|---|---|---|---|
| ORF | Metabolite | Analytics | Value | Value |
| b0403 | Palmitic acid (C16:0) | GC | 1.21 | 1.40 |
| b0488 | Palmitic acid (C16:0) | GC | 1.16 | 1.43 |
| b1095 | Palmitic acid (C16:0) | GC | 1.16 | 1.47 |
| b1410 | Palmitic acid (C16:0) | GC | 1.28 | 1.41 |
| b1627 | Palmitic acid (C16:0) | GC | 1.16 | 1.24 |
| b1758 | Palmitic acid (C16:0) | GC | 1.16 | 1.29 |
| b1980 | Palmitic acid (C16:0) | GC | 1.16 | 1.33 |
| b2066 | Palmitic acid (C16:0) | GC | 1.19 | 1.46 |
| b2223 | Palmitic acid (C16:0) | GC | 1.17 | 1.89 |
| YLR099C | Palmitic acid (C16:0) | GC | 1.15 | 1.50 |
| YPR035W | Palmitic acid (C16:0) | GC | 1.25 | 1.60 |

[2579] for the disclosure of the paragraphs [0499.0.0.8] and [0500.0.0.8] see paragraphs [0499.0.0.0] and [0500.0.0.0] above.

### Example 15a

### Engineering Ryegrass Plants by Over-Expressing YLR099C or YPR035W from Saccharomyces cerevisiae or Homologs of YLR099C or YPR035W from Other Organisms

[2580] for the disclosure of the paragraphs [0502.0.0.8] to [0508.0.0.8] see paragraphs [0502.0.0.0] to [0508.0.0.0] above.

### Example 15b

### Engineering Soybean Plants by Over-Expressing YLR099C or YPR035W from Saccharomyces cerevisiae or Homologs of YLR099C or YPR035W from Other Organisms

[2581] for the disclosure of the paragraphs [0510.0.0.8] to [0513.0.0.8] see paragraphs [0510.0.0.0] to [0513.0.0.0] above.

### Example 15c

### Engineering Corn Plants by Over-Expressing YLR099C or YPR035W from Saccharomyces cerevisiae or Homologs of YLR099C or YPR035W from Other Organisms

[2582] for the disclosure of the paragraphs [0515.0.0.8] to [0540.0.0.8] see paragraphs [0515.0.0.0] to [0540.0.0.0] above.

### Example 15d

### Engineering Wheat Plants by Over-Expressing YLR099C or YPR035W from Saccharomyces cerevisiae or Homologs of YLR099C or YPR035W from Other Organisms

[2583] for the disclosure of the paragraphs [0542.0.0.8] to [0544.0.0.8] see paragraphs [0542.0.0.0] to [0544.0.0.0] above.

### Example 15e

### Engineering Rapeseed/Canola Plants by Over-Expressing YLR099C or YPR035W from Saccharomyces cerevisiae or Homologs of YLR099C or YPR035W from Other Organisms

[2584] for the disclosure of the paragraphs [0546.0.0.8] to [0549.0.0.8] see paragraphs [0544.0.0.0] to [0549.0.0.0] above.

### Example 15f

### Engineering Alfalfa Plants by Over-Expressing YLR099C or YPR035W from Saccharomyces cerevisiae or Homologs of YLR099C or YPR035W from Other Organisms

[2585] for the disclosure of the paragraphs [0551.0.0.8] to [0554.0.0.8] see paragraphs [0551.0.0.0] to [0554.0.0.0] above.

[2586] %

[2587] for the disclosure of this paragraph see [0554.2.0.0] above.

[2588] for the disclosure of this paragraph see [0555.0.0.0] above.

[2589] for the disclosure of this paragraph see [0001.0.0.0].

[2590] Due to their plastids, plants possess some biosynthetic pathways, which are, besides in cyanobacteria, unique in living organisms. Some plastidic compounds are indispensable for human and animal nutrition and are therefore called vitamins. Two essential lipophilic components for nutrition are provitamin A (beta-carotene) and vitamin E.

Vitamin E is classified by its pharmacological effect and chromanol ring structure and not by biosynthesis. It comprises a class of 8 lipid-soluble components, being subdivided into tocopherols and tocotrienols. While tocopherols share an isoprenoid side chain derived from phytyl-PP, tocotrienol side chains are derivates of geranylgeranyl-PP. The α, β, γ and δ-members of these subclasses differ in their degree of methylation in the 6-chromanol-ring structure.
The tocopherol group (1a-d) has a saturated side chain, and the tocotrienol group (2a-d) has an unsaturated side chain:

[chemical structure]

In the present invention, vitamin E means all of the aforementioned tocopherols and tocotrienols with vitamin E activity.

[2591] The four major forms of tocopherols, α, β, γ, and δ, differ in the position and number of methyl groups. The predominant form in the leaves of higher plants is α-tocopherol, whereas in seeds γ-tocopherol is often the major isoform. Tocopherols predominantly function as antioxidants in vivo in photosynthetic organisms and in animals, as well as in isolated compounds such as oils. The antioxidant properties of tocopherols derive from their ability to quench free radicals and different tocopherols may be optimal as antioxidants for different biological systems. For human and animal utility, α-tocopherol has the highest vitamin E activity and has been implicated in a variety of health areas, including possible benefits in preventing cardiovascular disease, certain cancers, and cataract formation. The amounts of vitamin E needed to achieve these effects are often quite high, 100 to 400 International Units (I.U.) and even up to 800 I.U. compared with the recommended daily allowance of 40 I.U. In fats and oils, tocopherols protect unsaturated fatty acids from oxidation. In these systems, γ-tocopherol appears to have the greater utility. In fact, tocopherols are often included in processed oils to help stabilize the fatty acids. For human health as well as food and feed utility, it is desirable to have plants with increased tocopherol content along with those where the tocopherol composition is customized.

[2592] Tocopherols contain an aromatic head group, which is derived from homogentisic acid (HGA) and a hydrocarbon portion, which arises from phytyldiphosphate (phytyl-DP). HGA is derived from the shikimic acid pathway and phytyl-DP is generated from the condensation of four isoprenoid units. The isoprenoid contribution to tocopherol biosynthesis is thought to come primarily from the plastidal methylerythritol phosphate pathway, and not the cytosolic mevalonic acid pathway. The condensation of HGA and phytyl-DP to form 2-methyl-6-phytylplastoquinol, the first committed step in tocopherol biosynthesis, is a prenyltransferase reaction that is performed by a homogentisate phytyltransferase (HPT). Subsequent cyclization and methylation reactions result in the formation of the four major tocopherols. The enzymatic reactions in tocopherol biosynthesis were identified 15 to 20 years ago, but cloning of the genes encoding these enzymes has only occurred in the last few years.

[2593] Tocopherol biosynthesis takes place in the plastid and the enzymes are associated with the chloroplast envelope. The membrane association of the enzymes has made purification difficult. With the advent of genomics and the availability of complete genome sequences of a number of organisms, including Synechocystis sp. PCC 6803 and Arabidopsis, it has become possible to use bioinformatics techniques to identify and clone additional genes in the tocopherol pathway.

The first enzyme cloned in the tocopherol pathway, γ-tocopherol methyl transferase (γ-TMT), was identified in Synechocystis sp. PCC 6803 and Arabidopsis using bioinformatics. In that study, the Arabidopsis γ-TMT was shown to alter seed tocopherol composition when overexpressed in Arabidopsis. γ-Tocopherol, normally the predominant tocopherol isomer in Arabidopsis seeds, was almost completely converted to α-tocopherol.
HPT catalyzes the first committed reaction in the tocopherol pathway, and was unidentified previously. Concomitant with this study, slr1736 was found to encode a HPT in Synechocystis sp. PCC 6803 and the Arabidopsis HTP was identified.
There are prenyltransferases that condense prenyl groups with allylic chains and those that condense prenyl chains with aromatic groups. The prenyltransferases that catalyze sequential condensations of isopentenylpyrophosphate with allylic chains share common features, including Asp-rich motifs, and lead to the formation of compounds with two isoprenoid units, such as geranylpyrophosphate, or to much longer molecules, such as rubber, which contains greater than 1,000 isoprenoid units. Prenyltransferases that catalyze condensations with nonisoprenoid groups have an Asp-rich motif distinct from that of the allylic class, and include UbiA, which attaches a prenyl group to 4-hydroxybenzoic acid, and chlorophyll synthase, which attaches a prenyl group to chlorophyllide.

[2594] The first committed step in tocopherol biosynthesis is catalyzed by an aromatic prenyltransferase that transfers a phytyl chain to HGA

Classification by head groups would arrange tocopherols, tocotrienols and plastoquinones in one group, being quinones with antioxidant properties and having homogentisic acid as a precursor. Plastoquinones are important components of the quinone-pool in the photosynthetic electron transport chains of plastids, also interfering in the biosynthesis of provitamin A (beta-carotene; Norris S R, (1995). Plant Cell 7, 2139-2149).

[2595] Vitamin E is predominantly delivered by the ingestion of vegetable oils. It plays an important role as a membrane-associated antioxidant scavenger. During past years several additional functions of vitamin E as anti-hypercholesterolemic and immunostimulatory agent in humans have been proposed (Beharka (1997). Methods Enzymol. 282, 247-263).

These compounds with vitamin E activity are important natural fat-soluble antioxidants. A vitamin E deficiency leads to pathophysiological situations in humans and animals. Vitamin E compounds therefore are of high economical value as additives in the food and feed sectors, in pharmaceutical formulations and in cosmetic applications.

[2596] In plastids of plants many isoprenoid pathways are localized, which are interconnected by their substrates, end products and by regulation. These are, e.g. monoterpene-, diterpene-, giberillic acid-, abscisic acid-, chlorophyll-, phylloquinone-, carotenoid-, tocopherol-, tocotrienol- and plastoquinone-biosynthesis. In all these pathways prenyltransferases are involved in the biosynthesis of these compounds. With respect to the length of their side chains diterpenes, chlorophylls, phylloquinones, tocopherols and tocotrienols can be arranged into a C₂₀-group of isoprenoids. Another classification by degree of desaturation of the side chain, would arrange e.g. chlorophylls, phylloquinones and tocopherols into a phytyl-group and e.g. diterpenes, tocotrienols, plastoquinones and carotenoids into a group of desaturated isoprenoid compounds.

[2597] An economical method for producing vitamin E or its precursor and food- and feedstuffs with increased vitamin E content is therefore very important. Particularly economical methods are biotechnological methods utilizing vitamin E-producing organisms which are either natural or optimized by genetic modification.

There is a constant need for providing novel enzyme activities or direct or indirect regulators and thus alternative methods with advantageous properties for producing vitamin E or its precursor in organisms, e.g. in transgenic organisms.
Attempts are known to achieve an increase in the flow of metabolites so as to increase the tocopherol and/or tocotrienol content by overexpressing
Phytyl/prenyltransferasegenes in transgenic organisms; WO 00/63391, WO 00/68393, WO 01/62781 and WO 02/33060.

[2598] Therefore improving the quality of foodstuffs and animal feeds is an important task of the food-and-feed industry. This is necessary since, for example, Vitamin E, which occur in plants and some microorganisms are limited with regard to the supply of mammals. Especially advantageous for the quality of foodstuffs and animal feeds is as balanced as possible a vitamin profile in the diet since a great excess of some vitamins above a specific concentration in the food has only some or little or no positive effect. A further increase in quality is only possible via addition of further vitamins, which are limiting.

[2599] To ensure a high quality of foods and animal feeds, it is therefore necessary to add one or a plurality of vitamins in a balanced manner to suit the organism.

[2600] Accordingly, there is still a great demand for new and more suitable genes which encode proteins which participate in the biosynthesis of vitamins,in particular vitamin E and make it possible to produce certain vitamins specifically on an industrial scale without unwanted byproducts forming. In the selection of genes for or regulators of biosynthesis two characteristics above all are particularly important. On the one hand, there is as ever a need for improved processes for obtaining the highest possible contents of vitamins like vitamin E on the other hand as less as possible byproducts should be produced in the production process.

[2601] for the disclosure of this paragraph see [0013.0.0.0] above.

[2602] Accordingly, in a first embodiment, the invention relates to a process for the production of a fine chemical, whereby the fine chemical is vitamin E. Accordingly, in the present invention, the term “the fine chemical” as used herein relates to “vitamin E”. Further, the term “the fine chemicals” as used herein also relates to fine chemicals comprising vitamin E.

[2603] In one embodiment, the term “Vitamin E” or “the fine chemical” or “the respective fine chemical” means at least one chemical compound with vitamin E activity selected from the group alpha-tocopherol, beta-tocopherol, gamma-tocopherol, delta-tocopherol, alpha-tocotrienol, beta-tocotrienol, gamma-tocotrienol and deltatocotrienol. In another embodiment, the term “Vitamin E” or “the fine chemical” or “the respective fine chemical” means at least one chemical compound with vitamin E activity selected from the group alpha-tocopherol, beta-tocopherol, gamma-tocopherol, delta-tocopherol, alpha-tocotrienol, beta-tocotrienol, gamma-tocotrienol and deltatocotrienol or the Vitamin E precourser 2,3-Dimethyl-5-phytylquinol. In an preferred embodiment, the term “the fine chemical” or the term “Vitamine E” or the term “the respective fine chemical” means at least one chemical compound with vitamin E activity selected from the group “alpha-tocopherol”, “beta-tocopherol”, “gamma-tocopherol”, “alpha-tocotrienol”, “beta-tocotrienol”, and/or “gamma-tocotrienol”.

An increased vitamin E content normally means an increased total vitamin E content. However, an increased vitamin E content also means, in particular, a modified content of the above-described 8 compounds with vitamin E activity, without the need for an inevitable increase in the total vitamin E content. In a preferred embodiment, the term “the fine chemical” means vitamin E in free form or its salts or its ester or bound.

[2604] Accordingly, the present invention relates to a process for the production of vitamin E, which comprises
[2605] (a) increasing or generating the activity of a protein as shown in table II, application no. 10, column 3 encoded by the nucleic acid sequences as shown in table I, application no. 10, column 5, in an organelle of a microorganism or plant, or
[2606] (b) increasing or generating the activity of a protein as shown in table II, application no. 10, column 3 encoded by the nucleic acid sequences as shown in table I, application no. 10, column 5 in the plastid of a microorganism or plant, or in one or more parts thereof; and
[2607] (c) growing the organism under conditions which permit the production of the fine chemical, thus, vitamin E or fine chemicals comprising vitamin E, in said organism or in the culture medium surrounding the organism.

[2608] Accordingly, the term “the fine chemical” means in one embodiment “2,3-dimethyl-5-pythylquinol” in relation to all sequences listed in Table I to IV, lines 92 to 97 or homologs thereof;

and means in one embodiment “alpha-tocopherol” in relation to all sequences listed in Tables I to IV, lines 85 to 90 or homologs thereof;
and means in one embodiment “alpha-tocotrienol” in relation to all sequences listed in Tables I to IV, line 91 or homologs thereof;
and means in one embodiment “beta-tocopherol” in relation to all sequences listed in Table I, lines 92 to 97, or homologs thereof;
and means in one embodiment “gamma-tocopherol” in relation to all sequences listed in Table I to IV, lines 92 to 97 or homologs thereof;
and means in one embodiment “beta-tocotrienol” in relation to all sequences listed in Table I, lines 98, or homologs thereof;
and means in one embodiment “gamma-tocotrienol” in relation to all sequences listed in Table I to IV, lines 98 or homologs thereof.
Accordingly, in one embodiment the term “the fine chemical” means “2,3-dimethyl-5-phytylquinol”, “beta-tocopherol” and “gamma-tocopherol” in relation to all sequences listed in Table I to IV, lines 92 to 97. In one embodiment the term “the fine chemical” means “beta-tocotrienol” and “gamma-tocotrienol” in relation to all sequences listed in Table I to IV, line 98.
Accordingly, the term “the fine chemical” can mean “2,3-dimethyl-5-pythylquinol”, “alpha-tocopherol”, “beta-tocopherol”, “gamma-tocopherol”, “alpha-tocotrienol”, “beta-tocotrienol”, and/or “gamma-tocotrienol”, owing to circumstances and the context. In order to illustrate that the meaning of the term “the fine chemical” means “2,3-dimethyl5-pythylquinol”, “alpha-tocopherol”, “beta-tocopherol”, “gamma-tocopherol”, “alpha-tocotrienol”, “beta-tocotrienol”, and/or “gamma-tocotrienol” the term “the respective fine chemical” is also used.

[2609] In another embodiment the present invention is related to a process for the production of vitamin E, which comprises
[2610] (a) increasing or generating the activity of a protein as shown in table II, application no. 6 column 3 encoded by the nucleic acid sequences as shown in table I, application no. 10, column 5, in an organelle of a non-human organism, or
[2611] (b) increasing or generating the activity of a protein as shown in table II, application no. 10, column 3 encoded by the nucleic acid sequences as shown in table I, application no. 10, column 5, which are joined to a nucleic acid sequence encoding a transit peptide in a non-human organism, or in one or more parts thereof; or
[2612] (c) increasing or generating the activity of a protein as shown in table II, application no. 10, column 3 encoded by the nucleic acid sequences as shown in table I, application no. 10, column 5, which are joined to a nucleic acid sequence encoding chloroplast localization sequence, in a non-human organism, or in one or more parts thereof, and
[2613] (d) growing the organism under conditions which permit the production of vitamin E in said organism.

[2614] In another embodiment, the present invention relates to a process for the production of vitamin E, which comprises
[2615] (a) increasing or generating the activity of a protein as shown in table II, application no. 10, column 3 encoded by the nucleic acid sequences as shown in table I, application no. 10, column 5, in an organelle of a microorganism or plant through the transformation of the organelle, or
[2616] (b) increasing or generating the activity of a protein as shown in table II, application no. 10, column 3 encoded by the nucleic acid sequences as shown in table I, application no. 10, column 5 in the plastid of a microorganism or plant, or in one or more parts thereof through the transformation of the plastids; and
[2617] (c) growing the organism under conditions which permit the production of the fine chemical, thus, vitamin E or fine chemicals comprising vitamin E, in said organism or in the culture medium surrounding the organism.

[2618] Advantageously the activity of the protein as shown in table II, application no. 10, column 3 encoded by the nucleic acid sequences as shown in table I, application no. 10, column 5 is increased or generated in the abovementioned process in the plastid of a microorganism or plant.

[2619] for the disclosure of the paragraphs [0019.0.0.9] to [0024.0.0.9] see paragraphs [0019.0.0.0] and [0024.0.0.0] above.

[2620] Even more preferred nucleic acid sequences are encoding transit peptides as disclosed by von Heijne et al. [Plant Molecular Biology Reporter, Vol. 9 (2), 1991: 104-126], which are hereby incorporated by reference. Table V shows some examples of the transit peptide sequences disclosed by von Heijne et al. According to the disclosure of the invention especially in the examples the skilled worker is able to link other nucleic acid sequences disclosed by von Heijne et al. to the nucleic acid sequences shown in table I, application no. 10, columns 5 and 7. Most preferred nucleic acid sequences encoding transit peptides are derived from the genus Spinacia such as chloroplast 30S ribosomal protein PSrp-1, root acyl carrier protein II, acyl carrier protein, ATP synthase: γ subunit, ATP synthase: δ subunit, cytochrom f, ferredoxin I, ferredoxin NADP oxidoreductase (=FNR), nitrite reductase, phosphoribulokinase, plastocyanin or carbonic anhydrase. The skilled worker will recognize that various other nucleic acid sequences encoding transit peptides can easily isolated from plastid-localized proteins, which are expressed from nuclear genes as precursors and are then targeted to plastids. Such transit peptides encoding sequences can be used for the construction of other expression constructs. The transit peptides advantageously used in the inventive process and which are part of the inventive nucleic acid sequences and proteins are typically 20 to 120 amino acids, preferably 25 to 110, 30 to 100 or 35 to 90 amino acids, more preferably 40 to 85 amino acids and most preferably 45 to 80 amino acids in length and functions post-translationally to direct the protein to the plastid preferably to the chloroplast. The nucleic acid sequences encoding such transit peptides are localized upstream of nucleic acid sequence encoding the mature protein. For the correct molecular joining of the transit peptide encoding nucleic acid and the nucleic acid encoding the protein to be targeted it is sometimes necessary to introduce additional base pairs at the joining position, which forms restriction enzyme recognition sequences useful for the molecular joining of the different nucleic acid molecules. This procedure might lead to very few additional amino acids at the N-terminal of the mature imported protein, which usually and preferably do not interfere with the protein function. In any case, the additional base pairs at the joining position which forms restriction enzyme recognition sequences have to be chosen with care, in order to avoid the formation of stop codons or codons which encode amino acids with a strong influence on protein folding, like e.g. proline. It is preferred that such additional codons encode small n.d. structural flexible amino acids such as glycine or alanine.

[2621] As mentioned above the nucleic acid sequences coding for the proteins as shown in table II, application no. 10, column 3 and its homologs as disclosed in table I, application no. 10, columns 5 and 7 are joined to a nucleic acid sequence encoding a transit peptide, This nucleic acid sequence encoding a transit peptide ensures transport of the protein to the plastid. The nucleic acid sequence of the gene to be expressed and the nucleic acid sequence encoding the transit peptide are operably linked. Therefore the transit peptide is fused in frame to the nucleic acid sequence coding for proteins as shown in table II, application no. 10, column 3 and its homologs as disclosed in table I, application no. 10, columns 5 and 7.

[2622] for the disclosure of the paragraphs [0027.0.0.9] to [0029.0.0.9] see paragraphs [0027.0.0.0] and [0029.0.0.0] above.

[2623] Alternatively, nucleic acid sequences coding for the transit peptides may be chemically synthesized either in part or wholly according to structure of transit peptide sequences disclosed in the prior art. Said natural or chemically synthesized sequences can be directly linked to the sequences encoding the mature protein or via a linker nucleic acid sequence, which may be typically less than 500 base pairs, preferably less than 450, 400, 350, 300, 250 or 200 base pairs, more preferably less than 150, 100, 90, 80, 70, 60, 50, 40 or 30 base pairs and most preferably less than 25, 20, 15, 12, 9, 6 or 3 base pairs in length and are in frame to the coding sequence. Furthermore favorable nucleic acid sequences encoding transit peptides may comprise sequences derived from more than one biological and/or chemical source and may include a nucleic acid sequence derived from the amino-terminal region of the mature protein, which in its native state is linked to the transit peptide. In a preferred embodiment of the invention said amino-terminal region of the mature protein is typically less than 150 amino acids, preferably less than 140, 130, 120, 110, 100 or 90 amino acids, more preferably less than 80, 70, 60, 50, 40, 35, 30, 25 or 20 amino acids and most preferably less than 19, 18, 17, 16, 15, 14, 13, 12, 11 or 10 amino acids in length. But even shorter or longer stretches are also possible. In addition target sequences, which facilitate the transport of proteins to other cell compartments such as the vacuole, endoplasmic reticulum, Golgi complex, glyoxysomes, peroxisomes or mitochondria may be also part of the inventive nucleic acid sequence. The proteins translated from said inventive nucleic acid sequences are a kind of fusion proteins that means the nucleic acid sequences encoding the transit peptide for example the ones shown in table V, preferably the last one of the table are joint to the nucleic acid sequences shown in table I, application no. 10, columns 5 and 7. The person skilled in the art is able to join said sequences in a functional manner. Advantageously the transit peptide part is cleaved off from the protein part shown in table II, application no. 10, columns 5 and 7 during the transport preferably into the plastids. All products of the cleavage of the preferred transit peptide shown in the last line of table V have preferably the N-terminal amino acid sequences QIA CSS or QIA EFQLTT in front of the start methionine of the protein mentioned in table II, application no. 10, columns 5 and 7. Other short amino acid sequences of an range of 1 to 20 amino acids preferable 2 to 15 amino acids, more preferable 3 to 10 amino acids most preferably 4 to 8 amino acids are also possible in front of the start methionine of the protein mentioned in table II, application no. 10, columns 5 and 7. In case of the amino acid sequence QIA CSS the three amino acids in front of the start methionine are stemming from the LIC (=ligatation independent cloning) cassette. Said short amino acid sequence is preferred in the case of the expression of E. coli genes. In case of the amino acid sequence QIA EFQLTT the six amino acids in front of the start methionine are stemming from the LIC cassette. Said short amino acid sequence is preferred in the case of the expression of S. cerevisiae genes. The skilled worker knows that other short sequences are also useful in the expression of the genes mentioned in table I, application no. 10, columns 5 and 7. Furthermore the skilled worker is aware of the fact that there is not a need for such short sequences in the expression of the genes.

[2624] Table V: Examples of transit peptides disclosed by von Heijne et al. for the disclosure of Table V see paragraph [0030.2.0.0] above.

[2625] Alternatively to the targeting of the sequences shown in table II, application no. 10, columns 5 and 7 preferably of sequences in general encoded in the nucleus with the aid of the targeting sequences mentioned for example in table V alone or in combination with other targeting sequences preferably into the plastids, the nucleic acids of the invention can directly introduced into the plastidal genome. Therefore in a preferred embodiment the nucleic acid sequences shown in table I, application no. 10, columns 5 and 7 are directly introduced and expressed in plastids.

The term “introduced” in the context of this specification shall mean the insertion of a nucleic acid sequence into the organism by means of a “transfection”, “transduction” or preferably by “transformation”.
A plastid, such as a chloroplast, has been “transformed” by an exogenous (preferably foreign) nucleic acid sequence if nucleic acid sequence has been introduced into the plastid that means that this sequence has crossed the membrane or the membranes of the plastid. The foreign DNA may be integrated (covalently linked) into plastid DNA making up the genome of the plastid, or it may remain unintegrated (e.g., by including a chloroplast origin of replication). “Stably” integrated DNA sequences are those, which are inherited through plastid replication, thereby transferring new plastids, with the features of the integrated DNA sequence to the progeny.

[2626] for the disclosure of the paragraphs [0030.2.0.9] and [0030.3.0.9] see paragraphs [0030.2.0.0] and [0030.3.0.0] above.

[2627] For the inventive process it is of great advantage that by transforming the plastids the intraspecies specific transgene flow is blocked, because a lot of species such as corn, cotton and rice have a strict maternal inheritance of plastids. By placing the genes specified in table I, application no. 10, columns 5 and 7 or active fragments thereof in the plastids of plants, these genes will not be present in the pollen of said plants.

A further preferred embodiment of the invention relates to the use of so called “chloroplast localization sequences”, in which a first RNA sequence or molecule is capable of transporting or “chaperoning” a second RNA sequence, such as a RNA sequence transcribed from the sequences depicted in table 1, application no. 10, columns 5 and 7 or a sequence encoding a protein, as depicted in table II, application no. 10, columns 5 and 7, from an external environment inside a cell or outside a plastid into a chloroplast. In one embodiment the chloroplast localization signal is substantially similar or complementary to a complete or intact viroid sequence. The chloroplast localization signal may be encoded by a DNA sequence, which is transcribed into the chloroplast localization RNA. The term “viroid” refers to a naturally occurring single stranded RNA molecule (Flores, C R Acad Sci III. 2001 October; 324(10): 943-52). Viroids usually contain about 200-500 nucleotides and generally exist as circular molecules. Examples of viroids that contain chloroplast localization signals include but are not limited to ASBVd, PLMVd, CChMVd and ELVd. The viroid sequence or a functional part of it can be fused to the sequences depicted in table, 1, application no. 10, columns 5 and 7 or a sequence encoding a protein, as depicted in table II, application no. 10, columns 5 and 7 in such a manner that the viroid sequence transports a sequence transcribed from a sequence as depicted in table 1 application no. 10, columns 5 and 7 or a sequence encoding a protein as depicted in table II, application no. 10, columns 5 and 7 into the chloroplasts. A preferred embodiment uses a modified ASBVd (Navarro et al., Virology. 2000 Mar. 1; 268(1): 218-25).
In a further specific embodiment the protein to be expressed in the plastids such as the proteins depicted in table II, application no. 10, columns 5 and 7 are encoded by different nucleic acids. Such a method is disclosed in WO 2004/040973, which shall be incorporated by reference. WO 2004/040973 teaches a method, which relates to the translocation of an RNA corresponding to a gene or gene fragment into the chloroplast by means of a chloroplast localization sequence. The genes, which should be expressed in the plant or plants cells, are split into nucleic acid fragments, which are introduced into different compartments in the plant e.g. the nucleus, the plastids and/or mitochondria. Additionally plant cells are described in which the chloroplast contains a ribozyme fused at one end to an RNA encoding a fragment of a protein used in the inventive process such that the ribozyme can trans-splice the translocated fusion RNA to the RNA encoding the gene fragment to form and as the case may be reunite the nucleic acid fragments to an intact mRNA encoding a functional protein for example as disclosed in table II, application no. 10, columns 5 and 7.

[2628] In a preferred embodiment of the invention the nucleic acid sequences as shown in table I, application no. 10, columns 5 and 7 used in the inventive process are transformed into plastids, which are metabolical active. Those plastids should preferably maintain at a high copy number in the plant or plant tissue of interest, most preferably the chloroplasts found in green plant tissues, such as leaves or cotyledons or in seeds.

[2629] For a good expression in the plastids the nucleic acid sequences as shown in table I, application no. 10, columns 5 and 7 are introduced into an expression cassette using a preferably a promoter and terminator, which are active in plastids preferably a chloroplast promoter. Examples of such promoters include the psbA promoter from the gene from spinach or pea, the rbcL promoter, and the atpB promoter from corn.

[2630] for the disclosure of the paragraphs [0031.0.0.9] and [0032.0.0.9] see paragraphs [0031.0.0.0] and [0032.0.0.0] above.

[2631] Advantageously the process for the production of the fine chemical leads to an enhanced production of the fine chemical. The terms “enhanced” or “increase” mean at least a 10%, 20%, 30%, 40% or 50%, preferably at least 60%, 70%, 80%, 90% or 100%, more preferably 150%, 200%, 300%, 400% or 500% higher production of the fine chemical in comparison to the reference as defined below, e.g. that means in comparison to an organism without the aforementioned modification of the activity of a protein as shown in table II, application no. 10, column 3. Preferably the modification of the activity of a protein as shown in table II, application no. 10, column 3 or their combination can be achieved by joining the protein to a transit peptide.

[2632] Surprisingly it was found, that the transgenic expression of the E. coli proteins shown in table II, application no. 10, column 3 in plastids of a plant such as Arabidopsis thaliana for example through the linkage to at least one targeting sequence—for example as mentioned in table V—conferred an increase in the respective fine chemical indicated in column 6 “metabolite” of each table I to IV in the transformed plant.

Surprisingly it was found, that the transgenic expression of the E. coli protein b1704, b2600, b2601, b2965, b3281, and/or b3390 in Arabidopsis thaliana conferred an increase in the 2,3-dimethyl-5-phytylquinol, which is a precursor in the biosynthesis of vitamin E, in particular of gama-tocopherol and thus of alpha-tocopherol. Thus, an increase in the level of this precursor of the tocopherol biosynthesis can be advantageous for the production of vitamin E. For example, in one embodiment the level of 2,3-dimethyl-5-phytylquinol is increased in combination with the modulation of the expression of other genes of the biosynthesis of vitamin E, in particular of genes encoding enzymes metabolising 2,3-dimethyl-5-phytylquinol to produce vitamin E or a precursor thereof, such as the 2,3-dimethyl-5-phytylquinol-Cyclase and/or gama-tocopherol-methyltransferase II.

[2633] for the disclosure of this paragraph see paragraph [0035.0.0.0] above.

[2634] The sequence of b1251 (Accession number F64872) from Escherichia coli has been published in Blattner et al., Science 277 (5331), 1453-1474 (1997), and its activity is being defined as “ycil protein”. Accordingly, in one embodiment, the process of the present invention comprises the use of a “ycil protein” or its homolog, e.g. as shown herein, for the production of the fine chemical, meaning of vitamin E, in particular for increasing the amount of vitamin E in free or bound form in an organism or a part thereof, as mentioned. In one embodiment, in the process of the present invention the activity of a b1251 protein is increased or generated, e.g. from Escherichia coli or a homolog thereof, preferably linked at least to one transit peptide as mentioned for example in table V.

In another embodiment, in the process of the present invention the activity of a b1251 protein is increased or generated in a subcellular compartment of the organism or organism cell such as in an organelle like a plastid or mitochondria.
The sequence of b1704 (Accession number NP_{—}416219) from Escherichia coli has been published in Blattner et al., Science 277 (5331), 1453-1474 (1997), and its activity is being defined as “3-deoxy-D-arabinoheptulosonate-7-phosphate synthase (DAHP synthetase), tryptophan-repressible”. Accordingly, in one embodiment, the process of the present invention comprises the use of a “3-deoxy-D-arabinoheptulosonate-7-phosphate synthase (DAHP synthetase), tryptophan-repressible” or its homolog, e.g. as shown herein, for the production of the fine chemical, meaning of vitamin E, in particular for increasing the amount of vitamin E in free or bound form in an organism or a part thereof, as mentioned. In one embodiment, in the process of the present invention the activity of a b1704 protein is increased or generated, e.g. from Escherichia coli or a homolog thereof, preferably linked at least to one transit peptide as mentioned for example in table V.
In another embodiment, in the process of the present invention the activity of a b1704 protein is increased or generated in a subcellular compartment of the organism or organism cell such as in an organelle like a plastid or mitochondria.
The sequence of b2600 (Accession number NP_{—}417091) from Escherichia coli has been published in Blattner et al., Science 277 (5331), 1453-1474 (1997), and its activity is being defined as “bifunctional chorismate mutase/prephenate dehydrogenase”. Accordingly, in one embodiment, the process of the present invention comprises the use of a “bifunctional chorismate mutase/prephenate dehydrogenase” or its homolog, e.g. as shown herein, for the production of the fine chemical, meaning of vitamin E, in particular for increasing the amount of vitamin E in free or bound form in an organism or a part thereof, as mentioned. In one embodiment, in the process of the present invention the activity of a b2600 protein is increased or generated, e.g. from Escherichia coli or a homolog thereof, preferably linked at least to one transit peptide as mentioned for example in table V.
In another embodiment, in the process of the present invention the activity of a b2600 protein is increased or generated in a subcellular compartment of the organism or organism cell such as in an organelle like a plastid or mitochondria.
The sequence of b2601 (Accession number NP_{—}417092) from Escherichia coli has been published in Blattner et al., Science 277 (5331), 1453-1474 (1997), and its activity is being defined as 3-deoxy-D-arabinoheptulosonate-7-phosphate (DAHP) synthase, tryptophan-repressible. Accordingly, in one embodiment, the process of the present invention comprises the use of a “3-deoxy-D-arabinoheptulosonate-7-phosphate (DAHP) synthase, trypothan-repressible” or its homolog, e.g. as shown herein, for the production of the fine chemical, meaning of vitamin E, in particular for increasing the amount of vitamin E in free or bound form in an organism or a part thereof, as mentioned. In one embodiment, in the process of the present invention the activity of a b2601 protein is increased or generated, e.g. from Escherichia coli or a homolog thereof, preferably linked at least to one transit peptide as mentioned for example in table V.
In another embodiment, in the process of the present invention the activity of a b2601 protein is increased or generated in a subcellular compartment of the organism or organism cell such as in an organelle like a plastid or mitochondria.
The sequence of b2965 (Accession number NP_{—}417440) from Escherichia coli has been published in Blattner et al., Science 277 (5331), 1453-1474 (1997), and its activity is being defined as “ornithine decarboxylase”. Accordingly, in one embodiment, the process of the present invention comprises the use of a “ornithine decarboxylase” or its homolog, e.g. as shown herein, for the production of the fine chemical, meaning of vitamin E, in particular for increasing the amount of vitamin E in free or bound form in an organism or a part thereof, as mentioned. In one embodiment, in the process of the present invention the activity of a b2965 protein is increased or generated, e.g. from Escherichia coli or a homolog thereof, preferably linked at least to one transit peptide as mentioned for example in table V.
In another embodiment, in the process of the present invention the activity of a b2965 protein is increased or generated in a subcellular compartment of the organism or organism cell such as in an organelle like a plastid or mitochondria.
The sequence of b3281 (Accession number NP_{—}417740) from Escherichia coli has been published in Blattner et al., Science 277 (5331), 1453-1474 (1997), and its activity is being defined as “Shikimate dehydrogenase”. Accordingly, in one embodiment, the process of the present invention comprises the use of a “Shikimate dehydrogenase” or its homolog, e.g. as shown herein, for the production of the fine chemical, meaning of vitamin E, in particular for increasing the amount of vitamin E in free or bound form in an organism or a part thereof, as mentioned. In one embodiment, in the process of the present invention the activity of a b3281 protein is increased or generated, e.g. from Escherichia coli or a homolog thereof, preferably linked at least to one transit peptide as mentioned for example in table V.
In another embodiment, in the process of the present invention the activity of a b3281 protein is increased or generated in a subcellular compartment of the organism or organism cell such as in an organelle like a plastid or mitochondria.
The sequence of b3390 (Accession number YP_{—}026215) from Escherichia coli has been published in Blattner et al., Science 277 (5331), 1453-1474 (1997), and its activity is being defined as “shikimate kinase I”. Accordingly, in one embodiment, the process of the present invention comprises the use of a “shikimate kinase I” or its homolog, e.g. as shown herein, for the production of the fine chemical, meaning of vitamin E, in particular for increasing the amount of vitamin E in free or bound form in an organism or a part thereof, as mentioned. In one embodiment, in the process of the present invention the activity of a b3390 protein is increased or generated, e.g. from Escherichia coli or a homolog thereof, preferably linked at least to one transit peptide as mentioned for example in table V.
In another embodiment, in the process of the present invention the activity of a b3390 protein is increased or generated in a subcellular compartment of the organism or organism cell such as in an organelle like a plastid or mitochondria.

[2635] In one embodiment, the homolog of the b1251, b1704, b2600, b2601, b2965, b3281, and/or b3390 is a homolog having said activity and being derived from bacteria. In one embodiment, the homolog of the b1251, b1704, b2600, b2601, b2965, b3281, and/or b3390 is a homolog having said activity and being derived from Proteobacteria. In one embodiment, the homolog of the b1251, b1704, b2600, b2601, b2965, b3281, and/or b3390 is a homolog having said activity and being derived from Gammaproteobacteria. In one embodiment, the homolog of the b1251, b1704, b2600, b2601, b2965, b3281, and/or b3390 is a homolog having said activity and being derived from Enterobacteriales. In one embodiment, the homolog of the b1251, b1704, b2600, b2601, b2965, b3281, and/or b3390 is a homolog having said activity and being derived from Enterobacteriaceae. In one embodiment, the homolog of the b1251, b1704, b2600, b2601, b2965, b3281, and/or b3390 is a homolog having said activity and being derived from Escherichia, preferably from Escherichia coli.

[2636] Homologs of the polypeptide table II, application no. 10, column 3 may be the polypeptides encoded by the nucleic acid molecules indicated in table I, application no. 10, column 7, resp., or may be the polypeptides indicated in table II, application no. 10, column 7, resp.

[2637] for the disclosure of this paragraph see paragraph [0038.0.0.0] above.

[2638] In accordance with the invention, a protein or polypeptide has the “activity of an protein as shown in table II, application no. 10, column 3” if its de novo activity, or its increased expression directly or indirectly leads to an increased in the level of the fine chemical indicated in the respective line of table II, application no. 10, column 6 “metabolite” in the organism or a part thereof, preferably in a cell of said organism, more preferably in an organelle such as a plastid or mitochondria of said organism. The protein has the above mentioned activities of a protein as shown in table II, application no. 10, column 3, preferably in the event the nucleic acid sequences encoding said proteins is functionally joined to the nucleic acid sequence of a transit peptide. Throughout the specification the activity or preferably the biological activity of such a protein or polypeptide or an nucleic acid molecule or sequence encoding such protein or polypeptide is identical or similar if it still has the biological or enzymatic activity of a protein as shown in table II, application no. 10, column 3, or which has at least 10% of the original enzymatic activity, preferably 20%, particularly preferably 30%, most particularly preferably 40% in comparison to a protein as shown in the respective line of table II, application no. 10, column 3 of E. coli.

[2639] for the disclosure of the paragraphs [0040.0.0.9] to [0047.0.0.9] see paragraphs [0040.0.0.0] to [0047.0.0.0] above.

[2640] Preferably, the reference, control or wild type differs form the subject of the present invention only in the cellular activity, preferably of the plastidial activity of the polypeptide of the invention, e.g. as result of an increase in the level of the nucleic acid molecule of the present invention or an increase of the specific activity of the polypeptide of the invention, e.g. by or in the expression level or activity of an protein having the activity of a respective protein as shown in table II, application no. 10, column 3 its biochemical or genetical causes and the increased amount of the respective fine chemical.

[2641] for the disclosure of the paragraphs [0049.0.0.9] to [0051.0.0.9] see paragraphs [0049.0.0.0] to [0051.0.0.0] above.

[2642] For example, the molecule number or the specific activity of the polypeptide or the nucleic acid molecule may be increased. Larger amounts of the fine chemical can be produced if the polypeptide or the nucleic acid of the invention is expressed de novo in an organism lacking the activity of said protein, preferably the nucleic acid molecules as mentioned in table I, application no. 10, columns 5 and 7 alone or preferably in combination with a transit peptide for example as mentioned in table V or in another embodiment by introducing said nucleic acid molecules into an organelle such as an plastid or mitochondria in the transgenic organism. However, it is also possible to modify the expression of the gene which is naturally present in the organisms, for example by integrating a nucleic acid sequence, encoding a plastidic targeting sequence in front (5 prime) of the coding sequence, leading to a functional preprotein, which is directed for example to the plastids.

[2643] for the disclosure of the paragraphs [0053.0.0.9] to [0058.0.0.9] see paragraphs [0053.0.0.0] to [0058.0.0.0] above.

[2644] In case the activity of the Escherichia coli protein b1251 or its homologs, e.g. a “ycil protein” is increased advantageously in an organelle such as a plastid or mitochondria, preferably, in one embodiment an increase of the fine chemical, preferably of alpha-Tocopherol between 35% and 81% or more is conferred.

In case the activity of the Escherichia coli protein b1704 or its homologs, e.g. a “3-deoxy-D-arabinoheptulosonate-7-phosphate synthase (DAHP synthetase), tryptophan-repressible” is increased advantageously in an organelle such as a plastid or mitochondria, preferably, in one embodiment an increase of the fine chemical, preferably of alpha-Tocopherol between 25% and 82% or more is conferred.
In case the activity of the Escherichia coli protein b1704 or its homologs, e.g. a “3-deoxy-D-arabinoheptulosonate-7-phosphate synthase (DAHP synthetase), tryptophan-repressible” is increased advantageously in an organelle such as a plastid or mitochondria, preferably, in one embodiment an increase of the fine chemical, preferably of gamma-Tocopherol, beta-Tocopherol and 2,3-Dimethyl-5-phytylquinol between 83% and 1547% or more is conferred.
In case the activity of the Escherichia coli protein b2600 or its homologs, e.g. a “bifunctional chorismate mutase/prephenate dehydrogenase” is increased advantageously in an organelle such as a plastid or mitochondria, preferably, in one embodiment an increase of the fine chemical, preferably of alpha-Tocopherol between 53% and 88% or more is conferred.
In case the activity of the Escherichia coli protein b2600 or its homologs, e.g. a “bifunctional chorismate mutase/prephenate dehydrogenase” is increased advantageously in an organelle such as a plastid or mitochondria, preferably, in one embodiment an increase of the fine chemical, preferably of gamma-Tocotrienol and beta-Tocotrienol between 677% and 1543% or more is conferred.
In case the activity of the Escherichia coli protein b2600 or its homologs, e.g. a “bifunctional chorismate mutase/prephenate dehydrogenase” is increased advantageously in an organelle such as a plastid or mitochondria, preferably, in one embodiment an increase of the fine chemical, preferably of gamma-Tocopherol, beta-Tocopherol and 2,3-Dimethyl-5-phytylquinol between 140% and 464% or more is conferred.
In case the activity of the Escherichia coli protein b2600 or its homologs, e.g. a “bifunctional chorismate mutase/prephenate dehydrogenase” is increased advantageously in an organelle such as a plastid or mitochondria, preferably, in one embodiment an increase of the fine chemical, preferably of alpha-Tocotrienol between 68% and 1512% or more is conferred.
In case the activity of the Escherichia coli protein b2601 or its homologs, e.g. a “3-deoxy-D-arabinoheptulosonate-7-phosphate (DAHP) synthase” is increased advantageously in an organelle such as a plastid or mitochondria, preferably, in one embodiment an increase of the fine chemical, preferably of alpha-Tocopherol between 56% and 611% or more is conferred.
In case the activity of the Escherichia coli protein b2601 or its homologs, e.g. a “3-deoxy-D-arabinoheptulosonate-7-phosphate (DAHP) synthase” is increased advantageously in an organelle such as a plastid or mitochondria, preferably, in one embodiment an increase of the fine chemical, preferably of gamma-Tocopherol, beta-Tocopherol and 2,3-Dimethyl-5-phytylquinol between 63% and 257% or more is conferred.
In case the activity of the Escherichia coli protein b2965 or its homologs, e.g. a “ornithine decarboxylase” is increased advantageously in an organelle such as a plastid or mitochondria, preferably, in one embodiment an increase of the fine chemical, preferably of gamma-Tocopherol, beta-Tocopherol and 2,3-Dimethyl-5-phytylquinol between 203% and 610% or more is conferred.
In case the activity of the Escherichia coli protein b2965 or its homologs, e.g. a “ornithine decarboxylase” is increased advantageously in an organelle such as a plastid or mitochondria, preferably, in one embodiment an increase of the fine chemical, preferably of alpha-Tocopherol between 72% and 204% or more is conferred.
In case the activity of the Escherichia coli protein b3281 or its homologs, e.g. a “Shikimate dehydrogenase” is increased advantageously in an organelle such as a plastid or mitochondria, preferably, in one embodiment an increase of the fine chemical, preferably of gamma-Tocopherol, beta-Tocopherol and 2,3-Dimethyl-5-phytylquinol between 38% and 164% or more is conferred.
In case the activity of the Escherichia coli protein b3390 or its homologs, e.g. a “shikimate kinase I” is increased advantageously in an organelle such as a plastid or mitochondria, preferably, in one embodiment an increase of the fine chemical, preferably of alpha-Tocopherol between 62% and 68% or more is conferred.
In case the activity of the Escherichia coli protein b3390 or its homologs, e.g. a “shikimate kinase I” is increased advantageously in an organelle such as a plastid or mitochondria, preferably, in one embodiment an increase of the fine chemical, preferably of gamma-Tocopherol, beta-Tocopherol and 2,3-Dimethyl-5-phytylquinol between 41% and 86% or more is conferred.

[2645] In one embodiment, the activity of any on of the Escherichia coli proteins b1251, b1704, b2600, b2601, b2965, b3281, and/or b3390 f or their homologs,” is advantageously increased in an organelle such as a plastid or mitochondria, preferably conferring an increase of the fine chemical indicated in column 6 “metabolites” for application no. 10 in any one of Tables I to IV, resp.,

[2646] for the disclosure of the paragraphs [0061.0.0.9] and [0062.0.0.8] see paragraphs [0061.0.0.0] and [0062.0.0.0] above.

[2647] A protein having an activity conferring an increase in the amount or level of the fine chemical, preferably upon targeting to the plastids, has in one embodiment the structure of the polypeptide described herein, in particular of the polypeptides comprising the consensus sequence shown in table IV, application no. 10, column 7 or of the polypeptide as shown in the amino acid sequences as disclosed in table II, application no. 10, columns 5 and 7 or the functional homologues thereof as described herein, or is encoded by the nucleic acid molecule characterized herein or the nucleic acid molecule according to the invention, for example by the nucleic acid molecule as shown in table I, application no. 10, columns 5 and 7 or its herein described functional homologues and has the herein mentioned activity.

[2648] For the purposes of the present invention, the reference to the fine chemical, e.g. to the term “vitamin E”, also encompasses the corresponding salts, such as, for example, the potassium or sodium salts or the salts with amines such as diethylamine as well as tryglycerides, lipids, oils and/or fats containing the respective fine chemical, e.g. vitamin E, alpha-, beta-, gamma-tocopherol, alpha-, beta-tocotrienol or the precourser 2,3-Dimethyl-5-phytylquinol

[2649] for the disclosure of the paragraphs [0065.0.0.9] and [0066.0.0.9] see paragraphs [0065.0.0.0] and [0066.0.0.0] above.

[2650] In one embodiment, the process of the present invention comprises one or more of the following steps
[2651] a) stabilizing a protein conferring the increased expression of a protein encoded by the nucleic acid molecule of the invention or of the polypeptide of the invention, e.g. of a polypeptide having the activity of a protein as indicated in table II, application no. 10, columns 5 and 7 or its homologs activity having herein-mentioned vitamin E increasing activity; and/or
[2652] b) stabilizing a mRNA conferring the increased expression of a protein encoded by the nucleic acid molecule of the invention, which is in the sense of the invention a fusion of a nucleic acid sequence encoding a transit peptide and of a nucleic acid sequence as shown in table I, application no. 10, columns 5 and 7, e.g. a nucleic acid sequence encoding a polypeptide having the activity of a protein as indicated in table II, application no. 10, columns 5 and 7 or its homologs activity or of a mRNA encoding the polypeptide of the present invention having herein-mentioned vitamin E increasing activity; and/or
[2653] c) increasing the specific activity of a protein conferring the increased expression of a protein encoded by the nucleic acid molecule of the invention or of the polypeptide of the present invention having herein-mentioned vitamin E increasing activity, e.g. of a polypeptide having the activity of a protein as indicated in table II, application no. 10, columns 5 and 7 or its homologs activity, or decreasing the inhibitory regulation of the polypeptide of the invention; and/or
[2654] d) generating or increasing the expression of an endogenous or artificial transcription factor mediating the expression of a protein conferring the increased expression of a protein encoded by the nucleic acid molecule of the invention or of the polypeptide of the invention having herein-mentioned vitamin E increasing activity, e.g. of a polypeptide having the activity of a protein as indicated in table II, application no. 10, columns 5 and 7 or its homologs activity; and/or
[2655] e) stimulating activity of a protein conferring the increased expression of a protein encoded by the nucleic acid molecule of the present invention or a polypeptide of the present invention having herein-mentioned vitamin E increasing activity, e.g. of a polypeptide having the activity of a protein as indicated in table II, application no. 10, columns 5 and 7 or its homologs activity, by adding one or more exogenous inducing factors to the organisms or parts thereof; and/or
[2656] f) expressing a transgenic gene encoding a protein conferring the increased expression of a polypeptide encoded by the nucleic acid molecule of the present invention or a polypeptide of the present invention, having herein-mentioned vitamin E increasing activity, e.g. of a polypeptide having the activity of a protein as indicated in table II, application no. 10, columns 5 and 7 or its homologs activity, and/or
[2657] g) increasing the copy number of a gene conferring the increased expression of a nucleic acid molecule encoding a polypeptide encoded by the nucleic acid molecule of the invention or the polypeptide of the invention having herein-mentioned vitamin E increasing activity, e.g. of a polypeptide having the activity of a protein as indicated in table II, application no. 10, columns 5 and 7 or its homologs activity; and/or
[2658] h) increasing the expression of the endogenous gene encoding the polypeptide of the invention, e.g. a polypeptide having the activity of a protein as indicated in table II, application no. 10, columns 5 and 7 or its homologs activity, by adding positive expression or removing negative expression elements, e.g. homologous recombination can be used to either introduce positive regulatory elements like for plants the 35S enhancer into the promoter or to remove repressor elements form regulatory regions. Further gene conversion methods can be used to disrupt repressor elements or to enhance to activity of positive elements. Positive elements can be randomly introduced in plants by T-DNA or transposon mutagenesis and lines can be identified in which the positive elements have be integrated near to a gene of the invention, the expression of which is thereby enhanced; and/or
[2659] i) modulating growth conditions of an organism in such a manner, that the expression or activity of the gene encoding the protein of the invention or the protein itself is enhanced for example microorganisms or plants can be grown for example under a higher temperature regime leading to an enhanced expression of heat shock proteins, which can lead an enhanced fine chemical production; and/or
[2660] j) selecting of organisms with especially high activity of the proteins of the invention from natural or from mutagenized resources and breeding them into the target organisms, eg the elite crops; and/or
[2661] k) directing a protein encoded by the nucleic acid molecule of the invention or of the polypeptide of the present invention having herein-mentioned vitamin E increasing activity, e.g. of polypeptide having the activity of a protein as indicated in table II, application no. 10, columns 5 and 7 or its homologs activity, to the plastids by the addition of a plastidial targeting sequence; and/or
[2662] l) generating the expression of a protein encoded by the nucleic acid molecule of the invention or of the polypeptide of the present invention having herein-mentioned vitamin E increasing activity, e.g. of a polypeptide having the activity of a protein as indicated in table II, application no. 10, columns 5 and 7 or its homologs activity in plastids by the stable or transient transformation advantageously stable transformation of organelles preferably plastids with an inventive nucleic acid sequence preferably in form of an expression cassette containing said sequence leading to the plastidial expression of the nucleic acids or polypeptides of the invention; and/or
[2663] m) generating the expression of a protein encoded by the nucleic acid molecule of the invention or of the polypeptide of the present invention having herein-mentioned vitamin E increasing activity, e.g. of a polypeptide having the activity of a protein as indicated in table II, application no. 10, columns 5 and 7 or its homologs activity in plastids by integration of a nucleic acid of the invention into the plastidal genome under control of preferable a plastidial promoter.

[2664] Preferably, said mRNA is the nucleic acid molecule of the present invention and/or the protein conferring the increased expression of a protein encoded by the nucleic acid molecule of the present invention alone or link to a transit nucleic acid sequence or transit peptide encoding nucleic acid sequence or the polypeptide having the herein mentioned activity, e.g. conferring the increase of the respective fine chemical as indicated in column 6 of application no. 10 in Table I to IV, resp., after increasing the expression or activity of the encoded polypeptide preferably in organelles such as plastids or having the activity of a polypeptide having an activity as the protein as shown in table II, application no. 10, column 3 or its homologs. Preferably the increase of the fine chemical takes place in plastids.

[2665] for the disclosure of the paragraphs [0069.0.0.9] to [0079.0.0.9] see paragraphs [0069.0.0.0] to [0079.0.0.0] above.

[2666] The activation of an endogenous polypeptide having above-mentioned activity, e.g. having the activity of a protein as shown in table II, application no. 10, column 3 or of the polypeptide of the invention, e.g. conferring the increase of the respective fine chemical after increase of expression or activity in the cytsol and/or in an organelle like a plastid, preferentially in the plastid, can also be increased by introducing a synthetic transcription factor, which binds close to the coding region of the gene encoding the protein as shown in table II, application no. 10, column 3 and activates its transcription. A chimeric zinc finger protein can be constructed, which comprises a specific DNA-binding domain and an activation domain as e.g. the VP16 domain of Herpes Simplex virus. The specific binding domain can bind to the regulatory region of the gene encoding the protein as shown in table II, application no. 10, column 3. The expression of the chimeric transcription factor in a organism, in particular in a plant, leads to a specific expression of the protein as shown in table II, application no. 10, column 3, see e.g. in WO01/52620, Oriz, Proc. Natl. Acad. Sci. USA, 2002, Vol. 99, 13290 or Guan, Proc. Natl. Acad. Sci. USA, 2002, Vol. 99, 13296.

[2667] for the disclosure of the paragraphs [0081.0.0.9] to [0084.0.0.9] see paragraphs [0081.0.0.0] to [0084.0.0.0] above.

[2668] Owing to the introduction of a gene or a plurality of genes conferring the expression of the nucleic acid molecule of the invention or the nucleic acid molecule used in the method of the invention or the polypeptide of the invention or the polypeptide used in the method of the invention as described below, for example the nucleic acid construct mentioned below into an organism alone or in combination with other genes, it is possible not only to increase the biosynthetic flux towards the end product, but also to increase, modify or create de novo an advantageous, preferably novel metabolites composition in the organism, e.g. an advantageous vitamin composition cornprising a higher content of (from a viewpoint of nutritional physiology limited) vitamins, like vitamin A, B, E; etc., or its precursor like 2,3-dimethyl-5-phytylquinol.

[2669] for the disclosure of this paragraph see paragraph [0086.0.0.0] above.

[2670] By influencing the metabolism thus, it is possible to produce, in the process according to the invention, further advantageous compounds. Examples of such compounds are vitamin E or its precursor 2,3-dimethyl-5-phytylquinol, further vitamins or provitamins or carotenoids.

[2671] Accordingly, in one embodiment, the process according to the invention relates to a process, which comprises:
[2672] a) providing a non-human organism, preferably a microorganism, a non-human animal, a plant or animal cell, a plant or animal tissue or a plant, more preferably a microorganism, a plant or a plant tissue;
[2673] b) increasing the activity of a protein as shown in table II, application no. 10, column 3 or of a polypeptide being encoded by the nucleic acid molecule of the present invention and described below, e.g. conferring an increase of the respective fine chemical as indicated in any one of Tables I to IV, application no. 10, column 6 “metabolite” in the organism, preferably in the microorganism, the non-human animal, the plant or animal cell, the plant or animal tissue or the plant, more preferably a microorganism, a plant or a plant tissue, in the cytsol or in the plastids, preferentially in the plastids,
[2674] c) growing the organism, preferably the microorganism, the non-human animal, the plant or animal cell, the plant or animal tissue or the plant under conditions which permit the production of the respective fine chemical in the organism, preferably the microorganism, the plant cell, the plant tissue or the plant; and
[2675] d) if desired, recovering, optionally isolating, the respective free and/or bound the fine chemical and, optionally further free and/or bound amino acids synthesized by the organism, the microorganism, the non-human animal, the plant or animal cell, the plant or animal tissue or the plant.

[2676] The organism, in particular the microorganism, non-human animal, the plant or animal cell, the plant or animal tissue or the plant is advantageously grown in such a way that it is not only possible to recover, if desired isolate the free or bound the respective fine chemical or the free and bound the respective fine chemical but as option it is also possible to produce, recover and, if desired isolate, other free or/and bound carotenoids, vitamins, provitamins etc.

[2677] for the disclosure of the paragraphs [0090.0.0.9] to [0097.0.0.9] see paragraphs [0090.0.0.0] to [0097.0.0.0] above.

[2678] With regard to the nucleic acid sequence as depicted a nucleic acid construct which contains a nucleic acid sequence mentioned herein or an organism (=transgenic organism) which is transformed with said nucleic acid sequence or said nucleic acid construct, “transgene” means all those constructs which have been brought about by genetic manipulation methods, preferably in which either
[2679] a) the nucleic acid sequence as shown in table I, application no. 10, columns 5 and 7 or a derivative thereof, or
[2680] b) a genetic regulatory element, for example a promoter, which is functionally linked to the nucleic acid sequence as shown table I, application no. 10, columns 5 and 7 or a derivative thereof, or
[2681] c) (a) and (b)
   is/are not present in its/their natural genetic environment or has/have been modified by means of genetic manipulation methods, it being possible for the modification to be, by way of example, a substitution, addition, deletion, inversion or insertion of one or more nucleotide. “Natural genetic environment” means the natural chromosomal locus in the organism of origin or the presence in a genomic library. In the case of a genomic library, the natural, genetic environment of the nucleic acid sequence is preferably at least partially still preserved. The environment flanks the nucleic acid sequence at least on one side and has a sequence length of at least 50 bp, preferably at least 500 bp, particularly preferably at least 1000 bp, very particularly preferably at least 5000 bp.

[2682] The use of the nucleic acid sequence according to the invention or of the nucleic acid construct according to the invention for the generation of transgenic plants is therefore also subject matter of the invention. As mentioned above the inventive nucleic acid sequence consists advantageously of the nucleic acid sequences as depicted in the sequence protocol and disclosed in table I, application no. 10, columns 5 and 7 joined to a nucleic acid sequence encoding a transit peptide, or a targeting nucleic acid sequence which directs the nucleic acid sequences disclosed in table I, application no. 10, columns 5 and 7 to the organelle preferentially the plastids. Alternatively the inventive nucleic acids sequences consist advantageously of the nucleic acid sequences as depicted in the sequence protocol and disclosed in table I, application no. 10, columns 5 and 7 joined preferably to a nucleic acids sequence mediating the stable integration of nucleic acids into the plastidial genome and optionally sequences mediating the transcription of the sequence in the plastidial compartment. A transient expression is in principal also desirable and possible.

[2683] for the disclosure of this paragraph see paragraph [0100.0.0.0] above.

[2684] In an advantageous embodiment of the invention, the organism takes the form of a plant whose vitamin E content is modified advantageously owing to the nucleic acid molecule of the present invention expressed. This is important for plant breeders since, for example, the nutritional value of plants for poultry is dependent on the abovementioned vitamin E as vitamin source in feed. Further, this is also important for the production of cosmetic compostions since, for example, the antioxidant level of plant extracts is depending on the abovementioned vitamin E and the general amount of vitamins e.g. as antioxidants.

After the activity of the protein as shown in table II, application no. 10, column 3 has been increased or generated, or after the expression of nucleic acid molecule or polypeptide according to the invention has been generated or increased, the transgenic plant generated thus is grown on or in a nutrient medium or else in the soil and subsequently harvested.

[2685] for the disclosure of the paragraphs [0102.0.0.9] to [0110.0.0.9] see paragraphs [0102.0.0.0] to [0110.0.0.0] above.

[2686] In a preferred embodiment, the respective fine chemical (vitamin E or its precursor 2,3-dimethyl-5-phytylquinol) is produced in accordance with the invention and, if desired, is isolated. The production of further vitamins, provitamins or carotenoids, e.g. carotenes or xanthophylls, or mixtures thereof or mixtures with other compounds by the process according to the invention is advantageous.

Thus, the content of plant components and preferably also further impurities is as low as possible, and the abovementioned vitamin E or its precursor 2,3-dimethyl-5-phytylquinol are obtained in as pure form as possible. In these applications, the content of plant components advantageously amounts to less than 10%, preferably 1%, more preferably 0.1%, very especially preferably 0.01% or less.

[2687] In another preferred embodiment of the invention a combination of the increased expression of the nucleic acid sequence or the protein of the invention together with the transformation of a protein or polypeptide or a compound, which functions as a sink for the desired fine chemical, for example vitamin E or its precursor 2,3-dimethyl-5-phytylquinol in the organism, is useful to increase the production of the respective fine chemical.

[2688] In the case of the fermentation of microorganisms, the abovementioned vitamin E or its precursor 2,3-dimethyl-5-phytylquinol may accumulate in the medium and/or the cells. If microorganisms are used in the process according to the invention, the fermentation broth can be processed after the cultivation. Depending on the requirement, all or some of the biomass can be removed from the fermentation broth by separation methods such as, for example, centrifugation, filtration, decanting or a combination of these methods, or else the biomass can be left in the fermentation broth. The fermentation broth can subsequently be reduced, or concentrated, with the aid of known methods such as, for example, rotary evaporator, thin-layer evaporator, falling film evaporator, by reverse osmosis or by nanofiltration. Afterwards advantageously further compounds for formulation can be added such as corn starch or silicates. This concentrated fermentation broth advantageously together with compounds for the formulation can subsequently be processed by lyophilization, spray drying, spray granulation or by other methods. Preferably the respective fine chemical or the vitamin E or its precursor 2,3-dimethyl-5-phytylquinol comprising compositions are isolated from the organisms, such as the microorganisms or plants or the culture medium in or on which the organisms have been grown, or from the organism and the culture medium, in the known manner, for example via extraction, distillation, crystallization, chromatography or a combination of these methods. These purification methods can be used alone or in combination with the aforementioned methods such as the separation and/or concentration methods.

[2689] Transgenic plants which comprise the vitamin E or its precursor 2,3-dimethyl-5-phytylquinol such as alpha, beta, or gamma-tocopherol, synthesized in the process according to the invention can advantageously be marketed directly without there being any need for vitamin E or its precursor 2,3-dimethyl-5-phytylquinol synthesized to be isolated. Plants for the process according to the invention are listed as meaning intact plants and all plant parts, plant organs or plant parts such as leaf, stem, seeds, root, tubers, anthers, fibers, root hairs, stalks, embryos, calli, cotelydons, petioles, harvested material, plant tissue, reproductive tissue and cell cultures which are derived from the actual transgenic plant and/or can be used for bringing about the transgenic plant. In this context, the seed comprises all parts of the seed such as the seed coats, epidermal cells, seed cells, endosperm or embryonic tissue.

The site of vitamin E biosynthesis in plants is, inter alia, the leaf tissue so that the isolation of leafs makes sense. However, this is not limiting, since the expression may also take place in a tissue-specific manner in all of the remaining parts of the plant, in particular in fat-containing seeds. A further preferred embodiment therefore relates to a seed-specific isolation of vitamin E or its precursor 2,3-dimethyl-5-phytylquinol. However, the respective fine chemical produced in the process according to the invention can also be isolated from the organisms, advantageously plants, in the form of their oils, fats, lipids as extracts, e.g. ether, alcohol, or other organic solvents or water containing extract and/or free vitamin E or its precursor 2,3-dimethyl-5-phytylquinol. The respective fine chemical produced by this process can be obtained by harvesting the organisms, either from the crop in which they grow, or from the field. This can be done via pressing or extraction of the plant parts, preferably the plant seeds. To increase the efficiency of oil extraction it is beneficial to clean, to temper and if necessary to hull and to flake the plant material especially the seeds. E.g the oils, fats, lipids, extracts, e.g. ether, alcohol, or other organic solvents or water containing extract and/or free vitamin E or its precursor 2,3-dimethyl-5-phytylquinol can be obtained by what is known as cold beating or cold pressing without applying heat. To allow for greater ease of disruption of the plant parts, specifically the seeds, they are previously comminuted, steamed or roasted. The seeds, which have been pretreated in this manner can subsequently be pressed or extracted with solvents such as preferably warm hexane. The solvent is subsequently removed. In the case of microorganisms, the latter are, after harvesting, for example extracted directly without further processing steps or else, after disruption, extracted via various methods with which the skilled worker is familiar. In this manner, more than 96% of the compounds produced in the process can be isolated. Thereafter, the resulting products are processed further, i.e. degummed and/or refined. In this process, substances such as the plant mucilages and suspended matter are first removed. What is known as desliming can be affected enzymatically or, for example, chemico-physically by addition of acid such as phosphoric acid.
Because vitamin E or its precursor 2,3-dimethyl-5-phytylquinol in microorganisms may be localized intracellularly, their recovery essentials comes down to the isolation of the biomass. Well-established approaches for the harvesting of cells include filtration, centrifugation and coagulation/flocculation as described herein. Determination of tocopherols in cells has been described by Tan and Tsumura 1989, see also Biotechnology of Vitamins, Pigments and Growth Factors, Edited by Erik J. Vandamme, London, 1989, p. 96 to 103. Many further methods to determine the tocopherol content are known to the person skilled in the art.

[2690] Vitamin E or its precursor 2,3-dimethyl-5-phytylquinol can for example be analyzed advantageously via HPLC or GC separation methods and detected by MS oder MSMS methods. The unambiguous detection for the presence of Vitamin E or its precursor 2,3-dimethyl-5-phytylquinol containing products can be obtained by analyzing recombinant organisms using analytical standard methods: GC, GC-MS or TLC, as described on several occasions by Christie and the references therein (1997, in: Advances on Lipid Methodology, Fourth Edition: Christie, Oily Press, Dundee, 119-169; 1998, Gaschromatographie-Massenspektrometrie-Verfahren [Gas chromatography/mass spectrometric methods], Lipide 33:343-353). The material to be analyzed can be disrupted by sonication, grinding in a glass mill, liquid nitrogen and grinding, cooking, or via other applicable methods; see also Biotechnology of Vitamins, Pigments and Growth Factors, Edited by Erik J. Vandamme, London, 1989, p. 96 to 103.

[2691] In a preferred embodiment, the present invention relates to a process for the production of the respective fine chemical comprising or generating in an organism or a part thereof, preferably in a cell compartment such as a plastid or mitochondria, the expression of at least one nucleic acid molecule comprising a nucleic acid molecule selected from the group consisting of:
[2692] a) nucleic acid molecule encoding, preferably at least the mature form, of the polypeptide shown in table II, application no. 10, columns 5 and 7 or a fragment thereof, which confers an increase in the amount of the respective fine chemical in an organism or a part thereof;
[2693] b) nucleic acid molecule comprising, preferably at least the mature form, of the nucleic acid molecule shown in table I, application no. 10, columns 5 and 7;
[2694] c) nucleic acid molecule whose sequence can be deduced from a polypeptide sequence encoded by a nucleic acid molecule of (a) or (b) as result of the degeneracy of the genetic code and conferring an increase in the amount of the respective fine chemical in an organism or a part thereof;
[2695] d) nucleic acid molecule encoding a polypeptide which has at least 50% identity with the amino acid sequence of the polypeptide encoded by the nucleic acid molecule of (a) to (c) and conferring an increase in the amount of the respective fine chemical in an organism or a part thereof;
[2696] e) nucleic acid molecule which hybridizes with a nucleic acid molecule of (a) to (c) under stringent hybridisation conditions and conferring an increase in the amount of the respective fine chemical in an organism or a part thereof;
[2697] f) nucleic acid molecule encoding a polypeptide, the polypeptide being derived by substituting, deleting and/or adding one or more amino acids of the amino acid sequence of the polypeptide encoded by the nucleic acid molecules (a) to (d), preferably to (a) to (c) and conferring an increase in the amount of the respective fine chemical in an organism or a part thereof;
[2698] g) nucleic acid molecule encoding a fragment or an epitope of a polypeptide which is encoded by one of the nucleic acid molecules of (a) to (e), preferably to (a) to (c) and conferring an increase in the amount of the respective fine chemical in an organism or a part thereof;
[2699] h) nucleic acid molecule comprising a nucleic acid molecule which is obtained by amplifying nucleic acid molecules from a cDNA library or a genomic library using the primers shown in table III, application no. 10, column 7 and conferring an increase in the amount of the respective fine chemical in an organism or a part thereof;
[2700] i) nucleic acid molecule encoding a polypeptide which is isolated, e.g. from an expression library, with the aid of monoclonal antibodies against a polypeptide encoded by one of the nucleic acid molecules of (a) to (h), preferably to (a) to (c), and conferring an increase in the amount of the respective fine chemical in an organism or a part thereof;
[2701] j) nucleic acid molecule which encodes a polypeptide comprising the consensus sequence shown in table IV, application no. 10, column 7 and conferring an increase in the amount of the respective fine chemical in an organism or a part thereof;
[2702] k) nucleic acid molecule comprising one or more of the nucleic acid molecule encoding the amino acid sequence of a polypeptide encoding a domain of the polypeptide shown in table II, application no. 10, columns 5 and 7 and conferring an increase in the amount of the fine chemical in an organism or a part thereof; and
[2703] l) nucleic acid molecule which is obtainable by screening a suitable library under stringent conditions with a probe comprising one of the sequences of the nucleic acid molecule of (a) to (k), preferably to (a) to (c), or with a fragment of at least 15 nt, preferably 20 nt, 30 nt, 50 nt, 100 nt, 200 nt or 500 nt of the nucleic acid molecule characterized in (a) to (k), preferably to (a) to (c), and conferring an increase in the amount of the respective fine chemical in an organism or a part thereof;
   or which comprises a sequence which is complementary thereto.

[2704] In one embodiment, the nucleic acid molecule used in the process of the invention distinguishes over the sequence indicated in table I A, application no. 10, columns 5 and 7 by one or more nucleotides. In one embodiment, the nucleic acid molecule used in the process of the invention does not consist of the sequence indicated in table I A, application no. 10, columns 5 and 7. In one embodiment, the nucleic acid molecule used in the process of the invention is less than 100%, 99.999%, 99.99%, 99.9% or 99% identical to a sequence indicated in table I A, application no. 10, columns 5 and 7. In another embodiment, the nucleic acid molecule does not encode a polypeptide of a sequence indicated in table II A, application no. 10, columns 5 and 7.

[2705] In one embodiment, the nucleic acid molecule used in the process of the invention distinguishes over the sequence indicated in table I B, application no. 10, columns 5 and 7, by one or more nucleotides. In one embodiment, the nucleic acid molecule used in the process of the invention does not consist of the sequence indicated in table I B, application no. 10, columns 5 and 7. In one embodiment, the nucleic acid molecule used in the process of the invention is less than 100%, 99.999%, 99.99%, 99.9% or 99% identical to a sequence indicated in table I B, application no. 10, columns 5 and 7. In another embodiment, the nucleic acid molecule does not encode a polypeptide of a sequence indicated in table II B, application no. 10, columns 5 and 7.

[2706] In one embodiment, the nucleic acid molecule used in the process distinguishes over the sequence shown in table I, application no. 10, columns 5 and 7 by one or more nucleotides or does not consist of the sequence shown in table I, application no. 10, columns 5 and 7. In one embodiment, the nucleic acid molecule of the present invention is less than 100%, 99.999%, 99.99%, 99.9% or 99% identical to the sequence shown in table I, application no. 10, columns 5 and 7. In another embodiment, the nucleic acid molecule does not encode a polypeptide of the sequence shown in table II, application no. 10, columns 5 and 7.

[2707] for the disclosure of the paragraphs [0118.0.0.9] to [0120.0.0.9] see paragraphs [0118.0.0.0] to [0120.0.0.0] above.

[2708] The expression of nucleic acid molecules with the sequence shown in table I, application no. 10, columns 5 and 7, or nucleic acid molecules which are derived from the amino acid sequences shown in table II, application no. 10, columns 5 and 7 or from polypeptides comprising the consensus sequence shown in table IV, application no. 10, column 7, or their derivatives or homologues encoding polypeptides with the enzymatic or biological activity of a protein as shown in table II, application no. 10, column 3, and conferring an increase of the respective fine chemical (column 6 of application no. 10 in any one of Tables I to IV) after increasing its plastidic and/or specific activity in the plastids is advantageously increased in the process according to the invention by expression either in the cytsol or in an organelle such as a plastid or mitochondria or both, preferably in plastids.

[2709] for the disclosure of this paragraph see paragraph [0122.0.0.0] above.

[2710] Nucleic acid molecules, which are advantageous for the process according to the invention and which encode polypeptides with the activity of a protein as shown in table II, application no. 10, column 3 can be determined from generally accessible databases.

[2711] for the disclosure of this paragraph see paragraph [0124.0.0.0] above.

[2712] The nucleic acid molecules used in the process according to the invention take the form of isolated nucleic acid sequences, which encode polypeptides with the activity of the proteins as shown in table II, application no. 10, column 3 and which confer an increase in the level of the respective fine chemical indicated in table II, application no. 10, column 6 by being expressed either in the cytsol or in an organelle such as a plastid or mitochondria or both, preferably in plastids, and the gene product being localized in the plastid and other parts of the cell or in the plastid as described above.

[2713] for the disclosure of the paragraphs [0126.0.0.9] to [0133.0.0.9] see paragraphs [0126.0.0.0] to [0133.0.0.0] above.

[2714] Production strains which are also advantageously selected in the process according to the invention are microorganisms selected from the group of green algae, like Spongioccoccum exentricum, Chlorella sorokiniana (pyrenoidosa, 7-11-05), or algae of the genus Haematococcus, Phaedactylum tricornatum, Volvox or Dunaliella or form the group of fungi like fungi belonging to the Daccrymycetaceae family, or non-photosynthetic bacteria, like methylotrophs, flavobacteria, actinomycetes, like streptomyces chrestomyceticus, Mycobacteria like Mycobacterim phlei, or Rhodobacter capsulatus. Thus, the invention also contemplates embodiments in which a host lacks vitamin E or its precursor 2,3-dimethyl-5-phytylquinol or other vitamin E or its precursor 2,3-dimethyl-5-phytylquinol precursors, such as the vinca. In a plant of the latter type, the inserted DNA includes genes that code for proteins producing vitamin E precursors (compounds that can be converted biologically into a compound with vitamin E activity) and one or more modifying enzymes which were originally absent in such a plant.

The invention also contemplates embodiments in which the vitamin E or its precursor 2,3-dimethyl-5-phytylquinol, or other vitamin E precursor compounds in the production of the respective fine chemical, is present in the phytosynthtically active organisms chosen as the host; for example, cyanobacteria, moses, algae or plants which, even as a wild type, are capable of producing vitamin E.

[2715] However, it is also possible to use artificial sequences, which differ in one or more bases from the nucleic acid sequences found in organisms, or in one or more amino acid molecules from polypeptide sequences found in organisms, in particular from the polypeptide sequences shown in table II, application no. 10, columns 5 and 7 or the functional homologues thereof as described herein, preferably conferring above-mentioned activity, i.e. conferring an increase of the respective fine chemical after increasing its plastidic activity, e.g. after increasing the activity of a protein as shown in table II, application no. 10, column 3 by—for example—expression either in the cytsol or in an organelle such as a plastid or mitochondria or both, preferably in plastids and the gene product, e.g. the polypeptide, being localized in the plastid and other parts of the cell or in the plastid as described above.

[2716] for the disclosure of the paragraphs [0135.0.0.9] to [0140.0.0.9] see paragraphs [0135.0.0.0] to [0140.0.0.0] above.

[2717] Synthetic oligonucleotide primers for the amplification, e.g. as shown in table III, application no. 10, column 7, by means of polymerase chain reaction can be generated on the basis of a sequence shown herein, for example the sequence shown in table I, application no. 10, columns 5 and 7 or the sequences derived from table II, application no. 10, columns 5 and 7.

[2718] Moreover, it is possible to identify conserved regions from various organisms by carrying out protein sequence alignments with the polypeptide used in the process of the invention, in particular with sequences of the polypeptide of the invention, from which conserved regions, and in turn, degenerate primers can be derived. Conserved regions are those, which show a very little variation in the amino acid in one particular position of several homologs from different origin. The consensus sequence shown in table IV, application no. 10, column 7 is derived from said alignments.

[2719] Degenerated primers can then be utilized by PCR for the amplification of fragments of novel proteins having above-mentioned activity, e.g. conferring the increase of the fine chemical after increasing the expression or activity or having the activity of a protein as shown in table II, application no. 10, column 3 or further functional homologs of the polypeptide of the invention from other organisms.

[2720] for the disclosure of the paragraphs [0144.0.0.9] to [0151.0.0.9] see paragraphs [0144.0.0.0] to [0151.0.0.0] above.

[2721] Polypeptides having above-mentioned activity, i.e. conferring the increase of the respective fine chemical indicated in table I, application no. 10, column 6, and being derived from other organisms, can be encoded by other DNA sequences which hybridize to the sequences shown in table I, application no. 10, columns 5 and 7, preferably of table I B, application no. 10, columns 5 and 7 under relaxed hybridization conditions and which code on expression for peptides having the respective fine chemical, i.e. vitamin E or its precursor 2,3-dimethyl-5-phytylquinol resp., in particular, of alpha-, beta-, and/or gamma-tocopherol, resp., increasing activity.

[2722] for the disclosure of the paragraphs [0153.0.0.9] to [0159.0.0.9] see paragraphs [0153.0.0.0] to [0159.0.0.0] above.

[2723] Further, the nucleic acid molecule of the invention comprises a nucleic acid molecule, which is a complement of one of the nucleotide sequences of above mentioned nucleic acid molecules or a portion thereof. A nucleic acid molecule which is complementary to one of the nucleotide sequences shown in table I, application no. 10, columns 5 and 7, preferably shown in table I B, application no. 10, columns 5 and 7 is one which is sufficiently complementary to one of the nucleotide sequences shown in table I, application no. 10, columns 5 and 7, preferably shown in table I B, application no. 10, columns 5 and 7 such that it can hybridize to one of the nucleotide sequences shown in table I, application no. 10, columns 5 and 7, preferably shown in table I B, application no. 10, columns 5 and 7, thereby forming a stable duplex. Preferably, the hybridisation is performed under stringent hybridization conditions. However, a complement of one of the herein disclosed sequences is preferably a sequence complement thereto according to the base pairing of nucleic acid molecules well known to the skilled person. For example, the bases A and G undergo base pairing with the bases T and U or C, resp. and visa versa. Modifications of the bases can influence the base-pairing partner.

[2724] The nucleic acid molecule of the invention comprises a nucleotide sequence which is at least about 30%, 35%, 40% or 45%, preferably at least about 50%, 55%, 60% or 65%, more preferably at least about 70%, 80%, or 90%, and even more preferably at least about 95%, 97%, 98%, 99% or more homologous to a nucleotide sequence shown in table I, application no. 10, columns 5 and 7, preferably shown in table I B, application no. 10, columns 5 and 7, or a portion thereof and preferably has above mentioned activity, in particular having a respective fine chemical increasing activity after increasing the activity or an activity of a gene product as shown in table II, application no. 10, column 3 by for example expression either in the cytsol or in an organelle such as a plastid or mitochondria or both, preferably in plastids, and the gene product, e.g. the polypeptide, being localized in the plastid and other parts of the cell or in the plastid as described above.

[2725] The nucleic acid molecule of the invention comprises a nucleotide sequence which hybridizes, preferably hybridizes under stringent conditions as defined herein, to one of the nucleotide sequences shown in table I, application no. 10, columns 5 and 7, preferably shown in table I B, application no. 10, columns 5 and 7, or a portion thereof and encodes a protein having above-mentioned activity, e.g. conferring of a vitamin E, triglycerides, lipids, oils and/or fats containing vitamin E increase by for example expression either in the cytsol or in an organelle such as a plastid or mitochondria or both, preferably in plastids, and optionally, the activity of a protein as shown in table II, application no. 10, column 3, and the gene product, e.g. the polypeptide, being localized in the plastid and other parts of the cell or in the plastid as described above.

[2726] Moreover, the nucleic acid molecule of the invention can comprise only a portion of the coding region of one of the sequences shown in table I, application no. 10, columns 5 and 7, preferably shown in table I B, application no. 10, columns 5 and 7, for example a fragment which can be used as a probe or primer or a fragment encoding a biologically active portion of the polypeptide of the present invention or of a polypeptide used in the process of the present invention, i.e. having above-mentioned activity, e.g. conferring an increase of the respective fine chemical indicated in Table I, application no. 10, column 6, if its activity is increased by for example expression either in the cytsol or in an organelle such as a plastid or mitochondria or both, preferably in plastids, and the gene product, e.g. the polypeptide, being localized in the plastid and other parts of the cell or in the plastid as described above. The nucleotide sequences determined from the cloning of the present protein-according-to-the-invention-encoding gene allows for the generation of probes and primers designed for use in identifying and/or cloning its homologues in other cell types and organisms. The probe/primer typically comprises substantially purified oligonucleotide. The oligonucleotide typically comprises a region of nucleotide sequence that hybridizes under stringent conditions to at least about 12, 15 preferably about 20 or 25, more preferably about 40, 50 or 75 consecutive nucleotides of a sense strand of one of the sequences set forth, e.g., in table I, application no. 10, columns 5 and 7, an anti-sense sequence of one of the sequences, e.g., set forth in table I, application no. 10, columns 5 and 7, preferably shown in table I B, application no. 10, columns 5 and 7, or naturally occurring mutants thereof. Primers based on a nucleotide of invention can be used in PCR reactions to clone homologues of the polypeptide of the invention or of the polypeptide used in the process of the invention, e.g. as the primers described in the examples of the present invention, e.g. as shown in the examples. A PCR with the primers shown in table III, application no. 10, column 7 will result in a fragment of the gene product as shown in table II, column 3.

[2727] for the disclosure of this paragraph see paragraph [0164.0.0.0] above.

[2728] The nucleic acid molecule of the invention encodes a polypeptide or portion thereof which includes an amino acid sequence which is sufficiently homologous to the amino acid sequence shown in table II, application no. 10, columns 5 and 7 such that the protein or portion thereof maintains the ability to participate in the fine chemical production, in particular an activity increasing the level of vitamin E or its precursor 2,3-dimethyl-5-phytylquinol resp., in particular, of alpha-, beta-, and/or gamma-tocopherol, resp., increasing the activity as mentioned above or as described in the examples in plants or microorganisms is comprised.

[2729] As used herein, the language “sufficiently homologous” refers to proteins or portions thereof which have amino acid sequences which include a minimum number of identical or equivalent amino acid residues (e.g., an amino acid residue which has a similar side chain as an amino acid residue in one of the sequences of the polypeptide of the present invention) to an amino acid sequence shown in table II, application no. 10, columns 5 and 7 such that the protein or portion thereof is able to participate in the increase of the fine chemical production. For examples having the activity of a protein as shown in table II, column 3 and as described herein.

[2730] In one embodiment, the nucleic acid molecule of the present invention comprises a nucleic acid that encodes a portion of the protein of the present invention. The protein is at least about 30%, 35%, 40%, 45% or 50%, preferably at least about 55%, 60%, 65% or 70%, and more preferably at least about 75%, 80%, 85%, 90%, 91%, 92%, 93% or 94% and most preferably at least about 95%, 97%, 98%, 99% or more homologous to an entire amino acid sequence of table II, application no. 10, columns 5 and 7 and having above-mentioned activity, e.g. conferring preferably the increase of the respective fine chemical by for example expression either in the cytsol or in an organelle such as a plastid or mitochondria or both, preferably in plastids, and the gene product, e.g. the polypeptide, being localized in the plastid and other parts of the cell or in the plastid as described above.

[2731] for the disclosure of the paragraphs [0168.0.0.9] and [0169.0.0.8] see paragraphs [0168.0.0.0] and [0169.0.0.0] above.

[2732] The invention further relates to nucleic acid molecules that differ from one of the nucleotide sequences shown in table I, application no. 10, columns 5 and 7 (and portions thereof) due to degeneracy of the genetic code and thus encode a polypeptide of the present invention, in particular a polypeptide having above mentioned activity, e.g. conferring an increase in the respective fine chemical in a organism, e.g. as that polypeptides depicted by the sequence shown in table II, application no. 10, columns 5 and 7 or the functional homologues. Advantageously, the nucleic acid molecule of the invention comprises, or in an other embodiment has, a nucleotide sequence encoding a protein comprising, or in an other embodiment having, an amino acid sequence shown in table II, application no. 10, columns 5 and 7 or the functional homologues. In a still further embodiment, the nucleic acid molecule of the invention encodes a full length protein which is substantially homologous to an amino acid sequence shown in table II, application no. 10, columns 5 and 7 or the functional homologues. However, in a preferred embodiment, the nucleic acid molecule of the present invention does not consist of the sequence shown in table I, application no. 10, columns 5 and 7, preferably as indicated in table I A, application no. 10, columns 5 and 7. Preferably the nucleic acid molecule of the invention is a functional homologue or identical to a nucleic acid molecule indicated in table I B, application no. 10, columns 5 and 7.

[2733] for the disclosure of the paragraphs [0171.0.0.9] to [0173.0.0.9] see paragraphs [0171.0.0.0] to [0173.0.0.0] above.

[2734] Accordingly, in another embodiment, a nucleic acid molecule of the invention is at least 15, 20, 25 or 30 nucleotides in length. Preferably, it hybridizes under stringent conditions to a nucleic acid molecule comprising a nucleotide sequence of the nucleic acid molecule of the present invention or used in the process of the present invention, e.g. comprising the sequence shown in table I, application no. 10, columns 5 and 7. The nucleic acid molecule is preferably at least 20, 30, 50, 100, 250 or more nucleotides in length.

[2735] for the disclosure of this paragraph see paragraph [0175.0.0.0] above.

[2736] Preferably, nucleic acid molecule of the invention that hybridizes under stringent conditions to a sequence shown in table I, application no. 10, columns 5 and 7 corresponds to a naturally-occurring nucleic acid molecule of the invention. As used herein, a “naturally-occurring” nucleic acid molecule refers to an RNA or DNA molecule having a nucleotide sequence that occurs in nature (e.g., encodes a natural protein). Preferably, the nucleic acid molecule encodes a natural protein having abovementioned activity, e.g. conferring the respective fine chemical increase after increasing the expression or activity thereof or the activity of a protein of the invention or used in the process of the invention by for example expression the nucleic acid sequence of the gene product in the cytsol and/or in an organelle such as a plastid or mitochondria, preferably in plastids.

[2737] for the disclosure of this paragraph see paragraph [0177.0.0.0] above.

[2738] For example, nucleotide substitutions leading to amino acid substitutions at “non-essential” amino acid residues can be made in a sequence of the nucleic acid molecule of the invention or used in the process of the invention, e.g. shown in table I, application no. 10, columns 5 and 7.

[2739] for the disclosure of the paragraphs [0179.0.0.9] and [0180.0.0.9] see paragraphs [0179.0.0.0] and [0180.0.0.0] above.

[2740] Accordingly, the invention relates to nucleic acid molecules encoding a polypeptide having above-mentioned activity, e.g. conferring an increase in the the respective fine chemical in an organisms or parts thereof by for example expression either in the cytsol or in an organelle such as a plastid or mitochondria or both, preferably in plastids (as described), that contain changes in amino acid residues that are not essential for said activity. Such polypeptides differ in amino acid sequence from a sequence contained in the sequences shown in table II, application no. 10, columns 5 and 7, preferably shown in table II A, application no. 10, columns 5 and 7 yet retain said activity described herein. The nucleic acid molecule can comprise a nucleotide sequence encoding a polypeptide, wherein the polypeptide comprises an amino acid sequence at least about 50% identical to an amino acid sequence shown in table II, application no. 10, columns 5 and 7, preferably shown in table II A, application no. 10, columns 5 and 7 and is capable of participation in the increase of production of the fine chemical after increasing its activity, e.g. its expression by for example expression either in the cytsol or in an organelle such as a plastid or mitochondria or both, preferably in plastids and the gene product, e.g. the polypeptide, being localized in the plastid and other parts of the cell or in the plastid as described above. Preferably, the protein encoded by the nucleic acid molecule is at least about 60% identical to the sequence shown in table II, application no. 10, columns 5 and 7, preferably shown in table II A, application no. 10, columns 5 and 7, more preferably at least about 70% identical to one of the sequences shown in table II, application no. 10, columns 5 and 7, preferably shown in table II A, application no. 10, columns 5 and 7, even more preferably at least about 80%, 90%, 95% homologous to the sequence shown in table II, application no. 10, columns 5 and 7, preferably shown in table II A, application no. 10, columns 5 and 7, and most preferably at least about 96%, 97%, 98%, or 99% identical to the sequence shown in table II, application no. 10, columns 5 and 7, preferably shown in table II A, application no. 10, columns 5 and 7.

[2741] for the disclosure of the paragraphs [0182.0.0.9] to [0188.0.0.9] see paragraphs [0182.0.0.0] to [0188.0.0.0] above.

[2742] Functional equivalents derived from one of the polypeptides as shown in table II, application no. 10, columns 5 and 7, preferably shown in table II B, application no. 10, columns 5 and 7 resp., according to the invention by substitution, insertion or deletion have at least 30%, 35%, 40%, 45% or 50%, preferably at least 55%, 60%, 65% or 70% by preference at least 80%, especially preferably at least 85% or 90%, 91%, 92%, 93% or 94%, very especially preferably at least 95%, 97%, 98% or 99% homology with one of the polypeptides as shown in table II, application no. 10, columns 5 and 7, preferably shown in table II B, application no. 10, columns 5 and 7 resp., according to the invention and are distinguished by essentially the same properties as the polypeptide as shown in table II, application no. 10, columns 5 and 7, preferably shown in table II B, application no. 10, columns 5 and 7.

[2743] Functional equivalents derived from the nucleic acid sequence as shown in table I, application no. 10, columns 5 and 7, preferably shown in table I B, application no. 10, columns 5 and 7 resp., according to the invention by substitution, insertion or deletion have at least 30%, 35%, 40%, 45% or 50%, preferably at least 55%, 60%, 65% or 70% by preference at least 80%, especially preferably at least 85% or 90%, 91%, 92%, 93% or 94%, very especially preferably at least 95%, 97%, 98% or 99% homology with one of the polypeptides as shown in table II, application no. 10, columns 5 and 7, preferably shown in table II B, application no. 10, columns 5 and 7 resp., according to the invention and encode polypeptides having essentially the same properties as the polypeptide as shown in table II, application no. 10, columns 5 and 7, preferably shown in table II B, application no. 10, columns 5 and 7.

[2744] for the disclosure of this paragraph see paragraph [0191.0.0.0] above.

[2745] A nucleic acid molecule encoding an homologous to a protein sequence of table II, application no. 10, columns 5 and 7, preferably shown in table II B, application no. 10, columns 5 and 7 resp., can be created by introducing one or more nucleotide substitutions, additions or deletions into a nucleotide sequence of the nucleic acid molecule of the present invention, in particular of table I, application no. 10, columns 5 and 7, preferably shown in table I B, application no. 10, columns 5 and 7 resp., such that one or more amino acid substitutions, additions or deletions are introduced into the encoded protein. Mutations can be introduced into the encoding sequences of table I, application no. 10, columns 5 and 7, preferably shown in table I B, application no. 10, columns 5 and 7 resp., by standard techniques, such as site-directed mutagenesis and PCR-mediated mutagenesis.

[2746] for the disclosure of the paragraphs [0193.0.0.9] to [0196.0.0.9] see paragraphs [0193.0.0.0] to [0196.0.0.0] above.

[2747] Homologues of the nucleic acid sequences used, with the sequence shown in table I, application no. 10, columns 5 and 7, preferably shown in table I B, application no. 10, columns 5 and 7, comprise also allelic variants with at least approximately 30%, 35%, 40% or 45% homology, by preference at least approximately 50%, 60% or 70%, more preferably at least approximately 90%, 91%_{,} 92%, 93%, 94% or 95% and even more preferably at least approximately 96%, 97%, 98%, 99% or more homology with one of the nucleotide sequences shown or the abovementioned derived nucleic acid sequences or their homologues, derivatives or analogues or parts of these. Allelic variants encompass in particular functional variants which can be obtained by deletion, insertion or substitution of nucleotides from the sequences shown, preferably from table I, application no. 10, columns 5 and 7, preferably shown in table I B, application no. 10, columns 5 and 7, or from the derived nucleic acid sequences, the intention being, however, that the enzyme activity or the biological activity of the resulting proteins synthesized is advantageously retained or increased.

[2748] In one embodiment of the present invention, the nucleic acid molecule of the invention or used in the process of the invention comprises the sequences shown in any of the table I, application no. 10, columns 5 and 7, preferably shown in table I B, application no. 10, columns 5 and 7. It is preferred that the nucleic acid molecule comprises as little as possible other nucleotides not shown in any one of table I, application no. 10, columns 5 and 7, preferably shown in table I B, application no. 10, columns 5 and 7. In one embodiment, the nucleic acid molecule comprises less than 500, 400, 300, 200, 100, 90, 80, 70, 60, 50 or 40 further nucleotides. In a further embodiment, the nucleic acid molecule comprises less than 30, 20 or 10 further nucleotides. In one embodiment, the nucleic acid molecule use in the process of the invention is identical to the sequences shown in table I, application no. 10, columns 5 and 7, preferably shown in table I B, application no. 10, columns 5 and 7.

[2749] Also preferred is that the nucleic acid molecule used in the process of the invention encodes a polypeptide comprising the sequence shown in table II, application no. 10, columns 5 and 7, preferably shown in table II B, application no. 10, columns 5 and 7. In one embodiment, the nucleic acid molecule encodes less than 150, 130, 100, 80, 60, 50, 40 or 30 further amino acids. In a further embodiment, the encoded polypeptide comprises less than 20, 15, 10, 9, 8, 7, 6 or 5 further amino acids. In one embodiment used in the inventive process, the encoded polypeptide is identical to the sequences shown in table II, application no. 10, columns 5 and 7, preferably shown in table II B, application no. 10, columns 5 and 7.

[2750] In one embodiment, the nucleic acid molecule of the invention or used in the process encodes a polypeptide comprising the sequence shown in table II, application no. 10, columns 5 and 7, preferably shown in table II B, application no. 10, columns 5 and 7 comprises less than 100 further nucleotides. In a further embodiment, said nucleic acid molecule comprises less than 30 further nucleotides. In one embodiment, the nucleic acid molecule used in the process is identical to a coding sequence of the sequences shown in table I, application no. 10, columns 5 and 7, preferably shown in table I B, application no. 10, columns 5 and 7.

[2751] Polypeptides (=proteins), which still have the essential biological or enzymatic activity of the polypeptide of the present invention conferring an increase of the respective fine chemical indicated in column 6 of Table I, application no. 10, i.e. whose activity is essentially not reduced, are polypeptides with at least 10% or 20%, by preference 30% or 40%, especially preferably 50% or 60%, very especially preferably 80% or 90 or more of the wild type biological activity or enzyme activity, advantageously, the activity is essentially not reduced in comparison with the activity of a polypeptide shown in table II, application no. 10, columns 5 and 7 expressed under identical conditions.

[2752] Homologues of table I, application no. 10, columns 5 and 7 or of the derived sequences of table II, application no. 10, columns 5 and 7 also mean truncated sequences, cDNA, single-stranded DNA or RNA of the coding and noncoding DNA sequence. Homologues of said sequences are also understood as meaning derivatives, which comprise noncoding regions such as, for example, UTRs, terminators, enhancers or promoter variants. The promoters upstream of the nucleotide sequences stated can be modified by one or more nucleotide substitution(s), insertion(s) and/or deletion(s) without, however, interfering with the functionality or activity either of the promoters, the open reading frame (=ORF) or with the 3′-regulatory region such as terminators or other 3′ regulatory regions, which are far away from the ORF. It is furthermore possible that the activity of the promoters is increased by modification of their sequence, or that they are replaced completely by more active promoters, even promoters from heterologous organisms. Appropriate promoters are known to the person skilled in the art and are mentioned herein below.

[2753] for the disclosure of the paragraphs [0203.0.0.9] to [0215.0.0.9] see paragraphs [0203.0.0.0] to [0215.0.0.0] above.

[2754] Accordingly, in one embodiment, the invention relates to a nucleic acid molecule, which comprises a nucleic acid molecule selected from the group consisting of:
[2755] a) nucleic acid molecule encoding, preferably at least the mature form, of the polypeptide shown in table II, application no. 10, columns 5 and 7, preferably in table II B, application no. 10, columns 5 and 7; or a fragment thereof conferring an increase in the amount of the fine chemical according to table II B, application no. 10, column 6 in an organism or a part thereof
[2756] b) nucleic acid molecule comprising, preferably at least the mature form, of the nucleic acid molecule shown in table I, application no. 10, columns 5 and 7, preferably in table I B, application no. 10, columns 5 and 7 or a fragment thereof conferring an increase in the amount of the fine chemical according to table II B, application no. 10, column 6 in an organism or a part thereof;
[2757] c) nucleic acid molecule whose sequence can be deduced from a polypeptide sequence encoded by a nucleic acid molecule of (a) or (b) as result of the degeneracy of the genetic code and conferring an increase in the amount of the fine chemical according to table II B, application no. 10, column 6 in an organism or a part thereof;
[2758] d) nucleic acid molecule encoding a polypeptide whose sequence has at least 50% identity with the amino acid sequence of the polypeptide encoded by the nucleic acid molecule of (a) to (c) and conferring an increase in the amount of the fine chemical according to table II B, application no. 10, column 6 in an organism or a part thereof;
[2759] e) nucleic acid molecule which hybridizes with a nucleic acid molecule of (a) to (c) under stringent hybridisation conditions and conferring an increase in the amount of the fine chemical according to table II B, application no. 10, column 6 in an organism or a part thereof;
[2760] f) nucleic acid molecule encoding a polypeptide, the polypeptide being derived by substituting, deleting and/or adding one or more amino acids of the amino acid sequence of the polypeptide encoded by the nucleic acid molecules (a) to (d), preferably to (a) to (c), and conferring an increase in the amount of the fine chemical according to table II B, application no. 10, column 6 in an organism or a part thereof;
[2761] g) nucleic acid molecule encoding a fragment or an epitope of a polypeptide which is encoded by one of the nucleic acid molecules of (a) to (e), preferably to (a) to (c) and conferring an increase in the amount of the fine chemical according to table II B, application no. 10, column 6 in an organism or a part thereof;
[2762] h) nucleic acid molecule comprising a nucleic acid molecule which is obtained by amplifying a cDNA library or a genomic library using the primers in table III, application no. 10, column 7 and conferring an increase in the amount of the fine chemical according to table II B, application no. 10, column 6 in an organism or a part thereof;
[2763] i) nucleic acid molecule encoding a polypeptide which is isolated, e.g. from a expression library, with the aid of monoclonal antibodies against a polypeptide encoded by one of the nucleic acid molecules of (a) to (g), preferably to (a) to (c) and conferring an increase in the amount of the fine chemical in an organism or a part thereof;
[2764] j) nucleic acid molecule which encodes a polypeptide comprising the consensus sequence shown in table IV, application no. 10, column 7 and conferring an increase in the amount of the fine chemical in an organism or a part thereof;
[2765] k) nucleic acid molecule encoding the amino acid sequence of a polypeptide encoding a domain of the polypeptide shown in table II, application no. 10, columns 5 and 7 and conferring an increase in the amount of the fine chemical according to table II B, application no. 10, column 6 in an organism or a part thereof; and
[2766] l) nucleic acid molecule which is obtainable by screening a suitable nucleic acid library under stringent hybridization conditions with a probe comprising one of the sequences of the nucleic acid molecule of (a) to (k) or with a fragment of at least 15 nt, preferably 20 nt, 30 nt, 50 nt, 100 nt, 200 nt or 500 nt of the nucleic acid molecule characterized in (a) to (h) or of the nucleic acid molecule shown in table I, application no. 10, columns 5 and 7 or a nucleic acid molecule encoding, preferably at least the mature form of, the polypeptide shown in table II, application no. 10, columns 5 and 7, and conferring an increase in the amount of the fine chemical according to table II B, application no. 10, column 6 in an organism or a part thereof; or which encompasses a sequence which is complementary thereto;
   whereby, preferably, the nucleic acid molecule according to (a) to (l) distinguishes over the sequence depicted in table I A and/or I B, application no. 10, columns 5 and 7 by one or more nucleotides. In one embodiment, the nucleic acid molecule of the invention does not consist of the sequence shown in table I A and/or I B, application no. 10, columns 5 and 7. In an other embodiment, the nucleic acid molecule of the present invention is at least 30% identical and less than 100%, 99.999%, 99.99%, 99.9% or 99% identical to the sequence shown in table IA and/or I B, application no. 10, columns 5 and 7. In a further embodiment the nucleic acid molecule does not encode the polypeptide sequence shown in table II A and/or II B, application no. 10, columns 5 and 7. Accordingly, in one embodiment, the nucleic acid molecule of the present invention encodes in one embodiment a polypeptide which differs at least in one or more amino acids from the polypeptide shown in table II A and/or II B, application no. 10, columns 5 and 7 does not encode a protein of the sequence shown in table II A and/or II B, application no. 10, columns 5 and 7. Accordingly, in one embodiment, the protein encoded by a sequence of a nucleic acid according to (a) to (l) does not consist of the sequence shown in table I A and/or I B, application no. 10, columns 5 and 7. In a further embodiment, the protein of the present invention is at least 30% identical to protein sequence depicted in table II A and/or II B, application no. 10, columns 5 and 7 and less than 100%, preferably less than 99.999%, 99.99% or 99.9%, more preferably less than 99%, 985, 97%, 96% or 95% identical to the sequence shown in table II A and/or II B, application no. 10, columns 5 and 7.

[2767] for the disclosure of the paragraphs [0217.0.0.9] to [0226.0.0.9] see paragraphs [0217.0.0.0] to [0226.0.0.0] above.

[2768] In general, vector systems preferably also comprise further cis-regulatory regions such as promoters and terminators and/or selection markers by means of which suitably transformed organisms can be identified. While vir genes and T-DNA sequences are located on the same vector in the case of cointegrated vector systems, binary systems are based on at least two vectors, one of which bears vir genes, but no T-DNA, while a second one bears T-DNA, but no vir gene. Owing to this fact, the last-mentioned vectors are relatively small, easy to manipulate and capable of replication in E. coli and in Agrobacterium. These binary vectors include vectors from the series pBIB-HYG, pPZP, pBecks, pGreen. Those which are preferably used in accordance with the invention are Bin19, pBI101, pBinAR, pGPTV and pCAMBIA. An overview of binary vectors and their use is given by Hellens et al, Trends in Plant Science (2000) 5, 446-451. The vectors are preferably modified in such a manner, that they already contain the nucleic acid coding for the transitpeptide and that the nucleic acids of the invention, preferentially the nucleic acid sequences encoding the polypeptides shown in table II, application no. 10, columns 5 and 7 can be cloned 3″ prime to the transitpeptide encoding sequence, leading to a functional preprotein, which is directed to the plastids and which means that the mature protein fulfills its biological activity.

[2769] for the disclosure of the paragraphs [0228.0.0.9] to [0239.0.0.9] see paragraphs [0228.0.0.0] to [0239.0.0.0] above.

[2770] The abovementioned nucleic acid molecules can be cloned into the nucleic acid constructs or vectors according to the invention in combination together with further genes, or else different genes are introduced by transforming several nucleic acid constructs or vectors (including plasmids) into a host cell, advantageously into a plant cell or a microorganisms.

In addition to the sequence mentioned in Table I, application no. 10, columns 5 and 7 or its derivatives, it is advantageous additionally to express and/or mutate further genes in the organisms. Especially advantageously, additionally at least one further gene of the tocopherol biosynthetic pathway such as for a vitamin E precursor, is expressed in the organisms such as plants or microorganisms. It is also possible that the regulation of the natural genes has been modified advantageously so that the gene and/or its gene product is no longer subject to the regulatory mechanisms which exist in the organisms. This leads to an increased synthesis of the amino acids desired since, for example, feedback regulations no longer exist to the same extent or not at all. In addition it might be advantageously to combine the sequences shown in Table I, application no. 10, columns 5 and 7 with genes which generally support or enhances to growth or yield of the target organism, for example genes which lead to faster growth rate of microorganisms or genes which produces stress-, pathogen, or herbicide resistant plants.

[2771] In a further embodiment of the process of the invention, therefore, organisms are grown, in which there is simultaneous overexpression of at least one nucleic acid or one of the genes which code for proteins involved in the tocopherol metabolism, in particular in synthesis of alpha-, beta-, and/or gamma-tocopherol.

[2772] Further advantageous nucleic acid sequences which can be expressed in combination with the sequences used in the process and/or the abovementioned biosynthesis genes are the sequences encoding further genes of the tocopherol biosynthetic pathway, such as the homogentisate phytyltransferase (HPT) or the enzymes catalysing the subsequent cyclization and methylation reactions, γ-tocopherol methyl transferase (γ-TMT), prenyltransferases that condense prenyl groups with allylic chains and those that condense prenyl chains with aromatic groups and others. These genes can lead to an increased synthesis of the essential vitamin E or its precursor 2,3-dimethyl-5-phytylquinol resp., in particular, of the fine chemical indicated in column 6 of any one of Tables I to IV.

[2773] In a further advantageous embodiment of the process of the invention, the organisms used in the process are those in which simultaneously a vitamin E degrading protein is attenuated, in particular by reducing the rate of expression of the corresponding gene.

[2774] The respective fine chemical produced can be isolated from the organism by methods with which the skilled worker is familiar. For example, via extraction, salt precipitation, and/or different chromatography methods. The process according to the invention can be conducted batchwise, semibatchwise or continuously. The respective fine chemical produced by this process can be obtained by harvesting the organisms, either from the crop in which they grow, or from the field. This can be done via pressing or extraction of the plant parts.

[2775] for the disclosure of the paragraphs [0243.0.0.9] to [0264.0.0.9] see paragraphs [0243.0.0.0] to [0264.0.0.0] above.

[2776] Other preferred sequences for use in operable linkage in gene expression constructs are targeting sequences, which are required for targeting the gene product into specific cell compartments (for a review, see Kermode, Crit. Rev. Plant Sci. 15, 4 (1996) 285-423 and references cited therein), for example into the vacuole, the nucleus, all types of plastids, such as amyloplasts, chloroplasts, chromoplasts, the extracellular space, the mitochondria, the endoplasmic reticulum, elaioplasts, peroxisomes, glycosomes, and other compartments of cells or extracellular preferred are sequences, which are involved in targeting to plastids as mentioned above. Sequences, which must be mentioned in this context are, in particular, the signal-peptide- or transit-peptide-encoding sequences which are known per se. For example, plastid-transit-peptide-encoding sequences enable the targeting of the expression product into the plastids of a plant cell. Targeting sequences are also known for eukaryotic and to a lower extent for prokaryotic organisms and can advantageously be operable linked with the nucleic acid molecule of the present invention as shown in table I, application no. 10, columns 5 and 7 and described herein to achieve an expression in one of said compartments or extracellular.

[2777] for the disclosure of the paragraphs [0266.0.0.9] to [0287.0.0.9] see paragraphs [0266.0.0.0] to [0287.0.0.0] above.

[2778] Accordingly, one embodiment of the invention relates to a vector where the nucleic acid molecule according to the invention is linked operably to regulatory sequences which permit the expression in a prokaryotic or eukaryotic or in a prokaryotic and eukaryotic host. A further preferred embodiment of the invention relates to a vector in which a nucleic acid sequence encoding one of the polypeptides shown in table II, application no. 10, columns 5 and 7 or their homologs is functionally linked to a plastidial targeting sequence. A further preferred embodiment of the invention relates to a vector in which a nucleic acid sequence encoding one of the polypeptides shown in table II, application no. 10, columns 5 and 7 or their homologs is functionally linked to a regulatory sequences which permit the expression in plastids.

[2779] for the disclosure of the paragraphs [0289.0.0.9] to [0296.0.0.9] see paragraphs [0289.0.0.0] to [0296.0.0.0] above.

[2780] Moreover, a native polypeptide conferring the increase of the respective fine chemical in an organism or part thereof can be isolated from cells (e.g., endothelial cells), for example using the antibody of the present invention as described herein, in particular, an antibody against polypeptides as shown in table II, application no. 10, columns 5 and 7, which can be produced by standard techniques utilizing the polypeptide of the present invention or fragment thereof, i.e., the polypeptide of this invention. Preferred are monoclonal antibodies.

[2781] for the disclosure of this paragraph see paragraph [0298.0.0.0] above.

[2782] In one embodiment, the present invention relates to a polypeptide having the sequence shown in table II, application no. 10, columns 5 and 7 or as coded by the nucleic acid molecule shown in table I, application no. 10, columns 5 and 7 or functional homologues thereof.

[2783] In one advantageous embodiment, in the method of the present invention the activity of a polypeptide is increased comprising or consisting of the consensus sequence shown in table IV, application no. 10, columns 7 and in one another embodiment, the present invention relates to a polypeptide comprising or consisting of the consensus sequence shown in table IV, application no. 10, column 7 whereby 20 or less, preferably 15 or 10, preferably 9, 8, 7, or 6, more preferred 5 or 4, even more preferred 3, even more preferred 2, even more preferred 1, most preferred 0 of the amino acids positions indicated can be replaced by any amino acid.

[2784] for the disclosure of the paragraphs [0301.0.0.9] to [0304.0.0.9] see paragraphs [0301.0.0.0] to [0304.0.0.0] above.

[2785] In one advantageous embodiment, the method of the present invention comprises the increasing of a polypeptide comprising or consisting of plant or microorganism specific consensus sequences.

In one embodiment, said polypeptide of the invention distinguishes over the sequence shown in table II A and/or II B, application no. 10, columns 5 and 7 by one or more amino acids. In one embodiment, polypeptide distinguishes form the sequence shown in table II A and/or II B, application no. 10, columns 5 and 7 by more than 5, 6, 7, 8 or 9 amino acids, preferably by more than 10, 15, 20, 25 or 30 amino acids, even more preferred are more than 40, 50, or 60 amino acids and, preferably, the sequence of the polypeptide of the invention distinguishes from the sequence shown in table II A and/or II B, application no. 10, columns 5 and 7 by not more than 80% or 70% of the amino acids, preferably not more than 60% or 50%, more preferred not more than 40% or 30%, even more preferred not more than 20% or 10%. In an other embodiment, said polypeptide of the invention does not consist of the sequence shown in table II A and/or II B, application no. 10, columns 5 and 7.

[2786] for the disclosure of this paragraph see paragraph [0306.0.0.0] above.

[2787] In one embodiment, the invention relates to polypeptide conferring an increase of level of the respective fine chemical indicated in Table II A and/or II B, application no. 10, column 6 in an organism or part being encoded by the nucleic acid molecule of the invention or used in the process of the invention and having a sequence which distinguishes from the sequence as shown in table II A and/or II B, application no. 10, columns 5 and 7 by one or more amino acids. In another embodiment, said polypeptide of the invention does not consist of the sequence shown in table II A and/or II B, application no. 10, columns 5 and 7. In a further embodiment, said polypeptide of the present invention is less than 100%, 99.999%, 99.99%, 99.9% or 99% identical. In one embodiment, said polypeptide does not consist of the sequence encoded by the nucleic acid molecules shown in table I A and/or I B, application no. 10, columns 5 and 7.

[2788] In one embodiment, the present invention relates to a polypeptide having the activity of the protein as shown in table II A and/or II B, application no. 10, column 3, which distinguishes over the sequence depicted in table II A and/or II B, application no. 10, columns 5 and 7 by one or more amino acids, preferably by more than 5, 6, 7, 8 or 9 amino acids, preferably by more than 10, 15, 20, 25 or 30 amino acids, even more preferred are more than 40, 50, or 60 amino acids but even more preferred by less than 70% of the amino acids, more preferred by less than 50%, even more preferred my less than 30% or 25%, more preferred are 20% or 15%, even more preferred are less than 10%. In a further preferred embodiment the polypeptide of the invention takes the form of a preprotein consisting of a plastidial transitpeptide joint to a polypeptide having the activity of the protein as shown in table II A and/or II B, column 3, from which the transitpeptide is preferably cleaved off upon transport of the preprotein into the organelle, for example into the plastid or mitochondria.

[2789] for the disclosure of the paragraphs [0309.0.0.9] to [0311.0.0.9] see paragraphs [0309.0.0.0] to [0311.0.0.0] above.

[2790] A polypeptide of the invention can participate in the process of the present invention. The polypeptide or a portion thereof comprises preferably an amino acid sequence, which is sufficiently homologous to an amino acid sequence shown in table II, application no. 10, columns 5 and 7.

[2791] Further, the polypeptide can have an amino acid sequence which is encoded by a nucleotide sequence which hybridizes, preferably hybridizes under stringent conditions as described above, to a nucleotide sequence of the nucleic acid molecule of the present invention. Accordingly, the polypeptide has an amino acid sequence which is encoded by a nucleotide sequence that is at least about 35%, 40%, 45%, 50%, 55%, 60%, 65% or 70%, preferably at least about 75%, 80%, 85% or 90, and more preferably at least about 91%, 92%, 93%, 94% or 95%, and even more preferably at least about 96%, 97%, 98%, 99% or more homologous to one of the amino acid sequences as shown in table II A and/or II B, application no. 10, columns 5 and 7. The preferred polypeptide of the present invention preferably possesses at least one of the activities according to the invention and described herein. A preferred polypeptide of the present invention includes an amino acid sequence encoded by a nucleotide sequence which hybridizes, preferably hybridizes under stringent conditions, to a nucleotide sequence of table I A and/or I B, application no. 10, columns 5 and 7 or which is homologous thereto, as defined above.

[2792] Accordingly the polypeptide of the present invention can vary from the sequences shown in table II A and/or II B, application no. 10, columns 5 and 7 in amino acid sequence due to natural variation or mutagenesis, as described in detail herein. Accordingly, the polypeptide comprise an amino acid sequence which is at least about 35%, 40%, 45%, 50%, 55%, 60%, 65% or 70%, preferably at least about 75%, 80%, 85% or 90, and more preferably at least about 91%, 92%, 93%, 94% or 95%, and most preferably at least about 96%, 97%, 98%, 99% or more homologous to an entire amino acid sequence shown in table II A and/or II B, application no. 10, columns 5 and 7.

[2793] for the disclosure of this paragraph see paragraph [0315.0.0.0] above.

[2794] Biologically active portions of an polypeptide of the present invention include peptides comprising amino acid sequences derived from the amino acid sequence of the polypeptide of the present invention or used in the process of the present invention, e.g., the amino acid sequence shown in table II, application no. 10, columns 5 and 7 or the amino acid sequence of a protein homologous thereto, which include fewer amino acids than a full length polypeptide of the present invention or used in the process of the present invention or the full length protein which is homologous to an polypeptide of the present invention or used in the process of the present invention depicted herein, and exhibit at least one activity of polypeptide of the present invention or used in the process of the present invention.

[2795] for the disclosure of this paragraph see paragraph [0317.0.0.0] above.

[2796] Manipulation of the nucleic acid molecule of the invention may result in the production of a protein having differences from the wild-type protein as shown in table II, application no. 10, column 3. Differences shall mean at least one amino acid different from the sequences as shown in table II, application no. 10, column 3, preferably at least 2, 3, 4, 5, 6, 7, 8, 9 or 10 amino acids, more preferably at least 15, 20, 25, 30, 35, 40, 45 or 50 amino acids different from the sequences as shown in table II, application no. 10, column 3. These proteins may be improved in efficiency or activity, may be present in greater numbers in the cell than is usual, or may be decreased in efficiency or activity in relation to the wild type protein.

[2797] Any mutagenesis strategies for the polypeptide of the present invention or the polypeptide used in the process of the present invention to result in increasing said activity are not meant to be limiting; variations on these strategies will be readily apparent to one skilled in the art. Using such strategies, and incorporating the mechanisms disclosed herein, the nucleic acid molecule and polypeptide of the invention may be utilized to generate plants or parts thereof, expressing wildtype proteins or mutated proteins of the proteins as shown in table II, application no. 10, column 3. The nucleic acid molecules and polypeptide molecules of the invention are expressed such that the yield, production, and/or efficiency of production of a desired compound is improved.

[2798] Preferably, the compound is a composition comprising the essentially pure fine chemical, i.e. Vitamin E, i.e. alpha-tocopherol, beta-tocopherol, and/or gamma-tocopherol or the vitamin E precursor 2,3-Dimethyl-5-pythylquinol, respectively or a recovered or isolated Vitamin E, i.e. alpha-tocopherol, beta-tocopherol, and/or gamma-tocopherol or the vitamin E precursor 2,3-Dimethyl-5-pythylquinol, respectively, e.g. in free or in protein- or membrane-bound form.

[2799] for the disclosure of the paragraphs [0320.0.0.9] to [0322.0.0.9] see paragraphs [0320.0.0.0] to [0322.0.0.0] above.

[2800] In one embodiment, a protein (=polypeptide) as shown in table II, application no. 10, column 3 refers to a polypeptide having an amino acid sequence corresponding to the polypeptide of the invention or used in the process of the invention, whereas a “non-inventive protein or polypeptide” or “other polypeptide” refers to a polypeptide having an amino acid sequence corresponding to a protein which is not substantially homologous to a polypeptide of the invention, preferably which is not substantially homologous to a polypeptide or protein as shown in table II, application no. 10, column 3, e.g., a protein which does not confer the activity described herein and which is derived from the same or a different organism.

[2801] for the disclosure of the paragraphs [0324.0.0.9] to [0329.0.0.9] see paragraphs [0324.0.0.0] to [0329.0.0.0] above.

[2802] In an especially preferred embodiment, the polypeptide according to the invention furthermore also does not have the sequences of those proteins, which are encoded by the sequences shown in table II, application no. 10, columns 5 and 7.

[2803] for the disclosure of the paragraphs [0331.0.0.9] to [0346.0.0.9] see paragraphs [0331.0.0.0] to [0346.0.0.0] above.

[2804] Accordingly the present invention relates to any cell transgenic for any nucleic acid characterized as part of the invention, e.g. conferring the increase of the respective fine chemical indicated in column 6 of application no. 10 in any one of Talbes I to IV in a cell or an organism or a part thereof, e.g. the nucleic acid molecule of the invention, the nucleic acid construct of the invention, the antisense molecule of the invention, the vector of the invention or a nucleic acid molecule encoding the polypeptide of the invention, e.g. encoding a polypeptide having an activity as the protein as shown in table II, application no. 10, column 3. Due to the above mentioned activity the respective fine chemical content in a cell or an organism is increased. For example, due to modulation or manipulation, the cellular activity is increased preferably in organelles such as plastids or mitochondria, e.g. due to an increased expression or specific activity or specific targeting of the subject matters of the invention in a cell or an organism or a part thereof especially in organelles such as plastids or mitochondria. Transgenic for a polypeptide having a protein or activity means herein that due to modulation or manipulation of the genome, the activity of protein as shown in table II, application no. 10, column 3 or a protein as shown in table II, application no. 10, column 3-like activity is increased in the cell or organism or part thereof especially in organelles such as plastids or mitochondria. Examples are described above in context with the process of the invention.

[2805] for the disclosure of this paragraph see paragraph [0348.0.0.0] above.

[2806] A naturally occurring expression cassette—for example the naturally occurring combination of the promoter of the gene encoding a protein as shown in table II, application no. 10, column 3 with the corresponding encoding gene—becomes a transgenic expression cassette when it is modified by non-natural, synthetic “artificial” methods such as, for example, mutagenization. Such methods have been described (U.S. Pat. No. 5,565,350; WO 00/15815; also see above).

[2807] for the disclosure of the paragraphs [0350.0.0.9] to [0358.0.0.9] see paragraphs [0350.0.0.0] to [0358.0.0.0] above.

[2808] Transgenic plants comprising the respective fine chemical synthesized in the process according to the invention can be marketed directly without isolation of the compounds synthesized. In the process according to the invention, plants are understood as meaning all plant parts, plant organs such as leaf, stalk, root, tubers or seeds or propagation material or harvested material or the intact plant. In this context, the seed encompasses all parts of the seed such as the seed coats, epidermal cells, seed cells, endosperm or embryonic tissue. The respective fine chemical indicated in column 6 of any one of Tables I to IV, application no. 10, e.g. vitamin E or its precursor 2,3-dimethyl-5-phytylquinol resp., in particular, alpha-, beta-, and/or gamma-tocopherol resp., and being produced in the process according to the invention may, however, also be isolated from the plant and can be isolated by harvesting the plants either from the culture in which they grow or from the field. This can be done for example via expressing, grinding and/or extraction of the plant parts, preferably the plant seeds, plant fruits, plant tubers and the like.

[2809] for the disclosure of the paragraphs [0360.0.0.9] to [0362.0.0.9] see paragraphs [0360.0.0.0] to [0362.0.0.0] above.

[2810] In this manner, more than 50% by weight, advantageously more than 60% by weight, preferably more than 70% by weight, especially preferably more than 80% by weight, very especially preferably more than 90% by weight, of the respective fine chemical produced in the process can be isolated. The resulting composition or fraction comprising the respective fine chemical can, if appropriate, subsequently be further purified, if desired mixed with other active ingredients such as fatty acids, vitamins, amino acids, carbohydrates, antibiotics, covitamins, antioxidants, carotenoids, and the like, and, if appropriate, formulated.

[2811] In one embodiment, the composition is the fine chemical.

[2812] The fine chemical indicated in column 6 of application no. 10 in Table I, in particular vitamin E or its precursor 2,3-dimethyl-5-phytylquinol resp., e.g. alpha-, beta-, and/or gamma-tocopherol resp., and being obtained in the process of the invention are suitable as starting material for the synthesis of further products of value. For example, they can be used in combination with each other or alone for the production of pharmaceuticals, foodstuffs, animal feeds or cosmetics. Accordingly, the present invention relates a method for the production of pharmaceuticals, food stuff, animal feeds, nutrients or cosmetics comprising the steps of the process according to the invention, including the isolation of a composition comprising the fine chemical, e.g. Vitamin E- or its precursor 2,3-dimethyl-5-phytylquinol, or the isolated respective fine chemical produced, if desired, and formulating the product with a pharmaceutical acceptable carrier or formulating the product in a form acceptable for an application in agriculture. A further embodiment according to the invention is the use of the respective fine chemical indicated in application no. 10, Table I, column 6, and being produced in the process or the use of the transgenic organisms in animal feeds, foodstuffs, medicines, food supplements, cosmetics or pharmaceuticals.

[2813] for the disclosure of the paragraphs [0366.0.0.9] to [0369.0.0.9] see paragraphs [0366.0.0.0] to [0369.0.0.0] above.

[2814] The fermentation broths obtained in this way, containing in particular the respective fine chemical indicated in column 6 of any one of Tables I to IV; application no. 10 or containing mixtures with other compounds, in particular with other vitamins or e.g. with carotenoids, e.g. with astaxanthin, or fatty acids or containing microorganisms or parts of microorganisms, like plastids, normally have a dry matter content of from 7.5 to 25% by weight. The fermentation broth can be processed further. Depending on requirements, the biomass can be separated, such as, for example, by centrifugation, filtration, decantation coagulation/flocculation or a combination of these methods, from the fermentation broth or left completely in it. The fermentation broth can be thickened or concentrated by known methods, such as, for example, with the aid of a rotary evaporator, thin-film evaporator, falling film evaporator, by reverse osmosis or by nanofiltration. This concentrated fermentation broth can then be worked up by extraction, freeze-drying, spray drying, spray granulation or by other processes.

[2815] As vitamin E is often localized in membranes or plastids, in one embodiment it is advantageous to avoid a leaching of the cells when the biomass is isolated entirely or partly by separation methods, such as, for example, centrifugation, filtration, decantation, coagulation/flocculation or a combination of these methods, from the fermentation broth. The dry biomass can directly be added to animal feed, provided the vitamin E concentration is sufficiently high and no toxic compounds are present. In view of the instability of vitamin E, conditions for drying, e.g. spray or flash-drying, can be mild and can be avoiding oxidation and cis/trans isomerization. For example antioxidants, e.g. BHT, ethoxyquin or other, can be added. In case the vitamin E concentration in the biomass is to dilute, solvent extraction can be used for their isolation, e.g. with alcohols, ether or other organic solvents, e.g. with methanol, ethanol, acetone, alcoholic potassium hydroxide, glycerol-fenol, liquefied fenol or for example with acids or bases, like trichloroacetatic acid or potassium hydroxide. A wide range of advantageous methods and techniques for the isolation of vitamin E can be found in the state of the art.

Accordingly, it is possible to further purify the produced vitamin E or its precursor 2,3-dimethyl-5-phytylquinol resp., in particular, alpha-, beta-, and/or gamma-tocopherol, resp. For this purpose, the product-containing composition, e.g. a total or partial lipid extraction fraction using organic solvents, e.g. as described above, is subjected for example to a saponification to remove triglycerides, partition between e.g. hexane/methanol (separation of non-polar epiphase from more polar hypophasic derivates) and separation via e.g. an open column chromatography or HPLC in which case the desired product or the impurities are retained wholly or partly on the chromatography resin. These chromatography steps can be repeated if necessary, using the same or different chromatography resins. The skilled worker is familiar with the choice of suitable chromatography resins and their most effective use.

[2816] for the disclosure of the paragraphs [0372.0.0.9] to [0376.0.0.9], [0376.1.0.9] and [0377.0.0.9] see paragraphs [0372.0.0.0] to [0376.0.0.0], [0376.1.0.0] and [0377.0.0.0] above.

[2817] In one embodiment, the present invention relates to a method for the identification of a gene product conferring an increase in the fine chemical production in a cell, comprising the following steps:
[2818] (a) contacting, e.g. hybridising, the nucleic acid molecules of a sample, e.g. cells, tissues, plants or microorganisms or a nucleic acid library, which can contain a candidate gene encoding a gene product conferring an increase in the respective fine chemical after expression, with the nucleic acid molecule of the present invention;
[2819] (b) identifying the nucleic acid molecules, which hybridize under relaxed stringent conditions with the nucleic acid molecule of the present invention in particular to the nucleic acid molecule sequence shown in table I, application no. 10, columns 5 and 7, preferably in table I B, application no. 10, columns 5 and 7, and, optionally, isolating the full length cDNA clone or complete genomic clone;
[2820] (c) introducing the candidate nucleic acid molecules in host cells, preferably in a plant cell or a microorganism, appropriate for producing the respective fine chemical;
[2821] (d) expressing the identified nucleic acid molecules in the host cells;
[2822] (e) assaying the respective fine chemical level in the host cells; and
[2823] (f) identifying the nucleic acid molecule and its gene product which expression confers an increase in the respective fine chemical level in the host cell after expression compared to the wild type.

[2824] for the disclosure of the paragraphs [0379.0.0.9] to [0383.0.0.9] see paragraphs [0379.0.0.0] to [0383.0.0.0] above.

[2825] The screen for a gene product or an agonist conferring an increase in the fine chemical production can be performed by growth of an organism for example a microorganism in the presence of growth reducing amounts of an inhibitor of the synthesis of the fine chemical. Better growth, eg higher dividing rate or high dry mass in comparison to the control under such conditions would identify a gene or gene product or an agonist conferring an increase in fine chemical production.

One can think to screen for increased fine chemical production by for example resistance to drugs blocking fine chemical synthesis and looking whether this effect is dependent on the proteins as shown in table II, application no. 10, column 3, eg comparing near identical organisms with low and high activity of the proteins as shown in table II, application no. 10, column 3.

[2826] for the disclosure of the paragraphs [0385.0.0.9] to [0404.0.0.9] see paragraphs [0385.0.0.0] to [0404.0.0.0] above.

[2827] Accordingly, the nucleic acid of the invention, the polypeptide of the invention, the nucleic acid construct of the invention, the organisms, the host cell, the microorganisms, the plant, plant tissue, plant cell, or the part thereof the invention, the vector of the invention, the agonist identified with the method of the invention, the nucleic acid molecule identified with the method of the present invention, can be used for the production of the respective fine chemical indicated in Column 6, Table I, application no. 10 or for the production of the respective fine chemical and one or more other carotenoids, vitamins or fatty acids. In one embodiment, in the process of the present invention, the produced vitamin E is used to protect fatty acids against oxidization, e.g. it is in a further step added in a pure form or only partly isolated to a composition comprising fatty acids.

Accordingly, the nucleic acid of the invention, or the nucleic acid molecule identified with the method of the present invention or the complement sequences thereof, the polypeptide of the invention, the nucleic acid construct of the invention, the organisms, the host cell, the microorganisms, the plant, plant tissue, plant cell, or the part thereof of the invention, the vector of the invention, the agonist identified with the method of the invention, the antibody of the present invention, can be used for the reduction of the respective fine chemical in a organism or part thereof, e.g. in a cell.

[2828] The nucleic acid molecule of the invention, the vector of the invention or the nucleic acid construct of the invention may also be useful for the production of organisms resistant to inhibitors of the vitamin E production biosynthesis pathways. In particular, the overexpression of the polypeptide of the present invention may protect an organism such as a microorganism or a plant against inhibitors, which block the vitamin E, in particular the respective fine chemical synthesis in said organism.

As vitamin E can protect organisms against damages of oxidative stress, especially singlet oxygens, a increased level of the respective fine chemical can protect plants against herbicides which cause the toxic buildup of oxidative compounds, e.g. singlet oxygens. For example, inhibition of the protoporphorineogen oxidase (Protox), an enzyme important in the synthesis of chlorophyll and heme biosynthesis results in the loss of chlorophyll and carotenoids and in leaky membranes; the membrane destruction is due to creation of free oxygen radicals (which is also reported for other classic photosynthetic inhibitor herbicides).
Accordingly, in one embodiment, the increase of the level of the respective fine chemical is used to protect plants against herbicides destroying membranes due to the creation of free oxygen radicals.
Examples of inhibitors or herbicides building up oxidative stress are aryl triazion, e.g. sulfentrazone, carfentrazone; or diphenylethers, e.g. acifluorfen, lactofen, or oxyfluorfen; or N-Phenylphthalimide, e.g. flumiclorac or flumioxazin; substituted ureas, e.g. fluometuron, tebuthiuron, diuron, or linuron; triazines, e.g. atrazine, prometryn, ametryn, metributzin, prometon, simazine, or hexazinone: or uracils, e.g. bromacil or terbacil.

[2829] In a further embodiment the present invention relates to the use of the antagonist of the present invention, the plant of the present invention or a part thereof, the microorganism or the host cell of the present invention or a part thereof for the production a cosmetic composition or a pharmaceutical composition. Such a composition has an antioxidative activity, photoprotective activity, can be used to protect, treat or heal the above mentioned diseases, e.g. hypercholesterolemic or cardiovascular diseases, certain cancers, and cataract formation or as immunostimulatory agent.

The vitamin E can be also used as stabilizer of other colours or oxygen sensitive compounds, like fatty acids, in particular unsaturated fatty acids.

[2830] for the disclosure of the paragraphs [0406.0.0.9] to [0416.0.0.9] see paragraphs [0406.0.0.0] to [0416.0.0.0] above.

[2831] An in vivo mutagenesis of organisms such as algae (e.g. Spongiococcum sp, e.g. Spongiococcum exentricum, Chlorella sp., Haematococcus, Phaedactylum tricornatum, Volvox or Dunaliella), Synechocystis sp. PCC 6803, Physcometrella patens, Saccharomyces, Mortierella, Escherichia and others mentioned above, which are beneficial for the production of vitamin E can be carried out by passing a plasmid DNA (or another vector DNA) containing the desired nucleic acid sequence or nucleic acid sequences, e.g. the nucleic acid molecule of the invention or the vector of the invention, through E. coli and other microorganisms (for example Bacillus spp. or yeasts such as Saccharomyces cerevisiae) which are not capable of maintaining the integrity of its genetic information. Usual mutator strains have mutations in the genes for the DNA repair system [for example mutHLS, mutD, mutT and the like; for comparison, see Rupp, W. D. (1996) DNA repair mechanisms in Escherichia coli and Salmonella, pp. 2277-2294, ASM: Washington]. The skilled worker knows these strains. The use of these strains is illustrated for example in Greener, A. and Callahan, M. (1994) Strategies 7; 32-34.

In-vitro mutation methods such as increasing the spontaneous mutation rates by chemical or physical treatment are well known to the skilled person. Mutagens like 5-bromo-uracil, N-methyl-N-nitro-N-nitrosoguanidine (=NTG), ethyl methanesulfonate (=EMS), hydroxylamine and/or nitrous acid are widely used as chemical agents for random in-vitro mutagenesis. The most common physical method for mutagenesis is the treatment with UV irradiation. Another random mutagenesis technique is the error-prone PCR for introducing amino acid changes into proteins. Mutations are deliberately introduced during PCR through the use of error-prone DNA polymerases and special reaction conditions known to a person skilled in the art. For this method randomized DNA sequences are cloned into expression vectors and the resulting mutant libraries screened for altered or improved protein activity as described below.
Site-directed mutagenesis method such as the introduction of desired mutations with an M13 or phagemid vector and short oligonucleotides primers is a well-known approach for site-directed mutagenesis. The clou of this method involves cloning of the nucleic acid sequence of the invention into an M13 or phagemid vector, which permits recovery of single-stranded recombinant nucleic acid sequence. A mutagenic oligonucleotide primer is then designed whose sequence is perfectly complementary to nucleic acid sequence in the region to be mutated, but with a single difference: at the intended mutation site it bears a base that is complementary to the desired mutant nucleotide rather than the original. The mutagenic oligonucleotide is then allowed to prime new DNA synthesis to create a complementary full-length sequence containing the desired mutation. Another site-directed mutagenesis method is the PCR mismatch primer mutagenesis method also known to the skilled person. DpnI site-directed mutagenesis is a further known method as described for example in the Stratagene Quickchange™ site-directed mutagenesis kit protocol. A huge number of other methods are also known and used in common practice.
Positive mutation events can be selected by screening the organisms for the production of the desired fine chemical.

[2832] for the disclosure of the paragraphs [0418.0.0.9] to [0427.0.0.9] see paragraphs [0418.0.0.0] to [0427.0.0.0] above.

[2833] Synechocystis sp. PCC 6803 is a unicellular, non-nitrogen-fixing cyanobacterium which has undergone thorough genetic investigation (Churin et al. (1995) J Bacteriol 177: 3337-3343), can easily be transformed (Williams (1988) Methods Enzymol 167:766-778) and has a very active homologous recombination potential. The strain PCC 6803 was isolated as Aphanocapsa N-1 from fresh water in California, USA, by R. Kunisawa in 1968 and is now obtainable through the “Pasteur Culture Collection of Axenic Cyanobacterial Strains” (PCC), Unité de Physiologie Microbienne, Paris, France. The complete genomic sequence of Synechocystis sp. PCC 6803 has been published from 1995 (Kaneko et al. (1995) DNA Research 2:153-166; Kaneko et al. (1995) DNA Research 2:191-198; Kaneko et al. (1996) DNA Research 3:109-136; Kaneko et al. (1996) DNA Research 3:185-209; Kaneko and Tabata (1997) Plant Cell Physiol 38:1171-1176; Kotani and Tabata (1998) Annu Rev Plant Physiol 49:151-171) and is published on the Internet (http://www.kazusa.or.jp/cyano/cyano.html) under the name “CyanoBase”. Efficient expression systems for Synechocystis 6803 are described in the literature (Mermet-Bouvier et al. (1993) Curr Microbiol 27:323-327; Mermet-Bouvier and Chauvat (1993) Curr Microbiol 28:145-148; Murphy and Stevens (1992) Appl Environ Microbiol 58:1650-1655; Takeshima et al. (1994) Proc Natl Acad Sci USA 91:9685-9689; Xiaoqiang et al. (1997) Appl Environ Microbiol 63:4971-4975; Ren et al. (1998) FEMS Microbiol Lett 158:127-132).

[2834] Growing Synechocystis

The cells of Synechocystis sp. PCC 6803 can be normally cultured autotrophically in BG11 medium. They have a diameter of 2.3 to 2.5 μm. For example, a cyanobacterium Synechocystis sp. PCC 6803 strain which is glucose-tolerant can be used, i.e. it is also able to grow heterotrophically in the dark with only a few minutes of weak blue light illumination per day. The culture conditions were developed by Anderson and McIntosh (Anderson and McIntosh (1991) J Bacteriol 173:2761-2767) and called light-activated heterotrophic growth (LANG). This makes it possible to cultivate these cyanobacteria without continuous photosynthesis and thus without production of oxygen.

[2835] BG 11 Culture Medium for Synechocystis

Stock solution 100 × BG11:

| | |
|---|---|
| NaNO₃ | 1.76 M = 149.58 g |
| MgSO₄ × 7 H₂O | 30.4 mM = 7.49 g |
| CaCl₂ × 2 H₂O | 24.5 mM = 3.6 g |
| Citric acid | 3.12 mM = 0.6 g |
| Na EDTA pH 8 | 0.279 mM = 0.104 g |

The weighed substances can be dissolved in 900 ml of H2O and made up to 1000 ml with 100 ml of the trace metal mix stock 1000×. The solution thus obtained is used as stock solution.

Trace metal mix stock 1000×:

| | |
|---|---|
| H₃BO₃ | 46.3 mM = 2.86 g/l |
| MnCl₂ × 4 H₂O | 4.15 mM = 1.81 g/l |
| ZnSO₄ × 7 H₂O | 0.77 mM = 0.222 g/l |
| Na₂MoO₄ × 2 H₂O | 1.61 mM = 0.39 g/l |
| CuSO₄ × 5 H₂O | 0.32 mM = 0.079 g/l |
| Co(NO₃)₂ × 6 H₂O | 0.17 mM = 0.0494 g/l |

[2836] The following solutions are required for 1 liter of BG11 culture solution:

[2837] 1. 10 ml of stock solution 100×BG 11

[2838] 2. 1 ml Na₂CO₃ (189 mM)

[2839] 3. 5 ml TES (1 M, pH 8)

[2840] 4. 1 ml K₂PO₄ (175 mM)

Whereas solution 2. and 3. ought to be sterilized by filtration, solution 4 must be autoclaved. The complete BG11 culture solution must be autoclaved before use and then be mixed with 1 ml of iron ammonium citrate (6 mg/ml) which has previously been sterilized by filtration. The iron ammonium citrate should never be autoclaved. For agar plates, 1.5% (w/v) bacto agar are added per liter of BG11 medium.

[2841] Amplification and cloning of DNA from Synechocystis spec. PCC 6803 The DNA can be amplified by the polymerase chain reaction (PCR) from Synechocystis spec. PCC 6803 by the method of Crispin A. Howitt (Howitt C A (1996) BioTechniques 21:32-34).

[2842] Tocopherol Production in Synechocystis Spec. PCC 6803

The cells of each of independent Synechocystis spec. PCC 6803 strains cultured on the BG-11 km agar medium, and untransformed wild-type cells (on BG11 agar medium without kanamycin) can be used to inoculate liquid cultures. For this, cells of a mutant or of the wild-type Synechocystis spec. PCC 6803 are transferred from plate into 10 ml of liquid culture in each case. These cultures are cultivated at 28° C. and 30 μmol photons*(m²*s)⁻¹ (30 μE) for about 3 days. After determination of the OD₇₃₀ of the individual cultures, the OD₇₃₀ of all cultures is synchronized by appropriate dilutions with BG-11 (wild types) or e.g. BG-11 km (mutants). These cell density-synchronized cultures are used to inoculate three cultures of the mutant and of the wild-type control. It is thus possible to carry out biochemical analyses using in each case three independently grown cultures of a mutant and of the corresponding wild types. The cultures are grown until the optical density was OD₇₃₀=0.3.
The cell culture medium is removed by centrifugation in an Eppendorf bench centrifuge at 14000 rpm twice. The subsequent disruption of the cells and extraction of the tocopherols or vitamin E take place by incubation in an Eppendorf shaker at 30° C., 1000 rpm in 100% methanol for 15 minutes twice, combining the supernatants obtained in each case.
In order to avoid oxidation, the resulting extracts can be analyzed immediate after the extraction with the aid of a Waters Alliance 2690 HPLC system. Tocopherols and vitamin E is separated on a reverse phase column (ProntoSil 200-3-C30, Bischoff) with a mobile phase of 100% methanol, and identified by means of a standard (Merck). The fluorescence of the substances (excitation 295 nm, emission 320 nm), which is detected with the aid of a Jasco FP 920 fluorescence detector, can serve as detection system.

[2843] for the disclosure of the paragraphs [0428.0.0.9] to [0435.0.0.9] see paragraphs [0428.0.0.0] to [0435.0.0.0] above.

[2844] Vitamin E Production

Vitamin E, like alpha-, beta-, or gamma-tocopherol, or its precursor 2,3-dimethyl-5-phytylquinol, can be detected advantageously as described in Deli, J. & Molnar, P., Paprika carotenoids: Analysis, isolation, structure elucidation. Curr. Org. Chem. 6, 1197-1219 (2004) or Fraser, P. D., Pinto, M. E., Holloway, D. E. & Bramley, P. M. Technical advance: application of high-performance liquid chromatography with photodiode array detection to the metabolic profiling of plant isoprenoids. Plant J. 24, 551-558 (2000).

[2845] for the disclosure of the paragraphs [0437.0.0.9] and [0438.0.0.9] see paragraphs [0437.0.0.0] and [0438.0.0.0] above.

### Example 8

### Analysis of the Effect of the Nucleic Acid Molecule on the Production of the Respective Fine Chemical Indicated in Table I, Application No. 10, Column 6

[2846] The effect of the genetic modification in plants, fungi, algae or ciliates on the production of a desired compound can be determined by growing the modified microorganisms or the modified plant under suitable conditions (such as those described above) and analyzing the medium and/or the cellular components for the elevated production of desired product (i.e. of the lipids or a fatty acid). These analytical techniques are known to the skilled worker and comprise spectroscopy, thin-layer chromatography, various types of staining methods, enzymatic and microbiological methods and analytical chromatography such as high-performance liquid chromatography (see, for example, Ullman, Encyclopedia of Industrial Chemistry, Vol. A2, p. 89-90 and p. 443-613, VCH: Weinheim (1985); Fallon, A., et al., (1987) “Applications of HPLC in Biochemistry” in: Laboratory Techniques in Biochemistry and Molecular Biology, Vol. 17; Rehm et al. (1993) Biotechnology, Vol. 3, Chapter III: “Product recovery and purification”, p. 469-714, VCH: Weinheim; Belter, P. A., et al. (1988) Bioseparations: downstream processing for Biotechnology, John Wiley and Sons; Kennedy, J. F., and Cabral, J. M. S. (1992) Recovery processes for biological Materials, John Wiley and Sons; Shaeiwitz, J. A., and Henry, J. D. (1988) Biochemical Separations, in: Ullmann's Encyclopedia of Industrial Chemistry, Vol. B3; Chapter 11, p. 1-27, VCH: Weinheim; and Dechow, F. J. (1989) Separation and purification techniques in biotechnology, Noyes Publications).

Vitamin E, like alpha-, beta-, or gamma-tocopherol, or its precursor 2,3-dimethyl-5-phytylquinol, can be detected advantageously as described in Deli, J. & Molnar, P., Paprika carotenoids: Analysis, isolation, structure elucidation. Curr. Org. Chem. 6, 1197-1219 (2004) or Fraser, P. D., Pinto, M. E., Holloway, D. E. & Bramley, P. M. Technical advance: application of high-performance liquid chromatography with photodiode array detection to the metabolic profiling of plant isoprenoids. Plant J. 24, 551-558 (2000).

[2847] for the disclosure of this paragraph see [0441.0.0.0] above.

### Example 9

### Purification of the Vitamin E or its Precursor 2,3-Dimethyl-5Phytylquinol

[2848] Abbreviations: GC-MS, gas liquid chromatography/mass spectrometry; TLC, thin-layer chromatography.

The unambiguous detection for the presence of vitamin E, like alpha-, beta-, or gamma-tocopherol, or its precursor 2,3-dimethyl-5-phytylquinol can be obtained by analyzing recombinant organisms using analytical standard methods: GC, GC-MS or TLC, as described (1997, in: Advances on Lipid Methodology, Fourth Edition: Christie, Oily Press, Dundee, 119-169; 1998, Gaschromatographie-Massenspektrometrie-Verfahren [Gas chromatography/mass spectrometric methods], Lipide 33:343-353). The total vitamin E produced in the organism for example in yeasts used in the inventive process can be analysed for example according to the following procedure: The material such as yeasts, E. coli or plants to be analyzed can be disrupted by sonication, grinding in a glass mill, liquid nitrogen and grinding or via other applicable methods.
Plant material is initially homogenized mechanically by comminuting in a pestle and mortar to make it more amenable to extraction.
A typical sample pretreatment consists of a total lipid extraction using such polar organic solvents as acetone or alcohols as methanol, or ethers, saponification, partition between phases, separation of non-polar epiphase from more polar hypophasic derivatives and chromatography.

### Characterization of the Transgenic Plants

[2849] In order to confirm that vitamin E biosynthesis in the transgenic plants is influenced by the expression of the polypeptides described herein, the tocopherol/vitamin E content in leaves and seeds of the plants transformed with the described constructs (Arabidopsis thaliana, Brassica napus and Nicotiana tabacum) is analyzed. For this purpose, the transgenic plants are grown in a greenhouse, and plants which express the gene coding for polypeptide of the invention or used in the method of the invention are identified at the Northern level. The tocopherol content or the vitamin E content in leaves and seeds of these plants is measured. In all, the tocopherol concentration is raised by comparison with untransformed plants.

[2850] If required and desired, further chromatography steps with a suitable resin may follow. Advantageously, the vitamin E, like alpha-, beta-, or gamma-tocopherol, or its precursor 2,3-dimethyl-5-phytylquinol, can be further purified with a so-called RTHPLC. As eluent acetonitrile/water or chloroform/acetonitrile mixtures can be used. If necessary, these chromatography steps may be repeated, using identical or other chromatography resins. The skilled worker is familiar with the selection of suitable chromatography resin and the most effective use for a particular molecule to be purified.

[2851] In addition depending on the produced fine chemical purification is also possible with cristalisation or destilation. Both methods are well known to a person skilled in the art.

[2852] for the disclosure of the paragraphs [0446.0.0.9] to [0496.0.0.9] see paragraphs [0446.0.0.0] to [0496.0.0.0] above.

[2853] As an alternative, the vitamin E, like alpha-, beta-, or gamma-tocopherol, or its precursor 2,3-dimethyl-5-phytylquinol, can be detected advantageously as described in Deli, J. & Molnar, P., Paprika carotenoids: Analysis, isolation, structure elucidation. Curr. Org. Chem. 6, 1197-1219 (2004) or Fraser, P. D., Pinto, M. E., Holloway, D. E. & Bramley, P. M. Technical advance: application of high-performance liquid chromatography with photodiode array detection to the metabolic profiling of plant isoprenoids. Plant J. 24, 551-558 (2000).
[2854] The results of the different plant analyses can be seen from the table, which follows:

TABLE VI

| | | Method/ | Min.- | Max.- |
|---|---|---|---|---|
| ORF | Metabolite | Analytics | Value | Value |
| b1251 | alpha-Tocopherol | LC | 1.35 | 1.81 |
| b1704 | alpha-Tocopherol | LC | 1.25 | 1.82 |
| b2600 | alpha-Tocopherol | GC | 1.53 | 1.88 |
| b2601 | alpha-Tocopherol | LC | 1.56 | 7.11 |
| b2965 | alpha-Tocopherol | GC | 1.72 | 3.04 |
| b3390 | alpha-Tocopherol | GC | 1.62 | 1.68 |
| b2600 | alpha-Tocotrienol | LC | 1.68 | 16.12 |
| b1704 | gamma-Tocopherol/beta- | LC | 1.83 | 16.47 |
| | Tocopherol/2,3-Dimethyl-5- | | | |
| | phytylquinol | | | |
| b2600 | gamma-Tocopherol/beta- | LC | 2.40 | 5.64 |
| | Tocopherol/2,3-Dimethyl-5- | | | |
| | phytylquinol | | | |
| b2601 | gamma-Tocopherol/beta- | LC | 1.63 | 3.57 |
| | Tocopherol/2,3-Dimethyl-5- | | | |
| | phytylquinol | | | |
| b2965 | gamma-Tocopherol/beta- | LC | 3.03 | 7.10 |
| | Tocopherol/2,3-Dimethyl-5- | | | |
| | phytylquinol | | | |
| b3281 | gamma-Tocopherol/beta- | LC | 1.38 | 2.64 |
| | Tocopherol/2,3-Dimethyl-5- | | | |
| | phytylquinol | | | |
| b3390 | gamma-Tocopherol/beta- | LC | 1.41 | 1.86 |
| | Tocopherol/2,3-Dimethyl-5- | | | |
| | phytylquinol | | | |
| b2600 | gamma-Tocotrienol/beta- | LC | 7.77 | 16.43 |
| | Tocotrienol | | | |

[2855] In the context of this table “gamma-Tocopherol/beta-Tocopherol/2,3-Dimethyl-5-phytylquinol” means the total amount of gamma-Tocopherol and beta-Tocopherol and 2,3-Dimethyl-5-phytylquinol.

[2856] for the disclosure of the paragraphs [0499.0.0.9] and [0500.0.0.9] see paragraphs [0499.0.0.0] and [0500.0.0.0] above.

### Example 15a

### Engineering Ryegrass Plants by Over-Expressing b1251 from E. coli or Homologs of b1251 from Other Organisms

[2857] for the disclosure of the paragraphs [0502.0.0.9] to [0508.0.0.9] see paragraphs [0502.0.0.0] to [0508.0.0.0] above.

### Example 15b

### Engineering Soybean Plants by Over-Expressing b1251 from E. coli or Homologs of b1251 from Other Organisms

[2858] for the disclosure of the paragraphs [0510.0.0.9] to [0513.0.0.9] see paragraphs [0510.0.0.0] to [0513.0.0.0] above.

### Example 15c

### Engineering Corn Plants by Over-Expressing b1251 from E. coli or Homologs of b1251 from Other Organisms

[2859] for the disclosure of the paragraphs [0515.0.0.9] to [0540.0.0.9] see paragraphs [0515.0.0.0] to [0540.0.0.0] above.

### Example 15d

### Engineering Wheat Plants by Over-Expressing b1251 from E. coli or Homologs of b1251 from Other Organisms

[2860] for the disclosure of the paragraphs [0542.0.0.9] to [0544.0.0.9] see paragraphs [0542.0.0.0] to [0544.0.0.0] above.

### Example 15e

### Engineering Rapeseed/Canola Plants by Over-Expressing b1251 from E. coli or Homologs of b1251 from Other Organisms

[2861] for the disclosure of the paragraphs [0546.0.0.9] to [0549.0.0.9] see paragraphs [0544.0.0.0] to [0549.0.0.0] above.

### Example 15f

### Engineering Alfalfa Plants by Over-Expressing b1251 from E. coli or Homologs of b1251 from Other Organisms

[2862] for the disclosure of the paragraphs [0551.0.0.9] to [0554.0.0.9] see paragraphs [0551.0.0.0] to [0554.0.0.0] above.

### Example 16

### Metabolite Profiling Info from Zea mays

[2863] Zea mays plants were engineered as described in Example 15c.
Metabolic results were either obtained from regenerated primary transformants (T0) or from the following progeny generation (T1) in comparison to appropriate control plants. The results are shown in table VII as minimal (MIN) or maximal changes (MAX) in the respective fine chemical (column “metabolite”) in genetically modified corn plants expressing the sequence listed in column 1 (ORF):

TABLE VII

| ORF | Metabolite | MIN | MAX |
|---|---|---|---|
| b2601 | alpha-Tocopherol | 1.56 | 2.67 |
| b2601 | beta/gamma-Tocopherol | 1.74 | 4.90 |
| b3390 | beta/gamma-Tocopherol | 1.83 | 2.03 |
| b3390 | alpha-Tocopherol | 1.47 | 1.86 |

In the context of this table “beta/gamma-Tocopherol” means the total amount of gamma-Tocopherol and beta-Tocopherol,
In one embodiment, in case the activity of the protein listed in column 1 of Table VII or its homologs, is increased in corn plants, preferably, an increase of the respective fine chemical as indicated in column 2 (Metabolite) is in the range between the minimal value shown in the line “MIN” and the maximal value shown in the line “MAX is conferred.

[2864] for the disclosure of this paragraph see [0554.2.0.0] above.

[2865] for the disclosure of this paragraph see [0555.0.0.0] above.

[2866] for the disclosure of this paragraph see [0001.0.0.0].

[2867] Carotenoids are red, yellow and orange pigments that are widely distributed in nature. Although specific carotenoids have been identified in photosynthetic centers in plants, in bird feathers, in crustaceans and in marigold petals, they are especially abundant in yellow-orange fruits and vegetables and dark green, leafy vegetables. Of the more than 700 naturally occurring carotenoids identified thus far, as many as 50 may be absorbed and metabolized by the human body. To date, only 14 carotenoids have been identified in human serum.

In animals some carotenoids (particularly beta-carotene) serve as dietary precursors to Vitamin A, and many of them may function as fat-soluble antioxidants. In plants carotenes serve for example as antioxidants to protect the highly reactive photosystems and act as accessory photopigments. In vitro experiments have shown that lycopene, alpha-carotene, zeaxanthin, lutein and cryptoxanthin quench singlet oxygen and inhibit lipid peroxidation. The isolation and identification of oxidized metabolites of lutein, zeaxanthin and lycopene provide direct evidence of the antioxidant action of these carotenoids.
Carotenoids are 40-carbon (C₄₀) terpenoids generally comprising eight isoprene (C₅) units joined together. Linking of the units is reversed at the center of the molecule. “Ketocarotenoid” is a general term for carotenoid pigments that contain a keto group in the ionene ring portion of the molecule, whereas “hydroxycarotenoid” refers to carotenoid pigments that contain a hydroxyl group in the ionene ring. Trivial names and abbreviations will be used throughout this disclosure, with IUPAC-recommended semisystematic names usually being given in parentheses after first mention of a trivial name.
Carotenoids are synthesized from a five carbon atom metabolic precursor, isopentenyl pyrophosphate (IPP). There are at least two known biosynthetic pathways in the formation of IPP, the universal isoprene unit. One pathway begins with mevalonic acid, the first specific precursor of terpenoids, formed from acetyl-CoA via HMG-CoA (3-hydroxy-3-methylglutaryl-CoA), that is itself converted to isopentenyl pyrophosphate (IPP). Later, condensation of two geranylgeranyl pyrophosphate (GGPP) molecules with each other produces colorless phytoene, which is the initial carotenoid. Studies have also shown the existence of an alternative, mevalonate-independent pathway for IPP formation that was characterized initially in several species of eubacteria, a green alga, and in the plastids of higher plants. The first reaction in this alternative pathway is the transketolase-type condensation reaction of pyruvate and D-glyceraldehylde-3-phosphate to yield 1-deoxy-D-xylulose-5-phosphate (DXP) as an intermediate.
Through a series of desaturation reactions, phytoene is converted to phytofluene, ζ-carotene, neurosporene and finally to lycopene. Subsequently, lycopene is converted by a cyclization reaction to β-carotene that contains two β-ionene rings. A keto-group and/or a hydroxyl group are introduced into each ring of β-carotene to thereby synthesize canthaxanthin, zeaxanthin, astaxanthin. A hydroxylase enzyme has been shown to convert canthaxanthin to astaxanthin. Similarly, a ketolase enzyme has been shown to convert zeaxanthin to astaxanthin. The ketolase also converts β-carotene to canthaxanthin and the hydroxylase converts β-carotene to zeaxanthin.
Carotenoids absorb light in the 400-500 nm region of the visible spectrum. This physical property imparts the characteristic red/yellow color of the pigments. A conjugated backbone composed of isoprene units is usually inverted at the center of the molecule, imparting symmetry. Changes in geometrical configuration about the double bonds result in the existence of many cis- and trans-isomers. Hydroxylated, oxidized, hydrogenated or ring-containing derivatives also exist. Hydrocarbon carotenoids are classified as carotenes while those containing oxygen are known as xanthophylls.
In animals, carotenoids are absorbed from the intestine with the aid of dietary fat and incorporated into chylomicrons for transport in the serum. The different structural features possessed by carotenoids account for selective distribution in organ tissue, biological activity and pro-vitamin A potency, or in vivo conversion to vitamin A. Due to the hydrophobic character, carotenoids are associated with lipid portions of human tissues, cells, and membranes. In general, 80-85% of carotenoids are distributed in adipose tissue, with smaller amounts found in the liver, muscle, adrenal glands, and reproductive organs. Approximately 1% circulate in the serum on high and low density lipoproteins. Serum concentrations are fairly constant and slow to change during periods of low intake. The estimated half-life was estimated to be 11-14 days for lycopene, α-carotene, β-carotene, lutein and zeaxanthin. Evidence for the existence of more than one body pool has been published. The major serum carotenoids are α-carotene, β-carotene, lutein, zeaxanthin, lycopene and cryptoxanthin. Smaller amounts of polyenes such as phytoene and phytofluene are also present.
Human serum levels reflect lifestyle choices and dietary habits within and between cultures. Approximately only 15 circulate in the blood, on HDL and LDL. Variations can be attributed to different intakes, unequal abilities to absorb certain carotenoids, and different rates of metabolism and tissue uptake. Decreased serum levels occur with alcohol consumption, the use of oral contraceptives, smoking and prolonged exposure to UV light.
α-Carotene, β-carotene and β-cryptoxanthin can be converted to retinol or vitamin A in the intestine and liver by the enzyme 15-15′-b-carotenoid dioxygenase. Such in vivo formation of retinol appears to be homeostatically controlled, such that conversion to retinol is limited in persons having adequate vitamin A status.

[2868] The established efficacy of beta-carotene in quenching singlet oxygen and intercepting deleterious free radicals and reactive oxygen species makes it part of the diverse antioxidant defense system in humans. Reactive oxygen species have been implicated in the development of many diseases, including ischemic heart disease, various cancers, cataracts and macular degeneration. Because the conjugated polyene portion of beta-carotene confers its antioxidant capability and all carotenoids possess this structural feature, research efforts have been directed at evaluating the efficacy of other carotenoids in the prevention of free radical-mediated diseases. Indeed, in vitro experiments have demonstrated that lycopene, alpha-carotene, zeaxanthin, lutein and cryptoxanthin quench singlet oxygen and inhibit lipid peroxidation. The isolation and identification of oxidized metabolites of lutein, zeaxanthin and lycopene may provide direct evidence of the antioxidant action of these carotenoids.

In addition to antioxidant capability, other biological actions of carotenoids include the ability to enhance immunocompetence and in vitro gap junction communication, reduce or inhibited mutagenesis and inhibit cell transformations in vitro.
Many epidemiological studies have established an inverse correlation between dietary intake of yellow-orange fruit and dark green, leafy vegetables and the incidence of various cancers, especially those of the mouth, pharynx, larynx, esophagus, lung, stomach, cervix and bladder. While a number of protective compounds may be responsible for this observation, the co-incidence of carotenoids in these foods has been noted. Because nutritionists and medical professionals currently recognize the occurrence of a large number of distinct carotenoids in food, interest in their functions and biological impact on health is burgeoning.
Lutein exists in the retina. It functions to protect photoreceptor cells from light-generated oxygen radicals, and thus plays a key role in preventing advanced macular degeneration. Lutein possesses chemopreventive activity, induces gap junction communication between cells and inhibits lipid peroxidation in vitro more effectively than beta-carotene, alpha-carotene and lycopene. High levels of lutein in serum have been inversely correlated with lung cancer.
In addition to lutein, zeaxanthin exists in the retina and confers protection against macular degeneration. Zeaxanthin is also prevalent in ovaries and adipocyte tissue. This xanthophyll does not possess provitamin A activity.
Alcohol consumption has been shown to influence lipid peroxidation. Anhydrolutein, an oxidative by-product of lutein and zeaxanthin, was higher in plasma after alcohol ingestion, while concentrations of these xanthophylls were reduced. Lutein and zeaxanthin may therefore have protective effects against LDL oxidation.
The all-trans isomer of Lycopene is typically quantified in serum, although signals for 9-, 13- and 15-cis isomers are detectable and account for as much as 50% of the total lycopene. In experiments performed in vitro, lycopene quenched singlet oxygen more efficiently than alpha-carotene, beta-carotene, zeaxanthin, lutein and cryptoxanthin. Lycopene induces gap junction communication, inhibits lipid peroxidation and has displays chemopreventive activity. Serum levels of lycopene have been inversely related to the risk of cancer in the pancreas and cervix. This carotenoid has been identified in tissues of the thyroid, kidneys, adrenals, spleen, liver, heart, testes and pancreas. Lycopene is not converted to retinol in vivo.
beta-Cryptoxanthin is capable of quenching singlet oxygen. beta-Cryptoxanthin is used to color butter. beta-Cryptoxanthin exhibits provitamin A activity.
The all-trans isomer of this carotenoid is the major source of dietary retinoids, due to its high provitamin A activity. One molecule of trans-beta-carotene can theoretically provide two molecules of trans retinaldehyde in vivo. Signals for 13- and 15-cis isomers of beta-carotene are also observed in the carotenoid profile and account for 10% or less of the total beta-carotene in serum. beta-Carotene quenches singlet oxygen, induces gap junction communication and inhibits lipid peroxidation. High serum levels of beta-carotene are correlated with low incidences of cancer in the mouth, lung, breast, cervix, skin and stomach. beta-Carotene has been identified in tissues of the thyroid, kidney, spleen, liver, heart, pancreas, fat, ovaries and adrenal glands.
alpha-Carotene is similar to beta-carotene in its biological activity, but quenches singlet oxygen more effectively. alpha-Carotene improves gap junction communication, prevents lipid peroxidation and inhibits the formation and uptake of carcinogens in the body. High serum levels have been associated with lower risks of lung cancer. With one half the provitamin A potency of beta-carotene, alpha-carotene also restores normal cell growth and differentiation. Serum levels are usually between 10 and 20% of the values for total beta-carotene.
Alpha-Carotene, beta-carotene and beta-cryptoxanthin can be converted to Vitamin A in the intestine and liver. Vitamin A is essential for the immune response and is also involved in other defenses against infectious agents. Nevertheless, in many individuals, this conversion is slow and ineffectual, particularly for older. Some individuals are known as non or low-responders because they do not convert beta-carotene to Vitamin A at the rate as expected. A number of factors can inhibit this conversion of beta-carotene to Vitamin A. The major reason why so many Americans have a poor vitamin A status is the regular use of excessive alcohol. Intestinal parasites can be a factor. And, any prescription drug that requires liver metabolism will decrease the liver conversion of beta-carotene to retinol in the liver. Diabetics and individuals with hypothyroidism or even borderline hypothyroidism are likely to be low-responders.

[2869] In plants, approximately 80-90% of the carotenoids present in green, leafy vegetables such as broccoli, kale, spinach and brussel sprouts are xanthophylls, whereas 10-20% are carotenes. Conversely, yellow and orange vegetables including carrots, sweet potatoes and squash contain predominantly carotenes. Up to 60% of the xanthophylls and 15% of the carotenes in these foods are destroyed during microwave cooking. Of the xanthophylls, lutein appears to be the most stable.

Lutein occurs in mango, papaya, oranges, kiwi, peaches, squash, peas, lima beans, green beans, broccoli, brussel sprouts, cabbage, kale, lettuce, prunes, pumpkin, sweet potatoes and honeydew melon. Commercial sources are obtained from the extraction of marigold petals. Lutein does not possess provitamin A activity.
Dietary sources of Zeaxanthin include peaches, squash, apricots, oranges, papaya, prunes, pumpkin, mango, kale, kiwi, lettuce, honeydew melon and yellow corn.
The red color of fruits and vegetables such as tomatoes, pink grapefruit, the skin of red grapes, watermelon and red guavas is due to lycopene. Other dietary sources include papaya and apricots.
beta-Cryptoxanthin occurs in oranges, mango, papaya, cantaloupe, peaches, prunes, squash.
Dietary sources of beta-Carotene include mango, cantaloupe, carrots, pumpkin, papaya, peaches, prunes, squash, sweet potato, apricots, cabbage, lima beans, green beans, broccoli, brussel sprouts, kale, kiwi, lettuce, peas, spinach, tomatoes, pink grapefruit, honeydew melon and oranges.
Dietary sources of alpha-Carotene include sweet potatoes, apricots, pumpkin, cantaloupe, green beans, lima beans, broccoli, brussel sprouts, cabbage, kale, kiwi, lettuce, peas, spinach, prunes, peaches, mango, papaya, squash and carrots.

[2870] Some carotenoids occur particularly in a wide variety of marine animals including fish such as salmonids and sea bream, and crustaceans such as crab, lobster, and shrimp. Because animals generally cannot biosynthesize carotenoids, they obtain those carotenoids present in microorganisms or plants upon which they feed. Carotenoids e.g. xanthophylls, e.g. as astaxanthin, supplied from biological sources, such as crustaceans, yeast, and green alga is limited by low yield and costly extraction methods when compared with that obtained by organic synthetic methods. Usual synthetic methods, however, produce by-products that can be considered unacceptable. It is therefore desirable to find a relatively inexpensive source of carotenoids, in particular xanthophylls, to be used as a feed supplement in aquaculture and as a valuable chemical for other industrial uses and for diets. Sources of Xanthophylls include crustaceans such as a krill in the Antarctic Ocean, cultured products of the yeast Phaffia, cultured products of a green alga Haematococcus pluvialis, and products obtained by organic synthetic methods. However, when crustaceans such as a krill or the like are used, a great deal of work and expense are required for the isolation of xanthophylls from contaminants such as lipids and the like during the harvesting and extraction. Moreover, in the case of the cultured product of the yeast Phaffia, a great deal of expense is required for the gathering and extraction of astaxanthin because the yeast has rigid cell walls and produces xanthophylls only in a low yield. One approach to increase the productivity of some xanthophylls' production in a biological system is to use genetic engineering technology.

[2871] In many plants, lycopene is a branch point in carotenoid biosynthesis. Thus, some of the plant's lycopene is made into beta-carotene and zeaxanthin, and sometimes zeaxanthin diglucoside, whereas remaining portions of lycopene are formed into alpha-carotene and lutein (3,3′-dihydroxy-α-carotene), another hydroxylated compound. Carotenoids in higher plants; i.e., angiosperms, are found in plastids; i.e., chloroplasts and chromoplasts. Plastids are intracellular storage bodies that differ from vacuoles in being surrounded by a double membrane rather than a single membrane. Plastids such as chloroplasts can also contain their own DNA and ribosomes, can reproduce independently and synthesize some of their own proteins. Plastids thus share several characteristics of mitochondria. In leaves, carotenoids are usually present in the grana of chloroplasts where they provide a photoprotective function. Beta-carotene and lutein are the predominant carotenoids, with the epoxidized carotenoids violaxanthin and neoxanthin being present in smaller amounts. Carotenoids accumulate in developing chromoplasts of flower petals, usually with the disappearance of chlorophyll. As in flower petals, carotenoids appear in fruit chromoplasts as they develop from chloroplasts. Most enzymes that take part in conversion of phytoene to carotenes and xanthophylls are labile, membrane-associated proteins that lose activity upon solubilization. In maize, cartonoids were present in horny endosperm (74% to 86%), floury endosperm (9%-23%) and in the germ and bran of the kernel.

[2872] At the present time only a few plants are widely used for commercial colored carotenoid production. However, the productivity of colored carotenoid synthesis in most of these plants is relatively low and the resulting carotenoids are expensively produced.

Dried marigold petals and marigold petal concentrates obtained from so-called xanthophyll marigolds are used as feed additives in the poultry industry to intensify the yellow color of egg yolks and broiler skin. The pigmenting ability of marigold petal meal resides largely in the carotenoid fraction known as the xanthophylls, primarily lutein esters. The xanthophyll zeaxanthin, also found in marigold petals, has been shown to be effective as a broiler pigmenter, producing a highly acceptable yellow to yellow-orange color. Of the xanthophylls, the pigments lutein and zeaxanthin are the most abundant in commercially available hybrids. Structural formulas for lutein and zeaxanthin are shown below.
Carotenoids have been found in various higher plants in storage organs and in flower petals. For example, marigold flower petals accumulate large quantities of esterified lutein as their predominant xanthophyll carotenoid (about 75 to more than 90 percent), with smaller amounts of esterified zeaxanthin. Besides lutein and zeaxanthin, marigold flower petals also typically exhibit a small accumulation of β-carotene and epoxidized xanthophylls, but do not produce or accumulate canthaxanthin or astaxanthin because a 4-keto-β-ionene ring-forming enzyme is absent in naturally-occurring marigolds or their hybrids.

[2873] One way to increase the productive capacity of biosynthesis is to apply recombinant DNA technology. Thus, it would be desirable to produce colored carotenoids generally and, with the use of recent advances in determining carotenoid biosynthesis from β-carotene to xanthophylls to control the production of carotenoids. That type of production permits control over quality, quantity and selection of the most suitable and efficient producer organisms. The latter is especially important for commercial production economics and therefore availability to consumers.

Methods of recombinant DNA technology have been used for some years to improve the production of Xanthophylls in microorganisms, in particular algae or in plants by amplifying individual xanthophyll biosynthesis genes and investigating the effect on xanthophyll production. It is for example reportet, that the five ketocarotenoids, e.g. the xanthophyll astaxanthin could be produced in the nectaries of transgenic tobacco plants. Those transgenic plants were prepared by Argobacterium tumifaciens-mediated transformation of tobacco plants using a vector that contained a ketolase-encoding gene from H. pluvialis denominated crtO along with the Pds gene from tomato as the promoter and to encode a leader sequence. The Pds gene was said by those workers to direct transcription and expression in chloroplasts and/or chromoplast-containing tissues of plants. Those results indicated that about 75 percent of the carotenoids found in the flower of the transformed plant contained a keto group. Further, in maize the phytonene synthase (Psy), Phytone desaturase (Pds), and the ζ-carotene desaturase were identified and it was shown, that PSY activity is an important control point for the regulation of the flux.

[2874] Genes suitable for conversion of microorganisms have also been reported (U.S. Pat. No. 6,150,130 WO 99/61652). Two different genes that can convert a carotenoid β-ionene ring compound into astaxanthin have been isolated from the green alga Haematococcus pluvialis. Zeaxanthin or ζ-carotene were also found in the marine bacteria Agrobacterium aurantiacum, Alcaligenes PC-1, Erwinia uredovora. An A. aurantiacum crtZ gene was introduced to an E. coli transformant that accumulated all-trans-β-carotene. The transformant so formed produced zeaxanthin. A gene cluster encoding the enzymes for a carotenoid biosynthesis pathway has been also cloned from the purple photosynthetic bacterium Rhodobacter capsulatus. A similar cluster for carotenoid biosynthesis from ubiquitous precursors such as farnesyl pyrophosphate and geranyl pyrophosphate has been cloned from the non-photosynthetic bacteria Erwinia herbicola. Yet another carotenoid biosynthesis gene cluster has been cloned from Erwinia uredovora. It is yet unknown and unpredictable as to whether enzymes encoded by other organisms behave similarly to that of A. aurantiacum in vitro or in vivo after transformation into the cells of a higher plant.

[2875] In addition to the above said about the biological importance of carotenoids, e.g. in vision, bone growth, reproduction, immune function, gene expression, embryonic expression, cell division and cell differation, and respiration, it should be mentioned that in the world, the prevalence of vitamin A deficiency ranges from 100 to 250 million children and an estimated 250.000 to 500.000 children go blind each year from vitamin A deficiency.

[2876] Thus, it would be advantageous if an algae or other microorganism were available who produce large amounts of β-carotene, beta-cryptoxanthin, lutein, zeaxanthin, or other carotenoids. It might be advantageous that only small amounts or no lutein is produced so that such organisms could be transformed with e.g. one or more of an appropriate hydroxylase gene and/or an appropriate ketolase gene to produce cryptoxanthin, zeaxanthin or astaxanthin. The invention discussed hereinafter relates in some embodiments to such transformed prokaryotic or eukaryotic microorganisms.

It would also be advantageous if a marigold or other plants were available whose flowers produced large amounts of β-carotene, beta-cryptoxanthin, lutein, zeaxanthin, or other carotenoids. It might be advantageous that only small amounts or no lutein is produced so that such plants could be transformed with one or more of an appropriate hydroxylase gene and an appropriate ketolase gene to produce cryptoxanthin, zeaxanthin or astaxanthin from e.g the flowers of the resulting transformants. The invention discussed hereinafter relates in some embodiments to such transformed plants.

[2877] Therefore improving the quality of foodstuffs and animal feeds is an important task of the food-and-feed industry. This is necessary since, for example, as mentioned above xanthophylls, which occur in plants and some microorganisms are limited with regard to the supply of mammals. Especially advantageous for the quality of foodstuffs and animal feeds is as balanced as possible a carotenoids profile in the diet since a great excess of some carotenoids above a specific concentration in the food has only some positive effect. A further increase in quality is only possible via addition of further carotenoids, which are limiting.

[2878] To ensure a high quality of foods and animal feeds, it is therefore necessary to add one or a plurality of carotenoids in a balanced manner to suit the organism.

[2879] Accordingly, there is still a great demand for new and more suitable genes which encode enzymes which participate in the biosynthesis of carotenoids, e.g. xanthophylls, e.g. like beta-crypotxanthin, or zeaxanthin, or astaxanthin, and make it possible to produce them specifically on an industrial scale without unwanted byproducts forming. In the selection of genes for biosynthesis two characteristics above all are particularly important. On the one hand, there is as ever a need for improved processes for obtaining the highest possible contents of carotenoids like xanthophylls; on the other hand as less as possible byproducts should be produced in the production process.

[2880] for the disclosure of this paragraph see [0013.0.0.0] above.

[2881] Accordingly, in a first embodiment, the invention relates to a process for the production of a fine chemical, whereby the fine chemical is a xanthophyll. Accordingly, in the present invention, the term “the fine chemical” as used herein relates to a “Xanthophyll”. Further, the term “the fine chemicals” as used herein also relates to fine chemicals comprising xanthophylls.

[2882] In one embodiment, the term “xanthophylls”, “the fine chemical” or “the respective fine chemical” means at least one chemical compound with xanthophylls activity selected from the group comprising zeaxanthin or β-cryptoxanthin. Throughout the specification the term “the fine chemical” or “the respective fine chemical” means at xanthophylls especially selected from the group comprising zeaxanthin or β-cryptoxanthin in free form or bound to other compounds such as membrane lipids.

In one embodiment, the term “the fine chemical” and the term “the respective fine chemical” mean at least one chemical compound with an activity of the abovementioned fine chemical.

[2883] Accordingly, the present invention relates to a process for the production of xanthophylls preferably zeaxanthin and/or cryptoxanthin, which comprises
[2884] (a) increasing or generating the activity of a protein as shown in table II, application no. 11, column 3 encoded by the nucleic acid sequences as shown in table I, application no. 11, column 5, in an organelle of a microorganism or plant, or
[2885] (b) increasing or generating the activity of a protein as shown in table II, application no. 11, column 3 encoded by the nucleic acid sequences as shown in table I, application no. 11, column 5 in the plastid of a microorganism or plant, or in one or more parts thereof; and
[2886] (c) growing the organism under conditions which permit the production of the fine chemical, thus, xanthophylls preferably zeaxanthin and/or cryptoxanthin or fine chemicals comprising xanthophylls preferably zeaxanthin and/or cryptoxanthin, in said organism or in the culture medium surrounding the organism.

[2887] Accordingly, the term “the fine chemical” means “beta-cryptoxanthin” in relation to all sequences listed in table I, application no. 11, columns 3 and 7 or homologs thereof. Accordingly, the term “the fine chemical” can mean “zeaxanthin” or “cryptoxanthin”, owing to circumstances and the context. Preferably the term “the fine chemical” means “zeaxanthin”. In order to illustrate that the meaning of the term “the respective fine chemical” means “cryptoxanthin”, and/or “zeaxanthin” owing to the sequences listed in the context the term “the respective fine chemical” is also used.

The terms “beta-cryptoxanthin” and “cryptoxanthin” are used as equivalent terms.

[2888] In another embodiment the present invention is related to a process for the production of xanthophylls, preferably zeaxanthin and/or cryptoxanthin, which comprises
[2889] (a) increasing or generating the activity of a protein as shown in table II, application no. 11, column 3 encoded by the nucleic acid sequences as shown in table I, application no. 11, column 5, in an organelle of a non-human organism, or
[2890] (b) increasing or generating the activity of a protein as shown in table II, application no. 11, column 3 encoded by the nucleic acid sequences as shown in table I, application no. 11, column 5, which are joined to a nucleic acid sequence encoding a transit peptide in a non-human organism, or in one or more parts thereof; or
[2891] (c) increasing or generating the activity of a protein as shown in table II, application no. 11, column 3 encoded by the nucleic acid sequences as shown in table I, application no. 11, column 5, which are joined to a nucleic acid sequence encoding chloroplast localization sequence, in a non-human organism, or in one or more parts thereof, and
[2892] (d) growing the organism under conditions which permit the production of xanthophylls, preferably zeaxanthin and/or cryptoxanthin in said organism.

[2893] In another embodiment, the present invention relates to a process for the production of xanthophylls, preferably zeaxanthin and/or cryptoxanthin, which comprises
[2894] (a) increasing or generating the activity of a protein as shown in table II, application no. 11, column 3 encoded by the nucleic acid sequences as shown in table I, application no. 11, column 5, in an organelle of a microorganism or plant through the transformation of the organelle, or
[2895] (b) increasing or generating the activity of a protein as shown in table II, application no. 11, column 3 encoded by the nucleic acid sequences as shown in table I, application no. 11, column 5 in the plastid of a microorganism or plant, or in one or more parts thereof through the transformation of the plastids; and
[2896] (c) growing the organism under conditions which permit the production of the fine chemical, thus, xanthophylls, preferably zeaxanthin and/or cryptoxanthin or fine chemicals comprising xanthophylls, preferably zeaxanthin and/or cryptoxanthin, in said organism or in the culture medium surrounding the organism.

[2897] Advantageously the activity of the protein as shown in table II, application no. 11, column 3 encoded by the nucleic acid sequences as shown in table I, application no. 11, column 5 is increased or generated in the abovementioned process in the plastid of a microorganism or plant.

[2898] for the disclosure of the paragraphs [0019.0.0.10] to [0224.0.0.10] see paragraphs [0019.0.0.0] and [0024.0.0.0] above.

[2899] Even more preferred nucleic acid sequences are encoding transit peptides as disclosed by von Heijne et al. [Plant Molecular Biology Reporter, Vol. 9 (2), 1991: 104-126], which are hereby incorporated by reference. Table V shows some examples of the transit peptide sequences disclosed by von Heijne et al. According to the disclosure of the invention especially in the examples the skilled worker is able to link other nucleic acid sequences disclosed by von Heijne et al. to the nucleic acid sequences shown in table I, application no. 11, columns 5 and 7. Most preferred nucleic acid sequences encoding transit peptides are derived from the genus Spinacia such as chloroplast 30S ribosomal protein PSrp-1, root acyl carrier protein II, acyl carrier protein, ATP synthase: γ subunit, ATP synthase: δ subunit, cytochrom f, ferredoxin I, ferredoxin NADP oxidoreductase (=FNR), nitrite reductase, phosphoribulokinase, plastocyanin or carbonic anhydrase. The skilled worker will recognize that various other nucleic acid sequences encoding transit peptides can easily isolated from plastid-localized proteins, which are expressed from nuclear genes as precursors and are then targeted to plastids. Such transit peptides encoding sequences can be used for the construction of other expression constructs. The transit peptides advantageously used in the inventive process and which are part of the inventive nucleic acid sequences and proteins are typically 20 to 120 amino acids, preferably 25 to 110, 30 to 100 or 35 to 90 amino acids, more preferably 40 to 85 amino acids and most preferably 45 to 80 amino acids in length and functions post-translationally to direct the protein to the plastid preferably to the chloroplast. The nucleic acid sequences encoding such transit peptides are localized upstream of nucleic acid sequence encoding the mature protein. For the correct molecular joining of the transit peptide encoding nucleic acid and the nucleic acid encoding the protein to be targeted it is sometimes necessary to introduce additional base pairs at the joining position, which forms restriction enzyme recognition sequences useful for the molecular joining of the different nucleic acid molecules. This procedure might lead to very few additional amino acids at the N-terminal of the mature imported protein, which usually and preferably do not interfere with the protein function. In any case, the additional base pairs at the joining position which forms restriction enzyme recognition sequences have to be chosen with care, in order to avoid the formation of stop codons or codons which encode amino acids with a strong influence on protein folding, like e.g. proline. It is preferred that such additional codons encode small n.d. structural flexible amino acids such as glycine or alanine.

[2900] As mentioned above the nucleic acid sequences coding for the proteins as shown in table II, application no. 11, column 3 and its homologs as disclosed in table I, application no. 11, columns 5 and 7 are joined to a nucleic acid sequence encoding a transit peptide, This nucleic acid sequence encoding a transit peptide ensures transport of the protein to the plastid. The nucleic acid sequence of the gene to be expressed and the nucleic acid sequence encoding the transit peptide are operably linked. Therefore the transit peptide is fused in frame to the nucleic acid sequence coding for proteins as shown in table II, application no. 11, column 3 and its homologs as disclosed in table I, application no. 11, columns 5 and 7.

[2901] for the disclosure of the paragraphs [0027.0.0.10] to [0029.0.0.10] see paragraphs [0027.0.0.0] and [0029.0.0.0] above.

[2902] Alternatively, nucleic acid sequences coding for the transit peptides may be chemically synthesized either in part or wholly according to structure of transit peptide sequences disclosed in the prior art. Said natural or chemically synthesized sequences can be directly linked to the sequences encoding the mature protein or via a linker nucleic acid sequence, which may be typically less than 500 base pairs, preferably less than 450, 400, 350, 300, 250 or 200 base pairs, more preferably less than 150, 100, 90, 80, 70, 60, 50, 40 or 30 base pairs and most preferably less than 25, 20, 15, 12, 9, 6 or 3 base pairs in length and are in frame to the coding sequence. Furthermore favorable nucleic acid sequences encoding transit peptides may comprise sequences derived from more than one biological and/or chemical source and may include a nucleic acid sequence derived from the amino-terminal region of the mature protein, which in its native state is linked to the transit peptide. In a preferred embodiment of the invention said amino-terminal region of the mature protein is typically less than 150 amino acids, preferably less than 140, 130, 120, 110, 100 or 90 amino acids, more preferably less than 80, 70, 60, 50, 40, 35, 30, 25 or 20 amino acids and most preferably less than 19, 18, 17, 16, 15, 14, 13, 12, 11 or 10 amino acids in length. But even shorter or longer stretches are also possible. In addition target sequences, which facilitate the transport of proteins to other cell compartments such as the vacuole, endoplasmic reticulum, Golgi complex, glyoxysomes, peroxisomes or mitochondria may be also part of the inventive nucleic acid sequence. The proteins translated from said inventive nucleic acid sequences are a kind of fusion proteins that means the nucleic acid sequences encoding the transit peptide for example the ones shown in table V, preferably the last one of the table are joint to the nucleic acid sequences shown in table I, application no. 11, columns 5 and 7. The person skilled in the art is able to join said sequences in a functional manner. Advantageously the transit peptide part is cleaved off from the protein part shown in table II, application no. 11, columns 5 and 7 during the transport preferably into the plastids. All products of the cleavage of the preferred transit peptide shown in the last line of table V have preferably the N-terminal amino acid sequences QIA CSS or QIA EFQLTT in front of the start methionine of the protein mentioned in table II, application no. 11, columns 5 and 7. Other short amino acid sequences of an range of 1 to 20 amino acids preferable 2 to 15 amino acids, more preferable 3 to 10 amino acids most preferably 4 to 8 amino acids are also possible in front of the start methionine of the protein mentioned in table II, application no. 11, columns 5 and 7. In case of the amino acid sequence QIA CSS the three amino acids in front of the start methionine are stemming from the LIC (=ligatation independent cloning) cassette. Said short amino acid sequence is preferred in the case of the expression of E. coli genes. In case of the amino acid sequence QIA EFQLTT the six amino acids in front of the start methionine are stemming from the LIC cassette. Said short amino acid sequence is preferred in the case of the expression of S. cerevisiae genes. The skilled worker knows that other short sequences are also useful in the expression of the genes mentioned in table I, application no. 11, columns 5 and 7. Furthermore the skilled worker is aware of the fact that there is not a need for such short sequences in the expression of the genes.

[2903] Table V: Examples of transit peptides disclosed by von Heijne et al. for the disclosure of Table V see paragraph [0030.2.0.0] above.

[2904] Alternatively to the targeting of the sequences shown in table II, application no. 11, columns 5 and 7 preferably of sequences in general encoded in the nucleus with the aid of the targeting sequences mentioned for example in table V alone or in combination with other targeting sequences preferably into the plastids, the nucleic acids of the invention can directly introduced into the plastidal genome. Therefore in a preferred embodiment the nucleic acid sequences shown in table I, application no. 11, columns 5 and 7 are directly introduced and expressed in plastids.

The term “introduced” in the context of this specification shall mean the insertion of a nucleic acid sequence into the organism by means of a “transfection”, “transduction” or preferably by “transformation”.
A plastid, such as a chloroplast, has been “transformed” by an exogenous (preferably foreign) nucleic acid sequence if nucleic acid sequence has been introduced into the plastid that means that this sequence has crossed the membrane or the membranes of the plastid. The foreign DNA may be integrated (covalently linked) into plastid DNA making up the genome of the plastid, or it may remain unintegrated (e.g., by including a chloroplast origin of replication). “Stably” integrated DNA sequences are those, which are inherited through plastid replication, thereby transferring new plastids, with the features of the integrated DNA sequence to the progeny.

[2905] for the disclosure of the paragraphs [0030.2.0.10] and [0030.3.0.10] see paragraphs [0030.2.0.0] and [0030.3.0.0] above.

[2906] For the inventive process it is of great advantage that by transforming the plastids the intraspecies specific transgene flow is blocked, because a lot of species such as corn, cotton and rice have a strict maternal inheritance of plastids. By placing the genes specified in table I, application no. 11, columns 5 and 7 or active fragments thereof in the plastids of plants, these genes will not be present in the pollen of said plants.

A further preferred embodiment of the invention relates to the use of so called “chloroplast localization sequences”, in which a first RNA sequence or molecule is capable of transporting or “chaperoning” a second RNA sequence, such as a RNA sequence transcribed from the sequences depicted in table I, application no. 11, columns 5 and 7 or a sequence encoding a protein, as depicted in table II, application no. 11, columns 5 and 7, from an external environment inside a cell or outside a plastid into a chloroplast. In one embodiment the chloroplast localization signal is substantially similar or complementary to a complete or intact viroid sequence. The chloroplast localization signal may be encoded by a DNA sequence, which is transcribed into the chloroplast localization RNA. The term “viroid” refers to a naturally occurring single stranded RNA molecule (Flores, C R Acad Sci III. 2001 October; 324(10): 943-52). Viroids usually contain about 200-500 nucleotides and generally exist as circular molecules. Examples of viroids that contain chloroplast localization signals include but are not limited to ASBVd, PLMVd, CChMVd and ELVd. The viroid sequence or a functional part of it can be fused to the sequences depicted in table I, application no. 11, columns 5 and 7 or a sequence encoding a protein, as depicted in table II, application no. 11, columns 5 and 7 in such a manner that the viroid sequence transports a sequence transcribed from a sequence as depicted in table I, application no. 11, columns 5 and 7 or a sequence encoding a protein as depicted in table II, application no. 11, columns 5 and 7 into the chloroplasts. A preferred embodiment uses a modified ASBVd (Navarro et al., Virology. 2000 Mar. 1; 268(1): 218-25).
In a further specific embodiment the protein to be expressed in the plastids such as the proteins depicted in table II, application no. 11, columns 5 and 7 are encoded by different nucleic acids. Such a method is disclosed in WO 2004/040973, which shall be incorporated by reference. WO 2004/040973 teaches a method, which relates to the translocation of an RNA corresponding to a gene or gene fragment into the chloroplast by means of a chloroplast localization sequence. The genes, which should be expressed in the plant or plants cells, are split into nucleic acid fragments, which are introduced into different compartments in the plant e.g. the nucleus, the plastids and/or mitochondria. Additionally plant cells are described in which the chloroplast contains a ribozyme fused at one end to an RNA encoding a fragment of a protein used in the inventive process such that the ribozyme can trans-splice the translocated fusion RNA to the RNA encoding the gene fragment to form and as the case may be reunite the nucleic acid fragments to an intact mRNA encoding a functional protein for example as disclosed in table II, application no. 11, columns 5 and 7.

[2907] In a preferred embodiment of the invention the nucleic acid sequences as shown in table I, application no. 11, columns 5 and 7 used in the inventive process are transformed into plastids, which are metabolical active. Those plastids should preferably maintain at a high copy number in the plant or plant tissue of interest, most preferably the chloroplasts found in green plant tissues, such as leaves or cotyledons or in seeds.

[2908] For a good expression in the plastids the nucleic acid sequences as shown in table I, application no. 11, columns 5 and 7 are introduced into an expression cassette using a preferably a promoter and terminator, which are active in plastids preferably a chloroplast promoter. Examples of such promoters include the psbA promoter from the gene from spinach or pea, the rbcL promoter, and the atpB promoter from corn.

[2909] for the disclosure of the paragraphs [0031.0.0.10] and [0032.0.0.10] see paragraphs [0031.0.0.0] and [0032.0.0.0] above.

[2910] Advantageously the process for the production of the fine chemical leads to an enhanced production of the fine chemical. The terms “enhanced” or “increase” mean at least a 10%, 20%, 30%, 40% or 50%, preferably at least 60%, 70%, 80%, 90% or 100%, more preferably 150%, 200%, 300%, 400% or 500% higher production of the fine chemical in comparison to the reference as defined below, e.g. that means in comparison to an organism without the aforementioned modification of the activity of a protein as shown in table II, application no. 11, column 3. Preferably the modification of the activity of a protein as shown in table II, application no. 11, column 3 or their combination can be achieved by joining the protein to a transit peptide.

[2911] Surprisingly it was found, that the transgenic expression of the Saccharomyces cerevisiae protein as shown in table II, application no. 11, column 3 in plastids of a plant such as Arabidopsis thaliana for example through the linkage to at least one targeting sequence for example as mentioned in table V conferred an increase in the fine chemical content of the transformed plants.

[2912] for the disclosure of this paragraph see paragraph [0035.0.0.0] above.

[2913] The sequence of b1095 (Accession number NP_{—}415613) from Escherichia coli has been published in Blattner et al., Science 277 (5331), 1453-1474 (1997), and its activity is being defined as “3-oxoacyl-[acyl-carrier-protein] synthase II”. Accordingly, in one embodiment, the process of the present invention comprises the use of a “3-oxoacyl-[acyl-carrier-protein] synthase II” or its homolog, e.g. as shown herein, for the production of the fine chemical, meaning of xanthophylls and/or tryglycerides, lipids, oils and/or fats containing xanthophylls, in particular for increasing the amount of xanthophylls in free or bound form in an organism or a part thereof, as mentioned. In one embodiment, in the process of the present invention the activity of a b1095 protein is increased or generated, e.g. from Escherichia coli or a homolog thereof, preferably linked at least to one transit peptide as mentioned for example in table V.

In another embodiment, in the process of the present invention the activity of a b1095 protein is increased or generated in a subcellular compartment of the organism or organism cell such as in an organelle like a plastid or mitochondria.
The sequence of b2022 (Accession number NP_{—}416526) from Escherichia coli has been published in Blattner et al., Science 277 (5331), 1453-1474 (1997), and its activity is being defined as “bifunctional histidinol-phosphatase/imidazoleglycerol-phosphate dehydratase”. Accordingly, in one embodiment, the process of the present invention comprises the use of a “bifunctional histidinol-phosphatase/imidazoleglycerol-phosphate dehydratase” or its homolog, e.g. as shown herein, for the production of the fine chemical, meaning of xanthophylls and/or tryglycerides, lipids, oils and/or fats containing xanthophylls, in particular for increasing the amount of xanthophylls in free or bound form in an organism or a part thereof, as mentioned. In one embodiment, in the process of the present invention the activity of a b2022 protein is increased or generated, e.g. from Escherichia coli or a homolog thereof, preferably linked at least to one transit peptide as mentioned for example in table V.
In another embodiment, in the process of the present invention the activity of a b2022 protein is increased or generated in a subcellular compartment of the organism or organism cell such as in an organelle like a plastid or mitochondria.
The sequence of b2344 (Accession number PIR:F65007) from Escherichia coli has been published in Blattner et al., Science 277 (5331), 1453-1474 (1997), and its activity is being defined as “outer membrane porin, transport of long-chain fatty acids, sensitivity to phage T2”. Accordingly, in one embodiment, the process of the present invention comprises the use of a “outer membrane porin, transport of long-chain fatty acids, sensitivity to phage T2” or its homolog, e.g. as shown herein, for the production of the fine chemical, meaning of xanthophylls and/or tryglycerides, lipids, oils and/or fats containing xanthophylls, in particular for increasing the amount of xanthophylls in free or bound form in an organism or a part thereof, as mentioned. In one embodiment, in the process of the present invention the activity of a b2344 protein is increased or generated, e.g. from Escherichia coli or a homolog thereof, preferably linked at least to one transit peptide as mentioned for example in table V.
In another embodiment, in the process of the present invention the activity of a b2344 protein is increased or generated in a subcellular compartment of the organism or organism cell such as in an organelle like a plastid or mitochondria.

[2914] In one embodiment, the homolog of the b1095, b2022 and/or b2344 is a homolog having said activity and being derived from bacteria. In one embodiment, the homolog of the b1095, b2022 and/or b2344 is a homolog having said activity and being derived from Proteobacteria. In one embodiment, the homolog of the b1095, b2022 and/or b2344 is a homolog having said activity and being derived from Gammaproteobacteria. In one embodiment, the homolog of the b1095, b2022 and/or b2344 is a homolog having said activity and being derived from Enterobacteriales. In one embodiment, the homolog of the b1095, b2022 and/or b2344 is a homolog having said activity and being derived from Enterobacteriaceae. In one embodiment, the homolog of the b1095, b2022 and/or b2344 is a homolog having said activity and being derived from Escherichia, preferably from Escherichia coli.

[2915] for the disclosure of this paragraph see paragraph [0038.0.0.0] above.

[2916] In accordance with the invention, a protein or polypeptide has the “activity of an protein as shown in table II, application no. 11, column 3” if its de novo activity, or its increased expression directly or indirectly leads to an increased in the fine chemical level in the organism or a part thereof, preferably in a cell of said organism, more preferably in an organelle such as a plastid or mitochondria of said organism and the protein has the above mentioned activities of a protein as shown in table II, application no. 11, column 3, preferably in the event the nucleic acid sequences encoding said proteins is functionally joined to the nucleic acid sequence of a transit peptide. Throughout the specification the activity or preferably the biological activity of such a protein or polypeptide or an nucleic acid molecule or sequence encoding such protein or polypeptide is identical or similar if it still has the biological or enzymatic activity of a protein as shown in table II, application no. 11, column 3, or which has at least 10% of the original enzymatic activity, preferably 20%, particularly preferably 30%, most particularly preferably 40% in comparison to a protein as shown in table II, application no. 11, column 3 of Saccharomyces cerevisiae.

[2917] for the disclosure of the paragraphs [0040.0.0.10] to [0047.0.0.10] see paragraphs [0040.0.0.0] to [0047.0.0.0] above.

[2918] Preferably, the reference, control or wild type differs form the subject of the present invention only in the cellular activity, preferably of the plastidial activity of the polypeptide of the invention, e.g. as result of an increase in the level of the nucleic acid molecule of the present invention or an increase of the specific activity of the polypeptide of the invention, e.g. by or in the expression level or activity of an protein having the activity of a protein as shown in table II, application no. 11, column 3 its biochemical or genetical causes and the increased amount of the fine chemical.

[2919] for the disclosure of the paragraphs [0049.0.0.10] to [0051.0.0.10] see paragraphs [0049.0.0.0] to [0051.0.0.0] above.

[2920] For example, the molecule number or the specific activity of the polypeptide or the nucleic acid molecule may be increased. Larger amounts of the fine chemical can be produced if the polypeptide or the nucleic acid of the invention is expressed de novo in an organism lacking the activity of said protein, preferably the nucleic acid molecules as mentioned in table I, application no. 11, columns 5 and 7 alone or preferably in combination with a transit peptide for example as mentioned in table V or in another embodiment by introducing said nucleic acid molecules into an organelle such as an plastid or mitochondria in the transgenic organism. However, it is also possible to modify the expression of the gene which is naturally present in the organisms, for example by integrating a nucleic acid sequence, encoding a plastidic targeting sequence in front (5 prime) of the coding sequence, leading to a functional preprotein, which is directed for example to the plastids.

[2921] for the disclosure of the paragraphs [0053.0.0.10] to [0058.0.0.10] see paragraphs [0053.0.0.0] to [0058.0.0.0] above.

[2922] In case the activity of the Escherichia coli protein b1095 or its homologs, e.g. a “3-oxoacyl-[acyl-carrier-protein] synthase II” is increased advantageously in an organelle such as a plastid or mitochondria, preferably, in one embodiment an increase of the fine chemical, preferably of xanthophylls, more preferably zeaxanthin between 25% and 37% or more is conferred.

In case the activity of the Escherichia coli protein b2022 or its homologs, e.g. a “bifunctional histidinol-phosphatase/imidazoleglycerol-phosphate dehydratase” is increased advantageously in an organelle such as a plastid or mitochondria, preferably, in one embodiment an increase of the fine chemical, preferably of xanthophylls, more preferably zeaxanthin between 23% and 29% or more is conferred.
In case the activity of the Escherichia coli protein b2344 or its homologs, e.g. a “outer membrane porin, transport of long-chain fatty acids, sensitivity to phage T2” is increased advantageously in an organelle such as a plastid or mitochondria, preferably, in one embodiment an increase of the fine chemical, preferably of xanthophylls, more preferably zeaxanthin between 27% and 90% or more is conferred.

[2923] In case the activity of the Escherichia coli proteins b1095, b2022 and/or b2344 or their homologs, are increased advantageously in an organelle such as a plastid or mitochondria, preferably an increase of the fine chemical xanthophylls, more preferably zeaxanthin is conferred.

[2924] for the disclosure of the paragraphs [0061.0.0.10] and [0062.0.0.10] see paragraphs [0061.0.0.0] and [0062.0.0.0] above.

[2925] A protein having an activity conferring an increase in the amount or level of the fine chemical, preferably upon targeting to the plastids preferably has the structure of the polypeptide described herein, in particular of the polypeptides comprising the consensus sequence shown in table IV, application no. 11, column 7 or of the polypeptide as shown in the amino acid sequences as disclosed in table II, application no. 11, columns 5 and 7 or the functional homologues thereof as described herein, or is encoded by the nucleic acid molecule characterized herein or the nucleic acid molecule according to the invention, for example by the nucleic acid molecule as shown in table I, application no. 11, columns 5 and 7 or its herein described functional homologues and has the herein mentioned activity.

[2926] /

[2927] for the disclosure of the paragraphs [0065.0.0.10] and [0066.0.0.10] see paragraphs [0065.0.0.0] and [0066.0.0.0] above.

[2928] In one embodiment, the process of the present invention comprises one or more of the following steps
[2929] a) stabilizing a protein conferring the increased expression of a protein encoded by the nucleic acid molecule of the invention or of the polypeptide of the invention, e.g. of a polypeptide having the activity of a protein as indicated in table II, application no. 11, columns 5 and 7 or its homologs activity having herein-mentioned xanthophylls, preferably cryptoxanthin and/or zeaxanthin increasing activity; and/or
[2930] b) stabilizing a mRNA conferring the increased expression of a protein encoded by the nucleic acid molecule of the invention, which is in the sense of the invention a fusion of a nucleic acid sequence encoding a transit peptide and of a nucleic acid sequence as shown in table I, application no. 11, columns 5 and 7, e.g. a nucleic acid sequence encoding a polypeptide having the activity of a protein as indicated in table II, application no. 11, columns 5 and 7 or its homologs activity or of a mRNA encoding the polypeptide of the present invention having herein-mentioned xanthophylls, preferably cryptoxanthin and/or zeaxanthin increasing activity; and/or
[2931] c) increasing the specific activity of a protein conferring the increased expression of a protein encoded by the nucleic acid molecule of the invention or of the polypeptide of the present invention having herein-mentioned xanthophylls, preferably cryptoxanthin and/or zeaxanthin increasing activity, e.g. of a polypeptide having the activity of a protein as indicated in table II, application no. 11, columns 5 and 7 or its homologs activity, or decreasing the inhibitory regulation of the polypeptide of the invention; and/or
[2932] d) generating or increasing the expression of an endogenous or artificial transcription factor mediating the expression of a protein conferring the increased expression of a protein encoded by the nucleic acid molecule of the invention or of the polypeptide of the invention having herein-mentioned xanthophylls, preferably cryptoxanthin and/or zeaxanthin increasing activity, e.g. of a polypeptide having the activity of a protein as indicated in table II, application no. 11, columns 5 and 7 or its homologs activity; and/or
[2933] e) stimulating activity of a protein conferring the increased expression of a protein encoded by the nucleic acid molecule of the present invention or a polypeptide of the present invention having herein-mentioned xanthophylls, preferably cryptoxanthin and/or zeaxanthin increasing activity, e.g. of a polypeptide having the activity of a protein as indicated in table II, application no. 11, columns 5 and 7 or its homologs activity, by adding one or more exogenous inducing factors to the organisms or parts thereof; and/or
[2934] f) expressing a transgenic gene encoding a protein conferring the increased expression of a polypeptide encoded by the nucleic acid molecule of the present invention or a polypeptide of the present invention, having herein-mentioned xanthophylls, preferably cryptoxanthin and/or zeaxanthin increasing activity, e.g. of a polypeptide having the activity of a protein as indicated in table II, application no. 11, columns 5 and 7 or its homologs activity, and/or
[2935] g) increasing the copy number of a gene conferring the increased expression of a nucleic acid molecule encoding a polypeptide encoded by the nucleic acid molecule of the invention or the polypeptide of the invention having herein-mentioned xanthophylls, preferably cryptoxanthin and/or zeaxanthin increasing activity, e.g. of a polypeptide having the activity of a protein as indicated in table II, application no. 11, columns 5 and 7 or its homologs activity; and/or
[2936] h) increasing the expression of the endogenous gene encoding the polypeptide of the invention, e.g. a polypeptide having the activity of a protein as indicated in table II, application no. 11, columns 5 and 7 or its homologs activity, by adding positive expression or removing negative expression elements, e.g. homologous recombination can be used to either introduce positive regulatory elements like for plants the 35S enhancer into the promoter or to remove repressor elements form regulatory regions. Further gene conversion methods can be used to disrupt repressor elements or to enhance to activity of positive elements. Positive elements can be randomly introduced in plants by T-DNA or transposon mutagenesis and lines can be identified in which the positive elements have be integrated near to a gene of the invention, the expression of which is thereby enhanced; and/or
[2937] i) modulating growth conditions of an organism in such a manner, that the expression or activity of the gene encoding the protein of the invention or the protein itself is enhanced for example microorganisms or plants can be grown for example under a higher temperature regime leading to an enhanced expression of heat shock proteins, which can lead an enhanced fine chemical production; and/or
[2938] j) selecting of organisms with especially high activity of the proteins of the invention from natural or from mutagenized resources and breeding them into the target organisms, eg the elite crops; and/or
[2939] k) directing a protein encoded by the nucleic acid molecule of the invention or of the polypeptide of the present invention having herein-mentioned xanthophylls, preferably cryptoxanthin and/or zeaxanthin increasing activity, e.g. of polypeptide having the activity of a protein as indicated in table II, application no. 11, columns 5 and 7 or its homologs activity, to the plastids by the addition of a plastidial targeting sequence; and/or
[2940] l) generating the expression of a protein encoded by the nucleic acid molecule of the invention or of the polypeptide of the present invention having herein-mentioned xanthophylls, preferably cryptoxanthin and/or zeaxanthin increasing activity, e.g. of a polypeptide having the activity of a protein as indicated in table II, application no. 11, columns 5 and 7 or its homologs activity in plastids by the stable or transient transformation advantageously stable transformation of organelles preferably plastids with an inventive nucleic acid sequence preferably in form of an expression cassette containing said sequence leading to the plastidial expression of the nucleic acids or polypeptides of the invention; and/or
[2941] m) generating the expression of a protein encoded by the nucleic acid molecule of the invention or of the polypeptide of the present invention having herein-mentioned xanthophylls, preferably cryptoxanthin and/or zeaxanthin increasing activity, e.g. of a polypeptide having the activity of a protein as indicated in table II, application no. 11, columns 5 and 7 or its homologs activity in plastids by integration of a nucleic acid of the invention into the plastidal genome under control of preferable a plastidial promoter.

[2942] Preferably, said mRNA is the nucleic acid molecule of the present invention and/or the protein conferring the increased expression of a protein encoded by the nucleic acid molecule of the present invention alone or link to a transit nucleic acid sequence or transit peptide encoding nucleic acid sequence or the polypeptide having the herein mentioned activity, e.g. conferring the increase of the fine chemical after increasing the expression or activity of the encoded polypeptide preferably in organelles such as plastids or having the activity of a polypeptide having an activity as the protein as shown in table II, application no. 11, column 3 or its homologs. Preferably the increase of the fine chemical takes place in plastids.

[2943] for the disclosure of the paragraphs [0069.0.0.10] to [0079.0.0.10] see paragraphs [0069.0.0.0] to [0079.0.0.0] above.

[2944] The activation of an endogenous polypeptide having above-mentioned activity, e.g. having the activity of a protein as shown in table II, application no. 11, column 3 or of the polypeptide of the invention, e.g. conferring the increase of the fine chemical after increase of expression or activity in the cytsol and/or in an organelle like a plastid, preferentially in the plastid, can also be increased by introducing a synthetic transcription factor, which binds close to the coding region of the gene encoding the protein as shown in table II, application no. 11, column 3 and activates its transcription. A chimeric zinc finger protein can be constructed, which comprises a specific DNA-binding domain and an activation domain as e.g. the VP16 domain of Herpes Simplex virus. The specific binding domain can bind to the regulatory region of the gene encoding the protein as shown in table II, application no. 11, column 3. The expression of the chimeric transcription factor in a organism, in particular in a plant, leads to a specific expression of the protein as shown in table II, application no. 11, column 3, see e.g. in WO01/52620, Oriz, Proc. Natl. Acad. Sci. USA, 2002, Vol. 99, 13290 or Guan, Proc. Natl. Acad. Sci. USA, 2002, Vol. 99, 13296.

[2945] for the disclosure of the paragraphs [0081.0.0.10] to [0084.0.0.10] see paragraphs [0081.0.0.0] to [0084.0.0.0] above.

[2946] Owing to the introduction of a gene or a plurality of genes conferring the expression of the nucleic acid molecule of the invention or the nucleic acid molecule used in the method of the invention or the polypeptide of the invention or the polypeptide used in the method of the invention as described below, for example the nucleic acid construct mentioned below into an organism alone or in combination with other genes, it is possible not only to increase the biosynthetic flux towards the end product, but also to increase, modify or create de novo an advantageous, preferably novel metabolites composition in the organism, e.g. an advantageous xanthophyll composition comprising a higher content of (from a viewpoint of nutritional physiology limited) xanthopylls, like violaxanthin, antheraxanthin, lutein, astaxanthin, canthaxanthin and/or fucoxanthin.

[2947] for the disclosure of this paragraph see paragraph [0086.0.0.0] above.

[2948] By influencing the metabolism thus, it is possible to produce, in the process according to the invention, further advantageous compounds. Examples of such compounds are, in addition to xanthophylls, triglycerides, lipids, oils and/or fats containing xanthophylls compounds such as zeaxanthin, cryptoxanthin, violaxanthin, antheraxanthin, lutein, astaxanthin, canthaxanthin and/or fucoxanthin preferably zeaxanthin and/or cryptoxanthin.

[2949] Accordingly, in one embodiment, the process according to the invention relates to a process, which comprises:
[2950] a) providing a non-human organism, preferably a microorganism, a non-human animal, a plant or animal cell, a plant or animal tissue or a plant, more preferably a microorganism, a plant or a plant tissue;
[2951] b) increasing the activity of a protein as shown in table II, application no. 11, column 3 or of a polypeptide being encoded by the nucleic acid molecule of the present invention and described below, e.g. conferring an increase of the fine chemical in the organism, preferably in the microorganism, the non-human animal, the plant or animal cell, the plant or animal tissue or the plant, more preferably a microorganism, a plant or a plant tissue, in the cytsol or in the plastids, preferentially in the plastids,
[2952] c) growing the organism, preferably the microorganism, the non-human animal, the plant or animal cell, the plant or animal tissue or the plant under conditions which permit the production of the fine chemical in the organism, preferably the microorganism, the plant cell, the plant tissue or the plant; and
[2953] d) if desired, recovering, optionally isolating, the free and/or bound the fine chemical and, optionally further free and/or bound amino acids synthesized by the organism, the microorganism, the non-human animal, the plant or animal cell, the plant or animal tissue or the plant.

[2954] The organism, in particular the microorganism, non-human animal, the plant or animal cell, the plant or animal tissue or the plant is advantageously grown in such a way that it is not only possible to recover, if desired isolate the free or bound the fine chemical or the free and bound the fine chemical but as option it is also possible to produce, recover and, if desired isolate, other free or/and bound xanthophylls, in particular zeaxanthin and/or cryptoxanthin.

[2955] for the disclosure of the paragraphs [0090.0.0.10] to [0097.0.0.10] see paragraphs [0090.0.0.0] to [0097.0.0.0] above.

[2956] With regard to the nucleic acid sequence as depicted a nucleic acid construct which contains a nucleic acid sequence mentioned herein or an organism (=transgenic organism) which is transformed with said nucleic acid sequence or said nucleic acid construct, “transgene” means all those constructs which have been brought about by genetic manipulation methods, preferably in which either
[2957] a) the nucleic acid sequence as shown in table I, application no. 11, columns 5 and 7 or a derivative thereof, or
[2958] b) a genetic regulatory element, for example a promoter, which is functionally linked to the nucleic acid sequence as shown table I, application no. 11, columns 5 and 7 or a derivative thereof, or
[2959] c) (a) and (b)
   is/are not present in its/their natural genetic environment or has/have been modified by means of genetic manipulation methods, it being possible for the modification to be, by way of example, a substitution, addition, deletion, inversion or insertion of one or more nucleotide. “Natural genetic environment” means the natural chromosomal locus in the organism of origin or the presence in a genomic library. In the case of a genomic library, the natural, genetic environment of the nucleic acid sequence is preferably at least partially still preserved. The environment flanks the nucleic acid sequence at least on one side and has a sequence length of at least 50 bp, preferably at least 500 bp, particularly preferably at least 1000 bp, very particularly preferably at least 5000 bp.

[2960] The use of the nucleic acid sequence according to the invention or of the nucleic acid construct according to the invention for the generation of transgenic plants is therefore also subject matter of the invention. As mentioned above the inventive nucleic acid sequence consists advantageously of the nucleic acid sequences as depicted in the sequence protocol and disclosed in table I, application no. 11, columns 5 and 7 joined to a nucleic acid sequence encoding a transit peptide, or a targeting nucleic acid sequence which directs the nucleic acid sequences disclosed in table I, application no. 11, columns 5 and 7 to the organelle preferentially the plastids. Alternatively the inventive nucleic acids sequences consist advantageously of the nucleic acid sequences as depicted in the sequence protocol and disclosed in table I, application no. 11, columns 5 and 7 joined preferably to a nucleic acids sequence mediating the stable integration of nucleic acids into the plastidial genome and optionally sequences mediating the transcription of the sequence in the plastidial compartment. A transient expression is in principal also desirable and possible.

[2961] for the disclosure of this paragraph see paragraph [0100.0.0.0] above.

[2962] In an advantageous embodiment of the invention, the organism takes the form of a plant whose xanthophyll content is modified advantageously owing to the nucleic acid molecule of the present invention expressed. This is important for plant breeders since, for example, the nutritional value of plants for poultry is dependent on the abovementioned xanthophylls and the general amount of xanthophylls as energy source and/or protecting compounds in feed. After the activity of the protein as shown in table II, application no. 11, column 3 has been increased or generated, or after the expression of nucleic acid molecule or polypeptide according to the invention has been generated or increased, the transgenic plant generated thus is grown on or in a nutrient medium or else in the soil and subsequently harvested.

[2963] for the disclosure of the paragraphs [0102.0.0.10] to [0110.0.0.10] see paragraphs [0102.0.0.0] to [0110.0.0.0] above.

[2964] In a preferred embodiment, the fine chemical (xanthophyll) is produced in accordance with the invention and, if desired, is isolated. The production of further xanthophylls such as zeaxanthin, cryptoxanthin, violaxanthin, antheraxanthin, lutein, astaxanthin, canthaxanthin and/or fucoxanthin and mixtures thereof or mixtures of other xanthophylls by the process according to the invention is advantageous. It may be advantageous to increase the pool of free xanthophylls in the transgenic organisms by the process according to the invention in order to isolate high amounts of the pure fine chemical.

[2965] In another preferred embodiment of the invention a combination of the increased expression of the nucleic acid sequence or the protein of the invention together with the transformation of a nucleic acid encoding a protein or polypeptide for example another gene of the xanthophyll biosynthesis, or a compound, which functions as a sink for the desired xanthophyll for example for xanthophylls like zeaxanthin, cryptoxanthin, violaxanthin, antheraxanthin, lutein, astaxanthin, canthaxanthin and/or fucoxanthin, preferably zeaxanthin and/or cryptoxanthin in the organism is useful to increase the production of the respective fine chemical.

[2966] In a preferred embodiment, the respective fine chemical is produced in accordance with the invention and, if desired, is isolated. The production of further carotenoids, e.g. carotenes or xanthophylls, in particular ketocarentoids or hydrocarotenoids, e.g. lutein, lycopene, alpha-carotene, or beta-carotene, or compounds for which the respective fine chemical is a biosynthesis precursor compounds, e.g. astaxanthin, or mixtures thereof or mixtures of other carotenoids, in particular of xanthophylls, by the process according to the invention is advantageous.

[2967] In the case of the fermentation of microorganisms, the abovementioned desired fine chemical may accumulate in the medium and/or the cells. If microorganisms are used in the process according to the invention, the fermentation broth can be processed after the cultivation. Depending on the requirement, all or some of the biomass can be removed from the fermentation broth by separation methods such as, for example, centrifugation, filtration, decanting or a combination of these methods, or else the biomass can be left in the fermentation broth. The fermentation broth can subsequently be reduced, or concentrated, with the aid of known methods such as, for example, rotary evaporator, thin-layer evaporator, falling film evaporator, by reverse osmosis or by nanofiltration. Afterwards advantageously further compounds for formulation can be added such as corn starch or silicates. This concentrated fermentation broth advantageously together with compounds for the formulation can subsequently be processed by lyophilization, spray drying, and spray granulation or by other methods. Preferably the respective fine chemical comprising compositions are isolated from the organisms, such as the microorganisms or plants or the culture medium in or on which the organisms have been grown, or from the organism and the culture medium, in the known manner, for example via extraction, distillation, crystallization, chromatography or a combination of these methods. These purification methods can be used alone or in combination with the aforementioned methods such as the separation and/or concentration methods.

[2968] Transgenic plants which comprise the carotenoids such as said xanthophylls, e.g. cryptoxanthin or zeaxanthin (or astaxanthin as it is synthesized from cryptoxanthin or zeaxanthin) synthesized in the process according to the invention can advantageously be marketed directly without there being any need for the carotenoids synthesized to be isolated. Plants for the process according to the invention are listed as meaning intact plants and all plant parts, plant organs or plant parts such as leaf, stem, seeds, root, tubers, anthers, fibers, root hairs, stalks, embryos, calli, cotelydons, petioles, flowers, harvested material, plant tissue, reproductive tissue and cell cultures which are derived from the actual transgenic plant and/or can be used for bringing about the transgenic plant. In this context, the seed comprises all parts of the seed such as the seed coats, epidermal cells, seed cells, endosperm or embryonic tissue. However, the respective fine chemical produced in the process according to the invention can also be isolated from the organisms, advantageously plants, (in the form of their oils, fats, lipids, as extracts, e.g. ether, alcohol, or other organic solvents or water containing extract and/or free xanthophylls. The respective fine chemical produced by this process can be obtained by harvesting the organisms, either from the medium in which they grow, or from the field. This can be done via pressing or extraction of the plant parts. To increase the efficiency of extraction it is beneficial to clean, to temper and if necessary to hull and to flake the plant material. E.g., oils, fats, and/or lipids comprising xanthophylls can be obtained by what is known as cold beating or cold pressing without applying heat. To allow for greater ease of disruption of the plant parts, specifically the seeds, they can previously be comminuted, steamed or roasted. Seeds, which have been pretreated in this manner can subsequently be pressed or extracted with solvents such as warm hexane. The solvent is subsequently removed. In the case of microorganisms, the latter are, after harvesting, for example extracted directly without further processing steps or else, after disruption, extracted via various methods with which the skilled worker is familiar. Thereafter, the resulting products can be processed further, i.e. degummed and/or refined. In this process, substances such as the plant mucilages and suspended matter can be first removed. What is known as desliming can be affected enzymatically or, for example, chemico-physically by addition of acid such as phosphoric acid.

Because carotenoids in microorganisms are localized intracellular, their recovery essentials comes down to the isolation of the biomass. Well-established approaches for the harvesting of cells include filtration, centrifugation and coagulation/flocculation as described herein. Of the residual hydrocarbon, adsorbed on the cells, has to be removed. Solvent extraction or treatment with surfactants have been suggested for this purpose. However, it can be advantageous to avoid this treatment as it can result in cells devoid of most carotenoids.

[2969] The identity and purity of the compound(s) isolated can be determined by prior-art techniques. They encompass high-performance liquid chromatography (HPLC), gas chromatography (GC), spectroscopic methods, mass spectrometry (MS), staining methods, thin-layer chromatography, NIRS, enzyme assays or microbiological assays. These analytical methods are compiled in: Patek et al. (1994) Appl. Environ. Microbiol. 60:133-140; Malakhova et al. (1996) Biotekhnologiya 11 27-32; and Schmidt et al. (1998) Bioprocess Engineer. 19:67-70. Ulmann's Encyclopedia of Industrial Chemistry (1996) Bd. A27, VCH Weinheim, pp. 89-90, pp. 521-540, pp. 540-547, pp. 559-566, 575-581 and pp. 581-587; Michal, G (1999) Biochemical Pathways: An Atlas of Biochemistry and Molecular Biology, John Wiley and Sons; Fallon, A. et al. (1987) Applications of HPLC in Biochemistry in: Laboratory Techniques in Biochemistry and Molecular Biology, vol. 17.

[2970] Xanthophylls, in particular beta-cryptoxanthin or zeaxanthin can for example be detected advantageously via HPLC, LC or GC separation methods. The unambiguous detection for the presence of xanthophylls, in particular beta-cryptoxanthin or zeaxanthin containing products can be obtained by analyzing recombinant organisms using analytical standard methods: LC, LC-MS, MS or TLC). The material to be analyzed can be disrupted by sonication, grinding in a glass mill, liquid nitrogen and grinding, cooking, or via other applicable methods

[2971] In a preferred embodiment, the present invention relates to a process for the production of the fine chemical comprising or generating in an organism or a part thereof, preferably in a cell compartment such as a plastid or mitochondria, the expression of at least one nucleic acid molecule comprising a nucleic acid molecule selected from the group consisting of:
[2972] a) nucleic acid molecule encoding, preferably at least the mature form, of the polypeptide shown in table II, application no. 11, columns 5 and 7 or a fragment thereof, which confers an increase in the amount of the fine chemical in an organism or a part thereof;
[2973] b) nucleic acid molecule comprising, preferably at least the mature form, of the nucleic acid molecule shown in table I, application no. 11, columns 5 and 7;
[2974] c) nucleic acid molecule whose sequence can be deduced from a polypeptide sequence encoded by a nucleic acid molecule of (a) or (b) as result of the degeneracy of the genetic code and conferring an increase in the amount of the fine chemical in an organism or a part thereof;
[2975] d) nucleic acid molecule encoding a polypeptide which has at least 50% identity with the amino acid sequence of the polypeptide encoded by the nucleic acid molecule of (a) to (c) and conferring an increase in the amount of the fine chemical in an organism or a part thereof;
[2976] e) nucleic acid molecule which hybridizes with a nucleic acid molecule of (a) to (c) under stringent hybridisation conditions and conferring an increase in the amount of the fine chemical in an organism or a part thereof;
[2977] f) nucleic acid molecule encoding a polypeptide, the polypeptide being derived by substituting, deleting and/or adding one or more amino acids of the amino acid sequence of the polypeptide encoded by the nucleic acid molecules (a) to (d), preferably to (a) to (c) and conferring an increase in the amount of the fine chemical in an organism or a part thereof;
[2978] g) nucleic acid molecule encoding a fragment or an epitope of a polypeptide which is encoded by one of the nucleic acid molecules of (a) to (e), preferably to (a) to (c) and conferring an increase in the amount of the fine chemical in an organism or a part thereof;
[2979] h) nucleic acid molecule comprising a nucleic acid molecule which is obtained by amplifying nucleic acid molecules from a cDNA library or a genomic library using the primers shown in table III, application no. 11, column 7 and conferring an increase in the amount of the fine chemical in an organism or a part thereof;
[2980] i) nucleic acid molecule encoding a polypeptide which is isolated, e.g. from an expression library, with the aid of monoclonal antibodies against a polypeptide encoded by one of the nucleic acid molecules of (a) to (h), preferably to (a) to (c), and conferring an increase in the amount of the fine chemical in an organism or a part thereof;
[2981] j) nucleic acid molecule which encodes a polypeptide comprising the consensus sequence shown in table IV, application no. 11, column 7 and conferring an increase in the amount of the fine chemical in an organism or a part thereof;
[2982] k) nucleic acid molecule comprising one or more of the nucleic acid molecule encoding the amino acid sequence of a polypeptide encoding a domain of the polypeptide shown in table II, application no. 11, columns 5 and 7 and conferring an increase in the amount of the fine chemical in an organism or a part thereof; and
[2983] l) nucleic acid molecule which is obtainable by screening a suitable library under stringent conditions with a probe comprising one of the sequences of the nucleic acid molecule of (a) to (k), preferably to (a) to (c), or with a fragment of at least 15 nt, preferably 20 nt, 30 nt, 50 nt, 100 nt, 200 nt or 500 nt of the nucleic acid molecule characterized in (a) to (k), preferably to (a) to (c), and conferring an increase in the amount of the fine chemical in an organism or a part thereof;
   or which comprises a sequence which is complementary thereto.

[2984] In one embodiment, the nucleic acid molecule used in the process of the invention distinguishes over the sequence indicated in table I A, application no. 11, columns 5 and 7 by one or more nucleotides. In one embodiment, the nucleic acid molecule used in the process of the invention does not consist of the sequence indicated in table I A, application no. 11, columns 5 and 7. In one embodiment, the nucleic acid molecule used in the process of the invention is less than 100%, 99.999%, 99.99%, 99.9% or 99% identical to a sequence indicated in table I A, application no. 11, columns 5 and 7. In another embodiment, the nucleic acid molecule does not encode a polypeptide of a sequence indicated in table II A, application no. 11, columns 5 and 7.

[2985] In one embodiment, the nucleic acid molecule used in the process of the invention distinguishes over the sequence indicated in table I B, application no. 11, columns 5 and 7, by one or more nucleotides. In one embodiment, the nucleic acid molecule used in the process of the invention does not consist of the sequence indicated in table I B, application no. 11, columns 5 and 7. In one embodiment, the nucleic acid molecule used in the process of the invention is less than 100%, 99.999%, 99.99%, 99.9% or 99% identical to a sequence indicated in table I B, application no. 11, columns 5 and 7. In another embodiment, the nucleic acid molecule does not encode a polypeptide of a sequence indicated in table II B, application no. 11, columns 5 and 7.

[2986] In one embodiment, the nucleic acid molecule used in the process distinguishes over the sequence shown in table I, application no. 11, columns 5 and 7 by one or more nucleotides or does not consist of the sequence shown in table I, application no. 11, columns 5 and 7. In one embodiment, the nucleic acid molecule of the present invention is less than 100%, 99.999%, 99.99%, 99.9% or 99% identical to the sequence shown in table I, application no. 11, columns 5 and 7. In another embodiment, the nucleic acid molecule does not encode a polypeptide of the sequence shown in. table II, application no. 11, columns 5 and 7.

[2987] for the disclosure of the paragraphs [0118.0.0.10] to [0120.0.0.10] see paragraphs [0118.0.0.0] to [0120.0.0.0] above.

[2988] Nucleic acid molecules with the sequence shown in table I, application no. 11, columns 5 and 7, nucleic acid molecules which are derived from the amino acid sequences shown in table II, application no. 11, columns 5 and 7 or from polypeptides comprising the consensus sequence shown in table IV, application no. 11, column 7, or their derivatives or homologues encoding polypeptides with the enzymatic or biological activity of a protein as shown in table II, application no. 11, column 3 or conferring the fine chemical increase after increasing its expression or activity are advantageously increased in the process according to the invention by expression either in the cytsol or in an organelle such as a plastid or mitochondria or both, preferably in plastids.

[2989] for the disclosure of this paragraph see paragraph [0122.0.0.0] above.

[2990] Nucleic acid molecules, which are advantageous for the process according to the invention and which encode polypeptides with the activity of a protein as shown in table II, application no. 11, column 3 can be determined from generally accessible databases.

[2991] for the disclosure of this paragraph see paragraph [0124.0.0.0] above.

[2992] The nucleic acid molecules used in the process according to the invention take the form of isolated nucleic acid sequences, which encode polypeptides with the activity of the proteins as shown in table II, application no. 11, column 3 and conferring the fine chemical increase by expression either in the cytsol or in an organelle such as a plastid or mitochondria or both, preferably in plastids.

[2993] for the disclosure of the paragraphs [0126.0.0.10] to [0133.0.0.10] see paragraphs [0126.0.0.0] to [0133.0.0.0] above.

[2994] However, it is also possible to use artificial sequences, which differ in one or more bases from the nucleic acid sequences found in organisms, or in one or more amino acid molecules from polypeptide sequences found in organisms, in particular from the polypeptide sequences shown in table II, application no. 11, columns 5 and 7 or the functional homologues thereof as described herein, preferably conferring above-mentioned activity, i.e. conferring the fine chemical increase after increasing its activity, e.g. after increasing the activity of a protein as shown in table II, application no. 11, column 3 by for example expression either in the cytsol or in an organelle such as a plastid or mitochondria or both, preferably in plastids.

[2995] for the disclosure of the paragraphs [0135.0.0.10] to [0140.0.0.10] see paragraphs [0135.0.0.0] to [0140.0.0.0] above.

[2996] Synthetic oligonucleotide primers for the amplification, e.g. as shown in table Ill, application no. 11, column 7, by means of polymerase chain reaction can be generated on the basis of a sequence shown herein, for example the sequence shown in table I, application no. 11, columns 5 and 7 or the sequences derived from table II, application no. 11, columns 5 and 7.

[2997] Moreover, it is possible to identify conserved regions from various organisms by carrying out protein sequence alignments with the polypeptide used in the process of the invention, in particular with sequences of the polypeptide of the invention, from which conserved regions, and in turn, degenerate primers can be derived. Conserved regions are those, which show a very little variation in the amino acid in one particular position of several homologs from different origin. The consensus sequence shown in table IV, application no. 11, column 7 is derived from said alignments.

[2998] Degenerated primers can then be utilized by PCR for the amplification of fragments of novel proteins having above-mentioned activity, e.g. conferring the increase of the fine chemical after increasing the expression or activity or having the activity of a protein as shown in table II, application no. 11, column 3 or further functional homologs of the polypeptide of the invention from other organisms.

[2999] for the disclosure of the paragraphs [0144.0.0.10] to [0151.0.0.10] see paragraphs [0144.0.0.0] to [0151.0.0.0] above.

[3000] Polypeptides having above-mentioned activity, i.e. conferring the fine chemical increase, derived from other organisms, can be encoded by other DNA sequences which hybridize to the sequences shown in table I, application no. 11, columns 5 and 7, preferably of table I B, application no. 11, columns 5 and 7 under relaxed hybridization conditions and which code on expression for peptides having the xanthophyll preferably zeaxanthin and/or cryptoxanthin or lipids, oils and/or fats containing xanthophyll preferably zeaxanthin and/or cryptoxanthin increasing activity.

[3001] for the disclosure of the paragraphs [0153.0.0.10] to [0159.0.0.10] see paragraphs [0153.0.0.0] to [0159.0.0.0] above.

[3002] Further, the nucleic acid molecule of the invention comprises a nucleic acid molecule, which is a complement of one of the nucleotide sequences of above mentioned nucleic acid molecules or a portion thereof. A nucleic acid molecule which is complementary to one of the nucleotide sequences shown in table I, application no. 11, columns 5 and 7, preferably shown in table I B, application no. 11, columns 5 and 7 is one which is sufficiently complementary to one of the nucleotide sequences shown in table I, application no. 11, columns 5 and 7, preferably shown in table I B, application no. 11, columns 5 and 7 such that it can hybridize to one of the nucleotide sequences shown in table I, application no. 11, columns 5 and 7, preferably shown in table I B, application no. 11, columns 5 and 7, thereby forming a stable duplex. Preferably, the hybridisation is performed under stringent hybridization conditions. However, a complement of one of the herein disclosed sequences is preferably a sequence complement thereto according to the base pairing of nucleic acid molecules well known to the skilled person. For example, the bases A and G undergo base pairing with the bases T and U or C, resp. and visa versa. Modifications of the bases can influence the base-pairing partner.

[3003] The nucleic acid molecule of the invention comprises a nucleotide sequence which is at least about 30%, 35%, 40% or 45%, preferably at least about 50%, 55%, 60% or 65%, more preferably at least about 70%, 80%, or 90%, and even more preferably at least about 95%, 97%, 98%, 99% or more homologous to a nucleotide sequence shown in table I, application no. 11, columns 5 and 7, preferably shown in table I B, application no. 11, columns 5 and 7, or a portion thereof and preferably has above mentioned activity, in particular having a fine chemical increasing activity after increasing the activity or an activity of a gene product as shown in table II, application no. 11, column 3 by for example expression either in the cytsol or in an organelle such as a plastid or mitochondria or both, preferably in plastids.

[3004] The nucleic acid molecule of the invention comprises a nucleotide sequence which hybridizes, preferably hybridizes under stringent conditions as defined herein, to one of the nucleotide sequences shown in table I, application no. 11, columns 5 and 7, preferably shown in table I B, application no. 11, columns 5 and 7, or a portion thereof and encodes a protein having above-mentioned activity, e.g. conferring of a xanthophyll preferably zeaxanthin and/or cryptoxanthin, triglycerides, lipids, oils and/or fats containing xanthophyll preferably zeaxanthin and/or cryptoxanthin increase by for example expression either in the cytsol or in an organelle such as a plastid or mitochondria or both, preferably in plastids, and optionally, the activity of a protein as shown in table II, application no. 11, column 3.

[3005] Moreover, the nucleic acid molecule of the invention can comprise only a portion of the coding region of one of the sequences shown in table I, application no. 11, columns 5 and 7, preferably shown in table I B, application no. 11, columns 5 and 7, for example a fragment which can be used as a probe or primer or a fragment encoding a biologically active portion of the polypeptide of the present invention or of a polypeptide used in the process of the present invention, i.e. having above-mentioned activity, e.g. conferring an increase of the fine chemical if its activity is increased by for example expression either in the cytsol or in an organelle such as a plastid or mitochondria or both, preferably in plastids. The nucleotide sequences determined from the cloning of the present protein-according-to-the-invention-encoding gene allows for the generation of probes and primers designed for use in identifying and/or cloning its homologues in other cell types and organisms. The probe/primer typically comprises substantially purified oligonucleotide. The oligonucleotide typically comprises a region of nucleotide sequence that hybridizes under stringent conditions to at least about 12, 15 preferably about 20 or 25, more preferably about 40, 50 or 75 consecutive nucleotides of a sense strand of one of the sequences set forth, e.g., in table I, application no. 11, columns 5 and 7, an anti-sense sequence of one of the sequences, e.g., set forth in table I, application no. 11, columns 5 and 7, preferably shown in table I B, application no. 11, columns 5 and 7, or naturally occurring mutants thereof. Primers based on a nucleotide of invention can be used in PCR reactions to clone homologues of the polypeptide of the invention or of the polypeptide used in the process of the invention, e.g. as the primers described in the examples of the present invention, e.g. as shown in the examples. A PCR with the primers shown in table Ill, application no. 11, column 7 will result in a fragment of the gene product as shown in table II, column 3.

[3006] for the disclosure of this paragraph see paragraph [0164.0.0.0] above.

[3007] The nucleic acid molecule of the invention encodes a polypeptide or portion thereof which includes an amino acid sequence which is sufficiently homologous to the amino acid sequence shown in table II, application no. 11, columns 5 and 7 such that the protein or portion thereof maintains the ability to participate in the fine chemical production, in particular a xanthophyll preferably zeaxanthin and/or cryptoxanthin, triglycerides, lipids, oils and/or fats containing xanthophylls preferably zeaxanthin and/or cryptoxanthin increasing the activity as mentioned above or as described in the examples in plants or microorganisms is comprised.

[3008] As used herein, the language “sufficiently homologous” refers to proteins or portions thereof which have amino acid sequences which include a minimum number of identical or equivalent amino acid residues (e.g., an amino acid residue which has a similar side chain as an amino acid residue in one of the sequences of the polypeptide of the present invention) to an amino acid sequence shown in table II, application no. 11, columns 5 and 7 such that the protein or portion thereof is able to participate in the increase of the fine chemical production. For examples having the activity of a protein as shown in table II, column 3 and as described herein.

[3009] In one embodiment, the nucleic acid molecule of the present invention comprises a nucleic acid that encodes a portion of the protein of the present invention. The protein is at least about 30%, 35%, 40%, 45% or 50%, preferably at least about 55%, 60%, 65% or 70%, and more preferably at least about 75%, 80%, 85%, 90%, 91%, 92%, 93% or 94% and most preferably at least about 95%, 97%, 98%, 99% or more homologous to an entire amino acid sequence of table II, application no. 11, columns 5 and 7 and having above-mentioned activity, e.g. conferring preferably the increase of the fine chemical by for example expression either in the cytsol or in an organelle such as a plastid or mitochondria or both, preferably in plastids.

[3010] for the disclosure of the paragraphs [0168.0.0.10] and [0169.0.0.10] see paragraphs [0168.0.0.0] and [0169.0.0.0] above.

[3011] The invention further relates to nucleic acid molecules that differ from one of the nucleotide sequences shown in table I, application no. 11, columns 5 and 7 (and portions thereof) due to degeneracy of the genetic code and thus encode a polypeptide of the present invention, in particular a polypeptide having above mentioned activity, e.g. conferring an increase in the fine chemical in a organism, e.g. as that polypeptides depicted by the sequence shown in table II, application no. 11, columns 5 and 7 or the functional homologues. Advantageously, the nucleic acid molecule of the invention comprises, or in an other embodiment has, a nucleotide sequence encoding a protein comprising, or in an other embodiment having, an amino acid sequence shown in table II, application no. 11, columns 5 and 7 or the functional homologues. In a still further embodiment, the nucleic acid molecule of the invention encodes a full length protein which is substantially homologous to an amino acid sequence shown in table II, application no. 11, columns 5 and 7 or the functional homologues. However, in a preferred embodiment, the nucleic acid molecule of the present invention does not consist of the sequence shown in table I, application no. 11, columns 5 and 7, preferably as indicated in table I A, application no. 11, columns 5 and 7. Preferably the nucleic acid molecule of the invention is a functional homologue or identical to a nucleic acid molecule indicated in table I B, application no. 11, columns 5 and 7.

[3012] for the disclosure of the paragraphs [0171.0.0.10] to [0173.0.0.10] see paragraphs [0171.0.0.0] to [0173.0.0.0] above.

[3013] Accordingly, in another embodiment, a nucleic acid molecule of the invention is at least 15, 20, 25 or 30 nucleotides in length. Preferably, it hybridizes under stringent conditions to a nucleic acid molecule comprising a nucleotide sequence of the nucleic acid molecule of the present invention or used in the process of the present invention, e.g. comprising the sequence shown in table I, application no. 11, columns 5 and 7. The nucleic acid molecule is preferably at least 20, 30, 50, 100, 250 or more nucleotides in length.

[3014] for the disclosure of this paragraph see paragraph [0175.0.0.0] above.

[3015] Preferably, nucleic acid molecule of the invention that hybridizes under stringent conditions to a sequence shown in table I, application no. 11, columns 5 and 7 corresponds to a naturally-occurring nucleic acid molecule of the invention. As used herein, a “naturally-occurring” nucleic acid molecule refers to an RNA or DNA molecule having a nucleotide sequence that occurs in nature (e.g., encodes a natural protein). Preferably, the nucleic acid molecule encodes a natural protein having abovementioned activity, e.g. conferring the fine chemical increase after increasing the expression or activity thereof or the activity of a protein of the invention or used in the process of the invention by for example expression the nucleic acid sequence of the gene product in the cytsol and/or in an organelle such as a plastid or mitochondria, preferably in plastids.

[3016] for the disclosure of this paragraph see paragraph [0177.0.0.0] above.

[3017] For example, nucleotide substitutions leading to amino acid substitutions at “non-essential” amino acid residues can be made in a sequence of the nucleic acid molecule of the invention or used in the process of the invention, e.g. shown in table I, application no. 11, columns 5 and 7.

[3018] for the disclosure of the paragraphs [0179.0.0.10] and [0180.0.0.10] see paragraphs [0179.0.0.0] and [0180.0.0.0] above.

[3019] Accordingly, the invention relates to nucleic acid molecules encoding a polypeptide having above-mentioned activity, e.g. conferring an increase in the fine chemical in an organisms or parts thereof by for example expression either in the cytsol or in an organelle such as a plastid or mitochondria or both, preferably in plastids that contain changes in amino acid residues that are not essential for said activity. Such polypeptides differ in amino acid sequence from a sequence contained in the sequences shown in table II, application no. 11, columns 5 and 7, preferably shown in table II A, application no. 11, columns 5 and 7 yet retain said activity described herein. The nucleic acid molecule can comprise a nucleotide sequence encoding a polypeptide, wherein the polypeptide comprises an amino acid sequence at least about 50% identical to an amino acid sequence shown in table II, application no. 11, columns 5 and 7, preferably shown in table II A, application no. 11, columns 5 and 7 and is capable of participation in the increase of production of the fine chemical after increasing its activity, e.g. its expression by for example expression either in the cytsol or in an organelle such as a plastid or mitochondria or both, preferably in plastids. Preferably, the protein encoded by the nucleic acid molecule is at least about 60% identical to the seshown in table II, application no. 11, columns 5 and 7, preferably shown in table II A, application no. 11, columns 5 and 7, more preferably at least about 70% identical to one of the sequences shown in table II, application no. 11, columns 5 and 7, preferably shown in table II A, application no. 11, columns 5 and 7, even more preferably at least about 80%, 90%, 95% homologous to the sequence shown in table II, application no. 11, columns 5 and 7, preferably shown in table II A, application no. 11, columns 5 and 7, and most preferably at least about 96%, 97%, 98%, or 99% identical to the sequence shown in table II, application no. 11, columns 5 and 7, preferably shown in table II A, application no. 11, columns 5 and 7.

[3020] for the disclosure of the paragraphs [0182.0.0.10] to [0188.0.0.10] see paragraphs [0182.0.0.0] to [0188.0.0.0] above.

[3021] Functional equivalents derived from one of the polypeptides as shown in table II, application no. 11, columns 5 and 7, preferably shown in table II B, application no. 11, columns 5 and 7 resp., according to the invention by substitution, insertion or deletion have at least 30%, 35%, 40%, 45% or 50%, preferably at least 55%, 60%, 65% or 70% by preference at least 80%, especially preferably at least 85% or 90%, 91%, 92%, 93% or 94%, very especially preferably at least 95%, 97%, 98% or 99% homology with one of the polypeptides as shown in table II, application no. 11, columns 5 and 7, preferably shown in table II B, application no. 11, columns 5 and 7 resp., according to the invention and are distinguished by essentially the same properties as the polypeptide as shown in table II, application no. 11, columns 5 and 7, preferably shown in table II B, application no. 11, columns 5 and 7.

[3022] Functional equivalents derived from the nucleic acid sequence as shown in table I, application no. 11, columns 5 and 7, preferably shown in table I B, application no. 11, columns 5 and 7 resp., according to the invention by substitution, insertion or deletion have at least 30%, 35%, 40%, 45% or 50%, preferably at least 55%, 60%, 65% or 70% by preference at least 80%, especially preferably at least 85% or 90%, 91%, 92%, 93% or 94%, very especially preferably at least 95%, 97%, 98% or 99% homology with one of the polypeptides as shown in table II, application no. 11, columns 5 and 7, preferably shown in table II B, application no. 11, columns 5 and 7 resp., according to the invention and encode polypeptides having essentially the same properties as the polypeptide as shown in table II, application no. 11, columns 5 and 7, preferably shown in table II B, application no. 11, columns 5 and 7.

[3023] for the disclosure of this paragraph see paragraph [0191.0.0.0] above.

[3024] A nucleic acid molecule encoding an homologous to a protein sequence of table II, application no. 11, columns 5 and 7, preferably shown in table II B, application no. 11, columns 5 and 7 resp., can be created by introducing one or more nucleotide substitutions, additions or deletions into a nucleotide sequence of the nucleic acid molecule of the present invention, in particular of table I, application no. 11, columns 5 and 7, preferably shown in table I B, application no. 11, columns 5 and 7 resp., such that one or more amino acid substitutions, additions or deletions are introduced into the encoded protein. Mutations can be introduced into the encoding sequences of table I, application no. 11, columns 5 and 7, preferably shown in table I B, application no. 11, columns 5 and 7 resp., by standard techniques, such as site-directed mutagenesis and PCR-mediated mutagenesis.

[3025] for the disclosure of the paragraphs [0193.0.0.10] to [0196.0.0.10] see paragraphs [0193.0.0.0] to [0196.0.0.0] above.

[3026] Homologues of the nucleic acid sequences used, with the sequence shown in table I, application no. 11, columns 5 and 7, preferably shown in table I B, application no. 11, columns 5 and 7, comprise also allelic variants with at least approximately 30%, 35%, 40% or 45% homology, by preference at least approximately 50%, 60% or 70%, more preferably at least approximately 90%, 91%_{,} 92%, 93%, 94% or 95% and even more preferably at least approximately 96%, 97%, 98%, 99% or more homology with one of the nucleotide sequences shown or the abovementioned derived nucleic acid sequences or their homologues, derivatives or analogues or parts of these. Allelic variants encompass in particular functional variants which can be obtained by deletion, insertion or substitution of nucleotides from the sequences shown, preferably from table I, application no. 11, columns 5 and 7, preferably shown in table I B, application no. 11, columns 5 and 7, or from the derived nucleic acid sequences, the intention being, however, that the enzyme activity or the biological activity of the resulting proteins synthesized is advantageously retained or increased.

[3027] In one embodiment of the present invention, the nucleic acid molecule of the invention or used in the process of the invention comprises the sequences shown in any of the table I, application no. 11, columns 5 and 7, preferably shown in table I B, application no. 11, columns 5 and 7. It is preferred that the nucleic acid molecule comprises as little as possible other nucleotides not shown in any one of table I, application no. 11, columns 5 and 7, preferably shown in table I B, application no. 11, columns 5 and 7. In one embodiment, the nucleic acid molecule comprises less than 500, 400, 300, 200, 100, 90, 80, 70, 60, 50 or 40 further nucleotides. In a further embodiment, the nucleic acid molecule comprises less than 30, 20 or 10 further nucleotides. In one embodiment, the nucleic acid molecule use in the process of the invention is identical to the sequences shown in table I, application no. 11, columns 5 and 7, preferably shown in table I B, application no. 11, columns 5 and 7.

[3028] Also preferred is that the nucleic acid molecule used in the process of the invention encodes a polypeptide comprising the sequence shown in table II, application no. 11, columns 5 and 7, preferably shown in table II B, application no. 11, columns 5 and 7. In one embodiment, the nucleic acid molecule encodes less than 150, 130, 100, 80, 60, 50, 40 or 30 further amino acids. In a further embodiment, the encoded polypeptide comprises less than 20, 15, 10, 9, 8, 7, 6 or 5 further amino acids.

[3029] In one embodiment used in the inventive process, the encoded polypeptide is identical to the sequences shown in table II, application no. 11, columns 5 and 7, preferably shown in table II B, application no. 11, columns 5 and 7.

[3030] In one embodiment, the nucleic acid molecule of the invention or used in the process encodes a polypeptide comprising the sequence shown in table II, application no. 11, columns 5 and 7, preferably shown in table II B, application no. 11, columns 5 and 7 comprises less than 100 further nucleotides. In a further embodiment, said nucleic acid molecule comprises less than 30 further nucleotides. In one embodiment, the nucleic acid molecule used in the process is identical to a coding sequence of the sequences shown in table I, application no. 11, columns 5 and 7, preferably shown in table I B, application no. 11, columns 5 and 7.

[3031] Polypeptides (=proteins), which still have the essential biological or enzymatic activity of the polypeptide of the present invention conferring an increase of the fine chemical i.e. whose activity is essentially not reduced, are polypeptides with at least 10% or 20%, by preference 30% or 40%, especially preferably 50% or 60%, very especially preferably 80% or 90 or more of the wild type biological activity or enzyme activity, advantageously, the activity is essentially not reduced in comparison with the activity of a polypeptide shown in table II, application no. 11, columns 5 and 7 expressed under identical conditions.

[3032] Homologues of table I, application no. 11, columns 5 and 7 or of the derived sequences of table II, application no. 11, columns 5 and 7 also mean truncated sequences, cDNA, single-stranded DNA or RNA of the coding and noncoding DNA sequence. Homologues of said sequences are also understood as meaning derivatives, which comprise noncoding regions such as, for example, UTRs, terminators, enhancers or promoter variants. The promoters upstream of the nucleotide sequences stated can be modified by one or more nucleotide substitution(s), insertion(s) and/or deletion(s) without, however, interfering with the functionality or activity either of the promoters, the open reading frame (=ORF) or with the 3′-regulatory region such as terminators or other 3′ regulatory regions, which are far away from the ORF. It is furthermore possible that the activity of the promoters is increased by modification of their sequence, or that they are replaced completely by more active promoters, even promoters from heterologous organisms. Appropriate promoters are known to the person skilled in the art and are mentioned herein below.

[3033] for the disclosure of the paragraphs [0203.0.0.10] to [0215.0.0.10] see paragraphs [0203.0.0.0] to [0215.0.0.0] above.

[3034] Accordingly, in one embodiment, the invention relates to a nucleic acid molecule, which comprises a nucleic acid molecule selected from the group consisting of:
[3035] a) nucleic acid molecule encoding, preferably at least the mature form, of the polypeptide shown in table II, application no. 11, columns 5 and 7, preferably in table II B, application no. 11, columns 5 and 7; or a fragment thereof conferring an increase in the amount of the fine chemical in an organism or a part thereof
[3036] b) nucleic acid molecule comprising, preferably at least the mature form, of the nucleic acid molecule shown in table I, application no. 11, columns 5 and 7, preferably in table I B, application no. 11, columns 5 and 7 or a fragment thereof conferring an increase in the amount of the fine chemical in an organism or a part thereof;
[3037] c) nucleic acid molecule whose sequence can be deduced from a polypeptide sequence encoded by a nucleic acid molecule of (a) or (b) as result of the degeneracy of the genetic code and conferring an increase in the amount of the fine chemical in an organism or a part thereof;
[3038] d) nucleic acid molecule encoding a polypeptide whose sequence has at least 50% identity with the amino acid sequence of the polypeptide encoded by the nucleic acid molecule of (a) to (c) and conferring an increase in the amount of the fine chemical in an organism or a part thereof;
[3039] e) nucleic acid molecule which hybridizes with a nucleic acid molecule of (a) to (c) under stringent hybridisation conditions and conferring an increase in the amount of the fine chemical in an organism or a part thereof;
[3040] f) nucleic acid molecule encoding a polypeptide, the polypeptide being derived by substituting, deleting and/or adding one or more amino acids of the amino acid sequence of the polypeptide encoded by the nucleic acid molecules (a) to (d), preferably to (a) to (c), and conferring an increase in the amount of the fine chemical in an organism or a part thereof;
[3041] g) nucleic acid molecule encoding a fragment or an epitope of a polypeptide which is encoded by one of the nucleic acid molecules of (a) to (e), preferably to (a) to (c) and conferring an increase in the amount of the fine chemical in an organism or a part thereof;
[3042] h) nucleic acid molecule comprising a nucleic acid molecule which is obtained by amplifying a cDNA library or a genomic library using the primers in table III, application no. 11, column 7 and conferring an increase in the amount of the fine chemical in an organism or a part thereof;
[3043] i) nucleic acid molecule encoding a polypeptide which is isolated, e.g. from a expression library, with the aid of monoclonal antibodies against a polypeptide encoded by one of the nucleic acid molecules of (a) to (g), preferably to (a) to (c) and conferring an increase in the amount of the fine chemical in an organism or a part thereof;
[3044] j) nucleic acid molecule which encodes a polypeptide comprising the consensus sequence shown in table IV, application no. 11, column 7 and conferring an increase in the amount of the fine chemical in an organism or a part thereof;
[3045] k) nucleic acid molecule encoding the amino acid sequence of a polypeptide encoding a domain of the polypeptide shown in table II, application no. 11, columns 5 and 7 and conferring an increase in the amount of the fine chemical in an organism or a part thereof; and
[3046] l) nucleic acid molecule which is obtainable by screening a suitable nucleic acid library under stringent hybridization conditions with a probe comprising one of the sequences of the nucleic acid molecule of (a) to (k) or with a fragment of at least 15 nt, preferably 20 nt, 30 nt, 50 nt, 100 nt, 200 nt or 500 nt of the nucleic acid molecule characterized in (a) to (h) or of the nucleic acid molecule shown in table I, application no. 11, columns 5 and 7 or a nucleic acid molecule encoding, preferably at least the mature form of, the polypeptide shown in table II, application no. 11, columns 5 and 7, and conferring an increase in the amount of the fine chemical in an organism or a part thereof; or which encompasses a sequence which is complementary thereto;
   whereby, preferably, the nucleic acid molecule according to (a) to (l) distinguishes over the sequence depicted in table I A and/or I B, application no. 11, columns 5 and 7 by one or more nucleotides. In one embodiment, the nucleic acid molecule of the invention does not consist of the sequence shown in table I A and/or I B, application no. 11, columns 5 and 7. In another embodiment, the nucleic acid molecule of the present invention is at least 30% identical and less than 100%, 99.999%, 99.99%, 99.9% or 99% identical to the sequence shown in table I A and/or I B, application no. 11, columns 5 and 7. In a further embodiment the nucleic acid molecule does not encode the polypeptide sequence shown in table II A and/or II B, application no. 11, columns 5 and 7. Accordingly, in one embodiment, the nucleic acid molecule of the present invention encodes in one embodiment a polypeptide which differs at least in one or more amino acids from the polypeptide shown in table II A and/or II B, application no. 11, columns 5 and 7 does not encode a protein of the sequence shown in table II A and/or II B, application no. 11, columns 5 and 7. Accordingly, in one embodiment, the protein encoded by a sequence of a nucleic acid according to (a) to (l) does not consist of the sequence shown in table I A and/or I B, application no. 11, columns 5 and 7. In a further embodiment, the protein of the present invention is at least 30% identical to protein sequence depicted in table II A and/or II B, application no. 11, columns 5 and 7 and less than 100%, preferably less than 99.999%, 99.99% or 99.9%, more preferably less than 99%, 985, 97%, 96% or 95% identical to the sequence shown in table II A and/or II B, application no. 11, columns 5 and 7.

[3047] for the disclosure of the paragraphs [0217.0.0.10] to [0226.0.0.10] see paragraphs [0217.0.0.0] to [0226.0.0.0] above.

[3048] In general, vector systems preferably also comprise further cis-regulatory regions such as promoters and terminators and/or selection markers by means of which suitably transformed organisms can be identified. While vir genes and T-DNA sequences are located on the same vector in the case of cointegrated vector systems, binary systems are based on at least two vectors, one of which bears vir genes, but no T-DNA, while a second one bears T-DNA, but no vir gene. Owing to this fact, the last-mentioned vectors are relatively small, easy to manipulate and capable of replication in E. coli and in Agrobacterium. These binary vectors include vectors from the series pBIB-HYG, pPZP, pBecks, pGreen. Those which are preferably used in accordance with the invention are Bin19, pBI101, pBinAR, pGPTV and pCAMBIA. An overview of binary vectors and their use is given by Hellens et al, Trends in Plant Science (2000) 5, 446-451. The vectors are preferably modified in such a manner, that they already contain the nucleic acid coding for the transitpeptide and that the nucleic acids of the invention, preferentially the nucleic acid sequences encoding the polypeptides shown in table II, application no. 11, columns 5 and 7 can be cloned 3″ prime to the transitpeptide encoding sequence, leading to a functional preprotein, which is directed to the plastids and which means that the mature protein fulfills its biological activity.

[3049] for the disclosure of the paragraphs [0228.0.0.10] to [0239.0.0.10] see paragraphs [0228.0.0.0] to [0239.0.0.0] above.

[3050] The abovementioned nucleic acid molecules can be cloned into the nucleic acid constructs or vectors according to the invention in combination together with further genes, or else different genes are introduced by transforming several nucleic acid constructs or vectors (including plasmids) into a host cell, advantageously into a plant cell or a microorganisms.

In addition to the sequence mentioned in Table I, application no. 11, columns 5 and 7 or its derivatives, it is advantageous additionally to express and/or mutate further genes in the organisms. Especially advantageously, additionally at least one further gene of xanthophyll biosynthetic pathway such as for cryptoxanthin or zeaxanthin, e.g. one of the above mentioned genes of this pathway, or e.g. for the synthesis of astaxanthin or for another provitamin A or for another carotenoids is expressed in the organisms such as plants or microorganisms. It is also possible that the regulation of the natural genes has been modified advantageously so that the gene and/or its gene product is no longer subject to the regulatory mechanisms which exist in the organisms. This leads to an increased synthesis of the respective desired fine chemical since, for example, feedback regulations no longer exist to the same extent or not at all. In addition it might be advantageously to combine the sequences shown in Table I, application no. 11, columns 5 and 7 with genes which generally support or enhances to growth or yield of the target organism, for example genes which lead to faster growth rate of microorganisms or genes which produces stress-, pathogen, or herbicide resistant plants.

[3051] In a further embodiment of the process of the invention, therefore, organisms are grown, in which there is simultaneous direct or indirect overexpression of at least one nucleic acid or one of the genes which code for proteins involved in the xanthophyll metabolism, in particular in synthesis of beta-cryptoxanthin, zeaxanthin, astaxanthin or lutein. Indirect overexpression might be brought about by the manipulation of the regulation of the endogenous gene, for example through promoter mutations or the expression of natural or artificial transcriptional regulators.

[3052] Further advantageous nucleic acid sequences which can be expressed in combination with the sequences used in the process and/or the abovementioned biosynthesis genes are the sequences encoding further genes of the carotenoids biosynthetic pathway, such as phytoene synthase (Psy), which is an important control point for the regulation of the flux (Fraser et al., 2002), phytoene desaturase (Pds), z-carotene desaturase, above mentioned enzymes (s. introduction of the application), e.g. hydroxylases such as beta-carotene hydroxylase (U.S. Pat. No. 6,214,575), ketolases, or cyclases such as the beta-cyclase (U.S. Pat. No. 6,232,530) or oxygenases such as the beta-C4-oxygenase described in U.S. Pat. No. 6,218,599 or homologs thereof, astaxanthin synthase (U.S. Pat. No. 6,365,386), or other genes as described in U.S. Pat. No. 6,150,130. These genes can lead to an increased synthesis of the essential carotenoids, in particular xanthophylls.

[3053] In a further advantageous embodiment of the process of the invention, the organisms used in the process are those in which simultaneously a zeaxanthin or cryptoxanthin degrading protein is attenuated, in particular by reducing the rate of expression of the corresponding gene, or by inactivating the gene for example the mutagenesis and/or selection. In another advantageous embodiment the synthesis of competitive pathways which rely on the same precursors are down regulated or interrupted. A person skilled in the art knows for example, that the inhibition of the lutein synthesis from carotene increases the amount of cryptoxanthin and zeaxanthin in an organism, in particular in plants. In one embodiment, the level of astaxanthin in the organism shall be increased. Thus, astaxanthin degrading enzymes are attenuated but not enzymes catalyzing the synthesis of astaxanthin from zeaxanthin or cryptoxanthin.

[3054] The respective fine chemical produced can be isolated from the organism by methods with which the skilled worker are familiar, for example via extraction, salt precipitation, and/or different chromatography methods. The process according to the invention can be conducted batchwise, semibatchwise or continuously. The fine chemical and other xanthophylls produced by this process can be obtained by harvesting the organisms, either from the crop in which they grow, or from the field. This can be done via pressing or extraction of the plant parts.

[3055] Preferrably, the compound is a composition comprising the essentially pure cryptoxanthin or zeaxanthin or a recovered or isolated cryptoxanthin or zeaxathin, in particular, the respective fine chemical, free or in protein- and/or lipid-bound form.

[3056] for the disclosure of the paragraphs [0243.0.0.10] to [0264.0.0.10] see paragraphs [0243.0.0.0] to [0264.0.0.0] above.

[3057] Other preferred sequences for use in operable linkage in gene expression constructs are targeting sequences, which are required for targeting the gene product into specific cell compartments (for a review, see Kermode, Crit. Rev. Plant Sci. 15, 4 (1996) 285-423 and references cited therein), for example into the vacuole, the nucleus, all types of plastids, such as amyloplasts, chloroplasts, chromoplasts, the extracellular space, the mitochondria, the endoplasmic reticulum, elaioplasts, peroxisomes, glycosomes, and other compartments of cells or extracellular preferred are sequences, which are involved in targeting to plastids as mentioned above. Sequences, which must be mentioned in this context are, in particular, the signal-peptide- or transit-peptide-encoding sequences which are known per se. For example, plastid-transit-peptide-encoding sequences enable the targeting of the expression product into the plastids of a plant cell. Targeting sequences are also known for eukaryotic and to a lower extent for prokaryotic organisms and can advantageously be operable linked with the nucleic acid molecule of the present invention as shown in table I, application no. 11, columns 5 and 7 and described herein to achieve an expression in one of said compartments or extracellular.

[3058] for the disclosure of the paragraphs [0266.0.0.10] to [0287.0.0.10] see paragraphs [0266.0.0.0] to [0287.0.0.0] above.

[3059] Accordingly, one embodiment of the invention relates to a vector where the nucleic acid molecule according to the invention is linked operably to regulatory sequences which permit the expression in a prokaryotic or eukaryotic or in a prokaryotic and eukaryotic host. A further preferred embodiment of the invention relates to a vector in which a nucleic acid sequence encoding one of the polypeptides shown in table II, application no. 11, columns 5 and 7 or their homologs is functionally linked to a plastidial targeting sequence. A further preferred embodiment of the invention relates to a vector in which a nucleic acid sequence encoding one of the polypeptides shown in table II, application no. 11, columns 5 and 7 or their homologs is functionally linked to a regulatory sequences which permit the expression in plastids.

[3060] for the disclosure of the paragraphs [0289.0.0.10] to [0296.0.0.10] see paragraphs [0289.0.0.0] to [0296.0.0.0] above.

[3061] Moreover, native polypeptide conferring the increase of the fine chemical in an organism or part thereof can be isolated from cells (e.g., endothelial cells), for example using the antibody of the present invention as described below, in particular, an anti-b1095, anti-2022 and/or anti-b2344 protein antibody or an antibody against polypeptides as shown in table II, application no. 11, columns 5 and 7, which can be produced by standard techniques utilizing the polypeptide of the present invention or fragment thereof, i.e., the polypeptide of this invention. Preferred are monoclonal antibodies.

[3062] for the disclosure of this paragraph see paragraph [0298.0.0.0] above.

[3063] In one embodiment, the present invention relates to a polypeptide having the sequence shown in table II, application no. 11, columns 5 and 7 or as coded by the nucleic acid molecule shown in table I, application no. 11, columns 5 and 7 or functional homologues thereof.

[3064] In one advantageous embodiment, in the method of the present invention the activity of a polypeptide is increased comprising or consisting of the consensus sequence shown in table IV, application no. 11, columns 7 and in one another embodiment, the present invention relates to a polypeptide comprising or consisting of the consensus sequence shown in table IV, application no. 11, column 7 whereby 20 or less, preferably 15 or 10, preferably 9, 8, 7, or 6, more preferred 5 or 4, even more preferred 3, even more preferred 2, even more preferred 1, most preferred 0 of the amino acids positions indicated can be replaced by any amino acid.

[3065] for the disclosure of the paragraphs [0301.0.0.10] to [0304.0.0.10] see paragraphs [0301.0.0.0] to [0304.0.0.0] above.

[3066] In one advantageous embodiment, the method of the present invention comprises the increasing of a polypeptide comprising or consisting of plant or microorganism specific consensus sequences.

In one embodiment, said polypeptide of the invention distinguishes over the sequence shown in table II A and/or II B, application no. 11, columns 5 and 7 by one or more amino acids. In one embodiment, polypeptide distinguishes form the sequence shown in table II A and/or II B, application no. 11, columns 5 and 7 by more than 5, 6, 7, 8 or 9 amino acids, preferably by more than 10, 15, 20, 25 or 30 amino acids, even more preferred are more than 40, 50, or 60 amino acids and, preferably, the sequence of the polypeptide of the invention distinguishes from the sequence shown in table II A and/or II B, application no. 11, columns 5 and 7 by not more than 80% or 70% of the amino acids, preferably not more than 60% or 50%, more preferred not more than 40% or 30%, even more preferred not more than 20% or 10%. In an other embodiment, said polypeptide of the invention does not consist of the sequence shown in table II A and/or II B, application no. 11, columns 5 and 7.

[3067] for the disclosure of this paragraph see paragraph [0306.0.0.0] above.

[3068] In one embodiment, the invention relates to polypeptide conferring an increase in the fine chemical in an organism or part being encoded by the nucleic acid molecule of the invention or used in the process of the invention and having a sequence which distinguishes from the sequence as shown in table II A and/or II B, application no. 11, columns 5 and 7 by one or more amino acids. In another embodiment, said polypeptide of the invention does not consist of the sequence shown in table II A and/or II B, application no. 11, columns 5 and 7. In a further embodiment, said polypeptide of the present invention is less than 100%, 99.999%, 99.99%, 99.9% or 99% identical. In one embodiment, said polypeptide does not consist of the sequence encoded by the nucleic acid molecules shown in table I A and/or I B, application no. 11, columns 5 and 7.

[3069] In one embodiment, the present invention relates to a polypeptide having the activity of the protein as shown in table II A and/or II B, application no. 11, column 3, which distinguishes over the sequence depicted in table II A and/or II B, application no. 11, columns 5 and 7 by one or more amino acids, preferably by more than 5, 6, 7, 8 or 9 amino acids, preferably by more than 10, 15, 20, 25 or 30 amino acids, even more preferred are more than 40, 50, or 60 amino acids but even more preferred by less than 70% of the amino acids, more preferred by less than 50%, even more preferred my less than 30% or 25%, more preferred are 20% or 15%, even more preferred are less than 10%. In a further preferred embodiment the polypeptide of the invention takes the form of a preprotein consisting of a plastidial transitpeptide joint to a polypeptide having the activity of the protein as shown in table II A and/or II B, column 3, from which the transitpeptide is preferably cleaved off upon transport of the preprotein into the organelle for example into the plastid or mitochondria.

[3070] for the disclosure of the paragraphs [0309.0.0.10] to [0311.0.0.10] see paragraphs [0309.0.0.0] to [0311.0.0.0] above.

[3071] A polypeptide of the invention can participate in the process of the present invention. The polypeptide or a portion thereof comprises preferably an amino acid sequence, which is sufficiently homologous to an amino acid sequence shown in table II, application no. 11, columns 5 and 7.

[3072] Further, the polypeptide can have an amino acid sequence which is encoded by a nucleotide sequence which hybridizes, preferably hybridizes under stringent conditions as described above, to a nucleotide sequence of the nucleic acid molecule of the present invention. Accordingly, the polypeptide has an amino acid sequence which is encoded by a nucleotide sequence that is at least about 35%, 40%, 45%, 50%, 55%, 60%, 65% or 70%, preferably at least about 75%, 80%, 85% or 90, and more preferably at least about 91%, 92%, 93%, 94% or 95%, and even more preferably at least about 96%, 97%, 98%, 99% or more homologous to one of the amino acid sequences as shown in table II A and/or II B, application no. 11, columns 5 and 7. The preferred polypeptide of the present invention preferably possesses at least one of the activities according to the invention and described herein. A preferred polypeptide of the present invention includes an amino acid sequence encoded by a nucleotide sequence which hybridizes, preferably hybridizes under stringent conditions, to a nucleotide sequence of table I A and/or I B, application no. 11, columns 5 and 7 or which is homologous thereto, as defined above.

[3073] Accordingly the polypeptide of the present invention can vary from the sequences shown in table II A and/or II B, application no. 11, columns 5 and 7 in amino acid sequence due to natural variation or mutagenesis, as described in detail herein. Accordingly, the polypeptide comprise an amino acid sequence which is at least about 35%, 40%, 45%, 50%, 55%, 60%, 65% or 70%, preferably at least about 75%, 80%, 85% or 90, and more preferably at least about 91%, 92%, 93%, 94% or 95%, and most preferably at least about 96%, 97%, 98%, 99% or more homologous to an entire amino acid sequence shown in table II A and/or II B, application no. 11, columns 5 and 7.

[3074] for the disclosure of this paragraph see paragraph [0315.0.0.0] above.

[3075] Biologically active portions of an polypeptide of the present invention include peptides comprising amino acid sequences derived from the amino acid sequence of the polypeptide of the present invention or used in the process of the present invention, e.g., the amino acid sequence shown in table II, application no. 11, columns 5 and 7 or the amino acid sequence of a protein homologous thereto, which include fewer amino acids than a full length polypeptide of the present invention or used in the process of the present invention or the full length protein which is homologous to an polypeptide of the present invention or used in the process of the present invention depicted herein, and exhibit at least one activity of polypeptide of the present invention or used in the process of the present invention.

[3076] for the disclosure of this paragraph see paragraph [0317.0.0.0] above.

[3077] Manipulation of the nucleic acid molecule of the invention may result in the production of a protein having differences from the wild-type protein as shown in table II, application no. 11, column 3. Differences shall mean at least one amino acid different from the sequences as shown in table II, application no. 11, column 3, preferably at least 2, 3, 4, 5, 6, 7, 8, 9 or 10 amino acids, more preferably at least 15, 20, 25, 30, 35, 40, 45 or 50 amino acids different from the sequences as shown in table II, application no. 11, column 3. These proteins may be improved in efficiency or activity, may be present in greater numbers in the cell than is usual, or may be decreased in efficiency or activity in relation to the wild type protein.

[3078] Any mutagenesis strategies for the polypeptide of the present invention or the polypeptide used in the process of the present invention to result in increasing said activity are not meant to be limiting; variations on these strategies will be readily apparent to one skilled in the art. Using such strategies, and incorporating the mechanisms disclosed herein, the nucleic acid molecule and polypeptide of the invention may be utilized to generate plants or parts thereof, expressing wildtype proteins or mutated proteins of the proteins as shown in table II, application no. 11, column 3. The nucleic acid molecules and polypeptide molecules of the invention are expressed such that the yield, production, and/or efficiency of production of a desired compound is improved.

[3079] for the disclosure of the paragraphs [0320.0.0.10] to [0322.0.0.10] see paragraphs [0320.0.0.0] to [0322.0.0.0] above.

[3080] In one embodiment, a protein (=polypeptide) as shown in table II, application no. 11, column 3 refers to a polypeptide having an amino acid sequence corresponding to the polypeptide of the invention or used in the process of the invention, whereas a “non-inventive protein or polypeptide” or “other polypeptide” refers to a polypeptide having an amino acid sequence corresponding to a protein which is not substantially homologous to a polypeptide of the invention, preferably which is not substantially homologous to a polypeptide or protein as shown in table II, application no. 11, column 3, e.g., a protein which does not confer the activity described herein and which is derived from the same or a different organism.

[3081] for the disclosure of the paragraphs [0324.0.0.10] to [0329.0.0.10] see paragraphs [0324.0.0.0] to [0329.0.0.0] above.

[3082] In an especially preferred embodiment, the polypeptide according to the invention furthermore also does not have the sequences of those proteins, which are encoded by the sequences shown in table II, application no. 11, columns 5 and 7.

[3083] for the disclosure of the paragraphs [0331.0.0.10] to [0346.0.0.10] see paragraphs [0331.0.0.0] to [0346.0.0.0] above.

[3084] Accordingly the present invention relates to any cell transgenic for any nucleic acid characterized as part of the invention, e.g. conferring the increase of the fine chemical in a cell or an organism or a part thereof, e.g. the nucleic acid molecule of the invention, the nucleic acid construct of the invention, the antisense molecule of the invention, the vector of the invention or a nucleic acid molecule encoding the polypeptide of the invention, e.g. encoding a polypeptide having an activity as the protein as shown in table II, application no. 11, column 3. Due to the above mentioned activity the fine chemical content in a cell or an organism is increased. For example, due to modulation or manipulation, the cellular activity is increased preferably in organelles such as plastids or mitochondria, e.g. due to an increased expression or specific activity or specific targeting of the subject matters of the invention in a cell or an organism or a part thereof especially in organelles such as plastids or mitochondria. Transgenic for a polypeptide having a protein or activity means herein that due to modulation or manipulation of the genome, the activity of protein as shown in table II, application no. 11, column 3 or a protein as shown in table II, application no. 11, column 3-like activity is increased in the cell or organism or part thereof especially in organelles such as plastids or mitochondria. Examples are described above in context with the process of the invention.

[3085] for the disclosure of this paragraph see paragraph [0348.0.0.0] above.

[3086] A naturally occurring expression cassette—for example the naturally occurring combination of the promoter of the gene encoding a protein as shown in table II, application no. 11, column 3 with the corresponding encoding gene—becomes a transgenic expression cassette when it is modified by non-natural, synthetic “artificial” methods such as, for example, mutagenization. Such methods have been described (U.S. Pat. No. 5,565,350; WO 00/15815; also see above).

[3087] for the disclosure of the paragraphs [0350.0.0.10] to [0358.0.0.10] see paragraphs [0350.0.0.0] to [0358.0.0.0] above.

[3088] Transgenic plants comprising the xanthophylls preferably zeaxanthin and/or cryptoxanthin synthesized in the process according to the invention can be marketed directly without isolation of the compounds synthesized. In the process according to the invention, plants are understood as meaning all plant parts, plant organs such as leaf, stalk, root, tubers or seeds or propagation material or harvested material or the intact plant. In this context, the seed encompasses all parts of the seed such as the seed coats, epidermal cells, seed cells, endosperm or embryonic tissue. The xanthophylls preferably zeaxanthin and/or cryptoxanthin produced in the process according to the invention may, however, also be isolated from the plant in the form of their free xanthophylls preferably zeaxanthin and/or cryptoxanthin, lipids, oils and/or fats containing said produced xanthophylls preferably zeaxanthin and/or cryptoxanthin or xanthophylls preferably zeaxanthin and/or cryptoxanthin bound to proteins. Xanthophylls preferably zeaxanthin and/or cryptoxanthin produced by this process can be isolated by harvesting the plants either from the culture in which they grow or from the field. This can be done for example via expressing, grinding and/or extraction of the plant parts, preferably the plant leaves, plant fruits, flowers and the like.

The invention furthermore relates to the use of the transgenic plants according to the invention and of the cells, cell cultures, parts—such as, for example, roots, leaves, flowers and the like as mentioned above in the case of transgenic plant organisms—derived from them, and to transgenic propagation material such as seeds or fruits and the like as mentioned above, for the production of foodstuffs or feeding stuffs, pharmaceuticals or fine chemicals.

[3089] for the disclosure of the paragraphs [0360.0.0.10] to [0362.0.0.10] see paragraphs [0360.0.0.0] to [0362.0.0.0] above.

[3090] In this manner, more than 50% by weight, advantageously more than 60% by weight, preferably more than 70% by weight, especially preferably more than 80% by weight, very especially preferably more than 90% by weight, of the fatty acids produced in the process can be isolated. The resulting xanthophylls can, if appropriate, subsequently be further purified, if desired mixed with other active ingredients such as other xanthophylls, fatty acids, vitamins, amino acids, carbohydrates, antibiotics and the like, and, if appropriate, formulated.

[3091] In one embodiment, the xanthophyll is the fine chemical.

[3092] The xanthophylls, in particular the respective fine chemicals obtained in the process are suitable as starting material for the synthesis of further products of value. For example, they can be used in combination with each other or alone for the production of pharmaceuticals, health products, foodstuffs, animal feeds, nutrients or cosmetics. Accordingly, the present invention relates a method for the production of pharmaceuticals, health products, food stuff, animal feeds, nutrients or cosmetics comprising the steps of the process according to the invention, including the isolation of the carotenoids containing, in particular xanthophylls containing composition produced or the respective fine chemical produced if desired and formulating the product with a pharmaceutical acceptable carrier or formulating the product in a form acceptable for an application in agriculture. A further embodiment according to the invention is the use of the carentoids or xanthophylls produced in the process or of the transgenic organisms in animal feeds, foodstuffs, medicines, food supplements, cosmetics or pharmaceuticals or for the production of astaxanthin, e.g. in after isolation of the respective fine chemical or without, e.g. in situ, e.g in the organism used for the process for the production of the respective fine chemical.

[3093] for the disclosure of the paragraphs [0366.0.0.10] to [0369.0.0.10] see paragraphs [0366.0.0.0] to [0369.0.0.0] above.

[3094] The fermentation broths obtained in this way, containing in particular zeaxanthin and/or beta-cryptoxanthin alone or in mixtures with other carotenoids, in particular with other xanthophylls, e.g. with astaxanthin, or containing microorganisms or parts of microorganisms, like plastids, containing zeaxanthin and/or beta-cryptoxanthin alone or in mixtures with other carotenoids, in particular with other xanthophylls, e.g. with astaxanthin, normally have a dry matter content of from 1 to 70% by weight, preferably 7.5 to 25% by weight. Sugar-limited fermentation is additionally advantageous, e.g. at the end, for example over at least 30% of the fermentation time. This means that the concentration of utilizable sugar in the fermentation medium is kept at, or reduced to, 0 to 10 g/l, preferably to 0 to 3 g/l during this time. The fermentation broth is then processed further. Depending on requirements, the biomass can be removed or isolated entirely or partly by separation methods, such as, for example, centrifugation, filtration, decantation, coagulation/flocculation or a combination of these methods, from the fermentation broth or left completely in it.

The fermentation broth can then be thickened or concentrated by known methods, such as, for example, with the aid of a rotary evaporator, thin-film evaporator, falling film evaporator, by reverse osmosis or by nanofiltration. This concentrated fermentation broth can then be worked up by freeze-drying, spray drying, spray granulation or by other processes.
As carotenoids are often localized in membranes or plastids, in one embodiment it is advantageous to avoid a leaching of the cells when the biomass is isolated entirely or partly by separation methods, such as, for example, centrifugation, filtration, decantation, coagulation/flocculation or a combination of these methods, from the fermentation broth. The dry biomass can directly be added to animal feed, provided the carotenoids concentration is sufficiently high and no toxic compounds are present. In view of the instability of carentoids, conditions for drying, e.g. spray or flash-drying, can be mild and can be avoiding oxidation and cis/trans isomerization. For example antioxidants, e.g. BHT, ethoxyquin or other, can be added. In case the carotenoids concentration in the biomass is to dilute, solvent extraction can be used for their isolation, e.g. with alcohols, ether or other organic solvents, e.g. with methanol, ethanol, aceton, alcoholic potassium hydroxide, glycerol-phenol, liquefied phenol or for example with acids or bases, like trichloroacetatic acid or potassium hydroxide. A wide range of advantageous methods and techniques for the isolation of carotenoids, in particular of xanthophylls, in particular of zeaxanthin or cryptoxanthin can be found in the state of the art. In case phenol is used it can for example be removed with ether and water extraction and the dry eluate comprises a mixture of the carotenoids of the biomass.

[3095] Accordingly, it is possible to purify the carotenoids, in particular the xanthophylls produced according to the invention further. For this purpose, the product-containing composition, e.g. a total or partial lipid extraction fraction using organic solvents, e.g. as described above, is subjected for example to a saponification to remove triglycerides, partition between e.g. hexane/methanol (separation of non-polar epiphase from more polar hypophasic derivates) and separation via e.g. an open column chromatography or HPLC in which case the desired product or the impurities are retained wholly or partly on the chromatography resin. These chromatography steps can be repeated if necessary, using the same or different chromatography resins. The skilled worker is familiar with the choice of suitable chromatography resins and their most effective use. for the disclosure of the paragraphs [0372.0.0.10] to [0376.0.0.10], [0376.1.0.10] and [0377.0.0.10] see paragraphs [0372.0.0.0] to [0376.0.0.0], [0376.1.0.0] and [0377.0.0.0] above.

[3096] In one embodiment, the present invention relates to a method for the identification of a gene product conferring an increase in the fine chemical production in a cell, comprising the following steps:
[3097] (a) contacting e.g. hybridising, the nucleic acid molecules of a sample, e.g. cells, tissues, plants or microorganisms or a nucleic acid library, which can contain a candidate gene encoding a gene product conferring an increase in the fine chemical after expression, with the nucleic acid molecule of the present invention;
[3098] (b) identifying the nucleic acid molecules, which hybridize under relaxed stringent conditions with the nucleic acid molecule of the present invention in particular to the nucleic acid molecule sequence shown in table I, application no. 11, columns 5 and 7, preferably in table I B, application no. 11, columns 5 and 7, and, optionally, isolating the full length cDNA clone or complete genomic clone;
[3099] (c) introducing the candidate nucleic acid molecules in host cells, preferably in a plant cell or a microorganism, appropriate for producing the fine chemical;
[3100] (d) expressing the identified nucleic acid molecules in the host cells;
[3101] (e) assaying the fine chemical level in the host cells; and
[3102] (f) identifying the nucleic acid molecule and its gene product which expression confers an increase in the fine chemical level in the host cell after expression compared to the wild type.

[3103] for the disclosure of the paragraphs [0379.0.0.10] to [0383.0.0.10] see paragraphs [0379.0.0.0] to [0383.0.0.0] above.

[3104] The screen for a gene product or an agonist conferring an increase in the fine chemical production can be performed by growth of an organism for example a microorganism in the presence of growth reducing amounts of an inhibitor of the synthesis of the fine chemical. Better growth, eg higher dividing rate or high dry mass in comparison to the control under such conditions would identify a gene or gene product or an agonist conferring an increase in fine chemical production.

One can think to screen for increased fine chemical production by for example resistance to drugs blocking fine chemical synthesis and looking whether this effect is dependent on the proteins as shown in table II, application no. 11, column 3, eg comparing near identical organisms with low and high activity of the proteins as shown in table II, application no. 11, column 3.

[3105] for the disclosure of the paragraphs [0385.0.0.10] to [0404.0.0.10] see paragraphs [0385.0.0.0] to [0404.0.0.0] above.

[3106] Accordingly, the nucleic acid of the invention, or the nucleic acid molecule identified with the method of the present invention or the complement sequences thereof, the polypeptide of the invention, the nucleic acid construct of the invention, the organisms, the host cell, the microorganisms, the plant, plant tissue, plant cell, or the part thereof the invention, the vector of the invention, the agonist identified with the method of the invention, the nucleic acid molecule identified with the method of the present invention, can be used for the production of the fine chemical or of the fine chemical and one or more other carotenoids, in particular the xanthophylls such as astaxanthin or lutein.

Accordingly, the nucleic acid of the invention, or the nucleic acid molecule identified with the method of the present invention or the complement sequences thereof, the polypeptide of the invention, the nucleic acid construct of the invention, the organisms, the host cell, the microorganisms, the plant, plant tissue, plant cell, or the part thereof of the invention, the vector of the invention, the agonist identified with the method of the invention, the antibody of the present invention, can be used for the reduction of the fine chemical in an organism or part thereof, e.g. in a cell.

[3107] for the disclosure of the paragraphs [0406.0.0.10] to [0435.0.0.10] see paragraphs [0406.0.0.0] to [0435.0.0.0] above.

[3108] Production of xanthophyll, triglycerides, lipids, oils and/or fats containing xanthophylls in Chlamydomonas reinhardtii

The xanthophyll production can be analysed as mentioned herein.
The proteins and nucleic acids can be analysed as mentioned below.

[3109] for the disclosure of the paragraphs [0437.0.0.10] and [0438.0.0.10] see paragraphs [0437.0.0.0] and [0438.0.0.0] above.

### Example 9

### Analysis of the Effect of the Nucleic Acid Molecule on the Production of Xanthophylls

[3110] The effect of the genetic modification of plants or algae on the production of a desired compound (such as xantopyhlls preferably zeaxanthin and/or cryptoxanthin) can be determined by growing the modified plant under suitable conditions (such as those described above) and analyzing the medium and/or the cellular components for the elevated production of desired product (i.e. of the xanthophylls). These analytical techniques are known to the skilled worker and comprise spectroscopy, thin-layer chromatography, various types of staining methods, enzymatic and microbiological methods and analytical chromatography such as high-performance liquid chromatography (see, for example, Ullman, Encyclopedia of Industrial Chemistry, Vol. A2, p. 89-90 and p. 443-613, VCH: Weinheim (1985); Fallon, A., et al., (1987) “Applications of HPLC in Biochemistry” in: Laboratory Techniques in Biochemistry and Molecular Biology, Vol. 17; Rehm et al. (1993) Biotechnology, Vol. 3, Chapter III: “Product recovery and purification”, p. 469-714, VCH: Weinheim; Belter, P. A., et al. (1988) Bioseparations: downstream processing for Biotechnology, John Wiley and Sons; Kennedy, J. F., and Cabral, J. M. S. (1992) Recovery processes for biological Materials, John Wiley and Sons; Shaeiwitz, J. A., and Henry, J. D. (1988) Biochemical Separations, in: Ullmann's Encyclopedia of Industrial Chemistry, Vol. B3; Chapter 11, p. 1-27, VCH: Weinheim; and Dechow, F. J. (1989) Separation and purification techniques in biotechnology, Noyes Publications) or the methods mentioned above.

[3111] for the disclosure of this paragraph see [0441.0.0.0] above.

[3112] Purification of the Xanthophylls and Determination of the Carotenoids Content:

[3113] Abbreviations: GC-MS, gas liquid chromatography/mass spectrometry; TLC, thin-layer chromatography.

The unambiguous detection for the presence of xanthophylls can be obtained by analyzing recombinant organisms using analytical standard methods: LC, LC-MSMS or TLC, as described The total xanthophylls produced in the organism for example in algae used in the inventive process can be analysed for example according to the following procedure:
The material such as algae or plants to be analyzed can be disrupted by sonication, grinding in a glass mill, liquid nitrogen and grinding or via other applicable methods.
Plant material is initially homogenized mechanically by comminuting in a pestle and mortar to make it more amenable to extraction.

[3114] A typical sample pretreatment consists of a total lipid extraction using such polar organic solvents as acetone or alcohols as methanol, or ethers, saponification, partition between phases, separation of non-polar epiphase from more polar hypophasic derivatives and chromatography. E.g.:

For analysis, solvent delivery and aliquot removal can be accomplished with a robotic system comprising a single injector valve Gilson 232XL and a 402 2S1V diluter [Gilson, Inc. USA, 3000 W. Beltline Highway, Middleton, Wis.]. For saponification, 3 ml of 50% potassium hydroxide hydro-ethanolic solution (4 water:1 ethanol) can be added to each vial, followed by the addition of 3 ml of octanol. The saponification treatment can be conducted at room temperature with vials maintained on an IKA HS 501 horizontal shaker [Labworld-online, Inc., Wilmington, N.C.] for fifteen hours at 250 movements/minute, followed by a stationary phase of approximately one hour.
Following saponification, the supernatant can be diluted with 0.10 ml of methanol. The addition of methanol can be conducted under pressure to ensure sample homogeneity. Using a 0.25 ml syringe, a 0.1 ml aliquot can be removed and transferred to HPLC vials for analysis.

[3115] For HPLC analysis, a Hewlett Packard 1100 HPLC, complete with a quaternary pump, vacuum degassing system, six-way injection valve, temperature regulated autosampler, column oven and Photodiode Array detector can be used [Agilent Technologies available through Ultra Scientific Inc., 250 Smith Street, North Kingstown, R.I.]. The column can be a Waters YMC30, 5-micron, 4.6×250 mm with a guard column of the same material [Waters, 34 Maple Street, Milford, Mass.]. The solvents for the mobile phase can be 81 methanol: 4 water: 15 tetrahydrofuran (THF) stabilized with 0.2% BHT (2,6-di-tert-butyl-4-methylphenol). Injections were 20 μl. Separation can be isocratic at 30° C. with a flow rate of 1.7 ml/minute. The peak responses can be measured by absorbance at 447 nm.

[3116] Carotenoid especially xanthophylls compositions can be determined for wild-type and transgene samples selected from those identified in a screening procedure. Petal samples can be stored in a −80° C. freezer until mutants were identified. Samples can be lyophilized, and the dried tissue can be stored under argon at −80° C. until ready for analysis.

Extraction procedures can be performed under red light. Dried petals can be ground to pass through a No. 40 sieve mesh size. A ground sample can be accurately weighed and transferred into a 100 ml red volumetric flask. To the sample, 500 microliters μl) of H₂O can be added, and the mixture can be swirled for 1 minute. Thirty ml of extractant solvent (10 ml hexane+7 ml acetone+6 ml absolute alcohol+7 ml toluene) can be added, and the flask can be shaken at 160 rpm for 10 minutes.
For saponification, 2 ml of 40% methanolic KOH can be added into the flask, which can be then swirled for one minute. The flask can be placed in a 56° C. H₂O bath for 20 minutes. An air condenser can be attached to prevent loss of solvent. The sample can be cooled in the dark for one hour with the condenser attached. After cooling, 30 ml of hexane can be added, and the flask can be shaken at 160 rpm for 10 minutes.
The shaken sample can be diluted to volume (100 ml) with 10% sodium sulfate solution and shaken vigorously for one minute. The sample can be remained in the dark for at least 30 minutes. A 35 ml aliquot can be removed from the approximately 50 ml upper phase, and transferred to a sample cup. An additional 30 ml of hexane can be added into the flask that can be then shaken at 160 rpm for 10 minutes. After approximately one hour, the upper phases can be combined. For HPLC analysis, 10 ml aliquots can be dried under nitrogen and stored under argon at −80° C.
HPLC equipment comprised an Alliance 2690 equipped with a refrigerated autosampler, column heater and a Waters Photodiode Array 996 detector (Waters Corp., 34 Maple Street Milford, Mass. 01757). Separation can be obtained with a YMC30 column, 3 μm, 2.0×150 mm with a guard column of the same material. Standards can be obtained from ICC Indorespective fine chemicals Somerville, N.J. 088876 and from DHI-Water & Environment, DK-2970 Horsholm, Denmark.
The dried mutant samples can be resuspended in tetrahydrofuran and methanol to a total volume of 200 μl and filtered, whereas the control can be not additionally concentrated. Carotenoids especially xanthophylls can be separated using a gradient method. Initial gradient conditions can be 90% methanol: 5% water: 5% methyl tert-butyl ether at a flow rate of 0.4 milliliters per minute (ml/min). From zero to 15 minutes, the mobile phase can be changed from the initial conditions to 80 methanol: 5 water: 15 methyl tert-butyl ether, and from 15 to 60 minutes to 20 methanol: 5 water: 75 methyl tert-butyl ether. For the following 10 minutes, the mobile phase can be returned to the initial conditions and the column equilibrated for an additional 10 minutes. The column temperature can be maintained at 27° C. and the flow rate was 0.4 ml/minute. Injections were 10 μl. The majority of peak responses can be measured at 450 nm and additional areas added from 286, 348, 400 and 472 nm extracted channels.
If required and desired, further chromatography steps with a suitable resin may follow. Advantageously, the xanthophylls can be further purified with a so-called RTHPLC. As eluent acetonitrile/water or chloroform/acetonitrile mixtures can be used. If necessary, these chromatography steps may be repeated, using identical or other chromatography resins. The skilled worker is familiar with the selection of suitable chromatography resin and the most effective use for a particular molecule to be purified.

[3117] for the disclosure of the paragraphs [0446.0.0.6] to [0496.0.0.10] see paragraphs [0446.0.0.0] to [0496.0.0.0] above.

[3118] As an alternative, the xanthophylls can be detected advantageously via HPLC separation in combination with NMR techniques for the structure clarification or in combination with mass spectrometry in case of small sample volumes as described for example by Karsten Putzbach (Theses, 2005 at the Eberhard-Karls-University of Tuebingen, Department of Chemistry and Pharmacy) or Mueller, H. Z. Lebensm. Unters. Forsch. A 204, 1997: 88-94.
[3119] The results of the different plant analyses can be seen from the table, which follows:

TABLE VI

| ORF | Metabolite | Method | Min | Max |
|---|---|---|---|---|
| b1095 | Zeaxanthin | LC | 1.25 | 1.37 |
| b2022 | Zeaxanthin | LC | 1.23 | 1.29 |
| b2344 | Zeaxanthin | LC | 1.27 | 1.90 |

[3120] for the disclosure of the paragraphs [0499.0.0.10] and [0500.0.0.10] see paragraphs [0499.0.0.0] and [0500.0.0.0] above.

### Example 15a

### Engineering Ryegrass Plants by Over-Expressing b1095 from Escherichia coli or Homologs of b1095 from Other Organisms

[3121] for the disclosure of the paragraphs [0502.0.0.10] to [0508.0.0.10] see paragraphs [0502.0.0.0] to [0508.0.0.0] above.

### Example 15b

### Engineering Soybean Plants by Over-Expressing b1095 from Escherichia coli or Homologs of b1095 from Other Organisms

[3122] for the disclosure of the paragraphs [0510.0.0.10] to [0513.0.0.10] see paragraphs [0510.0.0.0] to [0513.0.0.0] above.

### Example 15c

### Engineering Corn Plants by Over-Expressing b1095 from Escherichia coli or Homologs of b1095 from Other Organisms

[3123] for the disclosure of the paragraphs [0515.0.0.10] to [0540.0.0.10] see paragraphs [0515.0.0.0] to [0540.0.0.0] above.

### Example 15d

### Engineering Wheat Plants by Over-Expressing b1095 from Escherichia coli or Homologs of b1095 from Other Organisms

[3124] for the disclosure of the paragraphs [0542.0.0.10] to [0544.0.0.10] see paragraphs [0542.0.0.0] to [0544.0.0.0] above.

### Example 15e

### Engineering Rapeseed/Canola Plants by Over-Expressing b1095 from Escherichia coli or Homologs of b1095 from Other Organisms

[3125] for the disclosure of the paragraphs [0546.0.0.10] to [0549.0.0.10] see paragraphs [0544.0.0.0] to [0549.0.0.0] above.

### Example 15f

### Engineering Alfalfa Plants by Over-Expressing b1095 from Escherichia coli or Homologs of b1095 from Other Organisms

[3126] for the disclosure of the paragraphs [0551.0.0.10] to [0554.0.0.10] see paragraphs [0551.0.0.0] to [0554.0.0.0] above.

[3127] %

[3128] for the disclosure of this paragraph see [0554.2.0.0] above.

[3129] for the disclosure of this paragraph see [0555.0.0.0] above.

[3130] for the disclosure of this paragraph see [0001.0.0.0].

[3131] Carotenoids are red, yellow and orange pigments that are widely distributed in nature. Although specific carotenoids have been identified in photosynthetic centers in plants, in bird feathers, in crustaceans and in marigold petals, they are especially abundant in yellow-orange fruits and vegetables and dark green, leafy vegetables. Of the more than 700 naturally occurring carotenoids identified thus far, as many as 50 may be absorbed and metabolized by the human body. To date, only 14 carotenoids have been identified in human serum.

In animals some carotenoids (particularly beta-carotene) serve as dietary precursors to Vitamin A, and many of them may function as fat-soluble antioxidants. In plants carotenes serve for example as antioxidants to protect the highly reactive photosystems and act as accessory photopigments. In vitro experiments have shown that lycopene, alpha-carotene, zeaxanthin, lutein and cryptoxanthin quench singlet oxygen and inhibit lipid peroxidation. The isolation and identification of oxidized metabolites of lutein, zeaxanthin and lycopene provide direct evidence of the antioxidant action of these carotenoids.
Carotenoids are 40-carbon (C₄₀) terpenoids generally comprising eight isoprene (C₅) units joined together. Linking of the units is reversed at the center of the molecule. “Ketocarotenoid” is a general term for carotenoid pigments that contain a keto group in the ionene ring portion of the molecule, whereas “hydroxycarotenoid” refers to carotenoid pigments that contain a hydroxyl group in the ionene ring. Trivial names and abbreviations will be used throughout this disclosure, with IUPAC-recommended semisystematic names usually being given in parentheses after first mention of a trivial name. Owing to its three chiral centers, there are 2³ or 8 stereoisomers of lutein.
The principal natural stereoisomer of lutein and the form of lutein in the plasma is (3R,3′R,6′R)-lutein, thus a preferred form of the compound. Lutein is also known as xanthophyll (also, the group name of the oxygen-containing carotenoids), vegetable lutein, vegetable luteol and beta, epsilon-carotene-3,3′diol. The molecular formula of lutein is C₄₀H₅₆O₂ and its molecular weight is 568.88 daltons. The chemical name of the principal natural stereoisomer of lutein is (3R,3′R,6′R)-beta,epsilon-carotene-3,3′-diol.
Lutein and zeaxanthin esters are hydrolyzed in the small intestine via esterases and lipases. Lutein and zeaxanthin that are derived from supplements or released from the matrices of foods, are either solubilized in the lipid core of micelles (formed from bile salts and dietary lipids) in the lumen of the small intestine, or form clathrate complexes with conjugated bile salts. Micelles and possibly clathrate complexes deliver lutein and zeaxanthin to the enterocytes. Lutein and zeaxanthin are released from the enterocytes into the lymphatics in the form of chylomicrons. They are transported by the lymphatics to the general circulation via the thoracic duct. In the circulation, lipoprotein lipase hydrolyzes much of the triglycerides in the chylomicrons, resulting in the formation of chylomicron remnants. Chylomicron remnants retain apolipoproteins E and B48 on their surfaces and are mainly taken up by the hepatocytes and to a smaller degree by other tissues. Within hepatocytes, lutein and zeaxanthin are incorporated into lipoproteins. Lutein and zeaxanthin appear to be released into the blood mainly in the form of high-density lipoproteins (HDL) and, to a lesser extent, in the form of very-low density lipoprotein (VLDL). Lutein and zeaxanthin are transported in the plasma predominantly in the form of HDL. Lutein and zeaxanthin are mainly accumulated in the macula of the retina, where they bind to the retinal protein tuberlin. Zeaxanthin is specifically concentrated in the macula, especially in the fovea. Lutein is distributed throughout the retina. Zeaxanthin found in plasma is predominantly (3R,3′R)-zeaxanthin. Lutein appears to undergo some metabolism in the retina to meso-zeaxanthin.
Carotenoids are synthesized from a five carbon atom metabolic precursor, isopentenyl pyrophosphate (IPP). There are at least two known biosynthetic pathways in the formation of IPP, the universal isoprene unit. One pathway begins with mevalonic acid, the first specific precursor of terpenoids, formed from acetyl-CoA via HMG-CoA (3-hydroxy-3-methylglutaryl-CoA), that is itself converted to isopentenyl pyrophosphate (IPP). Later, condensation of two geranylgeranyl pyrophosphate (GGPP) molecules with each other produces colorless phytoene, which is the initial carotenoid. Studies have also shown the existence of an alternative, mevalonate-independent pathway for IPP formation that was characterized initially in several species of eubacteria, a green alga, and in the plastids of higher plants. The first reaction in this alternative pathway is the transketolase-type condensation reaction of pyruvate and D-glyceraldehylde-3-phosphate to yield 1-deoxy-D-xylulose-5-phosphate (DXP or DOXP) as an intermediate.
Through a series of desaturation reactions, phytoene is converted to phytofluene, ζ-carotene, neurosporene and finally to lycopene. Subsequently, lycopene is converted by a cyclization reaction to β-carotene that contains two β-ionene rings. A keto-group and/or a hydroxyl group are introduced into each ring of β-carotene to thereby synthesize canthaxanthin, zeaxanthin, astaxanthin. A hydroxylase enzyme has been shown to convert canthaxanthin to astaxanthin. Similarly, a ketolase enzyme has been shown to convert zeaxanthin to astaxanthin. The ketolase also converts β-carotene to canthaxanthin and the hydroxylase converts 3-carotene to zeaxanthin. In many plants, lycopene is a branch point in carotenoid biosynthesis. Thus, some of the plant's lycopene is made into beta-carotene and zeaxanthin, and sometimes zeaxanthin diglucoside, whereas remaining portions of lycopene are formed into alpha-carotene and lutein (3,3′-dihydroxy-α-carotene), another hydroxylated compound.

[3132] Lutein and zeaxanthin exist in several forms. Lutein and zeaxanthin also occur in plants in the form of mono- or diesters of fatty acids. For example, lutein and zeaxanthin dipalmitates, dimyristates and monomyristates are found in the petals of the marigold flower (Tagetes erecta). Many of the marketed lutein nutritional supplements contain lutein esters, with much smaller amounts of zeaxanthin esters, which are derived from the dried petals of marigold flowers. Lutein dipalmitate is found in the plant Helenium autumnale L. Compositae. It is also known as helenien and it is used in France for the treatment of visual disorders. Zeaxanthin in its fatty acid ester forms, is the principal carotenoid found in the plant Lycium chinese Mill. Lycium chinese Mill, also known as Chinese boxthorn, is used in traditional Chinese medicine for the treatment of a number of disorders, including visual problems. Nutritional supplement forms are comprised of these carotenoids either in their free (non-esterified) forms or in the form of fatty acid esters.

Lutein and zeaxanthin exist in a matrix in foods. In the case of the chicken egg yolk, the matrix is comprised of lipids (cholesterol, phospholipid, triglycerides). The carotenoids are dispersed in the matrix along with fat-soluble nutrients, including vitamins A, D and E. In the case of plants, lutein and zeaxanthin are associated with chloroplasts or chromoplasts.
Carotenoids absorb light in the 400-500 nm region of the visible spectrum. This physical property imparts the characteristic red/yellow colour of the pigments. A conjugated backbone composed of isoprene units is usually inverted at the centre of the molecule, imparting symmetry. Changes in geometrical configuration about the double bonds result in the existence of many cis- and trans-isomers. Hydroxylated, oxidized, hydrogenated or ring-containing derivatives also exist. Hydrocarbon carotenoids are classified as carotenes while those containing oxygen are known as xanthophylls.
In animals, carotenoids are absorbed from the intestine with the aid of dietary fat and incorporated into chylomicrons for transport in the serum. The different structural features possessed by carotenoids account for selective distribution in organ tissue, biological activity and pro-vitamin A potency, or in vivo conversion to vitamin A. Due to the hydrophobic character, carotenoids are associated with lipid portions of human tissues, cells, and membranes. In general, 80-85% of carotenoids are distributed in adipose tissue, with smaller amounts found in the liver, muscle, adrenal glands, and reproductive organs. Approximately 1% circulate in the serum on high and low density lipoproteins. Serum concentrations are fairly constant and slow to change during periods of low intake. The estimated half-life was estimated to be 11-14 days for lycopene, α-carotene, β-carotene, lutein and zeaxanthin. Evidence for the existence of more than one body pool has been published. The major serum carotenoids are β-carotene, α-carotene, lutein, zeaxanthin, lycopene and cryptoxanthin. Smaller amounts of polyenes such as phytoene and phytofluene are also present.
Human serum levels reflect lifestyle choices and dietary habits within and between cultures. Approximately only 15 carotenoids circulate in the blood, on HDL and LDL. Variations can be attributed to different intakes, unequal abilities to absorb certain carotenoids, and different rates of metabolism and tissue uptake. Decreased serum levels occur with alcohol consumption, the use of oral contraceptives, smoking and prolonged exposure to UV light.

[3133] The established efficacy of lutein in quenching singlet oxygen and intercepting deleterious free radicals and reactive oxygen species can make it part of the diverse antioxidant defense system in humans. Reactive oxygen species have been implicated in the development of many diseases, including ischemic heart disease, various cancers, cataracts and macular degeneration. Because the conjugated polyene portion of beta-carotene confers its antioxidant capability and all carotenoids possess this structural feature, research efforts have been directed at evaluating the efficacy of other carotenoids in the prevention of free radical-mediated diseases. Indeed, in vitro experiments have demonstrated that lycopene, alpha-carotene, zeaxanthin, lutein and cryptoxanthin quench singlet oxygen and inhibit lipid peroxidation. The isolation and identification of oxidized metabolites of lutein, zeaxanthin and lycopene may provide direct evidence of the antioxidant action of these carotenoids.

In addition to antioxidant capability, other biological actions of carotenoids include the ability to enhance immunocompetence and in vitro gap junction communication, reduce or inhibited mutagenesis and inhibit cell transformations in vitro.
Many epidemiological studies have established an inverse correlation between dietary intake of yellow-orange fruit and dark green, leafy vegetables and the incidence of various cancers, especially those of the mouth, pharynx, larynx, esophagus, lung, stomach, cervix and bladder. While a number of protective compounds may be responsible for this observation, the co-incidence of carotenoids in these foods has been noted. Because nutritionists and medical professionals currently recognize the occurrence of a large number of distinct carotenoids in food, interest in their functions and biological impact on health is burgeoning.
Lutein exists in the retina. It functions to protect photoreceptor cells from light-generated oxygen radicals, and thus plays a key role in preventing advanced macular degeneration. Lutein possesses chemopreventive activity, induces gap junction communication between cells and inhibits lipid peroxidation in vitro more effectively than beta-carotene, alpha-carotene and lycopene. High levels of lutein in serum have been inversely correlated with lung cancer.
In addition to lutein, zeaxanthin exists in the retina and confers protection against macular degeneration. Zeaxanthin is also prevalent in ovaries and adipocyte tissue. This xanthophyll does not possess provitamin A activity.
Alcohol consumption has been shown to influence lipid peroxidation. Anhydrolutein, an oxidative by-product of lutein and zeaxanthin, was higher in plasma after alcohol ingestion, while concentrations of these xanthophylls were reduced. Lutein and zeaxanthin may therefore have protective effects against LDL oxidation.

[3134] In plants, approximately 80-90% of the carotenoids present in green, leafy vegetables such as broccoli, kale, spinach and brussel sprouts are xanthophylls, whereas 10-20% are carotenes. Conversely, yellow and orange vegetables including carrots, sweet potatoes and squash contain predominantly carotenes. Up to 60% of the xanthophylls and 15% of the carotenes in these foods are destroyed during microwave cooking. Of the xanthophylls, lutein appears to be the most stable.

Lutein occurs in mango, papaya, oranges, kiwi, peaches, squash, peas, lima beans, green beans, broccoli, brussel sprouts, cabbage, kale, lettuce, prunes, pumpkin, sweet potatoes and honeydew melon. Commercial sources are obtained from the extraction of marigold petals. Lutein does not possess provitamin A activity.
Dietary sources of Zeaxanthin include peaches, squash, apricots, oranges, papaya, prunes, pumpkin, mango, kale, kiwi, lettuce, honeydew melon and yellow corn.

[3135] Some carotenoids occur particularly in a wide variety of marine animals including fish such as salmonids and sea bream, and crustaceans such as crab, lobster, and shrimp. Because animals generally cannot biosynthesize carotenoids, they obtain those carotenoids present in microorganisms or plants upon which they feed.

Carotenoids, e.g. xanthophylls, in particular lutein, supplied from biological sources, such as crustaceans, yeast, and green alga is limited by low yield and costly extraction methods when compared with that obtained by organic synthetic methods. Synthetic methods are e.g. described in Hansgeorg Ernst, Pure Appl. Chem., Vol. 74, No. 8, pp. 1369-1382, 2002. Usual synthetic methods, however, produce by-products that can be considered unacceptable. It is therefore desirable to find a relatively inexpensive source of carotenoids, in particular lutein, to be used as a feed supplement in aquaculture and as a valuable chemical for other industrial uses and for diets. Sources of xanthophylls include crustaceans such as a krill in the Antarctic Ocean, cultured products of the yeast Phaffia, cultured products of a green alga Haematococcus pluvialis, and products obtained by organic synthetic methods. However, when crustaceans such as a krill or the like are used, a great deal of work and expense are required for the isolation of xanthophylls from contaminants such as lipids and the like during the harvesting and extraction. Moreover, in the case of the cultured product of the yeast Phaffia, a great deal of expense is required for the gathering and extraction of astaxanthin because the yeast has rigid cell walls and produces xanthophylls only in a low yield. One approach to increase the productivity of some xanthophylls' production in a biological system is to use genetic engineering technology.

[3136] Carotenoids in higher plants; i.e., angiosperms, are found in plastids; i.e., chloroplasts and chromoplasts. Plastids are intracellular storage bodies that differ from vacuoles in being surrounded by a double membrane rather than a single membrane. Plastids such as chloroplasts can also contain their own DNA and ribosomes, can reproduce independently, and synthesize some of their own proteins. Plastids thus share several characteristics of mitochondria. In leaves, carotenoids are usually present in the grana of chloroplasts where they provide a photoprotective function. Beta-carotene and lutein are the predominant carotenoids, with the epoxidized carotenoids violaxanthin and neoxanthin being present in smaller amounts. Carotenoids accumulate in developing chromoplasts of flower petals, usually with the disappearance of chlorophyll. As in flower petals, carotenoids appear in fruit chromoplasts as they develop from chloroplasts. Most enzymes that take part in conversion of phytoene to carotenes and xanthophylls are labile, membrane-associated proteins that lose activity upon solubilization. In maize, cartonoids were present in horny endosperm (74% to 86%), floury endosperm (9%-23%) and in the germ and bran of the kernel.

[3137] At the present time only a few plants are widely used for commercial coloured carotenoid production. However, the productivity of coloured carotenoid synthesis in most of these plants is relatively low and the resulting carotenoids are expensively produced.

Dried marigold petals and marigold petal concentrates obtained from so-called xanthophyll marigolds are used as feed additives in the poultry industry to intensify the yellow color of egg yolks and broiler skin. The pigmenting ability of marigold petal meal resides largely in the carotenoid fraction known as the xanthophylls, primarily lutein esters. The xanthophyll zeaxanthin, also found in marigold petals, has been shown to be effective as a broiler pigmenter, producing a highly acceptable yellow to yellow-orange color. Of the xanthophylls, the pigments lutein and zeaxanthin are the most abundant in commercially available hybrids.
Carotenoids have been found in various higher plants in storage organs and in flower petals. For example, marigold flower petals accumulate large quantities of esterified lutein as their predominant xanthophyll carotenoid (about 75 to more than 90 percent), with smaller amounts of esterified zeaxanthin. Besides lutein and zeaxanthin, marigold flower petals also typically exhibit a small accumulation of β-carotene and epoxidized xanthophylls, but do not produce or accumulate canthaxanthin or astaxanthin because a 4-keto-β-ionene ring-forming enzyme is absent in naturally-occurring marigolds or their hybrids.

[3138] One way to increase the productive capacity of biosynthesis is to apply recombinant DNA technology. Thus, it would be desirable to produce coloured carotenoids generally and, with the use of recent advances in determining carotenoid biosynthesis from β-carotene to xanthophylls to control the production of carotenoids. That type of production permits control over quality, quantity, and selection of the most suitable and efficient producer organisms. The latter is especially important for commercial production economics and therefore availability to consumers.

Methods of recombinant DNA technology have been used for some years to improve the production of Xanthophylls in microorganisms, in particular algae or in plants by amplifying individual xanthophyll biosynthesis genes and investigating the effect on xanthophyll production. It is for example reported, that the five ketocarotenoids, e.g. the xanthophyll astaxanthin could be produced in the nectaries of transgenic tobacco plants. Those transgenic plants were prepared by Argobacterium tumifaciens-mediated transformation of tobacco plants using a vector that contained a ketolase-encoding gene from H. pluvialis denominated crtO along with the Pds gene from tomato as the promoter and to encode a leader sequence. The Pds gene was said by those workers to direct transcription and expression in chloroplasts and/or chromoplast-containing tissues of plants. Those results indicated that about 75 percent of the carotenoids found in the flower of the transformed plant contained a keto group. Further, in maize the phytonene synthase (Psy), Phytone desaturase (Pds), and the ζ-carotene desaturase were identified and it was shown, that PSY activity is an important control point for the regulation of the flux.
Genes suitable for conversion of microorganisms have also been reported (U.S. Pat. No. 6,150,130 WO 99/61652). Two different genes that can convert a carotenoid β-ionene ring compound into astaxanthin have been isolated from the green alga Haematococcus pluvialis. Zeaxanthin or β-carotene were also found in the marine bacteria Agrobacterium aurantiacum, Alcaligenes PC-1, Erwinia uredovora. An A. aurantiacum crtZ gene was introduced to an E. coli transformant that accumulated all-trans-β-carotene. The transformant so formed produced zeaxanthin. A gene cluster encoding the enzymes for a carotenoid biosynthesis pathway has been also cloned from the purple photosynthetic bacterium Rhodobacter capsulatus. A similar cluster for carotenoid biosynthesis from ubiquitous precursors such as farnesyl pyrophosphate and geranyl pyrophosphate has been cloned from the non-photosynthetic bacteria Erwinia herbicola. Yet another carotenoid biosynthesis gene cluster has been cloned from Erwinia uredovora. It is yet unknown and unpredictable as to whether enzymes encoded by other organisms behave similarly to that of A. aurantiacum in vitro or in vivo after transformation into the cells of a higher plant.

[3139] Thus, it would be advantageous if an algae or other microorganism were available which produce large amounts of β-carotene, beta-cryptoxanthin, lutein, zeaxanthin, or other carotenoids. The invention discussed hereinafter relates in some embodiments to such transformed prokaryotic or eukaryotic microorganisms.

It would also be advantageous if a marigold or other plants were available whose flowers produced large amounts of β-carotene, beta-cryptoxanthin, lutein, zeaxanthin, or other carotenoids. The invention discussed hereinafter relates in some embodiments to such transformed plants.

[3140] Therefore improving the quality of foodstuffs and animal feeds is an important task of the food-and-feed industry. This is necessary since, for example, as mentioned above xanthophylls, which occur in plants and some microorganisms are limited with regard to the supply of mammals. Especially advantageous for the quality of foodstuffs and animal feeds is as balanced as possible a carotenoids profile in the diet since a great excess of some carotenoids above a specific concentration in the food has only some positive effect. A further increase in quality is only possible via addition of further carotenoids, which are limiting.

[3141] To ensure a high quality of foods and animal feeds, it is therefore necessary to add carotenoids in a balanced manner to suit the organism.

[3142] Accordingly, there is still a great demand for new and more suitable genes which encode proteins or regulators which participate in the biosynthesis of lutein and make it possible to produce lutein and other carotenoids specifically on an industrial scale without unwanted byproducts forming. In the selection of genes for or regulators of biosynthesis two characteristics above all are particularly important. On the one hand, there is as ever a need for improved processes for obtaining the highest possible contents of carotenoids like lutein on the other hand as less as possible byproducts should be produced in the production process.

[3143] for the disclosure of this paragraph see [0013.0.0.0] above.

[3144] Accordingly, in a first embodiment, in context of paragraphs [0001.n.n.11] to [0555.n.n.11] the invention relates to a process for the production of a fine chemical, whereby the fine chemical is lutein. Accordingly, in the present invention, the term “the fine chemical” as used herein relates to “lutein”. Further, the term “the fine chemicals” as used herein also relates to fine chemicals comprising lutein.

[3145] In one embodiment, in context with paragraphs [0001.n.n.11] to [0555.n.n.11], the term “the respective fine chemical” means lutein. Throughout the specification of paragraph [0001.n.n.11] to paragraph [0555.n.n.11 ] the term “the respective fine chemical” or the term “lutein” means lutein in its free form, its salts, ester, its mono- or diesters of fatty acids, e.g. as lutein dipalmitates, dimyristates or monomyristates or bound to proteins, e.g. lipoproteins or tuberlin, or bound to other compounds.

Lutein exist in a matrix in foods. Thus, in one embodiment, the fine chemical produced according to the process of the invention is a matrix comprising inter alia lipids, in particular cholesterol, phospholipid, and/or triglycerides, and lutein.
Thus in one embodiment, the fine chemical is a lutein ester. In one particular embodiment, the fine chemical is a lutein ester of a natural occurring, preferably in plants or microorganisms occurring fatty acid. In a further embodiment, the fine chemical is a lutein monoester. In a further embodiment, the fine chemical is a lutein diester. In a further embodiment, the fine chemical is lutein dipalmitates, dimyristates or monomyristates. In a further embodiment, the fine chemical is a lutein comprising matrix. In a further embodiment, the fine chemical is a lutein comprising micelle, e.g. a micelle formed from bile salts or dietary lipids, or a clathrate complex, e.g. with conjugated bile salts. In a further embodiment, the fine chemical is lutein in the form of chylomicrons. In a further embodiment, the fine chemical is lutein in the form of chylomicron remnants. In a further embodiment, the fine chemical is lutein incorporated into lipoproteins, e.g. HDL or VLDL. In a further embodiment, the fine chemical is lutein bound to tuberlin. In a further embodiment, the fine chemical is free lutein, in particular (3R,3′R,6′R)-lutein.

[3146] Accordingly, the present invention relates to a process for the production of lutein, which comprises
[3147] (a) increasing or generating the activity of a protein as shown in table II, application no. 12, column 3 encoded by the nucleic acid sequences as shown in table I, application no. 12, column 5, in an organelle of a microorganism or plant, or
[3148] (b) increasing or generating the activity of a protein as shown in table II, application no. 12, column 3 encoded by the nucleic acid sequences as shown in table I, application no. 12, column 5 in the plastid of a microorganism or plant, or in one or more parts thereof; and
[3149] (c) growing the organism under conditions which permit the production of the fine chemical, thus, lutein or fine chemicals comprising lutein, in said organism or in the culture medium surrounding the organism.

[3150] Accordingly, the term “the fine chemical” means in one embodiment “lutein” in relation to all sequences listed in Table I to IV, application No. 12

[3151] In another embodiment the present invention is related to a process for the production of lutein, which comprises
[3152] (a) increasing or generating the activity of a protein as shown in table II, application no. 12 column 3 encoded by the nucleic acid sequences as shown in table I, application no. 12, column 5, in an organelle of a non-human organism, or
[3153] (b) increasing or generating the activity of a protein as shown in table II, application no. 12, column 3 encoded by the nucleic acid sequences as shown in table I, application no. 12, column 5, which are joined to a nucleic acid sequence encoding a transit peptide in a non-human organism, or in one or more parts thereof; or
[3154] (c) increasing or generating the activity of a protein as shown in table II, application no. 12, column 3 encoded by the nucleic acid sequences as shown in table I, application no. 12, column 5, which are joined to a nucleic acid sequence encoding chloroplast localization sequence, in a non-human organism, or in one or more parts thereof, and
[3155] (d) growing the organism under conditions which permit the production of lutein in said organism.

[3156] In another embodiment, the present invention relates to a process for the production of lutein, which comprises
[3157] (a) increasing or generating the activity of a protein as shown in table II, application no. 12, column 3 encoded by the nucleic acid sequences as shown in table I, application no. 12, column 5, in an organelle of a microorganism or plant through the transformation of the organelle, or
[3158] (b) increasing or generating the activity of a protein as shown in table II, application no. 12, column 3 encoded by the nucleic acid sequences as shown in table I, application no. 12, column 5 in the plastid of a microorganism or plant, or in one or more parts thereof through the transformation of the plastids; and
[3159] (c) growing the organism under conditions which permit the production of the fine chemical, thus, lutein or fine chemicals comprising lutein, in said organism or in the culture medium surrounding the organism.

[3160] Advantageously the activity of the protein as shown in table II, application no. 12, column 3 encoded by the nucleic acid sequences as shown in table I, application no. 12, column 5 is increased or generated in the abovementioned process in the plastid of a microorganism or plant.

[3161] for the disclosure of the paragraphs [0019.0.0.11] to [024.0.0.11] see paragraphs [0019.0.0.0] and [0024.0.0.0] above.

[3162] Even more preferred nucleic acid sequences are encoding transit peptides as disclosed by von Heijne et al. [Plant Molecular Biology Reporter, Vol. 9 (2), 1991: 104-126], which are hereby incorporated by reference. Table V shows some examples of the transit peptide sequences disclosed by von Heijne et al. According to the disclosure of the invention especially in the examples the skilled worker is able to link other nucleic acid sequences disclosed by von Heijne et al. to the nucleic acid sequences shown in table I, application no. 12, columns 5 and 7. Most preferred nucleic acid sequences encoding transit peptides are derived from the genus Spinacia such as chloroplast 30S ribosomal protein PSrp-1, root acyl carrier protein II, acyl carrier protein, ATP synthase: γ subunit, ATP synthase: δ subunit, cytochrom f, ferredoxin I, ferredoxin NADP oxidoreductase (=FNR), nitrite reductase, phosphoribulokinase, plastocyanin or carbonic anhydrase. The skilled worker will recognize that various other nucleic acid sequences encoding transit peptides can easily isolated from plastid-localized proteins, which are expressed from nuclear genes as precursors and are then targeted to plastids. Such transit peptides encoding sequences can be used for the construction of other expression constructs. The transit peptides advantageously used in the inventive process and which are part of the inventive nucleic acid sequences and proteins are typically 20 to 120 amino acids, preferably 25 to 110, 30 to 100 or 35 to 90 amino acids, more preferably 40 to 85 amino acids and most preferably 45 to 80 amino acids in length and functions post-translationally to direct the protein to the plastid preferably to the chloroplast. The nucleic acid sequences encoding such transit peptides are localized upstream of nucleic acid sequence encoding the mature protein. For the correct molecular joining of the transit peptide encoding nucleic acid and the nucleic acid encoding the protein to be targeted it is sometimes necessary to introduce additional base pairs at the joining position, which forms restriction enzyme recognition sequences useful for the molecular joining of the different nucleic acid molecules. This procedure might lead to very few additional amino acids at the N-terminal of the mature imported protein, which usually and preferably do not interfere with the protein function. In any case, the additional base pairs at the joining position which forms restriction enzyme recognition sequences have to be chosen with care, in order to avoid the formation of stop codons or codons which encode amino acids with a strong influence on protein folding, like e.g. proline. It is preferred that such additional codons encode small n.d. structural flexible amino acids such as glycine or alanine.

[3163] As mentioned above the nucleic acid sequences coding for the proteins as shown in table II, application no. 12, column 3 and its homologs as disclosed in table I, application no. 12, columns 5 and 7 are joined to a nucleic acid sequence encoding a transit peptide, This nucleic acid sequence encoding a transit peptide ensures transport of the protein to the plastid. The nucleic acid sequence of the gene to be expressed and the nucleic acid sequence encoding the transit peptide are operably linked. Therefore the transit peptide is fused in frame to the nucleic acid sequence coding for proteins as shown in table II, application no. 12, column 3 and its homologs as disclosed in table I, application no. 12, columns 5 and 7.

[3164] for the disclosure of the paragraphs [0027.0.0.11] to [0029.0.0.11] see paragraphs [0027.0.0.0] and [0029.0.0.0] above.

[3165] Alternatively, nucleic acid sequences coding for the transit peptides may be chemically synthesized either in part or wholly according to structure of transit peptide sequences disclosed in the prior art. Said natural or chemically synthesized sequences can be directly linked to the sequences encoding the mature protein or via a linker nucleic acid sequence, which may be typically less than 500 base pairs, preferably less than 450, 400, 350, 300, 250 or 200 base pairs, more preferably less than 150, 100, 90, 80, 70, 60, 50, 40 or 30 base pairs and most preferably less than 25, 20, 15, 12, 9, 6 or 3 base pairs in length and are in frame to the coding sequence. Furthermore favorable nucleic acid sequences encoding transit peptides may comprise sequences derived from more than one biological and/or chemical source and may include a nucleic acid sequence derived from the amino-terminal region of the mature protein, which in its native state is linked to the transit peptide. In a preferred embodiment of the invention said amino-terminal region of the mature protein is typically less than 150 amino acids, preferably less than 140, 130, 120, 110, 100 or 90 amino acids, more preferably less than 80, 70, 60, 50, 40, 35, 30, 25 or 20 amino acids and most preferably less than 19, 18, 17, 16, 15, 14, 13, 12, 11 or 10 amino acids in length. But even shorter or longer stretches are also possible. In addition target sequences, which facilitate the transport of proteins to other cell compartments such as the vacuole, endoplasmic reticulum, Golgi complex, glyoxysomes, peroxisomes or mitochondria may be also part of the inventive nucleic acid sequence. The proteins translated from said inventive nucleic acid sequences are a kind of fusion proteins that means the nucleic acid sequences encoding the transit peptide for example the ones shown in table V, preferably the last one of the table are joint to the nucleic acid sequences shown in table I, application no. 12, columns 5 and 7. The person skilled in the art is able to join said sequences in a functional manner. Advantageously the transit peptide part is cleaved off from the protein part shown in table II, application no. 12, columns 5 and 7 during the transport preferably into the plastids. All products of the cleavage of the preferred transit peptide shown in the last line of table V have preferably the N-terminal amino acid sequences QIA CSS or QIA EFQLTT in front of the start methionine of the protein mentioned in table II, application no. 12, columns 5 and 7. Other short amino acid sequences of an range of 1 to 20 amino acids preferable 2 to 15 amino acids, more preferable 3 to 10 amino acids most preferably 4 to 8 amino acids are also possible in front of the start methionine of the protein mentioned in table II, application no. 12, columns 5 and 7. In case of the amino acid sequence QIA CSS the three amino acids in front of the start methionine are stemming from the LIC (=ligatation independent cloning) cassette. Said short amino acid sequence is preferred in the case of the expression of E. coli genes. In case of the amino acid sequence QIA EFQLTT the six amino acids in front of the start methionine are stemming from the LIC cassette. Said short amino acid sequence is preferred in the case of the expression of S. cerevisiae genes. The skilled worker knows that other short sequences are also useful in the expression of the genes mentioned in table I, application no. 12, columns 5 and 7. Furthermore the skilled worker is aware of the fact that there is not a need for such short sequences in the expression of the genes.

[3166] Table V: Examples of transit peptides disclosed by von Heijne et al.: for the disclosure of the Table V see paragraphs [0030.2.0.0] above.

[3167] Alternatively to the targeting of the sequences shown in table II, application no. 12, columns 5 and 7 preferably of sequences in general encoded in the nucleus with the aid of the targeting sequences mentioned for example in table V alone or in combination with other targeting sequences preferably into the plastids, the nucleic acids of the invention can directly introduced into the plastidal genome. Therefore in a preferred embodiment the nucleic acid sequences shown in table I, application no. 12, columns 5 and 7 are directly introduced and expressed in plastids.

The term “introduced” in the context of this specification shall mean the insertion of a nucleic acid sequence into the organism by means of a “transfection”, “transduction” or preferably by “transformation”.
A plastid, such as a chloroplast, has been “transformed” by an exogenous (preferably foreign) nucleic acid sequence if nucleic acid sequence has been introduced into the plastid that means that this sequence has crossed the membrane or the membranes of the plastid. The foreign DNA may be integrated (covalently linked) into plastid DNA making up the genome of the plastid, or it may remain unintegrated (e.g., by including a chloroplast origin of replication). “Stably” integrated DNA sequences are those, which are inherited through plastid replication, thereby transferring new plastids, with the features of the integrated DNA sequence to the progeny.

[3168] for the disclosure of the paragraphs [0030.2.0.11] and [0030.3.0.11] see paragraphs [0030.2.0.0] and [0030.3.0.0] above.

[3169] For the inventive process it is of great advantage that by transforming the plastids the intraspecies specific transgene flow is blocked, because a lot of species such as corn, cotton and rice have a strict maternal inheritance of plastids. By placing the genes specified in table I, application no. 12, columns 5 and 7 or active fragments thereof in the plastids of plants, these genes will not be present in the pollen of said plants.

A further preferred embodiment of the invention relates to the use of so called “chloroplast localization sequences”, in which a first RNA sequence or molecule is capable of transporting or “chaperoning” a second RNA sequence, such as a RNA sequence transcribed from the sequences depicted in table 1, application no. 12, columns 5 and 7 or a sequence encoding a protein, as depicted in table II, application no. 12, columns 5 and 7, from an external environment inside a cell or outside a plastid into a chloroplast. In one embodiment the chloroplast localization signal is substantially similar or complementary to a complete or intact viroid sequence. The chloroplast localization signal may be encoded by a DNA sequence, which is transcribed into the chloroplast localization RNA. The term “viroid” refers to a naturally occurring single stranded RNA molecule (Flores, C R Acad Sci III. 2001 October; 324(10): 943-52). Viroids usually contain about 200-500 nucleotides and generally exist as circular molecules. Examples of viroids that contain chloroplast localization signals include but are not limited to ASBVd, PLMVd, CChMVd and ELVd. The viroid sequence or a functional part of it can be fused to the sequences depicted in table, 1, application no. 12, columns 5 and 7 or a sequence encoding a protein, as depicted in table II, application no. 12, columns 5 and 7 in such a manner that the viroid sequence transports a sequence transcribed from a sequence as depicted in table 1 application no. 12, columns 5 and 7 or a sequence encoding a protein as depicted in table II, application no. 12, columns 5 and 7 into the chloroplasts. A preferred embodiment uses a modified ASBVd (Navarro et al., Virology. 2000 Mar. 1; 268(1): 218-25).
In a further specific embodiment the protein to be expressed in the plastids such as the proteins depicted in table II, application no. 12, columns 5 and 7 are encoded by different nucleic acids. Such a method is disclosed in WO 2004/040973, which shall be incorporated by reference. WO 2004/040973 teaches a method, which relates to the translocation of an RNA corresponding to a gene or gene fragment into the chloroplast by means of a chloroplast localization sequence. The genes, which should be expressed in the plant or plants cells, are split into nucleic acid fragments, which are introduced into different compartments in the plant e.g. the nucleus, the plastids and/or mitochondria. Additionally plant cells are described in which the chloroplast contains a ribozyme fused at one end to an RNA encoding a fragment of a protein used in the inventive process such that the ribozyme can trans-splice the translocated fusion RNA to the RNA encoding the gene fragment to form and as the case may be reunite the nucleic acid fragments to an intact mRNA encoding a functional protein for example as disclosed in table II, application no. 12, columns 5 and 7.

[3170] In a preferred embodiment of the invention the nucleic acid sequences as shown in table I, application no. 12, columns 5 and 7 used in the inventive process are transformed into plastids, which are metabolical active. Those plastids should preferably maintain at a high copy number in the plant or plant tissue of interest, most preferably the chloroplasts found in green plant tissues, such as leaves or cotyledons or in seeds.

[3171] For a good expression in the plastids the nucleic acid sequences as shown in table I, application no. 12, columns 5 and 7 are introduced into an expression cassette using a preferably a promoter and terminator, which are active in plastids preferably a chloroplast promoter. Examples of such promoters include the psbA promoter from the gene from spinach or pea, the rbcL promoter, and the atpB promoter from corn.

[3172] for the disclosure of the paragraphs [0031.0.0.11] and [0032.0.0.11] see paragraphs [0031.0.0.0] and [0032.0.0.0] above.

[3173] Advantageously the process for the production of the fine chemical leads to an enhanced production of the fine chemical. The terms “enhanced” or “increase” mean at least a 10%, 20%, 30%, 40% or 50%, preferably at least 60%, 70%, 80%, 90% or 100%, more preferably 150%, 200%, 300%, 400% or 500% higher production of the fine chemical in comparison to the reference as defined below, e.g. that means in comparison to an organism without the aforementioned modification of the activity of a protein as shown in table II, application no. 12, column 3. Preferably the modification of the activity of a protein as shown in table II, application no. 12, column 3 or their combination can be achieved by joining the protein to a transit peptide.

[3174] Surprisingly it was found, that the transgenic expression of the E. coli proteins shown in table II, application no. 12, column 3 in plastids of a plant such as Arabidopsis thaliana for example through the linkage to at least one targeting sequence—for example as mentioned in table V—conferred an increase in the respective fine chemical indicated in column 6 “metabolite” of each table I to IV in the transformed plant.

Surprisingly it was found, that the transgenic expression of the E. coli protein b2344 in combination with a plastidal targeting sequence in Arabidopsis thaliana conferred an increase in lutein.

[3175] for the disclosure of this paragraph see paragraph [0035.0.0.0] above.

[3176] The sequence of b2344 (Accession number PIR:F65007) from Escherichia coli has been published in Blattner et al., Science 277 (5331), 1453-1474 (1997), and its activity is being defined as “outer membrane porin, transport of long-chain fatty acids, sensitivity to phage T2”. Accordingly, in one embodiment, the process of the present invention comprises the use of a “outer membrane porin, transport of long-chain fatty acids, sensitivity to phage T2” or its homolog, e.g. as shown herein, for the production of the fine chemical, meaning of lutein, in particular for increasing the amount of lutein in free or bound form in an organism or a part thereof, as mentioned. In one embodiment, in the process of the present invention the activity of a b2344 protein is increased or generated, e.g. from Escherichia coli or a homolog thereof, preferably linked at least to one transit peptide as mentioned for example in table V.

In another embodiment, in the process of the present invention the activity of a b2344 protein is increased or generated in a subcellular compartment of the organism or organism cell such as in an organelle like a plastid or mitochondria.

[3177] In one embodiment, the homolog of the b2344 is a homolog having said activity and being derived from bacteria. In one embodiment, the homolog of the b2344 is a homolog having said activity and being derived from Proteobacteria. In one embodiment, the homolog of the b2344 is a homolog having said activity and being derived from Gammaproteobacteria. In one embodiment, the homolog of the b2344 is a homolog having said activity and being derived from Enterobacteriales. In one embodiment, the homolog of the b2344 is a homolog having said activity and being derived from Enterobacteriaceae. In one embodiment, the homolog of the b2344 is a homolog having said activity and being derived from Escherichia, preferably from Escherichia coli.

[3178] Homologs of the polypeptide disclosed in table II, application no. 12, column 3 may be the polypeptides encoded by the nucleic acid molecules indicated in table I, application no. 12, column 7, resp., or may be the polypeptides indicated in table II, application no. 12, column 7, resp.

[3179] for the disclosure of this paragraph see paragraph [0038.0.0.0] above.

[3180] In accordance with the invention, a protein or polypeptide has the “activity of an protein as shown in table II, application no. 12, column 3” if its de novo activity, or its increased expression directly or indirectly leads to an increased in the level of the fine chemical indicated in the respective line of table II, application no. 12, column 6 “metabolite” in the organism or a part thereof, preferably in a cell of said organism, more preferably in an organelle such as a plastid or mitochondria of said organism. The protein has the above mentioned activities of a protein as shown in table II, application no. 12, column 3, preferably in the event the nucleic acid sequences encoding said proteins is functionally joined to the nucleic acid sequence of a transit peptide. Throughout the specification the activity or preferably the biological activity of such a protein or polypeptide or an nucleic acid molecule or sequence encoding such protein or polypeptide is identical or similar if it still has the biological or enzymatic activity of a protein as shown in table II, application no. 12, column 3, or which has at least 10% of the original enzymatic activity, preferably 20%, particularly preferably 30%, most particularly preferably 40% in comparison to a protein as shown in the respective line of table II, application no. 12, column 3 of E. coli.

[3181] for the disclosure of the paragraphs [0040.0.0.11] to [0047.0.0.11] see paragraphs [0040.0.0.0] to [0047.0.0.0] above.

[3182] Preferably, the reference, control or wild type differs form the subject of the present invention only in the cellular activity, preferably of the plastidial activity of the polypeptide of the invention, e.g. as result of an increase in the level of the nucleic acid molecule of the present invention or an increase of the specific activity of the polypeptide of the invention, e.g. by or in the expression level or activity of an protein having the activity of a respective protein as shown in table II, application no. 12, column 3 its biochemical or genetical causes and the increased amount of the respective fine chemical.

[3183] for the disclosure of the paragraphs [0049.0.0.11] to [0051.0.0.11] see paragraphs [0049.0.0.0] to [0051.0.0.0] above.

[3184] For example, the molecule number or the specific activity of the polypeptide or the nucleic acid molecule may be increased. Larger amounts of the fine chemical can be produced if the polypeptide or the nucleic acid of the invention is expressed de novo in an organism lacking the activity of said protein, preferably the nucleic acid molecules as mentioned in table I, application no. 12, columns 5 and 7 alone or preferably in combination with a transit peptide for example as mentioned in table V or in another embodiment by introducing said nucleic acid molecules into an organelle such as an plastid or mitochondria in the transgenic organism. However, it is also possible to modify the expression of the gene which is naturally present in the organisms, for example by integrating a nucleic acid sequence, encoding a plastidic targeting sequence in front (5 prime) of the coding sequence, leading to a functional preprotein, which is directed for example to the plastids.

[3185] for the disclosure of the paragraphs [0053.0.0.11] to [0058.0.0.11] see paragraphs [0053.0.0.0] to [0058.0.0.0] above.

[3186] In case the activity of the Escherichia coli protein b2344 or its homologs, e.g. a “outer membrane porin, transport of long-chain fatty acids, sensitivity to phage T2” is increased, advantageously in an organelle such as a plastid or mitochondria, preferably, an increase of the fine chemical, preferably of free lutein between 39% and 115% or more is conferred.

[3187] In one embodiment, the activity of the Escherichia coli protein b2344 or its homologs, e.g. a outer membrane porin, transport of long-chain fatty acids, sensitivity to phage T2″ is advantageously increased in an organelle such as a plastid or mitochondria, preferably conferring an increase of the fine chemical indicated in column 6 “metabolites” for application no. 12 in any one of Tables I to IV and of further carotenoids, preferably xanthophylls, in particular zeaxanthin.

[3188] for the disclosure of the paragraphs [0061.0.0.11] and [0062.0.0.11] see paragraphs [0061.0.0.0] and [0062.0.0.0] above.

[3189] A protein having an activity conferring an increase in the amount or level of the fine chemical, preferably upon targeting to the plastids, has in one embodiment the structure of the polypeptide described herein, in particular of the polypeptides comprising the consensus sequence shown in table IV, application no. 12, column 7 or of the polypeptide as shown in the amino acid sequences as disclosed in table II, application no. 12, columns 5 and 7 or the functional homologues thereof as described herein, or is encoded by the nucleic acid molecule characterized herein or the nucleic acid molecule according to the invention, for example by the nucleic acid molecule as shown in table I, application no. 12, columns 5 and 7 or its herein described functional homologues and has the herein mentioned activity.

[3190] For the purposes of the present invention, the reference to the fine chemical, e.g. to the term “lutein”, also encompasses the corresponding salt, ester, e.g. the mono- or diesters of fatty acids, e.g. lutein dipalmitates, dimyristates or monomyristates, or lutein bound to proteins, e.g. lipoproteins or e.g. tuberlin, or bound to other compounds.

Lutein exist in a matrix in foods. Thus, in one embodiment, the fine chemical produced according to the process of the invention is a matrix comprising inter alia lipids, in particular cholesterol, phospholipid, and/or triglycerides, and lutein.

[3191] for the disclosure of the paragraphs [0065.0.0.11] and [0066.0.0.11] see paragraphs [0065.0.0.0] and [0066.0.0.0] above.

[3192] In one embodiment, the process of the present invention comprises one or more of the following steps
[3193] a) stabilizing a protein conferring the increased expression of a protein encoded by the nucleic acid molecule of the invention or of the polypeptide of the invention, e.g. of a polypeptide having the activity of a protein as indicated in table II, application no. 12, columns 5 and 7 or its homologs activity having herein-mentioned lutein increasing activity; and/or
[3194] b) stabilizing a mRNA conferring the increased expression of a protein encoded by the nucleic acid molecule of the invention, which is in the sense of the invention a fusion of a nucleic acid sequence encoding a transit peptide and of a nucleic acid sequence as shown in table I, application no. 12, columns 5 and 7, e.g. a nucleic acid sequence encoding a polypeptide having the activity of a protein as indicated in table II, application no. 12, columns 5 and 7 or its homologs activity or of a mRNA encoding the polypeptide of the present invention having herein-mentioned lutein increasing activity; and/or
[3195] c) increasing the specific activity of a protein conferring the increased expression of a protein encoded by the nucleic acid molecule of the invention or of the polypeptide of the present invention having herein-mentioned lutein increasing activity, e.g. of a polypeptide having the activity of a protein as indicated in table II, application no. 12, columns 5 and 7 or its homologs activity, or decreasing the inhibitory regulation of the polypeptide of the invention; and/or
[3196] d) generating or increasing the expression of an endogenous or artificial transcription factor mediating the expression of a protein conferring the increased expression of a protein encoded by the nucleic acid molecule of the invention or of the polypeptide of the invention having herein-mentioned lutein increasing activity, e.g. of a polypeptide having the activity of a protein as indicated in table II, application no. 12, columns 5 and 7 or its homologs activity; and/or
[3197] e) stimulating activity of a protein conferring the increased expression of a protein encoded by the nucleic acid molecule of the present invention or a polypeptide of the present invention having herein-mentioned lutein increasing activity, e.g. of a polypeptide having the activity of a protein as indicated in table II, application no. 12, columns 5 and 7 or its homologs activity, by adding one or more exogenous inducing factors to the organisms or parts thereof; and/or
[3198] f) expressing a transgenic gene encoding a protein conferring the increased expression of a polypeptide encoded by the nucleic acid molecule of the present invention or a polypeptide of the present invention, having herein-mentioned lutein increasing activity, e.g. of a polypeptide having the activity of a protein as indicated in table II, application no. 12, columns 5 and 7 or its homologs activity, and/or
[3199] g) increasing the copy number of a gene conferring the increased expression of a nucleic acid molecule encoding a polypeptide encoded by the nucleic acid molecule of the invention or the polypeptide of the invention having herein-mentioned lutein increasing activity, e.g. of a polypeptide having the activity of a protein as indicated in table II, application no. 12, columns 5 and 7 or its homologs activity; and/or
[3200] h) increasing the expression of the endogenous gene encoding the polypeptide of the invention, e.g. a polypeptide having the activity of a protein as indicated in table II, application no. 12, columns 5 and 7 or its homologs activity, by adding positive expression or removing negative expression elements, e.g. homologous recombination can be used to either introduce positive regulatory elements like for plants the 35S enhancer into the promoter or to remove repressor elements form regulatory regions. Further gene conversion methods can be used to disrupt repressor elements or to enhance to activity of positive elements. Positive elements can be randomly introduced in plants by T-DNA or transposon mutagenesis and lines can be identified in which the positive elements have be integrated near to a gene of the invention, the expression of which is thereby enhanced; and/or
[3201] i) modulating growth conditions of an organism in such a manner, that the expression or activity of the gene encoding the protein of the invention or the protein itself is enhanced for example microorganisms or plants can be grown for example under a higher temperature regime leading to an enhanced expression of heat shock proteins, which can lead an enhanced fine chemical production; and/or
[3202] j) selecting of organisms with especially high activity of the proteins of the invention from natural or from mutagenized resources and breeding them into the target organisms, eg the elite crops; and/or
[3203] k) directing a protein encoded by the nucleic acid molecule of the invention or of the polypeptide of the present invention having herein-mentioned lutein increasing activity, e.g. of polypeptide having the activity of a protein as indicated in table II, application no. 12, columns 5 and 7 or its homologs activity, to the plastids by the addition of a plastidial targeting sequence; and/or
[3204] l) generating the expression of a protein encoded by the nucleic acid molecule of the invention or of the polypeptide of the present invention having herein-mentioned lutein increasing activity, e.g. of a polypeptide having the activity of a protein as indicated in table II, application no. 12, columns 5 and 7 or its homologs activity in plastids by the stable or transient transformation advantageously stable transformation of organelles preferably plastids with an inventive nucleic acid sequence preferably in form of an expression cassette containing said sequence leading to the plastidial expression of the nucleic acids or polypeptides of the invention; and/or
[3205] m) generating the expression of a protein encoded by the nucleic acid molecule of the invention or of the polypeptide of the present invention having herein-mentioned lutein increasing activity, e.g. of a polypeptide having the activity of a protein as indicated in table II, application no. 12, columns 5 and 7 or its homologs activity in plastids by integration of a nucleic acid of the invention into the plastidal genome under control of preferable a plastidial promoter.

[3206] Preferably, said mRNA is the nucleic acid molecule of the present invention and/or the protein conferring the increased expression of a protein encoded by the nucleic acid molecule of the present invention alone or link to a transit nucleic acid sequence or transit peptide encoding nucleic acid sequence or the polypeptide having the herein mentioned activity, e.g. conferring the increase of the respective fine chemical as indicated in column 6 of application no. 12 in Table I to IV, resp., after increasing the expression or activity of the encoded polypeptide preferably in organelles such as plastids or having the activity of a polypeptide having an activity as the protein as shown in table II, application no. 12, column 3 or its homologs. Preferably the increase of the fine chemical takes place in plastids.

[3207] for the disclosure of the paragraphs [0069.0.0.11] to [0079.0.0.11] see paragraphs [0069.0.0.0] to [0079.0.0.0] above.

[3208] The activation of an endogenous polypeptide having above-mentioned activity, e.g. having the activity of a protein as shown in table II, application no. 12, column 3 or of the polypeptide of the invention, e.g. conferring the increase of the respective fine chemical after increase of expression or activity in the cytsol and/or in an organelle like a plastid, preferentially in the plastid, can also be increased by introducing a synthetic transcription factor, which binds close to the coding region of the gene encoding the protein as shown in table II, application no. 12, column 3 and activates its transcription. A chimeric zinc finger protein can be constructed, which comprises a specific DNA-binding domain and an activation domain as e.g. the VP16 domain of Herpes Simplex virus. The specific binding domain can bind to the regulatory region of the gene encoding the protein as shown in table II, application no. 12, column 3. The expression of the chimeric transcription factor in a organism, in particular in a plant, leads to a specific expression of the protein as shown in table II, application no. 12, column 3, see e.g. in WO01/52620, Oriz, Proc. Natl. Acad. Sci. USA, 2002, Vol. 99, 13290 or Guan, Proc. Natl. Acad. Sci. USA, 2002, Vol. 99, 13296.

[3209] for the disclosure of the paragraphs [0081.0.0.11] to [0084.0.0.11] see paragraphs [0081.0.0.0] to [0084.0.0.0] above.

[3210] Owing to the introduction of a gene or a plurality of genes conferring the expression of the nucleic acid molecule of the invention or the nucleic acid molecule used in the method of the invention or the polypeptide of the invention or the polypeptide used in the method of the invention as described below, for example the nucleic acid construct mentioned below into an organism alone or in combination with other genes, it is possible not only to increase the biosynthetic flux towards the end product, but also to increase, modify or create de novo an advantageous, preferably novel metabolites composition in the organism, e.g. an advantageous lutein containing composition comprising a higher content of (from a viewpoint of nutritional physiology limited), carotenoids, e.g. xanthophylls, in particular lutein, e.g. in combination with fatty acid(s), dietary oil(s), such as corn oil, and/or triglycerides, in particular medium-chain (e.g. C₄ to C₁₈-, in particular C₆ to C₁₄—) triglycerides, lipoproteins, e.g. HDL and/or VLDL, micelles, clathrate complexes, e.g. conjugated with bile salts, chylomicrons, chylomicron remnants, tuberlin and/or other carotenoids, e.g. xanthophylls, in particular zeaxanthin It can also be advantageous to increase the level of a metabolic precursor of lutein in the organism or part thereof, e.g. of phytoene, lycopene, alpha-carotene. It can also be advantageous owing to the introduction of a gene or a plurality of genes conferring the expression of a inhibitory nucleic acid molecule, e.g. for a gene k.o., e.g. a iRNA or a antisense nucleic acid, to decrease the level of production of neoxanthin or one or more precursor thereof, e.g. vialastaxanthin, zeaxanthin, and/or beta-carotene as this might increase the level of lycopene to be provided for the production of lutein according to method of present invention.

Depending on the choice of the organism used for the process according to the present invention, for example a microorganism or a plant, compositions or mixtures of various carotenoids and lutein can be produced.

[3211] for the disclosure of this paragraph see paragraph [0086.0.0.0] above.

[3212] By influencing the metabolism thus, it is possible to produce, in the process according to the invention, further advantageous compounds. Examples of such compounds are further carotenoids, e.g. carotenes or xanthophylls, in particular ketocarotenoids, or hydrocarotenoids, e.g. beta-cryptoxanthin, zeaxanthin, astaxanthin, lycopene, alpha-carotene, or beta-carentene, or compounds for which lutein is a precursor compound or medium-chain (e.g C₄ to C₁₈-, in particular C₆ to C₁₄—) triglycerides, lipoproteins, e.g. HDL and/or VLDL, micelles, clathrate complexes, e.g. conjugated with bile salts, chylomicrons, chylomicron remnants, and/or tuberlin.

[3213] Accordingly, in one embodiment, the process according to the invention relates to a process, which comprises:
[3214] a) providing a non-human organism, preferably a microorganism, a non-human animal, a plant or animal cell, a plant or animal tissue or a plant, more preferably a microorganism, a plant or a plant tissue;
[3215] b) increasing the activity of a protein as shown in table II, application no. 12, column 3 or of a polypeptide being encoded by the nucleic acid molecule of the present invention and described below, e.g. conferring an increase of the respective fine chemical as indicated in any one of Tables I to IV, application no. 12, column 6 “metabolite” in the organism, preferably in the microorganism, the non-human animal, the plant or animal cell, the plant or animal tissue or the plant, more preferably a microorganism, a plant or a plant tissue, in the cytsol or in the plastids, preferentially in the plastids,
[3216] c) growing the organism, preferably the microorganism, the non-human animal, the plant or animal cell, the plant or animal tissue or the plant under conditions which permit the production of the respective fine chemical in the organism, preferably the microorganism, the plant cell, the plant tissue or the plant; and
[3217] d) if desired, recovering, optionally isolating, the respective free and/or bound the fine chemical as indicated in any one of Tables I to IV, application no. 12, column 6 “metabolite” and, optionally further free and/or bound carotenoids, in particular ketocarotenoids, or hydrocarotenoids, e.g. beta-cryptoxanthin, zeaxanthin, astaxanthin, lycopene, alpha-carotene, or beta-carotene, synthesized by the organism, the microorganism, the non-human animal, the plant or animal cell, the plant or animal tissue or the plant.

[3218] The organism, in particular the microorganism, non-human animal, the plant or animal cell, the plant or animal tissue or the plant is advantageously grown in such a way that it is not only possible to recover, if desired isolate the free or bound the respective fine chemical or the free and bound the respective fine chemical but as option it is also possible to produce, recover and, if desired isolate, other free or/and bound carotenoids, in particular ketocarotenoids, or hydrocarotenoids, e.g. beta-cryptoxanthin, zeaxanthin, astaxanthin, lycopene, alpha-carotene, or beta-carotene.

[3219] for the disclosure of the paragraphs [0090.0.0.11] to [0097.0.0.11] see paragraphs [0090.0.0.0] to [0097.0.0.0] above.

[3220] With regard to the nucleic acid sequence as depicted a nucleic acid construct which contains a nucleic acid sequence mentioned herein or an organism (=transgenic organism) which is transformed with said nucleic acid sequence or said nucleic acid construct, “transgene” means all those constructs which have been brought about by genetic manipulation methods, preferably in which either
[3221] a) the nucleic acid sequence as shown in table I, application no. 12, columns 5 and 7 or a derivative thereof, or
[3222] b) a genetic regulatory element, for example a promoter, which is functionally linked to the nucleic acid sequence as shown table I, application no. 12, columns 5 and 7 or a derivative thereof, or
[3223] c) (a) and (b)
   is/are not present in its/their natural genetic environment or has/have been modified by means of genetic manipulation methods, it being possible for the modification to be, by way of example, a substitution, addition, deletion, inversion or insertion of one or more nucleotide. “Natural genetic environment” means the natural chromosomal locus in the organism of origin or the presence in a genomic library. In the case of a genomic library, the natural, genetic environment of the nucleic acid sequence is preferably at least partially still preserved. The environment flanks the nucleic acid sequence at least on one side and has a sequence length of at least 50 bp, preferably at least 500 bp, particularly preferably at least 1000 bp, very particularly preferably at least 5000 bp.

[3224] The use of the nucleic acid sequence according to the invention or of the nucleic acid construct according to the invention for the generation of transgenic plants is therefore also subject matter of the invention. As mentioned above the inventive nucleic acid sequence consists advantageously of the nucleic acid sequences as depicted in the sequence protocol and disclosed in table I, application no. 12, columns 5 and 7 joined to a nucleic acid sequence encoding a transit peptide, or a targeting nucleic acid sequence which directs the nucleic acid sequences disclosed in table I, application no. 12, columns 5 and 7 to the organelle preferentially the plastids. Alternatively the inventive nucleic acids sequences consist advantageously of the nucleic acid sequences as depicted in the sequence protocol and disclosed in table I, application no. 12, columns 5 and 7 joined preferably to a nucleic acids sequence mediating the stable integration of nucleic acids into the plastidial genome and optionally sequences mediating the transcription of the sequence in the plastidial compartment. A transient expression is in principal also desirable and possible.

[3225] for the disclosure of this paragraph see paragraph [0100.0.0.0] above.

[3226] In an advantageous embodiment of the invention, the organism takes the form of a plant whose lutein content is modified advantageously owing to the nucleic acid molecule of the present invention expressed. This is important for plant breeders since, for example, the nutritional value of plants for poultry is dependent on the abovementioned lutein as antioxidant source in feed. Further, this is also important for the production of cosmetic compostions since, for example, the antioxidant level of plant extracts is depending on the abovementioned lutein and the general amount of antioxidants e.g. as vitamins.

After the activity of the protein as shown in table II, application no. 12, column 3 has been increased or generated, or after the expression of nucleic acid molecule or polypeptide according to the invention has been generated or increased, the transgenic plant generated thus is grown on or in a nutrient medium or else in the soil and subsequently harvested.

[3227] for the disclosure of the paragraphs [0102.0.0.11] to [0110.0.0.11] see paragraphs [0102.0.0.0] to [0110.0.0.0] above.

[3228] In a preferred embodiment, the respective fine chemical as indicated in any one of Tables I to IV, application no. 12, column 6 “metabolite” (lutein) is produced in accordance with the invention and, if desired, is isolated. The production of further vitamins, provitamins or carotenoids, e.g. carotenes or xanthophylls, or mixtures thereof or mixtures with other compounds by the process according to the invention is advantageous.

Thus, the content of plant components and preferably also further impurities is as low as possible, and the abovementioned lutein are obtained in as pure form as possible. In these applications, the content of plant components advantageously amounts to less than 10%, preferably 1%, more preferably 0.1%, very especially preferably 0.01% or less.

[3229] In another preferred embodiment of the invention a combination of the increased expression of the nucleic acid sequence or the protein of the invention together with the transformation of a protein or polypeptide or a compound, which functions as a sink for the desired fine chemical, for example lutein in the organism, is useful to increase the production of the respective fine chemical (as indicated in any one of Tables I to IV, application no. 12, column 6 “metabolite”).

[3230] In the case of the fermentation of microorganisms, the abovementioned lutein may accumulate in the medium and/or the cells. If microorganisms are used in the process according to the invention, the fermentation broth can be processed after the cultivation. Depending on the requirement, all or some of the biomass can be removed from the fermentation broth by separation methods such as, for example, centrifugation, filtration, decanting or a combination of these methods, or else the biomass can be left in the fermentation broth. The fermentation broth can subsequently be reduced, or concentrated, with the aid of known methods such as, for example, rotary evaporator, thin-layer evaporator, falling film evaporator, by reverse osmosis or by nanofiltration. Afterwards advantageously further compounds for formulation can be added such as corn starch or silicates. This concentrated fermentation broth advantageously together with compounds for the formulation can subsequently be processed by lyophilization, spray drying, spray granulation or by other methods. Preferably the respective fine chemical as indicated for application no. 12 in any one of Tables I to IV, column 6 “metabolite” or the lutein comprising compositions are isolated from the organisms, such as the microorganisms or plants or the culture medium in or on which the organisms have been grown, or from the organism and the culture medium, in the known manner, for example via extraction, distillation, crystallization, chromatography or a combination of these methods. These purification methods can be used alone or in combination with the aforementioned methods such as the separation and/or concentration methods.

[3231] Transgenic plants which comprise the lutein, synthesized in the process according to the invention can advantageously be marketed directly without there being any need for lutein synthesized to be isolated. Plants for the process according to the invention are listed as meaning intact plants and all plant parts, plant organs or plant parts such as leaf, stem, seeds, root, tubers, anthers, fibers, root hairs, stalks, embryos, calli, cotelydons, petioles, harvested material, plant tissue, reproductive tissue and cell cultures which are derived from the actual transgenic plant and/or can be used for bringing about the transgenic plant. In this context, the seed comprises all parts of the seed such as the seed coats, epidermal cells, seed cells, endosperm or embryonic tissue.

The site of lutein biosynthesis in plants is, inter alia, the leaf tissue so that the isolation of leafs makes sense. However, this is not limiting, since the expression may also take place in a tissue-specific manner in all of the remaining parts of the plant, in particular in fat-containing seeds. A further preferred embodiment therefore relates to a seed-specific isolation of lutein.
However, the respective fine chemical as indicated for application no. 12 in any one of Tables I to IV, column 6, “metabolite” produced in the process according to the invention can also be isolated from the organisms, advantageously plants, in the form of their oils, fats, lipids as extracts, e.g. ether, alcohol, or other organic solvents or water containing extract and/or free lutein. The respective fine chemical produced by this process can be obtained by harvesting the organisms, either from the crop in which they grow, or from the field. This can be done via pressing or extraction of the plant parts, preferably the plant seeds. To increase the efficiency of oil extraction it is beneficial to clean, to temper and if necessary to hull and to flake the plant material especially the seeds. E.g the oils, fats, lipids, extracts, e.g. ether, alcohol, or other organic solvents or water containing extract and/or free lutein can be obtained by what is known as cold beating or cold pressing without applying heat. To allow for greater ease of disruption of the plant parts, specifically the seeds, they are previously comminuted, steamed or roasted. The seeds, which have been pretreated in this manner can subsequently be pressed or extracted with solvents such as preferably warm hexane. The solvent is subsequently removed. In the case of microorganisms, the latter are, after harvesting, for example extracted directly without further processing steps or else, after disruption, extracted via various methods with which the skilled worker is familiar. In this manner, more than 96% of the compounds produced in the process can be isolated. Thereafter, the resulting products are processed further, i.e. degummed and/or refined. In this process, substances such as the plant mucilages and suspended matter are first removed. What is known as desliming can be affected enzymatically or, for example, chemico-physically by addition of acid such as phosphoric acid.
Because lutein in microorganisms may be localized intracellularly, their recovery essentials comes down to the isolation of the biomass. Well-establisthed approaches for the harvesting of cells include filtration, centrifugation and coagulation/flocculation as described herein.

[3232] Lutein can for example be analyzed advantageously via HPLC, LC or GC separation methods and detected by MS oder MSMS methods. The unambiguous detection for the presence of Lutein containing products can be obtained by analyzing recombinant organisms using analytical standard methods: GC, GC-MS, or TLC, as described on several occasions by Christie and the references therein (1997, in: Advances on Lipid Methodology, Fourth Edition: Christie, Oily Press, Dundee, 119-169; 1998, Gaschromatographie-Massenspektrometrie-Verfahren [Gas chromatography/mass spectrometric methods], Lipide 33:343-353). The material to be analyzed can be disrupted by sonication, grinding in a glass mill, liquid nitrogen and grinding, cooking, or via other applicable methods; see also Biotechnology of Vitamins, Pigments and Growth Factors, Edited by Erik J. Vandamme, London, 1989, p. 96 to 103.

[3233] In a preferred embodiment, the present invention relates to a process for the production of the respective fine chemical as indicated for application no. 12 in any one of Tables I to IV, column 6 “metabolite”, comprising or generating in an organism or a part thereof, preferably in a cell compartment such as a plastid or mitochondria, the expression of at least one nucleic acid molecule comprising a nucleic acid molecule selected from the group consisting of:
[3234] a) nucleic acid molecule encoding, preferably at least the mature form, of the polypeptide shown in table II, application no. 12, columns 5 and 7 or a fragment thereof, which confers an increase in the amount of the respective fine chemical in an organism or a part thereof;
[3235] b) nucleic acid molecule comprising, preferably at least the mature form, of the nucleic acid molecule shown in table I, application no. 12, columns 5 and 7;
[3236] c) nucleic acid molecule whose sequence can be deduced from a polypeptide sequence encoded by a nucleic acid molecule of (a) or (b) as result of the degeneracy of the genetic code and conferring an increase in the amount of the respective fine chemical in an organism or a part thereof;
[3237] d) nucleic acid molecule encoding a polypeptide which has at least 50% identity with the amino acid sequence of the polypeptide encoded by the nucleic acid molecule of (a) to (c) and conferring an increase in the amount of the respective fine chemical in an organism or a part thereof;
[3238] e) nucleic acid molecule which hybridizes with a nucleic acid molecule of (a) to (c) under stringent hybridisation conditions and conferring an increase in the amount of the respective fine chemical in an organism or a part thereof;
[3239] f) nucleic acid molecule encoding a polypeptide, the polypeptide being derived by substituting, deleting and/or adding one or more amino acids of the amino acid sequence of the polypeptide encoded by the nucleic acid molecules (a) to (d), preferably to (a) to (c) and conferring an increase in the amount of the respective fine chemical in an organism or a part thereof;
[3240] g) nucleic acid molecule encoding a fragment or an epitope of a polypeptide which is encoded by one of the nucleic acid molecules of (a) to (e), preferably to (a) to (c) and conferring an increase in the amount of the respective fine chemical in an organism or a part thereof;
[3241] h) nucleic acid molecule comprising a nucleic acid molecule which is obtained by amplifying nucleic acid molecules from a cDNA library or a genomic library using the primers shown in table III, application no. 12, column 7 and conferring an increase in the amount of the respective fine chemical in an organism or a part thereof;
[3242] i) nucleic acid molecule encoding a polypeptide which is isolated, e.g. from an expression library, with the aid of monoclonal antibodies against a polypeptide encoded by one of the nucleic acid molecules of (a) to (h), preferably to (a) to (c), and conferring an increase in the amount of the respective fine chemical in an organism or a part thereof;
[3243] j) nucleic acid molecule which encodes a polypeptide comprising the consensus sequence shown in table IV, application no. 12, column 7 and conferring an increase in the amount of the respective fine chemical in an organism or a part thereof;
[3244] k) nucleic acid molecule comprising one or more of the nucleic acid molecule encoding the amino acid sequence of a polypeptide encoding a domain of the polypeptide shown in table II, application no. 12, columns 5 and 7 and conferring an increase in the amount of the fine chemical in an organism or a part thereof; and
[3245] l) nucleic acid molecule which is obtainable by screening a suitable library under stringent conditions with a probe comprising one of the sequences of the nucleic acid molecule of (a) to (k), preferably to (a) to (c), or with a fragment of at least 15 nt, preferably 20 nt, 30 nt, 50 nt, 100 nt, 200 nt or 500 nt of the nucleic acid molecule characterized in (a) to (k), preferably to (a) to (c), and conferring an increase in the amount of the respective fine chemical in an organism or a part thereof;
   or which comprises a sequence which is complementary thereto.

[3246] In one embodiment, the nucleic acid molecule used in the process of the invention distinguishes over the sequence indicated in table I A, application no. 12, columns 5 and 7 by one or more nucleotides. In one embodiment, the nucleic acid molecule used in the process of the invention does not consist of the sequence indicated in table I A, application no. 12, columns 5 and 7. In one embodiment, the nucleic acid molecule used in the process of the invention is less than 100%, 99.999%, 99.99%, 99.9% or 99% identical to a sequence indicated in table I A, application no. 12, columns 5 and 7. In another embodiment, the nucleic acid molecule does not encode a polypeptide of a sequence indicated in table II A, application no. 12, columns 5 and 7.

[3247] In one embodiment, the nucleic acid molecule used in the process of the invention distinguishes over the sequence indicated in table I B, application no. 12, columns 5 and 7, by one or more nucleotides. In one embodiment, the nucleic acid molecule used in the process of the invention does not consist of the sequence indicated in table I B, application no. 12, columns 5 and 7. In one embodiment, the nucleic acid molecule used in the process of the invention is less than 100%, 99.999%, 99.99%, 99.9% or 99% identical to a sequence indicated in table I B, application no. 12, columns 5 and 7. In another embodiment, the nucleic acid molecule does not encode a polypeptide of a sequence indicated in table II B, application no. 12, columns 5 and 7.

[3248] In one embodiment, the nucleic acid molecule used in the process distinguishes over the sequence shown in table I, application no. 12, columns 5 and 7 by one or more nucleotides or does not consist of the sequence shown in table I, application no. 12, columns 5 and 7. In one embodiment, the nucleic acid molecule of the present invention is less than 100%, 99.999%, 99.99%, 99.9% or 99% identical to the sequence shown in table I, application no. 12, columns 5 and 7. In another embodiment, the nucleic acid molecule does not encode a polypeptide of the sequence shown in table II, application no. 12, columns 5 and 7.

[3249] for the disclosure of the paragraphs [0118.0.0.11] to [0120.0.0.11] see paragraphs [0118.0.0.0] to [0120.0.0.0] above.

[3250] The expression of nucleic acid molecules with the sequence shown in table I, application no. 12, columns 5 and 7, or nucleic acid molecules which are derived from the amino acid sequences shown in table II, application no. 12, columns 5 and 7 or from polypeptides comprising the consensus sequence shown in table IV, application no. 12, column 7, or their derivatives or homologues encoding polypeptides with the enzymatic or biological activity of a protein as shown in table II, application no. 12, column 3, and conferring an increase of the respective fine chemical (column 6 of application no. 12 in any one of Tables I to IV) after increasing its plastidic expression and/or specific activity in the plastids is advantageously increased in the process according to the invention by expression either in the cytsol or in an organelle such as a plastid or mitochondria or both, preferably in plastids.

[3251] for the disclosure of this paragraph see paragraph [0122.0.0.0] above.

[3252] Nucleic acid molecules, which are advantageous for the process according to the invention and which encode polypeptides with the activity of a protein as shown in table II, application no. 12, column 3 can be determined from generally accessible databases.

[3253] for the disclosure of this paragraph see paragraph [0124.0.0.0] above.

[3254] The nucleic acid molecules used in the process according to the invention take the form of isolated nucleic acid sequences, which encode polypeptides with the activity of the proteins as shown in table II, application no. 12, column 3 and which confer an increase in the level of the respective fine chemical indicated in table II, application no. 12, column 6 by being expressed either in the cytsol or in an organelle such as a plastid or mitochondria or both, preferably in plastids, and the gene product being localized in the plastid and other parts of the cell or in the plastid as described above.

[3255] for the disclosure of the paragraphs [0126.0.0.11] to [0133.0.0.11] see paragraphs [0126.0.0.0] to [0133.0.0.0] above.

[3256] Production strains which are also advantageously selected in the process according to the invention are microorganisms selected from the group of green algae, like Spongioccoccum exentricum, Chlorella sorokiniana (pyrenoidosa, 7-11-05), or algae of the genus Haematococcus, Phaedactylum tricornatum, Volvox or Dunaliella or form the group of fungi like fungi belonging to the Daccrymycetaceae family, or non-photosynthetic bacteria, like methylotrophs, flavobacteria, actinomycetes, like streptomyces chrestomyceticus, Mycobacteria like Mycobacterim phlei, Rhodobacter capsulatus, or Brevibacterium linens, Dunaliella spp., Phaffia rhodozyma, Phycomyces sp., Rhodotorula spp. Thus, the invention also contemplates embodiments in which a host lacks lutein or lutein precursors, such as the vinca. In a plant of the latter type, the inserted DNA includes genes that code for proteins producing lutein precursors (compounds that can be converted biologically into a compound with lutein activity) and one or more modifying enzymes which were originally absent in such a plant.

The invention also contemplates embodiments in which the lutein or lutein precursor compounds in the production of the respective fine chemical, are present in a photosynthetic active organisms chosen as the host; for example, cyanobacteria, moses, algae or plants which, even as a wild type, are capable of producing carotenoids.

[3257] However, it is also possible to use artificial sequences, which differ in one or more bases from the nucleic acid sequences found in organisms, or in one or more amino acid molecules from polypeptide sequences found in organisms, in particular from the polypeptide sequences shown in table II, application no. 12, columns 5 and 7 or the functional homologues thereof as described herein, preferably conferring above-mentioned activity, i.e. conferring an increase of the respective fine chemical after increasing its plastidic activity, e.g. after increasing the activity of a protein as shown in table II, application no. 12, column 3 by—for example—expression either in the cytsol or in an organelle such as a plastid or mitochondria or both, preferably in plastids and the gene product, e.g. the polypeptide, being localized in the plastid and other parts of the cell or in the plastid as described above.

[3258] for the disclosure of the paragraphs [0135.0.0.11] to [0140.0.0.11] see paragraphs [0135.0.0.0] to [0140.0.0.0] above.

[3259] Synthetic oligonucleotide primers for the amplification, e.g. as shown in table III, application no. 12, column 7, by means of polymerase chain reaction can be generated on the basis of a sequence shown herein, for example the sequence shown in table I, application no. 12, columns 5 and 7 or the sequences derived from table II, application no. 12, columns 5 and 7.

[3260] Moreover, it is possible to identify conserved regions from various organisms by carrying out protein sequence alignments with the polypeptide used in the process of the invention, in particular with sequences of the polypeptide of the invention, from which conserved regions, and in turn, degenerate primers can be derived. Conserved regions are those, which show a very little variation in the amino acid in one particular position of several homologs from different origin. The consensus sequence shown in table IV, application no. 12, column 7 is derived from said alignments.

[3261] Degenerated primers can then be utilized by PCR for the amplification of fragments of novel proteins having above-mentioned activity, e.g. conferring the increase of the fine chemical after increasing the expression or activity or having the activity of a protein as shown in table II, application no. 12, column 3 or further functional homologs of the polypeptide of the invention from other organisms.

[3262] for the disclosure of the paragraphs [0144.0.0.11] to [0151.0.0.11] see paragraphs [0144.0.0.0] to [0151.0.0.0] above.

[3263] Polypeptides having above-mentioned activity, i.e. conferring the increase of the respective fine chemical indicated in table I, application no. 12, column 6, and being derived from other organisms, can be encoded by other DNA sequences which hybridize to the sequences shown in table I, application no. 12, columns 5 and 7, preferably of table I B, application no. 12, columns 5 and 7 under relaxed hybridization conditions and which code on expression for peptides having the respective fine chemical, i.e. lutein increasing activity, when expressed in a way that the gene product, e.g. the polypeptide, being localized in the plastid and other parts of the cell or in the plastid as described above.

[3264] for the disclosure of the paragraphs [0153.0.0.11] to [0158.0.0.11] see paragraphs [0153.0.0.0] to [0159.0.0.0] above.

[3265] Further, the nucleic acid molecule of the invention comprises a nucleic acid molecule, which is a complement of one of the nucleotide sequences of above mentioned nucleic acid molecules or a portion thereof. A nucleic acid molecule which is complementary to one of the nucleotide sequences shown in table I, application no. 12, columns 5 and 7, preferably shown in table I B, application no. 12, columns 5 and 7 is one which is sufficiently complementary to one of the nucleotide sequences shown in table I, application no. 12, columns 5 and 7, preferably shown in table I B, application no. 12, columns 5 and 7 such that it can hybridize to one of the nucleotide sequences shown in table I, application no. 12, columns 5 and 7, preferably shown in table I B, application no. 12, columns 5 and 7, thereby forming a stable duplex. Preferably, the hybridisation is performed under stringent hybridization conditions. However, a complement of one of the herein disclosed sequences is preferably a sequence complement thereto according to the base pairing of nucleic acid molecules well known to the skilled person. For example, the bases A and G undergo base pairing with the bases T and U or C, resp. and visa versa. Modifications of the bases can influence the base-pairing partner.

[3266] The nucleic acid molecule of the invention comprises a nucleotide sequence which is at least about 30%, 35%, 40% or 45%, preferably at least about 50%, 55%, 60% or 65%, more preferably at least about 70%, 80%, or 90%, and even more preferably at least about 95%, 97%, 98%, 99% or more homologous to a nucleotide sequence shown in table I, application no. 12, columns 5 and 7, preferably shown in table I B, application no. 12, columns 5 and 7, or a portion thereof and preferably has above mentioned activity, in particular having a respective fine chemical increasing activity after increasing the activity or an activity of a gene product as shown in table II, application no. 12, column 3 by for example expression either in the cytsol or in an organelle such as a plastid or mitochondria or both, preferably in plastids, and the gene product, e.g. the polypeptide, being localized in the plastid and other parts of the cell or in the plastid as described above.

[3267] The nucleic acid molecule of the invention comprises a nucleotide sequence which hybridizes, preferably hybridizes under stringent conditions as defined herein, to one of the nucleotide sequences shown in table I, application no. 12, columns 5 and 7, preferably shown in table I B, application no. 12, columns 5 and 7, or a portion thereof and encodes a protein having above-mentioned activity, e.g. conferring of a lutein or triglycerides, lipids, oils and/or fats containing lutein increase by for example expression either in the cytsol or in an organelle such as a plastid or mitochondria or both, preferably in plastids, and optionally, the activity of a protein as shown in table II, application no. 12, column 3, and the gene product, e.g. the polypeptide, being localized in the plastid and other parts of the cell or in the plastid as described above.

[3268] Moreover, the nucleic acid molecule of the invention can comprise only a portion of the coding region of one of the sequences shown in table I, application no. 12, columns 5 and 7, preferably shown in table I B, application no. 12, columns 5 and 7, for example a fragment which can be used as a probe or primer or a fragment encoding a biologically active portion of the polypeptide of the present invention or of a polypeptide used in the process of the present invention, i.e. having above-mentioned activity, e.g. conferring an increase of the respective fine chemical indicated in Table I, application no. 12, column 6, if its activity is increased by for example expression either in the cytsol or in an organelle such as a plastid or mitochondria or both, preferably in plastids, and the gene product, e.g. the polypeptide, being localized in the plastid and other parts of the cell or in the plastid as described above. The nucleotide sequences determined from the cloning of the present protein-according-to-the-invention-encoding gene allows for the generation of probes and primers designed for use in identifying and/or cloning its homologues in other cell types and organisms. The probe/primer typically comprises substantially purified oligonucleotide. The oligonucleotide typically comprises a region of nucleotide sequence that hybridizes under stringent conditions to at least about 12, 15 preferably about 20 or 25, more preferably about 40, 50 or 75 consecutive nucleotides of a sense strand of one of the sequences set forth, e.g., in table I, application no. 12, columns 5 and 7, an anti-sense sequence of one of the sequences, e.g., set forth in table I, application no. 12, columns 5 and 7, preferably shown in table I B, application no. 12, columns 5 and 7, or naturally occurring mutants thereof. Primers based on a nucleotide of invention can be used in PCR reactions to clone homologues of the polypeptide of the invention or of the polypeptide used in the process of the invention, e.g. as the primers described in the examples of the present invention, e.g. as shown in the examples. A PCR with the primers shown in table III, application no. 12, column 7 will result in a fragment of the gene product as shown in table II, column 3.

[3269] for the disclosure of this paragraph see paragraph [0164.0.0.0] above.

[3270] The nucleic acid molecule of the invention encodes a polypeptide or portion thereof which includes an amino acid sequence which is sufficiently homologous to the amino acid sequence shown in table II, application no. 12, columns 5 and 7 such that the protein or portion thereof maintains the ability to participate in the fine chemical production, in particular an activity increasing the level of lutein increasing the activity as mentioned above or as described in the examples in plants or microorganisms is comprised.

[3271] As used herein, the language “sufficiently homologous” refers to proteins or portions thereof which have amino acid sequences which include a minimum number of identical or equivalent amino acid residues (e.g., an amino acid residue which has a similar side chain as an amino acid residue in one of the sequences of the polypeptide of the present invention) to an amino acid sequence shown in table II, application no. 12, columns 5 and 7 such that the protein or portion thereof is able to participate in the increase of the fine chemical production. For examples having the activity of a protein as shown in table II, column 3 and as described herein.

[3272] In one embodiment, the nucleic acid molecule of the present invention comprises a nucleic acid that encodes a portion of the protein of the present invention. The protein is at least about 30%, 35%, 40%, 45% or 50%, preferably at least about 55%, 60%, 65% or 70%, and more preferably at least about 75%, 80%, 85%, 90%, 91%, 92%, 93% or 94% and most preferably at least about 95%, 97%, 98%, 99% or more homologous to an entire amino acid sequence of table II, application no. 12, columns 5 and 7 and having above-mentioned activity, e.g. conferring preferably the increase of the respective fine chemical by for example expression either in the cytsol or in an organelle such as a plastid or mitochondria or both, preferably in plastids, and the gene product, e.g. the polypeptide, being localized in the plastid and other parts of the cell or in the plastid as described above.

[3273] for the disclosure of the paragraphs [0168.0.0.11] and [0169.0.0.11] see paragraphs [0168.0.0.0] and [0169.0.0.0] above.

[3274] The invention further relates to nucleic acid molecules that differ from one of the nucleotide sequences shown in table I, application no. 12, columns 5 and 7 (and portions thereof) due to degeneracy of the genetic code and thus encode a polypeptide of the present invention, in particular a polypeptide having above mentioned activity, e.g. conferring an increase in the respective fine chemical in a organism, e.g. as that polypeptides depicted by the sequence shown in table II, application no. 12, columns 5 and 7 or the functional homologues. Advantageously, the nucleic acid molecule of the invention comprises, or in an other embodiment has, a nucleotide sequence encoding a protein comprising, or in an other embodiment having, an amino acid sequence shown in table II, application no. 12, columns 5 and 7 or the functional homologues. In a still further embodiment, the nucleic acid molecule of the invention encodes a full length protein which is substantially homologous to an amino acid sequence shown in table II, application no. 12, columns 5 and 7 or the functional homologues. However, in a preferred embodiment, the nucleic acid molecule of the present invention does not consist of the sequence shown in table I, application no. 12, columns 5 and 7, preferably as indicated in table I A, application no. 12, columns 5 and 7. Preferably the nucleic acid molecule of the invention is a functional homologue or identical to a nucleic acid molecule indicated in table I B, application no. 12, columns 5 and 7.

[3275] for the disclosure of the paragraphs [0171.0.0.11] to [0173.0.0.11] see paragraphs [0171.0.0.0] to [0173.0.0.0] above.

[3276] Accordingly, in another embodiment, a nucleic acid molecule of the invention is at least 15, 20, 25 or 30 nucleotides in length. Preferably, it hybridizes under stringent conditions to a nucleic acid molecule comprising a nucleotide sequence of the nucleic acid molecule of the present invention or used in the process of the present invention, e.g. comprising the sequence shown in table I, application no. 12, columns 5 and 7. The nucleic acid molecule is preferably at least 20, 30, 50, 100, 250 or more nucleotides in length.

[3277] for the disclosure of this paragraph see paragraph [0175.0.0.0] above.

[3278] Preferably, nucleic acid molecule of the invention that hybridizes under stringent conditions to a sequence shown in table I, application no. 12, columns 5 and 7 corresponds to a naturally-occurring nucleic acid molecule of the invention. As used herein, a “naturally-occurring” nucleic acid molecule refers to an RNA or DNA molecule having a nucleotide sequence that occurs in nature (e.g., encodes a natural protein). Preferably, the nucleic acid molecule encodes a natural protein having abovementioned activity, e.g. conferring the respective fine chemical increase after increasing the expression or activity thereof or the activity of a protein of the invention or used in the process of the invention by for example expression the nucleic acid sequence of the gene product in the cytsol and/or in an organelle such as a plastid or mitochondria, preferably in plastids.

[3279] for the disclosure of this paragraph see paragraph [0177.0.0.0] above.

[3280] For example, nucleotide substitutions leading to amino acid substitutions at “non-essential” amino acid residues can be made in a sequence of the nucleic acid molecule of the invention or used in the process of the invention, e.g. shown in table I, application no. 12, columns 5 and 7.

[3281] for the disclosure of the paragraphs [0179.0.0.11] and [0180.0.0.11] see paragraphs [0179.0.0.0] and [0180.0.0.0] above.

[3282] Accordingly, the invention relates to nucleic acid molecules encoding a polypeptide having above-mentioned activity, e.g. conferring an increase in the the respective fine chemical in an organisms or parts thereof by for example expression either in the cytsol or in an organelle such as a plastid or mitochondria or both, preferably in plastids (as described), that contain changes in amino acid residues that are not essential for said activity. Such polypeptides differ in amino acid sequence from a sequence contained in the sequences shown in table II, application no. 12, columns 5 and 7, preferably shown in table II A, application no. 12, columns 5 and 7 yet retain said activity described herein. The nucleic acid molecule can comprise a nucleotide sequence encoding a polypeptide, wherein the polypeptide comprises an amino acid sequence at least about 50% identical to an amino acid sequence shown in table II, application no. 12, columns 5 and 7, preferably shown in table II A, application no. 12, columns 5 and 7 and is capable of participation in the increase of production of the fine chemical after increasing its activity, e.g. its expression by for example expression either in the cytsol or in an organelle such as a plastid or mitochondria or both, preferably in plastids and the gene product, e.g. the polypeptide, being localized in the plastid and other parts of the cell or in the plastid as described above. Preferably, the protein encoded by the nucleic acid molecule is at least about 60% identical to the sequence shown in table II, application no. 12, columns 5 and 7, preferably shown in table II A, application no. 12, columns 5 and 7, more preferably at least about 70% identical to one of the sequences shown in table II, application no. 12, columns 5 and 7, preferably shown in table II A, application no. 12, columns 5 and 7, even more preferably at least about 80%, 90%, 95% homologous to the sequence shown in table II, application no. 12, columns 5 and 7, preferably shown in table II A, application no. 12, columns 5 and 7, and most preferably at least about 96%, 97%^{,} 98%, or 99% identical to the sequence shown in table II, application no. 12, columns 5 and 7, preferably shown in table II A, application no. 12, columns 5 and 7.

[3283] for the disclosure of the paragraphs [0182.0.0.11] to [0188.0.0.11] see paragraphs [0182.0.0.0] to [0188.0.0.0] above.

[3284] Functional equivalents derived from one of the polypeptides as shown in table II, application no. 12, columns 5 and 7, preferably shown in table II B, application no. 12, columns 5 and 7 resp., according to the invention by substitution, insertion or deletion have at least 30%, 35%, 40%, 45% or 50%, preferably at least 55%, 60%, 65% or 70% by preference at least 80%, especially preferably at least 85% or 90%, 91%, 92%, 93% or 94%, very especially preferably at least 95%, 97%, 98% or 99% homology with one of the polypeptides as shown in table II, application no. 12, columns 5 and 7, preferably shown in table II B, application no. 12, columns 5 and 7 resp., according to the invention and are distinguished by essentially the same properties as the polypeptide as shown in table II, application no. 12, columns 5 and 7, preferably shown in table II B, application no. 12, columns 5 and 7.

[3285] Functional equivalents derived from the nucleic acid sequence as shown in table I, application no. 12, columns 5 and 7, preferably shown in table I B, application no. 12, columns 5 and 7 resp., according to the invention by substitution, insertion or deletion have at least 30%, 35%, 40%, 45% or 50%, preferably at least 55%, 60%, 65% or 70% by preference at least 80%, especially preferably at least 85% or 90%, 91%, 92%, 93% or 94%, very especially preferably at least 95%, 97%, 98% or 99% homology with one of the polypeptides as shown in table II, application no. 12, columns 5 and 7, preferably shown in table II B, application no. 12, columns 5 and 7 resp., according to the invention and encode polypeptides having essentially the same properties as the polypeptide as shown in table II, application no. 12, columns 5 and 7, preferably shown in table II B, application no. 12, columns 5 and 7.

[3286] for the disclosure of this paragraph see paragraph [0191.0.0.0] above.

[3287] A nucleic acid molecule encoding an homologous to a protein sequence of table II, application no. 12, columns 5 and 7, preferably shown in table II B, application no. 12, columns 5 and 7 resp., can be created by introducing one or more nucleotide substitutions, additions or deletions into a nucleotide sequence of the nucleic acid molecule of the present invention, in particular of table I, application no. 12, columns 5 and 7, preferably shown in table I B, application no. 12, columns 5 and 7 resp., such that one or more amino acid substitutions, additions or deletions are introduced into the encoded protein. Mutations can be introduced into the encoding sequences of table I, application no. 12, columns 5 and 7, preferably shown in table I B, application no. 12, columns 5 and 7 resp., by standard techniques, such as site-directed mutagenesis and PCR-mediated mutagenesis.

[3288] for the disclosure of the paragraphs [0193.0.0.11] to [0196.0.0.11] see paragraphs [0193.0.0.0] to [0196.0.0.0] above.

[3289] Homologues of the nucleic acid sequences used, with the sequence shown in table I, application no. 12, columns 5 and 7, preferably shown in table I B, application no. 12, columns 5 and 7, comprise also allelic variants with at least approximately 30%, 35%, 40% or 45% homology, by preference at least approximately 50%, 60% or 70%, more preferably at least approximately 90%, 91%, 92%, 93%, 94% or 95% and even more preferably at least approximately 96%, 97%, 98%, 99% or more homology with one of the nucleotide sequences shown or the abovementioned derived nucleic acid sequences or their homologues, derivatives or analogues or parts of these. Allelic variants encompass in particular functional variants which can be obtained by deletion, insertion or substitution of nucleotides from the sequences shown, preferably from table I, application no. 12, columns 5 and 7, preferably shown in table I B, application no. 12, columns 5 and 7, or from the derived nucleic acid sequences, the intention being, however, that the enzyme activity or the biological activity of the resulting proteins synthesized is advantageously retained or increased.

[3290] In one embodiment of the present invention, the nucleic acid molecule of the invention or used in the process of the invention comprises the sequences shown in any of the table I, application no. 12, columns 5 and 7, preferably shown in table I B, application no. 12, columns 5 and 7. It is preferred that the nucleic acid molecule comprises as little as possible other nucleotides not shown in any one of table I, application no. 12, columns 5 and 7, preferably shown in table I B, application no. 12, columns 5 and 7. In one embodiment, the nucleic acid molecule comprises less than 500, 400, 300, 200, 100, 90, 80, 70, 60, 50 or 40 further nucleotides. In a further embodiment, the nucleic acid molecule comprises less than 30, 20 or 10 further nucleotides. In one embodiment, the nucleic acid molecule use in the process of the invention is identical to the sequences shown in table I, application no. 12, columns 5 and 7, preferably shown in table I B, application no. 12, columns 5 and 7.

[3291] Also preferred is that the nucleic acid molecule used in the process of the invention encodes a polypeptide comprising the sequence shown in table II, application no. 12, columns 5 and 7, preferably shown in table II B, application no. 12, columns 5 and 7. In one embodiment, the nucleic acid molecule encodes less than 150, 130, 100, 80, 60, 50, 40 or 30 further amino acids. In a further embodiment, the encoded polypeptide comprises less than 20, 15, 10, 9, 8, 7, 6 or 5 further amino acids. In one embodiment used in the inventive process, the encoded polypeptide is identical to the sequences shown in table II, application no. 12, columns 5 and 7, preferably shown in table II B, application no. 12, columns 5 and 7.

[3292] In one embodiment, the nucleic acid molecule of the invention or used in the process encodes a polypeptide comprising the sequence shown in table II, application no. 12, columns 5 and 7, preferably shown in table II B, application no. 12, columns 5 and 7 comprises less than 100 further nucleotides. In a further embodiment, said nucleic acid molecule comprises less than 30 further nucleotides. In one embodiment, the nucleic acid molecule used in the process is identical to a coding sequence of the sequences shown in table I, application no. 12, columns 5 and 7, preferably shown in table I B, application no. 12, columns 5 and 7.

[3293] Polypeptides (=proteins), which still have the essential biological or enzymatic activity of the polypeptide of the present invention conferring an increase of the respective fine chemical indicated in column 6 of Table I, application no. 12, i.e. whose activity is essentially not reduced, are polypeptides with at least 10% or 20%, by preference 30% or 40%, especially preferably 50% or 60%, very especially preferably 80% or 90 or more of the wild type biological activity or enzyme activity, advantageously, the activity is essentially not reduced in comparison with the activity of a polypeptide shown in table II, application no. 12, columns 5 and 7 expressed under identical conditions.

[3294] Homologues of table I, application no. 12, columns 5 and 7 or of the derived sequences of table II, application no. 12, columns 5 and 7 also mean truncated sequences, cDNA, single-stranded DNA or RNA of the coding and noncoding DNA sequence. Homologues of said sequences are also understood as meaning derivatives, which comprise noncoding regions such as, for example, UTRs, terminators, enhancers or promoter variants. The promoters upstream of the nucleotide sequences stated can be modified by one or more nucleotide substitution(s), insertion(s) and/or deletion(s) without, however, interfering with the functionality or activity either of the promoters, the open reading frame (=ORF) or with the 3′-regulatory region such as terminators or other 3′ regulatory regions, which are far away from the ORF. It is furthermore possible that the activity of the promoters is increased by modification of their sequence, or that they are replaced completely by more active promoters, even promoters from heterologous organisms. Appropriate promoters are known to the person skilled in the art and are mentioned herein below.

[3295] for the disclosure of the paragraphs [0203.0.0.11] to [0215.0.0.11] see paragraphs [0203.0.0.0] to [0215.0.0.0] above.

[3296] Accordingly, in one embodiment, the invention relates to a nucleic acid molecule, which comprises a nucleic acid molecule selected from the group consisting of:
[3297] a) nucleic acid molecule encoding, preferably at least the mature form, of the polypeptide shown in table II, application no. 12, columns 5 and 7, preferably in table II B, application no. 12, columns 5 and 7; or a fragment thereof conferring an increase in the amount of the fine chemical according to table II B, application no. 12, column 6 in an organism or a part thereof
[3298] b) nucleic acid molecule comprising, preferably at least the mature form, of the nucleic acid molecule shown in table I, application no. 12, columns 5 and 7, preferably in table I B, application no. 12, columns 5 and 7 or a fragment thereof conferring an increase in the amount of the fine chemical according to table II B, application no. 12, column 6 in an organism or a part thereof;
[3299] c) nucleic acid molecule whose sequence can be deduced from a polypeptide sequence encoded by a nucleic acid molecule of (a) or (b) as result of the degeneracy of the genetic code and conferring an increase in the amount of the fine chemical according to table II B, application no. 12, column 6 in an organism or a part thereof;
[3300] d) nucleic acid molecule encoding a polypeptide whose sequence has at least 50% identity with the amino acid sequence of the polypeptide encoded by the nucleic acid molecule of (a) to (c) and conferring an increase in the amount of the fine chemical according to table II B, application no. 12, column 6 in an organism or a part thereof;
[3301] e) nucleic acid molecule which hybridizes with a nucleic acid molecule of (a) to (c) under stringent hybridisation conditions and conferring an increase in the amount of the fine chemical according to table II B, application no. 12, column 6 in an organism or a part thereof;
[3302] f) nucleic acid molecule encoding a polypeptide, the polypeptide being derived by substituting, deleting and/or adding one or more amino acids of the amino acid sequence of the polypeptide encoded by the nucleic acid molecules (a) to (d), preferably to (a) to (c), and conferring an increase in the amount of the fine chemical according to table II B, application no. 12, column 6 in an organism or a part thereof;
[3303] g) nucleic acid molecule encoding a fragment or an epitope of a polypeptide which is encoded by one of the nucleic acid molecules of (a) to (e), preferably to (a) to (c) and conferring an increase in the amount of the fine chemical according to table II B, application no. 12, column 6 in an organism or a part thereof;
[3304] h) nucleic acid molecule comprising a nucleic acid molecule which is obtained by amplifying a cDNA library or a genomic library using the primers in table Ill, application no. 12, column 7 and conferring an increase in the amount of the fine chemical according to table II B, application no. 12, column 6 in an organism or a part thereof;
[3305] i) nucleic acid molecule encoding a polypeptide which is isolated, e.g. from a expression library, with the aid of monoclonal antibodies against a polypeptide encoded by one of the nucleic acid molecules of (a) to (g), preferably to (a) to (c) and conferring an increase in the amount of the fine chemical in an organism or a part thereof;
[3306] j) nucleic acid molecule which encodes a polypeptide comprising the consensus sequence shown in table IV, application no. 12, column 7 and conferring an increase in the amount of the fine chemical in an organism or a part thereof;
[3307] k) nucleic acid molecule encoding the amino acid sequence of a polypeptide encoding a domain of the polypeptide shown in table II, application no. 12, columns 5 and 7 and conferring an increase in the amount of the fine chemical according to table II B, application no. 12, column 6 in an organism or a part thereof; and
[3308] l) nucleic acid molecule which is obtainable by screening a suitable nucleic acid library under stringent hybridization conditions with a probe comprising one of the sequences of the nucleic acid molecule of (a) to (k) or with a fragment of at least 15 nt, preferably 20 nt, 30 nt, 50 nt, 100 nt, 200 nt or 500 nt of the nucleic acid molecule characterized in (a) to (h) or of the nucleic acid molecule shown in table I, application no. 12, columns 5 and 7 or a nucleic acid molecule encoding, preferably at least the mature form of, the polypeptide shown in table II, application no. 12, columns 5 and 7, and conferring an increase in the amount of the fine chemical according to table II B, application no. 12, column 6 in an organism or a part thereof; or which encompasses a sequence which is complementary thereto;
   whereby, preferably, the nucleic acid molecule according to (a) to (l) distinguishes over the sequence depicted in table I A and/or I B, application no. 12, columns 5 and 7 by one or more nucleotides. In one embodiment, the nucleic acid molecule of the invention does not consist of the sequence shown in table I A and/or I B, application no. 12, columns 5 and 7. In an other embodiment, the nucleic acid molecule of the present invention is at least 30% identical and less than 100%, 99.999%, 99.99%, 99.9% or 99% identical to the sequence shown in table I A and/or I B, application no. 12, columns 5 and 7. In a further embodiment the nucleic acid molecule does not encode the polypeptide sequence shown in table II A and/or II B, application no. 12, columns 5 and 7. Accordingly, in one embodiment, the nucleic acid molecule of the present invention encodes in one embodiment a polypeptide which differs at least in one or more amino acids from the polypeptide shown in table II A and/or II B, application no. 12, columns 5 and 7 does not encode a protein of the sequence shown in table II A and/or II B, application no. 12, columns 5 and 7. Accordingly, in one embodiment, the protein encoded by a sequence of a nucleic acid according to (a) to (l) does not consist of the sequence shown in table I A and/or I B, application no. 12, columns 5 and 7. In a further embodiment, the protein of the present invention is at least 30% identical to protein sequence depicted in table II A and/or II B, application no. 12, columns 5 and 7 and less than 100%, preferably less than 99.999%, 99.99% or 99.9%, more preferably less than 99%, 985, 97%, 96% or 95% identical to the sequence shown in table II A and/or II B, application no. 12, columns 5 and 7.

[3309] for the disclosure of the paragraphs [0217.0.0.11] to [0226.0.0.11] see paragraphs [0217.0.0.0] to [0226.0.0.0] above.

[3310] In general, vector systems preferably also comprise further cis-regulatory regions such as promoters and terminators and/or selection markers by means of which suitably transformed organisms can be identified. While vir genes and T-DNA sequences are located on the same vector in the case of cointegrated vector systems, binary systems are based on at least two vectors, one of which bears vir genes, but no T-DNA, while a second one bears T-DNA, but no vir gene. Owing to this fact, the last-mentioned vectors are relatively small, easy to manipulate and capable of replication in E. coli and in Agrobacterium. These binary vectors include vectors from the series pBIB-HYG, pPZP, pBecks, pGreen. Those which are preferably used in accordance with the invention are Bin19, pBI101, pBinAR, pGPTV and pCAMBIA. An overview of binary vectors and their use is given by Hellens et al, Trends in Plant Science (2000) 5, 446-451. The vectors are preferably modified in such a manner, that they already contain the nucleic acid coding for the transitpeptide and that the nucleic acids of the invention, preferentially the nucleic acid sequences encoding the polypeptides shown in table II, application no. 12, columns 5 and 7 can be cloned 3″ prime to the transitpeptide encoding sequence, leading to a functional preprotein, which is directed to the plastids and which means that the mature protein fulfills its biological activity.

[3311] for the disclosure of the paragraphs [0228.0.0.11] to [0239.0.0.11] see paragraphs [0228.0.0.0] to [0239.0.0.0] above.

[3312] The abovementioned nucleic acid molecules can be cloned into the nucleic acid constructs or vectors according to the invention in combination together with further genes, or else different genes are introduced by transforming several nucleic acid constructs or vectors (including plasmids) into a host cell, advantageously into a plant cell or a microorganisms.

In addition to the sequence mentioned in Table I, application no. 12, columns 5 and 7 or its derivatives, it is advantageous additionally to express and/or mutate further genes in the organisms. It can be especially advantageously, if additionally at least one further gene of the lutein biosynthetic pathway, e.g. of the DOXP pathway of isoprenoids biosynthesis, is expressed in the organisms such as plants or microorganisms. It is also possible that the regulation of the natural genes has been modified advantageously so that the gene and/or its gene product is no longer subject to the regulatory mechanisms which exist in the organisms. This leads to an increased synthesis of the amino acids desired since, for example, feedback regulations no longer exist to the same extent or not at all. In addition it might be advantageously to combine the sequences shown in Table I, application no. 12, columns 5 and 7 with genes which generally support or enhances the growth or yield of the target organism, for example genes which lead to faster growth rate of microorganisms or genes which produces stress-, pathogen, or herbicide resistant plants.

[3313] In addition, it might be also advantageously to combine one or more of the sequences indicated in Table I, columns 5 or 7, application no. 12, with genes which modify plant architecture or flower development, in the way, that the plant either produces more flowers, or produces flowers with more petals in order to increase the respective fine chemical production capacity.

[3314] In a further embodiment of the process of the invention, therefore, organisms are grown, in which there is simultaneous direct or indirect overexpression of at least one nucleic acid or one of the genes which code for proteins involved in the carotenoids metabolism, in particular in synthesis of zeaxanthin, e.g. as described in Burrr B J. Carotenoids and gen expression. Nutrition 2000, 31; 16(7-8):577-8; Delagado-Vargas F, Natural pigments: carotenoids, anthocyanins, and betalains—characteristics, biosynthesis, processing, and stability. Crit Rev Food Sci Nutr 2000; 40(3):173-289. Indirect overexpression might be brought about by the manipulation of the regulation of the endogenous gene, for example through promoter mutations or the expression of natural or artificial transcriptional regulators.

[3315] Further advantageous nucleic acid sequences which can be expressed in combination with the sequences used in the process and/or the abovementioned biosynthesis genes are the sequences encoding further genes of the carotenoids biosynthetic pathway, such as ε-Lycopene cyclase, β-lycopene cyclase, beta-carotene hydroxylase, and/or ε-carotene hydroxylase. These genes may lead town increased synthesis of the essential carotenoids, in particular lutein.

[3316] In a further advantageous embodiment of the process of the invention, the organisms used in the process are those in which simultaneously a lutein degrading protein is attenuated, in particular by reducing the rate of expression of the corresponding gene.

[3317] The respective fine chemical produced can be isolated from the organism by methods with which the skilled worker is familiar. For example, via extraction, salt precipitation, and/or different chromatography methods. The process according to the invention can be conducted batchwise, semibatchwise or continuously. The respective fine chemical produced by this process can be obtained by harvesting the organisms, either from the crop in which they grow, or from the field. This can be done via pressing or extraction of the plant parts.

[3318] for the disclosure of the paragraphs [0243.0.0.11] to [0264.0.0.11] see paragraphs [0243.0.0.0] to [0264.0.0.0] above.

[3319] Other preferred sequences for use in operable linkage in gene expression constructs are targeting sequences, which are required for targeting the gene product into specific cell compartments (for a review, see Kermode, Crit. Rev. Plant Sci. 15, 4 (1996) 285-423 and references cited therein), for example into the vacuole, the nucleus, all types of plastids, such as amyloplasts, chloroplasts, chromoplasts, the extracellular space, the mitochondria, the endoplasmic reticulum, elaioplasts, peroxisomes, glycosomes, and other compartments of cells or extracellular preferred are sequences, which are involved in targeting to plastids as mentioned above. Sequences, which must be mentioned in this context are, in particular, the signal-peptide- or transit-peptide-encoding sequences which are known per se. For example, plastid-transit-peptide-encoding sequences enable the targeting of the expression product into the plastids of a plant cell. Targeting sequences are also known for eukaryotic and to a lower extent for prokaryotic organisms and can advantageously be operable linked with the nucleic acid molecule of the present invention as shown in table I, application no. 12, columns 5 and 7 and described herein to achieve an expression in one of said compartments or extracellular.

[3320] for the disclosure of the paragraphs [0266.0.0.11] to [0287.0.0.11] see paragraphs [0266.0.0.0] to [0287.0.0.0] above.

[3321] Accordingly, one embodiment of the invention relates to a vector where the nucleic acid molecule according to the invention is linked operably to regulatory sequences which permit the expression in a prokaryotic or eukaryotic or in a prokaryotic and eukaryotic host. A further preferred embodiment of the invention relates to a vector in which a nucleic acid sequence encoding one of the polypeptides shown in table II, application no. 12, columns 5 and 7 or their homologs is functionally linked to a plastidial targeting sequence. A further preferred embodiment of the invention relates to a vector in which a nucleic acid sequence encoding one of the polypeptides shown in table II, application no. 12, columns 5 and 7 or their homologs is functionally linked to a regulatory sequences which permit the expression in plastids.

[3322] for the disclosure of the paragraphs [0289.0.0.11] to [0296.0.0.11] see paragraphs [0289.0.0.0] to [0296.0.0.0] above.

[3323] Moreover, a native polypeptide conferring the increase of the respective fine chemical in an organism or part thereof can be isolated from cells (e.g., endothelial cells), for example using the antibody of the present invention as described herein, in particular, an antibody against polypeptides as shown in table II, application no. 12, columns 5 and 7, which can be produced by standard techniques utilizing the polypeptide of the present invention or fragment thereof, i.e., the polypeptide of this invention. Preferred are monoclonal antibodies.

[3324] for the disclosure of this paragraph see paragraph [0298.0.0.0] above.

[3325] In one embodiment, the present invention relates to a polypeptide having the sequence shown in table II, application no. 12, columns 5 and 7 or as coded by the nucleic acid molecule shown in table I, application no. 12, columns 5 and 7 or functional homologues thereof.

[3326] In one advantageous embodiment, in the method of the present invention the activity of a polypeptide is increased comprising or consisting of the consensus sequence shown in table IV, application no. 12, columns 7 and in one another embodiment, the present invention relates to a polypeptide comprising or consisting of the consensus sequence shown in table IV, application no. 12, column 7 whereby 20 or less, preferably 15 or 10, preferably 9, 8, 7, or 6, more preferred 5 or 4, even more preferred 3, even more preferred 2, even more preferred 1, most preferred 0 of the amino acids positions indicated can be replaced by any amino acid.

[3327] for the disclosure of the paragraphs [0301.0.0.11] to [0304.0.0.11] see paragraphs [0301.0.0.0] to [0304.0.0.0] above.

[3328] In one advantageous embodiment, the method of the present invention comprises the increasing of a polypeptide comprising or consisting of plant or microorganism specific consensus sequences.

In one embodiment, said polypeptide of the invention distinguishes over the sequence shown in table II A and/or II B, application no. 12, columns 5 and 7 by one or more amino acids. In one embodiment, polypeptide distinguishes form the sequence shown in table II A and/or II B, application no. 12, columns 5 and 7 by more than 5, 6, 7, 8 or 9 amino acids, preferably by more than 10, 15, 20, 25 or 30 amino acids, even more preferred are more than 40, 50, or 60 amino acids and, preferably, the sequence of the polypeptide of the invention distinguishes from the sequence shown in table II A and/or II B, application no. 12, columns 5 and 7 by not more than 80% or 70% of the amino acids, preferably not more than 60% or 50%, more preferred not more than 40% or 30%, even more preferred not more than 20% or 10%. In an other embodiment, said polypeptide of the invention does not consist of the sequence shown in table II A and/or II B, application no. 12, columns 5 and 7.

[3329] for the disclosure of this paragraph see paragraph [0306.0.0.0] above.

[3330] In one embodiment, the invention relates to polypeptide conferring an increase of level of the respective fine chemical indicated in Table II A and/or II B, application no. 12, column 6 in an organism or part being encoded by the nucleic acid molecule of the invention or used in the process of the invention and having a sequence which distinguishes from the sequence as shown in table II A and/or II B, application no. 12, columns 5 and 7 by one or more amino acids. In another embodiment, said polypeptide of the invention does not consist of the sequence shown in table II A and/or II B, application no. 12, columns 5 and 7. In a further embodiment, said polypeptide of the present invention is less than 100%, 99.999%, 99.99%, 99.9% or 99% identical. In one embodiment, said polypeptide does not consist of the sequence encoded by the nucleic acid molecules shown in table I A and/or I B, application no. 12, columns 5 and 7.

[3331] In one embodiment, the present invention relates to a polypeptide having the activity of the protein as shown in table II A and/or II B, application no. 12, column 3, which distinguishes over the sequence depicted in table II A and/or II B, application no. 12, columns 5 and 7 by one or more amino acids, preferably by more than 5, 6, 7, 8 or 9 amino acids, preferably by more than 10, 15, 20, 25 or 30 amino acids, even more preferred are more than 40, 50, or 60 amino acids but even more preferred by less than 70% of the amino acids, more preferred by less than 50%, even more preferred my less than 30% or 25%, more preferred are 20% or 15%, even more preferred are less than 10%. In a further preferred embodiment the polypeptide of the invention takes the form of a preprotein consisting of a plastidial transitpeptide joint to a polypeptide having the activity of the protein as shown in table II A and/or II B, column 3, from which the transitpeptide is preferably cleaved off upon transport of the preprotein into the organelle, for example into the plastid or mitochondria.

[3332] for the disclosure of the paragraphs [0309.0.0.11] to [0311.0.0.11] see paragraphs [0309.0.0.0] to [0311.0.0.0] above.

[3333] A polypeptide of the invention can participate in the process of the present invention. The polypeptide or a portion thereof comprises preferably an amino acid sequence, which is sufficiently homologous to an amino acid sequence shown in table II, application no. 12, columns 5 and 7.

[3334] Further, the polypeptide can have an amino acid sequence which is encoded by a nucleotide sequence which hybridizes, preferably hybridizes under stringent conditions as described above, to a nucleotide sequence of the nucleic acid molecule of the present invention. Accordingly, the polypeptide has an amino acid sequence which is encoded by a nucleotide sequence that is at least about 35%, 40%, 45%, 50%, 55%, 60%, 65% or 70%, preferably at least about 75%, 80%, 85% or 90, and more preferably at least about 91%, 92%, 93%, 94% or 95%, and even more preferably at least about 96%, 97%, 98%, 99% or more homologous to one of the amino acid sequences as shown in table II A and/or II B, application no. 12, columns 5 and 7. The preferred polypeptide of the present invention preferably possesses at least one of the activities according to the invention and described herein. A preferred polypeptide of the present invention includes an amino acid sequence encoded by a nucleotide sequence which hybridizes, preferably hybridizes under stringent conditions, to a nucleotide sequence of table I A and/or I B, application no. 12, columns 5 and 7 or which is homologous thereto, as defined above.

[3335] Accordingly the polypeptide of the present invention can vary from the sequences shown in table II A and/or II B, application no. 12, columns 5 and 7 in amino acid sequence due to natural variation or mutagenesis, as described in detail herein. Accordingly, the polypeptide comprise an amino acid sequence which is at least about 35%, 40%, 45%, 50%, 55%, 60%, 65% or 70%, preferably at least about 75%, 80%, 85% or 90, and more preferably at least about 91%, 92%, 93%, 94% or 95%, and most preferably at least about 96%, 97%, 98%, 99% or more homologous to an entire amino acid sequence shown in table II A and/or II B, application no. 12, columns 5 and 7.

[3336] for the disclosure of this paragraph see paragraph [0315.0.0.0] above.

[3337] Biologically active portions of an polypeptide of the present invention include peptides comprising amino acid sequences derived from the amino acid sequence of the polypeptide of the present invention or used in the process of the present invention, e.g., the amino acid sequence shown in table II, application no. 12, columns 5 and 7 or the amino acid sequence of a protein homologous thereto, which include fewer amino acids than a full length polypeptide of the present invention or used in the process of the present invention or the full length protein which is homologous to an polypeptide of the present invention or used in the process of the present invention depicted herein, and exhibit at least one activity of polypeptide of the present invention or used in the process of the present invention.

[3338] for the disclosure of this paragraph see paragraph [0317.0.0.0] above.

[3339] Manipulation of the nucleic acid molecule of the invention may result in the production of a protein having differences from the wild-type protein as shown in table II, application no. 12, column 3. Differences shall mean at least one amino acid different from the sequences as shown in table II, application no. 12, column 3, preferably at least 2, 3, 4, 5, 6, 7, 8, 9 or 10 amino acids, more preferably at least 15, 20, 25, 30, 35, 40, 45 or 50 amino acids different from the sequences as shown in table II, application no. 12, column 3. These proteins may be improved in efficiency or activity, may be present in greater numbers in the cell than is usual, or may be decreased in efficiency or activity in relation to the wild type protein.

[3340] Any mutagenesis strategies for the polypeptide of the present invention or the polypeptide used in the process of the present invention to result in increasing said activity are not meant to be limiting; variations on these strategies will be readily apparent to one skilled in the art. Using such strategies, and incorporating the mechanisms disclosed herein, the nucleic acid molecule and polypeptide of the invention may be utilized to generate plants or parts thereof, expressing wildtype proteins or mutated proteins of the proteins as shown in table II, application no. 12, column 3. The nucleic acid molecules and polypeptide molecules of the invention are expressed such that the yield, production, and/or efficiency of production of a desired compound is improved.

[3341] Preferably, the compound is a composition comprising the essentially pure fine chemical, i.e. lutein or a recovered or isolated lutein in free or in protein- or membrane-bound form.

[3342] for the disclosure of the paragraphs [0320.0.0.11] to [0322.0.0.11] see paragraphs [0320.0.0.0] to [0322.0.0.0] above.

[3343] In one embodiment, a protein (=polypeptide) as shown in table II, application no. 12, column 3 refers to a polypeptide having an amino acid sequence corresponding to the polypeptide of the invention or used in the process of the invention, whereas a “non-inventive protein or polypeptide” or “other polypeptide” refers to a polypeptide having an amino acid sequence corresponding to a protein which is not substantially homologous to a polypeptide of the invention, preferably which is not substantially homologous to a polypeptide or protein as shown in table II, application no. 12, column 3, e.g., a protein which does not confer the activity described herein and which is derived from the same or a different organism.

[3344] for the disclosure of the paragraphs [0324.0.0.11] to [0329.0.0.11] see paragraphs [0324.0.0.0] to [0329.0.0.0] above.

[3345] In an especially preferred embodiment, the polypeptide according to the invention furthermore also does not have the sequences of those proteins, which are encoded by the sequences shown in table II, application no. 12, columns 5 and 7.

[3346] for the disclosure of the paragraphs [0331.0.0.11] to [0346.0.0.11] see paragraphs [0331.0.0.0] to [0346.0.0.0] above.

[3347] Accordingly the present invention relates to any cell transgenic for any nucleic acid characterized as part of the invention, e.g. conferring the increase of the respective fine chemical indicated in column 6 of application no. 12 in any one of Talbes I to IV in a cell or an organism or a part thereof, e.g. the nucleic acid molecule of the invention, the nucleic acid construct of the invention, the antisense molecule of the invention, the vector of the invention or a nucleic acid molecule encoding the polypeptide of the invention, e.g. encoding a polypeptide having an activity as the protein as shown in table II, application no. 12, column 3. Due to the above mentioned activity the respective fine chemical content in a cell or an organism is increased. For example, due to modulation or manipulation, the cellular activity is increased preferably in organelles such as plastids or mitochondria, e.g. due to an increased expression or specific activity or specific targeting of the subject matters of the invention in a cell or an organism or a part thereof especially in organelles such as plastids or mitochondria. Transgenic for a polypeptide having a protein or activity means herein that due to modulation or manipulation of the genome, the activity of protein as shown in table II, application no. 12, column 3 or a protein as shown in table II, application no. 12, column 3-like activity is increased in the cell or organism or part thereof especially in organelles such as plastids or mitochondria. Examples are described above in context with the process of the invention.

[3348] for the disclosure of this paragraph see paragraph [0348.0.0.0] above.

[3349] A naturally occurring expression cassette—for example the naturally occurring combination of the promoter of the gene encoding a protein as shown in table II, application no. 12, column 3 with the corresponding encoding gene—becomes a transgenic expression cassette when it is modified by non-natural, synthetic “artificial” methods such as, for example, mutagenization. Such methods have been described (U.S. Pat. No. 5,565,350; WO 00/15815; also see above).

[3350] for the disclosure of the paragraphs [0350.0.0.11] to [0358.0.0.11] see paragraphs [0350.0.0.0] to [0358.0.0.0] above.

[3351] Transgenic plants comprising the respective fine chemical synthesized in the process according to the invention can be marketed directly without isolation of the compounds synthesized. In the process according to the invention, plants are understood as meaning all plant parts, plant organs such as leaf, stalk, root, tubers or seeds or propagation material or harvested material or the intact plant. In this context, the seed encompasses all parts of the seed such as the seed coats, epidermal cells, seed cells, endosperm or embryonic tissue. The respective fine chemical indicated in column 6 of any one of Tables I to IV, application no. 12 and being produced in the process according to the invention may, however, also be isolated from the plant as one of the above mentioned derivates of lutein or lutein itself and can be isolated by harvesting the plants either from the culture in which they grow or from the field. This can be done for example via expressing, grinding and/or extraction of the plant parts, preferably the plant seeds, plant fruits, plant tubers and the like.

[3352] for the disclosure of the paragraphs [0360.0.0.11] to [0362.0.0.11] see paragraphs [0360.0.0.0] to [0362.0.0.0] above.

[3353] In this manner, more than 50% by weight, advantageously more than 60% by weight, preferably more than 70% by weight, especially preferably more than 80% by weight, very especially preferably more than 90% by weight, of the respective fine chemical produced in the process can be isolated. The resulting composition or fraction comprising the respective fine chemical can, if appropriate, subsequently be further purified, if desired mixed with other active ingredients such as fatty acids, vitamins, amino acids, carbohydrates, antibiotics, covitamins, antioxidants, carotenoids, and the like, and, if appropriate, formulated.

[3354] In one embodiment, the composition is the fine chemical.

[3355] The fine chemical indicated in column 6 of application no. 12 in Table I, and being obtained in the process of the invention are suitable as starting material for the synthesis of further products of value. For example, they can be used in combination with each other or alone for the production of pharmaceuticals, foodstuffs, animal feeds or cosmetics. Accordingly, the present invention relates a method for the production of pharmaceuticals, food stuff, animal feeds, nutrients or cosmetics comprising the steps of the process according to the invention, including the isolation of a composition comprising the fine chemical, e.g. lutein or the isolated respective fine chemical produced, if desired, and formulating the product with a pharmaceutical acceptable carrier or formulating the product in a form acceptable for an application in agriculture. A further embodiment according to the invention is the use of the respective fine chemical indicated in application no. 12, Table I, column 6, and being produced in the process or the use of the transgenic organisms in animal feeds, foodstuffs, medicines, food supplements, cosmetics or pharmaceuticals.

[3356] for the disclosure of the paragraphs [0366.0.0.11] to [0369.0.0.11] see paragraphs [0366.0.0.0] to [0369.0.0.0] above.

[3357] The fermentation broths obtained in this way, containing in particular the respective fine chemical indicated in column 6 of any one of Tables I to IV; application no. 12 or containing mixtures with other compounds, in particular with other vitamins or e.g. with carotenoids, e.g. with astaxanthin, or fatty acids or containing microorganisms or parts of microorganisms, like plastids, normally have a dry matter content of from 7.5 to 25% by weight. The fermentation broth can be processed further. Depending on requirements, the biomass can be separated, such as, for example, by centrifugation, filtration, decantation, coagulation/flocculation or a combination of these methods, from the fermentation broth or left completely in it. The fermentation broth can be thickened or concentrated by known methods, such as, for example, with the aid of a rotary evaporator, thin-film evaporator, falling film evaporator, by reverse osmosis or by nanofiltration. This concentrated fermentation broth can then be worked up by extraction, freeze-drying, spray drying, spray granulation or by other processes.

[3358] As lutein is often localized in membranes or plastids, in one embodiment it is advantageous to avoid a leaching of the cells when the biomass is isolated entirely or partly by separation methods, such as, for example, centrifugation, filtration, decantation, coagulation/flocculation or a combination of these methods, from the fermentation broth. The dry biomass can directly be added to animal feed, provided the lutein concentration is sufficiently high and no toxic compounds are present. In view of the instability of lutein, conditions for drying, e.g. spray or flash-drying, can be mild and can be avoiding oxidation and cis/trans isomerization. For example antioxidants, e.g. BHT, ethoxyquin or other, can be added. In case the lutein concentration in the biomass is to dilute, solvent extraction can be used for their isolation, e.g. with alcohols, ether or other organic solvents, e.g. with methanol, ethanol, aceton, alcoholic potassium hydroxide, glycerol-phenol, liquefied phenol or for example with acids or bases, like trichloroacetatic acid or potassium hydroxide. A wide range of advantageous methods and techniques for the isolation of lutein can be found in the state of the art. Accordingly, it is possible to further purify the produced lutein. For this purpose, the product-containing composition, e.g. a total or partial lipid extraction fraction using organic solvents, e.g. as described above, is subjected for example to a saponification to remove triglycerides, partition between e.g. hexane/methanol (separation of non-polar epiphase from more polar hypophasic derivates) and separation via e.g. an open column chromatography or HPLC in which case the desired product or the impurities are retained wholly or partly on the chromatography resin. These chromatography steps can be repeated if necessary, using the same or different chromatography resins. The skilled worker is familiar with the choice of suitable chromatography resins and their most effective use.

[3359] for the disclosure of the paragraphs [0372.0.0.11] to [0376.0.0.11], [0376.1.0.11] and [0377.0.0.11] see paragraphs [0372.0.0.0] to [0376.0.0.0], [0376.1.0.0] and [0377.0.0.0] above.

[3360] In one embodiment, the present invention relates to a method for the identification of a gene product conferring an increase in the fine chemical production in a cell, comprising the following steps:
[3361] (a) contacting. e.g. hybridising, the nucleic acid molecules of a sample, e.g. cells, tissues, plants or microorganisms or a nucleic acid library, which can contain a candidate gene encoding a gene product conferring an increase in the respective fine chemical after expression, with the nucleic acid molecule of the present invention;
[3362] (b) identifying the nucleic acid molecules, which hybridize under relaxed stringent conditions with the nucleic acid molecule of the present invention in particular to the nucleic acid molecule sequence shown in table I, application no. 12, columns 5 and 7, preferably in table I B, application no. 12, columns 5 and 7, and, optionally, isolating the full length cDNA clone or complete genomic clone;
[3363] (c) introducing the candidate nucleic acid molecules in host cells, preferably in a plant cell or a microorganism, appropriate for producing the respective fine chemical;
[3364] (d) expressing the identified nucleic acid molecules in the host cells;
[3365] (e) assaying the respective fine chemical level in the host cells; and
[3366] (f) identifying the nucleic acid molecule and its gene product which expression confers an increase in the respective fine chemical as indicated for application no. 12 in any one of Tables I to IV level in the host cell after expression compared to the wild type.

[3367] for the disclosure of the paragraphs [0379.0.0.11] to [0383.0.0.11] see paragraphs [0379.0.0.0] to [0383.0.0.0] above.

[3368] The screen for a gene product or an agonist conferring an increase in the fine chemical production can be performed by growth of an organism for example a microorganism in the presence of growth reducing amounts of an inhibitor of the synthesis of the fine chemical. Better growth, eg higher dividing rate or high dry mass in comparison to the control under such conditions would identify a gene or gene product or an agonist conferring an increase in fine chemical production.

One can think to screen for increased fine chemical production by for example resistance to drugs blocking fine chemical synthesis and looking whether this effect is dependent on the proteins as shown in table II, application no. 12, column 3, eg comparing near identical organisms with low and high activity of the proteins as shown in table II, application no. 12, column 3.

[3369] for the disclosure of the paragraphs [0385.0.0.11] to [0404.0.0.11] see paragraphs [0385.0.0.0] to [0404.0.0.0] above.

[3370] Accordingly, the nucleic acid of the invention, the polypeptide of the invention, the nucleic acid construct of the invention, the organisms, the host cell, the microorganisms, the plant, plant tissue, plant cell, or the part thereof the invention, the vector of the invention, the agonist identified with the method of the invention, the nucleic acid molecule identified with the method of the present invention, can be used for the production of the respective fine chemical indicated in Column 6, Table I, application no. 12 or for the production of the respective fine chemical and one or more other carotenoids, vitamins or fatty acids. In one embodiment, in the process of the present invention, the produced lutein is used to protect fatty acids against oxidization, e.g. it is in a further step added in a pure form or only partly isolated to a composition comprising fatty acids.

Accordingly, the nucleic acid of the invention, or the nucleic acid molecule identified with the method of the present invention or the complement sequences thereof, the polypeptide of the invention, the nucleic acid construct of the invention, the organisms, the host cell, the microorganisms, the plant, plant tissue, plant cell, or the part thereof of the invention, the vector of the invention, the agonist identified with the method of the invention, the antibody of the present invention, can be used for the reduction of the respective fine chemical in a organism or part thereof, e.g. in a cell.

[3371] The nucleic acid molecule of the invention, the vector of the invention or the nucleic acid construct of the invention may also be useful for the production of organisms resistant to inhibitors of the lutein production biosynthesis pathways. In particular, the overexpression of the polypeptide of the present invention may protect an organism such as a microorganism or a plant against inhibitors, which block the lutein, in particular the respective fine chemical synthesis in said organism.

As lutein can protect organisms against damages of oxidative stress, especially singlet oxygens, a increased level of the respective fine chemical can protect plants against herbicides which cause the toxic buildup of oxidative compounds, e.g. singlet oxygens. For example, inhibition of the protoporphorineogen oxidase (Protox), an enzyme important in the synthesis of chlorophyll and heme biosynthesis results in the loss of chlorophyll and carotenoids and in leaky membranes; the membrane destruction is due to creation of free oxygen radicals (which is also reported for other classic photosynthetic inhibitor herbicides).
Accordingly, in one embodiment, the increase of the level of the respective fine chemical is used to protect plants against herbicides destroying membranes due to the creation of free oxygen radicals.
Examples of inhibitors or herbicides building up oxidative stress are aryl triazion, e.g. sulfentrazone, carfentrazone; or diphenylethers, e.g. acifluorfen, lactofen, or oxyfluorfen; or N-Phenylphthalimide, e.g. flumiclorac or flumioxazin; substituted ureas, e.g. fluometuron, tebuthiuron, diuron, or linuron; triazines, e.g. atrazine, prometryn, ametryn, metributzin, prometon, simazine, or hexazinone: or uracils, e.g. bromacil or terbacil.

[3372] In a further embodiment the present invention relates to the use of the antagonist of the present invention, the plant of the present invention or a part thereof, the microorganism or the host cell of the present invention or a part thereof for the production a cosmetic composition or a pharmaceutical composition. Such a composition has an antioxidative activity, photoprotective activity, can be used to protect, treat or heal the above mentioned diseases, e.g. hypercholesterolemic or cardiovascular diseases, certain cancers, and cataract formation or can be used as an immunostimulatory agent.

The lutein can be also used as stabilizer of other colours or oxygen sensitive compounds, like fatty acids, in particular unsaturated fatty acids.

[3373] for the disclosure of the paragraphs [0406.0.0.11] to [0416.0.0.11] see paragraphs [0406.0.0.0] to [0416.0.0.0] above.

[3374] An in vivo mutagenesis of organisms such as algae (e.g. Spongiococcum sp, e.g. Spongiococcum exentricum, Chlorella sp., Haematococcus, Phaedactylum tricornatum, Volvox or Dunaliella), Synechocystis sp. PCC 6803, Physcometrella patens, Saccharomyces, Mortierella, Escherichia and others mentioned above, which are beneficial for the production of lutein can be carried out by passing a plasmid DNA (or another vector DNA) containing the desired nucleic acid sequence or nucleic acid sequences, e.g. the nucleic acid molecule of the invention or the vector of the invention, through E. coli and other microorganisms (for example Bacillus spp. or yeasts such as Saccharomyces cerevisiae) which are not capable of maintaining the integrity of its genetic information. Usual mutator strains have mutations in the genes for the DNA repair system [for example mutHLS, mutD, mutT and the like; for comparison, see Rupp, W. D. (1996) DNA repair mechanisms in Escherichia coli and Salmonella, pp. 2277-2294, ASM: Washington]. The skilled worker knows these strains. The use of these strains is illustrated for example in Greener, A. and Callahan, M. (1994) Strategies 7; 32-34.

In-vitro mutation methods such as increasing the spontaneous mutation rates by chemical or physical treatment are well known to the skilled person. Mutagens like 5-bromo-uracil, N-methyl-N-nitro-N-nitrosoguanidine (=NTG), ethyl methanesulfonate (=EMS), hydroxylamine and/or nitrous acid are widely used as chemical agents for random in-vitro mutagenesis. The most common physical method for mutagenesis is the treatment with UV irradiation. Another random mutagenesis technique is the error-prone PCR for introducing amino acid changes into proteins. Mutations are deliberately introduced during PCR through the use of error-prone DNA polymerases and special reaction conditions known to a person skilled in the art. For this method randomized DNA sequences are cloned into expression vectors and the resulting mutant libraries screened for altered or improved protein activity as described below.
Site-directed mutagenesis method such as the introduction of desired mutations with an M13 or phagemid vector and short oligonucleotides primers is a well-known approach for site-directed mutagenesis. The clou of this method involves cloning of the nucleic acid sequence of the invention into an M13 or phagemid vector, which permits recovery of single-stranded recombinant nucleic acid sequence. A mutagenic oligonucleotide primer is then designed whose sequence is perfectly complementary to nucleic acid sequence in the region to be mutated, but with a single difference: at the intended mutation site it bears a base that is complementary to the desired mutant nucleotide rather than the original. The mutagenic oligonucleotide is then allowed to prime new DNA synthesis to create a complementary full-length sequence containing the desired mutation. Another site-directed mutagenesis method is the PCR mismatch primer mutagenesis method also known to the skilled person. DpnI site-directed mutagenesis is a further known method as described for example in the Stratagene Quickchange™ site-directed mutagenesis kit protocol. A huge number of other methods are also known and used in common practice.
Positive mutation events can be selected by screening the organisms for the production of the desired fine chemical.

[3375] for the disclosure of the paragraphs [0418.0.0.11] to [0427.0.0.11] see paragraphs [0418.0.0.0] to [0427.0.0.0] above.

[3376] for the disclosure of the paragraphs [0427.1.9.11] see paragraphs [0428.1.9.9] above

[3377] for the disclosure of the paragraphs [0427.2.9.11] see paragraph [0428.2.9.9] above

[3378] for the disclosure of the paragraphs [0427.3.9.11] see paragraph [0428.3.9.9] P above.

[3379] Lutein may be produced in Synechocystis spec. PCC 6803 The cells of each of independent Synechocystis spec. PCC 6803 strains cultured on the BG-11 km agar medium, and untransformed wild-type cells (on BG11 agar medium without kanamycin) can be used to inoculate liquid cultures. For this, cells of a mutant or of the wild-type Synechocystis spec. PCC 6803 are transferred from plate into 10 ml of liquid culture in each case. These cultures are cultivated at 28° C. and 30 μmol photons*(m²*s)⁻¹ (30 NE) for about 3 days. After determination of the OD₇₃₀ of the individual cultures, the OD₇₃₀ of all cultures is synchronized by appropriate dilutions with BG-11 (wild types) or e.g. BG-11 km (mutants). These cell density-synchronized cultures are used to inoculate three cultures of the mutant and of the wild-type control. It is thus possible to carry out biochemical analyses using in each case three independently grown cultures of a mutant and of the corresponding wild types. The cultures are grown until the optical density was OD₇₃₀=0.3.

The cell culture medium is removed by centrifugation in an Eppendorf bench centrifuge at 14000 rpm twice. The subsequent disruption of the cells and extraction lutein take place by incubation in an Eppendorf shaker at 30° C., 1000 rpm in 100% methanol for 15 minutes twice, combining the supernatants obtained in each case.
In order to avoid oxidation, the resulting extracts can be analyzed immediate after the extraction with the aid of a Waters Alliance 2690 HPLC system. Lutein can be separated on a reverse phase column and identified by means of a standard. The fluorescence of the substances which can be detected with the aid of a Jasco FP 920 fluorescence detector, can serve as detection system.

[3380] for the disclosure of the paragraphs [0428.0.0.11] to [0435.0.0.11] see paragraphs [0428.0.0.0] to [0435.0.0.0] above.

[3381] Lutein Production

Lutein can be detected advantageously as described in Deli, J. & Molnar, P., Paprika carotenoids: Analysis, isolation, structure elucidation. Curr. Org. Chem. 6, 1197-1219 (2004) or Fraser, P. D., Pinto, M. E., Holloway, D. E. & Bramley, P. M. Technical advance: application of high-performance liquid chromatography with photodiode array detection to the metabolic profiling of plant isoprenoids. Plant J. 24, 551-558 (2000).

[3382] for the disclosure of the paragraphs [0437.0.0.11] and [0438.0.0.11] see paragraphs [0437.0.0.0] and [0438.0.0.0] above.

### Example 8

### Analysis of the Effect of the Nucleic Acid Molecule on the Production of the Respective Fine Chemical Indicated in Table I, Application No. 12, Column 6

[3383] The effect of the genetic modification in plants, fungi, algae or ciliates on the production of a desired compound can be determined by growing the modified microorganisms or the modified plant under suitable conditions (such as those described above) and analyzing the medium and/or the cellular components for the elevated production of desired product (i.e. of the lipids or a fatty acid). These analytical techniques are known to the skilled worker and comprise spectroscopy, thin-layer chromatography, various types of staining methods, enzymatic and microbiological methods and analytical chromatography such as high-performance liquid chromatography (see, for example, Ullman, Encyclopedia of Industrial Chemistry, Vol. A2, p. 89-90 and p. 443-613, VCH: Weinheim (1985); Fallon, A., et al., (1987) “Applications of HPLC in Biochemistry” in: Laboratory Techniques in Biochemistry and Molecular Biology, Vol. 17; Rehm et al. (1993) Biotechnology, Vol. 3, Chapter III: “Product recovery and purification”, p. 469-714, VCH: Weinheim; Belter, P.A., et al. (1988) Bioseparations: downstream processing for Biotechnology, John Wiley and Sons; Kennedy, J. F., and Cabral, J. M. S. (1992) Recovery processes for biological Materials, John Wiley and Sons; Shaeiwitz, J. A., and Henry, J. D. (1988) Biochemical Separations, in: Ullmann's Encyclopedia of Industrial Chemistry, Vol. B3; Chapter 11, p. 1-27, VCH: Weinheim; and Dechow, F. J. (1989) Separation and purification techniques in biotechnology, Noyes Publications).

Lutein can be detected advantageously as described above.

[3384] for the disclosure of this paragraph see [0441.0.0.0] above.

### Example 9

### Purification of the Lutein

[3385] Abbreviations: GC-MS, gas liquid chromatography/mass spectrometry; TLC, thin-layer chromatography.

The unambiguous detection for the presence of lutein can be obtained by analyzing recombinant organisms using analytical standard methods: GC, GC-MS or TLC, as described (1997, in: Advances on Lipid Methodology, Fourth Edition: Christie, Oily Press, Dundee, 119-169; 1998, Gaschromatographie-Massenspektrometrie-Verfahren [Gas chromatography/mass spectrometric methods], Lipide 33:343-353).
The total lutein produced in the organism used in the inventive process can be analysed for example according to the following procedure:
The material such as yeasts, E. coli or plants to be analyzed can be disrupted by sonication, grinding in a glass mill, liquid nitrogen and grinding or via other applicable methods. Plant material is initially homogenized mechanically by comminuting in a pestle and mortar to make it more amenable to extraction.
A typical sample pretreatment consists of a total lipid extraction using such polar organic solvents as acetone or alcohols as methanol, or ethers, saponification, partition between phases, separation of non-polar epiphase from more polar hypophasic derivatives and chromatography.

[3386] Characterization of the Transgenic Plants

In order to confirm that lutein biosynthesis in the transgenic plants is influenced by the expression of the polypeptides described herein, the lutein content in leaves, seeds and/or preferably flowers of the plants transformed with the described constructs (Arabidopsis thaliana, Brassica napus and Nicotiana tabacum) is analyzed. For this purpose, the transgenic plants are grown in a greenhouse, and plants which express the gene coding for polypeptide of the invention or used in the method of the invention are identified at the Northern level. The lutein content in flowers, leaves or seeds of these plants is measured. In all, the lutein concentration is raised by comparison with untransformed plants.

[3387] If required and desired, further chromatography steps with a suitable resin may follow. Advantageously, the lutein can be further purified with a so-called RTHPLC. As eluent acetonitrile/water or chloroform/acetonitrile mixtures can be used. If necessary, these chromatography steps may be repeated, using identical or other chromatography resins. The skilled worker is familiar with the selection of suitable chromatography resin and the most effective use for a particular molecule to be purified.

[3388] In addition depending on the produced fine chemical purification is also possible with cristalisation or destilation. Both methods are well known to a person skilled in the art.

[3389] for the disclosure of the paragraphs [0446.0.0.11] to [0496.0.0.11] see paragraphs [0446.0.0.0] to [0496.0.0.0] above.

[3390] As an alternative, the lutein can be detected advantageously as described above.
[3391] The results of the different plant analyses can be seen from the table, which follows:

TABLE VI

| | | Method/ | Min.- | Max.- |
|---|---|---|---|---|
| ORF | Metabolite | Analytics | Value | Value |
| b2344 | Lutein | LC | 1.39 | 2.15 |

[3392] for the disclosure of the paragraphs [0499.0.0.11] and [0500.0.0.11] see paragraphs [0499.0.0.0] and [0500.0.0.0] above.

### Example 15a

### Engineering Ryegrass Plants by Over-Expressing b2344 from E. coli or Homologs of b2344 from Other Organisms

[3393] for the disclosure of the paragraphs [0502.0.0.11] to [0508.0.0.11] see paragraphs [0502.0.0.0] to [0508.0.0.0] above.

### Example 15b

### Engineering Soybean Plants by Over-Expressing b2344 from E. coli or Homologs of b2344 from Other Organisms

[3394] for the disclosure of the paragraphs [0510.0.0.11] to [0513.0.0.11] see paragraphs [0510.0.0.0] to [0513.0.0.0] above.

### Example 15c

### Engineering Corn Plants by Over-Expressing b2344 from E. coli or Homologs of b2344 from Other Organisms

[3395] for the disclosure of the paragraphs [0515.0.0.11] to [0540.0.0.11] see paragraphs [0515.0.0.0] to [0540.0.0.0] above.

### Example 15d

### Engineering Wheat Plants by Over-Expressing b2344 from E. coli or Homologs of b2344 from Other Organisms

[3396] for the disclosure of the paragraphs [0542.0.0.11] to [0544.0.0.11] see paragraphs [0542.0.0.0] to [0544.0.0.0] above.

### Example 15e

### Engineering Rapeseed/Canola Plants by Over-Expressing b2344 from E. coli or Homologs of b2344 from Other Organisms

[3397] for the disclosure of the paragraphs [0546.0.0.11] to [0549.0.0.11] see paragraphs [0544.0.0.0] to [0549.0.0.0] above.

### Example 15f

### Engineering Alfalfa Plants by Over-Expressing b2344 from E. coli or Homologs of b2344 from Other Organisms

[3398] for the disclosure of the paragraphs [0551.0.0.11] to [0554.0.0.11] see paragraphs [0551.0.0.0] to [0554.0.0.0] above.

[3399] /.

[3400] for the disclosure of this paragraph see [0554.2.0.0] above.

[3401] for the disclosure of this paragraph see [0555.0.0.0] above.

[3402] for the disclosure of this paragraph see [0001.0.0.0].

[3403] Sterols are a class of essential, natural compounds required by all eukaryotes to complete their life cycle. In animals, cholesterol is typically the major sterol while in fungi it is ergosterol. Plants produce a class of sterols called phytosterols. Phytosterols are natural components of many vegetables and grains. The term “phytosterols” covers plant sterols and plant stanols. Plant sterols are naturally occurring substances present in the diet as minor components of vegetable oils. The structures of these plant sterols are similar to that of cholesterol with an extra methyl or ethyl group and a double bond in the side chain. Saturated plant sterols, referred to as stanols, have no double bond in the ring structure.

Phytosterols (including plant sterols and stanols) are natural components of plant foods, especially plant oils, seeds and nuts, cereals and legumes specially of edible vegetable oils such as sunflower seed oil and, as such are natural constituents of the human diet. The most common phytosterols are beta-sitosterol, campesterol, and stigmasterol. Beta-sitosterol is found in high amounts in nuts.

[3404] A high concentration of cholesterol in serum, i.e., hypercholesterolemia, is a wellknown risk factor for coronary heart disease (CHD). Blood cholesterol levels can be decreased by following diets, which are low in saturated fat, high in polyunsaturated fat and low in cholesterol. Although considerable achievements have been made in terms of knowledge and education, consumers still find it difficult to follow healthy eating advice.

Both plant sterols and plant stanols are effective in lowering plasma total and low density lipoprotein (LDL) cholesterol and this occurs by inhibiting the absorption of cholesterol from the small intestine. The plasma cholesterol-lowering properties of plant sterols have been known since the 1950s (Pollak, Circulation, 7, 702-706.1953). They have been used as cholesterol-lowering agents, first in a free form (Pollak and Kritchevsky, Sitosterol. In: Monographs on Aherosclerosis. Clarkson T B, Kritchevsky D, Pollak O J, eds. New York, Basel, Karger 1981; 1-219) and recently mainly as esterified phytosterols (Katan et al., Mayo Clin Proc 2003; 78: 965-978).
The consumption of plant sterols and plant stanols lowers blood cholesterol levels by inhibiting the absorption of dietary and endogenously-produced cholesterol from the small intestine and the plant sterols/stanols are only very poorly absorbed themselves. This inhibition is related to the similarity in physico-chemical properties of plant sterols and stanols and cholesterol. Plant sterols and plant stanols appear to be without hazard to health, having been shown without adverse effects in a large number of human studies. They show no evidence of toxicity even at high dose levels and gastro-intestinal absorption is low.

[3405] The most abundant sterols of vascular plants are campesterol, sitosterol and stigmasterol, all of which contain a double bond between the carbon atoms at positions 5 and 6 and are classified as delta-5 sterols.

Exemplary naturally occurring delta-5 plant sterols are isofucosterol, sitosterol, stigmasterol, campesterol, cholesterol, and dihydrobrassicasterol. Exemplary naturally occurring non-delta-5 plant sterols are cycloartenol, 24-methylene cycloartenol, cycloeucalenol, and obtusifoliol.
The ratio of delta-5 to non-delta-5 sterols in plants can be an important factor relating to insect pest resistance. Insect pests are unable to synthesize de novo the steroid nucleus and depend upon external sources of sterols in their food source for production of necessary steroid compounds. In particular, insect pests require an external source of delta-5 sterols. By way of example, externally provided delta-5 sterols are necessary for the production of ecdysteroids, hormones that control reproduction and development. See, e.g., Costet et al., Proc. Natl. Acad. Sci. USA, 84:643 (1987) and Corio-Costet et al., Archives of Insect Biochem. Physiol., 11:47 (1989).

[3406] US 20020148006 and WO 98/45457 describes the modulation of phytosterol compositions to confer resistance to insects, nematodes, fungi and/or environmental stresses, and/or to improve the nutritional value of plants by using a DNA sequence encoding a first enzyme; which binds a first sterol and is preferably selected from the group consisting of S-adenosyl-L-methionine-L₂₄₍₂₅₎-sterol methyl transferase, a C-4 demethylase, a cycloeucalenol to obtusifoliol-isomerase, a 14-α-demethylase, a Δ₈ to Δ₇-isomerase, a Δ₇-C-5-desaturase and a 24,25-reductase, and produces a second sterol and a 3′ non-translated region which causes polyadenylation at the 3′ end of the RNA.

WO 93/16187 discloses new plants containing in its genome one or more genes involved in the early stages of phytosterol biosynthesis, preferably the genes encode mevalonate kinase.
U.S. Pat. No. 5,306,862, U.S. Pat. No. 5,589,619, U.S. Pat. No. 5,365,017, U.S. Pat. No. 5,349,126 and US 20030150008 describe a method of increasing sterol (and squalene) accumulation in a plant based on an increased HMG-CoA reductase activity to increase the pest resistance of transgenic plants.
WO 97/48793 discloses a C-14 sterol reductase polypeptide for the genetic manipulation of a plant sterol biosynthetic pathway.
US 20040172680 disclose the use of a gene expressing a SMT1 (sterol methyltransferase) to increase the level of sterols in the seeds of plants. A DNA sequence encoding sterol methyltransferase isolated from Zea mays is disclosed in WO 00/08190. Bouvier-Nav et al in Eur. J. Biochem. 256, 88-96 (1988) describes two families of sterol methyl transferases (SMTs), The first (SMT1) applying to cycloartenol and the second (SMT2) to 24-methylene Iophenol. Schaller et at (Plant Physiology (1998) 118: 461-169) describes the over-expression of SMT2 from Arabidopsis in tobacco resulting in a change in the ratio of 24-methyl cholesterol to sitosterol in the tobacco leaf.
U.S. Pat. No. 6,723,837 and US 20040199940 disclose nucleic acid molecules encoding proteins and fragments of proteins associated with sterol and phytosterol metabolism as well as cells, that have been manipulated to contain increased levels or overexpress at least one sterol or phytosterol compound. The protein or fragment is selected from the group consisting of a HES1, HMGCoA reductase, squalene synthase, cycloartenol synthase, SMTI, SMTII and UPC, preferably from member of the KES1/HES1/OSH1 family of oxysterol-binding (OSBP) proteins comprising an oxysterol-binding protein consensus sequence—E(K, Q) xSH (H, R) PPx (S, T, A, C, F)A. One class of proteins, oxysterol-binding proteins, have been reported in humans and yeast (Jiang et al., Yeast 10: 341-353 (1994), the entirety of which is herein incorporated by reference). These proteins have been reported to modulate ergosterol levels in yeast (Jiang et al., Yeast 10: 341-353 (1994)). In particular, Jiang et al., reported three genes KES1, HES1 and OSH1, which encode proteins containing an oxysterol-binding region.

[3407] Transgenic plants having altered sterol profiles could be instrumental in establishing a dietary approach to cholesterol management and cardiovascular disease prevention. The altered phytosterol profile further leads to pest resistance.

[3408] Although people consume plant sterols every day in their normal diet, the amount is not great enough to have a significant blood cholesterol lowering effect. The intake of phytosterols varies among different populations according to the food products being consumed, but the average daily Western diet is reported to contain 150-300 mg of these sterols (de Vries et al., J Food Comp Anal 1997; 19: 115-141; Björkhem et al. Inborn errors in bile acid biosynthesis and storage of sterols other than cholesterol. In: The Metabolic and Molecular Bases of Inherited Disease. Scriver C S, Beaudet A L, Sly W S, Valle D, eds. New York, McGraw-Hill 2001; 2961-2988). In order to achieve a cholesterol-lowering benefit, approximately 1 g/day of plant sterols need to be consumed (Hendriks et al., European Journal of Clinical Nutrition, 53, 319-327. 1999).

[3409] Phytosterols are found naturally in plant foods at low levels. The enrichment of foods such as margarines with plant sterols and stanols is one of the recent developments in functional foods to enhance the cholesterol-lowering ability of traditional food products. Incorporation of additional phytosterols into the diet may be an effective way of lowering total and LDL cholesterol levels. The non-esterified phytosterols can be used as novel food ingredients in:
[3410] (a) bakery products and cereals (eg, breakfast cereals, breakfast bars);
[3411] (b) dairy products such as low and reduced fat liquid milk, low and reduced fat yoghurt and yoghurt products, and dairy based desserts;
[3412] (c) non-carbonated soft drinks like low and reduced fat soy beverages and low and reduced fat soy-based yoghurts;
[3413] (d) meat products or edible fats and oils (eg, mayonnaise, spice sauces, salad dressings);
[3414] (e) margarine; and
   table spreads or dietary fats.

[3415] When edible oils undergo normal refining, plant sterols are partially extracted. It is estimated that 2500 tonnes of vegetable oil needs to be refined to produce 1 tonne of plant sterols. Plant stanols are obtained by hydrogenation of the plant sterols.

[3416] Another source of plant sterols is tall oil, derived from the process of paper production from wood and approximately 2500 tons of pine is required to produce 1 ton of plant sterols. Tall oil also contains a higher proportion of plant stanols (primarily b-sitostanol) than do vegetable oils.

[3417] To ensure a high quality of foods and animal feeds, it is therefore necessary to add sterols in a balanced manner to suit the organism.

[3418] Accordingly, there is still a great demand for new and more suitable genes which encode proteins or regulators which participate in the biosynthesis of sterols and make it possible to produce sterols specifically on an industrial scale without unwanted byproducts forming. In the selection of genes for or regulators of biosynthesis two characteristics above all are particularly important. On the one hand, there is as ever a need for improved processes for obtaining the highest possible contents of sterols on the other hand as less as possible byproducts should be produced in the production process.

[3419] for the disclosure of this paragraph see [0013.0.0.0] above.

[3420] Accordingly, in a first embodiment, in context of paragraphs [0001.n.n.12] to [0555.n.n.12] the invention relates to a process for the production of a fine chemical, whereby the fine chemical are sterols. Accordingly, in the present invention, the term “the fine chemical” as used herein relates to “sterols”. Further, the term “the fine chemicals” as used herein also relates to fine chemicals comprising sterols.

[3421] In one embodiment, the term “the fine chemical” means phytosterols, plant sterols and plant stanols. Throughout the specification the term “the fine chemical” means phytosterols and ester, thioester or sterols in free form or bound to other compounds. For the purpose of this description, the term sterol/stanol refers both to free sterols/stanols and conjugated sterols/stanols, for example, where the 3-hydroxy group is esterified by a fatty acid chain or phenolic acid to give a steryl/stanyl ester. As used herein, the term “phytosterol” includes all phytosterols without limitation, for example: sitosterol, campesterol, stigmasterol, brassicasterol, desmosterol, chalinosterol, poriferasterol, clionasterol, the corresponding stanols and all natural or synthesized forms and derivatives thereof, including isomers. It is to be understood that modifications to the phytosterols i.e. to include side chains also falls within the purview of this invention. All those derivates forms are summarized as “conjugates”. In an preferred embodiment, the term “the fine chemical” or the term “phytosterol” or the term “the respective fine chemical” means at least one chemical compound plant sterols and plant stanols selected from the group “beta-sitosterol, sitostanol, stigmasterol, brassicasterol, campestanol, isofucosterol and campesterol”, preferred “beta-sitosterol, campesterol, and/or stigmasterol”, most preferred “beta-sitosterol and/or campesterol”. Also preferably, are esters of sterols/stanols with C10-24 fatty acids.

Increased phytosterol content normally means an increased total phytosterol content. However, an increased phytosterol content also means, in particular, a modified content of the above-described compounds (“beta-sitosterol, sitostanol, stigmasterol, brassicasterol, campestanol, isofucosterol and campesterol”) with phytosterol activity, without the need for an inevitable increase in the total phytosterol content.

[3422] Accordingly, the present invention relates to a process for the production of sterols which comprises
[3423] (a) increasing or generating the activity of a protein as shown in table II, application no. 13, column 3 encoded by the nucleic acid sequences as shown in table I, application no. 13, column 5, in an organelle of a microorganism or plant, or
[3424] (b) increasing or generating the activity of a protein as shown in table II, application no. 13, column 3 encoded by the nucleic acid sequences as shown in table I, application no. 13, column 5 in the plastid of a microorganism or plant, or in one or more parts thereof; and
[3425] (c) growing the organism under conditions which permit the production of the fine chemical, thus sterols or fine chemicals comprising sterols, in said organism or in the culture medium surrounding the organism.

[3426] Accordingly, the term “the fine chemical” means in one embodiment “sterols” in relation to all sequences listed in Table I to IV, application no. 13

[3427] In another embodiment the present invention is related to a process for the production of sterols, which comprises
[3428] (a) increasing or generating the activity of a protein as shown in table II, application no. 13 column 3 encoded by the nucleic acid sequences as shown in table I, application no. 13, column 5, in an organelle of a non-human organism, or
[3429] (b) increasing or generating the activity of a protein as shown in table II, application no. 13, column 3 encoded by the nucleic acid sequences as shown in table I, application no. 13, column 5, which are joined to a nucleic acid sequence encoding a transit peptide in a non-human organism, or in one or more parts thereof; or
[3430] (c) increasing or generating the activity of a protein as shown in table II, application no. 13, column 3 encoded by the nucleic acid sequences as shown in table I, application no. 13, column 5, which are joined to a nucleic acid sequence encoding chloroplast localization sequence, in a non-human organism, or in one or more parts thereof, and
[3431] (d) growing the organism under conditions which permit the production of sterols in said organism.

[3432] In another embodiment, the present invention relates to a process for the production of sterols, which comprises
[3433] (a) increasing or generating the activity of a protein as shown in table II, application no. 13, column 3 encoded by the nucleic acid sequences as shown in table I, application no. 13, column 5, in an organelle of a microorganism or plant through the transformation of the organelle, or
[3434] (b) increasing or generating the activity of a protein as shown in table II, application no. 13, column 3 encoded by the nucleic acid sequences as shown in table I, application no. 13, column 5 in the plastid of a microorganism or plant, or in one or more parts thereof through the transformation of the plastids; and
[3435] (c) growing the organism under conditions which permit the production of the fine chemical, thus, sterols or fine chemicals comprising sterols, in said organism or in the culture medium surrounding the organism.

[3436] Advantageously the activity of the protein as shown in table II, application no. 13, column 3 encoded by the nucleic acid sequences as shown in table I, application no. 13, column 5 is increased or generated in the abovementioned process in the plastid of a microorganism or plant.

[3437] for the disclosure of the paragraphs [0019.0.0.12] to [0024.0.0.12] see paragraphs [0019.0.0.0] and [0024.0.0.0] above.

[3438] Even more preferred nucleic acid sequences are encoding transit peptides as disclosed by von Heijne et al. [Plant Molecular Biology Reporter, Vol. 9 (2), 1991: 104-126], which are hereby incorporated by reference. Table V shows some examples of the transit peptide sequences disclosed by von Heijne et al. According to the disclosure of the invention especially in the examples the skilled worker is able to link other nucleic acid sequences disclosed by von Heijne et al. to the nucleic acid sequences shown in table I, application no. 13, columns 5 and 7. Most preferred nucleic acid sequences encoding transit peptides are derived from the genus Spinacia such as chloroplast 30S ribosomal protein PSrp-1, root acyl carrier protein II, acyl carrier protein, ATP synthase: γ subunit, ATP synthase: δ subunit, cytochrom f, ferredoxin I, ferredoxin NADP oxidoreductase (=FNR), nitrite reductase, phosphoribulokinase, plastocyanin or carbonic anhydrase. The skilled worker will recognize that various other nucleic acid sequences encoding transit peptides can easily isolated from plastid-localized proteins, which are expressed from nuclear genes as precursors and are then targeted to plastids. Such transit peptides encoding sequences can be used for the construction of other expression constructs. The transit peptides advantageously used in the inventive process and which are part of the inventive nucleic acid sequences and proteins are typically 20 to 120 amino acids, preferably 25 to 110, 30 to 100 or 35 to 90 amino acids, more preferably 40 to 85 amino acids and most preferably 45 to 80 amino acids in length and functions post-translationally to direct the protein to the plastid preferably to the chloroplast. The nucleic acid sequences encoding such transit peptides are localized upstream of nucleic acid sequence encoding the mature protein. For the correct molecular joining of the transit peptide encoding nucleic acid and the nucleic acid encoding the protein to be targeted it is sometimes necessary to introduce additional base pairs at the joining position, which forms restriction enzyme recognition sequences useful for the molecular joining of the different nucleic acid molecules. This procedure might lead to very few additional amino acids at the N-terminal of the mature imported protein, which usually and preferably do not interfere with the protein function. In any case, the additional base pairs at the joining position which forms restriction enzyme recognition sequences have to be chosen with care, in order to avoid the formation of stop codons or codons which encode amino acids with a strong influence on protein folding, like e.g. proline. It is preferred that such additional codons encode small n.d. structural flexible amino acids such as glycine or alanine.

[3439] As mentioned above the nucleic acid sequences coding for the proteins as shown in table II, application no. 13, column 3 and its homologs as disclosed in table I, application no. 13, columns 5 and 7 are joined to a nucleic acid sequence encoding a transit peptide, This nucleic acid sequence encoding a transit peptide ensures transport of the protein to the plastid. The nucleic acid sequence of the gene to be expressed and the nucleic acid sequence encoding the transit peptide are operably linked. Therefore the transit peptide is fused in frame to the nucleic acid sequence coding for proteins as shown in table II, application no. 13, column 3 and its homologs as disclosed in table I, application no. 13, columns 5 and 7.

[3440] for the disclosure of the paragraphs [0027.0.0.12] to [0029.0.0.12] see paragraphs [0027.0.0.0] and [0029.0.0.0] above.

[3441] Alternatively, nucleic acid sequences coding for the transit peptides may be chemically synthesized either in part or wholly according to structure of transit peptide sequences disclosed in the prior art. Said natural or chemically synthesized sequences can be directly linked to the sequences encoding the mature protein or via a linker nucleic acid sequence, which may be typically less than 500 base pairs, preferably less than 450, 400, 350, 300, 250 or 200 base pairs, more preferably less than 150, 100, 90, 80, 70, 60, 50, 40 or 30 base pairs and most preferably less than 25, 20, 15, 12, 9, 6 or 3 base pairs in length and are in frame to the coding sequence. Furthermore favorable nucleic acid sequences encoding transit peptides may comprise sequences derived from more than one biological and/or chemical source and may include a nucleic acid sequence derived from the amino-terminal region of the mature protein, which in its native state is linked to the transit peptide. In a preferred embodiment of the invention said amino-terminal region of the mature protein is typically less than 150 amino acids, preferably less than 140, 130, 120, 110, 100 or 90 amino acids, more preferably less than 80, 70, 60, 50, 40, 35, 30, 25 or 20 amino acids and most preferably less than 19, 18, 17, 16, 15, 14, 13, 12, 11 or 10 amino acids in length. But even shorter or longer stretches are also possible. In addition target sequences, which facilitate the transport of proteins to other cell compartments such as the vacuole, endoplasmic reticulum, Golgi complex, glyoxysomes, peroxisomes or mitochondria may be also part of the inventive nucleic acid sequence. The proteins translated from said inventive nucleic acid sequences are a kind of fusion proteins that means the nucleic acid sequences encoding the transit peptide for example the ones shown in table V, preferably the last one of the table are joint to the nucleic acid sequences shown in table I, application no. 13, columns 5 and 7. The person skilled in the art is able to join said sequences in a functional manner. Advantageously the transit peptide part is cleaved off from the protein part shown in table II, application no. 13, columns 5 and 7 during the transport preferably into the plastids. All products of the cleavage of the preferred transit peptide shown in the last line of table V have preferably the N-terminal amino acid sequences QIA CSS or QIA EFQLTT in front of the start methionine of the protein mentioned in table II, application no. 13, columns 5 and 7. Other short amino acid sequences of an range of 1 to 20 amino acids preferable 2 to 15 amino acids, more preferable 3 to 10 amino acids most preferably 4 to 8 amino acids are also possible in front of the start methionine of the protein mentioned in table II, application no. 13, columns 5 and 7. In case of the amino acid sequence QIA CSS the three amino acids in front of the start methionine are stemming from the LIC (=ligatation independent cloning) cassette. Said short amino acid sequence is preferred in the case of the expression of E. coli genes. In case of the amino acid sequence QIA EFQLTT the six amino acids in front of the start methionine are stemming from the LIC cassette. Said short amino acid sequence is preferred in the case of the expression of S. cerevisiae genes. The skilled worker knows that other short sequences are also useful in the expression of the genes mentioned in table I, application no. 13, columns 5 and 7. Furthermore the skilled worker is aware of the fact that there is not a need for such short sequences in the expression of the genes.

[3442] Table V: Examples of transit peptides disclosed by von Heijne et al.: for the disclosure of the Table V see paragraphs [0030.2.0.0] above.

[3443] Alternatively to the targeting of the sequences shown in table II, application no. 13, columns 5 and 7 preferably of sequences in general encoded in the nucleus with the aid of the targeting sequences mentioned for example in table V alone or in combination with other targeting sequences preferably into the plastids, the nucleic acids of the invention can directly introduced into the plastidal genome. Therefore in a preferred embodiment the nucleic acid sequences shown in table I, application no. 13, columns 5 and 7 are directly introduced and expressed in plastids.

The term “introduced” in the context of this specification shall mean the insertion of a nucleic acid sequence into the organism by means of a “transfection”, “transduction” or preferably by “transformation”.
A plastid, such as a chloroplast, has been “transformed” by an exogenous (preferably foreign) nucleic acid sequence if nucleic acid sequence has been introduced into the plastid that means that this sequence has crossed the membrane or the membranes of the plastid. The foreign DNA may be integrated (covalently linked) into plastid DNA making up the genome of the plastid, or it may remain unintegrated (e.g., by including a chloroplast origin of replication). “Stably” integrated DNA sequences are those, which are inherited through plastid replication, thereby transferring new plastids, with the features of the integrated DNA sequence to the progeny.

[3444] for the disclosure of the paragraphs [0030.2.0.12] and [0030.3.0.12] see paragraphs [0030.2.0.0] and [0030.3.0.0] above.

[3445] For the inventive process it is of great advantage that by transforming the plastids the intraspecies specific transgene flow is blocked, because a lot of species such as corn, cotton and rice have a strict maternal inheritance of plastids. By placing the genes specified in table I, application no. 13, columns 5 and 7 or active fragments thereof in the plastids of plants, these genes will not be present in the pollen of said plants.

A further preferred embodiment of the invention relates to the use of so called “chloroplast localization sequences”, in which a first RNA sequence or molecule is capable of transporting or “chaperoning” a second RNA sequence, such as a RNA sequence transcribed from the sequences depicted in table 1, application no. 13, columns 5 and 7 or a sequence encoding a protein, as depicted in table II, application no. 13, columns 5 and 7, from an external environment inside a cell or outside a plastid into a chloroplast. In one embodiment the chloroplast localization signal is substantially similar or complementary to a complete or intact viroid sequence. The chloroplast localization signal may be encoded by a DNA sequence, which is transcribed into the chloroplast localization RNA. The term “viroid” refers to a naturally occurring single stranded RNA molecule (Flores, C R Acad Sci III. 2001 October; 324(10): 943-52). Viroids usually contain about 200-500 nucleotides and generally exist as circular molecules. Examples of viroids that contain chloroplast localization signals include but are not limited to ASBVd, PLMVd, CChMVd and ELVd. The viroid sequence or a functional part of it can be fused to the sequences depicted in table, 1, application no. 13, columns 5 and 7 or a sequence encoding a protein, as depicted in table II, application no. 13, columns 5 and 7 in such a manner that the viroid sequence transports a sequence transcribed from a sequence as depicted in table 1 application no. 13, columns 5 and 7 or a sequence encoding a protein as depicted in table II, application no. 13, columns 5 and 7 into the chloroplasts. A preferred embodiment uses a modified ASBVd (Navarro et al., Virology. 2000 Mar. 1; 268(1): 218-25).
In a further specific embodiment the protein to be expressed in the plastids such as the proteins depicted in table II, application no. 13, columns 5 and 7 are encoded by different nucleic acids. Such a method is disclosed in WO 2004/040973, which shall be incorporated by reference. WO 2004/040973 teaches a method, which relates to the translocation of an RNA corresponding to a gene or gene fragment into the chloroplast by means of a chloroplast localization sequence. The genes, which should be expressed in the plant or plants cells, are split into nucleic acid fragments, which are introduced into different compartments in the plant e.g. the nucleus, the plastids and/or mitochondria. Additionally plant cells are described in which the chloroplast contains a ribozyme fused at one end to an RNA encoding a fragment of a protein used in the inventive process such that the ribozyme can trans-splice the translocated fusion RNA to the RNA encoding the gene fragment to form and as the case may be reunite the nucleic acid fragments to an intact mRNA encoding a functional protein for example as disclosed in table II, application no. 13, columns 5 and 7.

[3446] In a preferred embodiment of the invention the nucleic acid sequences as shown in table I, application no. 13, columns 5 and 7 used in the inventive process are transformed into plastids, which are metabolical active. Those plastids should preferably maintain at a high copy number in the plant or plant tissue of interest, most preferably the chloroplasts found in green plant tissues, such as leaves or cotyledons or in seeds.

[3447] For a good expression in the plastids the nucleic acid sequences as shown in table I, application no. 13, columns 5 and 7 are introduced into an expression cassette using a preferably a promoter and terminator, which are active in plastids preferably a chloroplast promoter. Examples of such promoters include the psbA promoter from the gene from spinach or pea, the rbcL promoter, and the atpB promoter from corn.

[3448] for the disclosure of the paragraphs [0031.0.0.12] and [0032.0.0.12] see paragraphs [0031.0.0.0] and [0032.0.0.0] above.

[3449] Advantageously the process for the production of the fine chemical leads to an enhanced production of the fine chemical. The terms “enhanced” or “increase” mean at least a 10%, 20%, 30%, 40% or 50%, preferably at least 60%, 70%, 80%, 90% or 100%, more preferably 150%, 200%, 300%, 400% or 500% higher production of the fine chemical in comparison to the reference as defined below, e.g. that means in comparison to an organism without the aforementioned modification of the activity of a protein as shown in table II, application no. 13, column 3. Preferably the modification of the activity of a protein as shown in table II, application no. 13, column 3 or their combination can be achieved by joining the protein to a transit peptide.

[3450] Surprisingly it was found, that the transgenic expression of the E. coli proteins shown in table II, application no. 13, column 3 in plastids of a plant such as Arabidopsis thaliana for example through the linkage to at least one targeting sequence—for example as mentioned in table V—conferred an increase in the respective fine chemical indicated in column 6 “metabolite” of each table I to IV in the transformed plant.

Surprisingly it was found, that the transgenic expression of the E. coli protein b0931 or b1410 in combination with a plastidal targeting sequence in Arabidopsis thaliana conferred an increase in beta-sitosterol.
Surprisingly it was found, that the transgenic expression of the E. coli protein b1410 or b1556 or b2022 or b3708 in combination with a plastidal targeting sequence in Arabidopsis thaliana conferred an increase in campesterol.
Surprisingly it was found, that the transgenic expression of the E. coli protein b1704 in combination with a plastidal targeting sequence in Arabidopsis thaliana conferred an increase in stigmasterol.
Surprisingly it was found, that the transgenic expression of the Saccharomyces cerevisiae protein YDR035W or YLR027C in combination with a plastidal targeting sequence in Arabidopsis thaliana conferred an increase in beta-sitosterol.
Surprisingly it was found, that the transgenic expression of the Saccharomyces cerevisiae protein YDR035W or YLR027C or YNL241C in combination with a plastidal targeting sequence in Arabidopsis thaliana conferred an increase in campesterol.

[3451] for the disclosure of this paragraph see paragraph [0035.0.0.0] above.

[3452] The sequence of b0931 from Escherichia coli (Accession PIR:JQ0756) has been published in Blattner et al., Science 277 (5331), 1453-1474 (1997), and its activity is being defined as “nicotinate phosphoribosyltransferase”. Accordingly, in one embodiment, the process of the present invention comprises the use of a “nicotinate phosphoribosyltransferase” or its homolog, e.g. as shown herein, for the production of the fine chemical, meaning of sterols, in particular for increasing the amount of beta-sitosterol in free or bound form in an organism or a part thereof, as mentioned. In one embodiment, in the process of the present invention the activity of a b0931 protein is increased or generated, e.g. from Escherichia coli or a homolog thereof, preferably linked at least to one transit peptide as mentioned for example in table V.

In another embodiment, in the process of the present invention the activity of a b0931 protein is increased or generated in a subcellular compartment of the organism or organism cell such as in an organelle like a plastid or mitochondria.
The sequence of b1410 from Escherichia coli (Accession NP_{—}415928) has been published in Blattner et al., Science 277 (5331), 1453-1474 (1997), and its activity is being defined as “putative methylase with S-adenosyl-L-methionine-dependent methyltransferase domain and alpha/beta-hydrolase domain”. Accordingly, in one embodiment, the process of the present invention comprises the use of a “putative methylase with S-adenosyl-L-methionine-dependent methyltransferase domain and alpha/beta-hydrolase domain” or its homolog, e.g. as shown herein, for the production of the fine chemical, meaning of sterols, in particular for increasing the amount of beta-sitosterol and/or campesterol in free or bound form in an organism or a part thereof, as mentioned. In one embodiment, in the process of the present invention the activity of a b1410 protein is increased or generated, e.g. from Escherichia coli or a homolog thereof, preferably linked at least to one transit peptide as mentioned for example in table V.
In another embodiment, in the process of the present invention the activity of a b1410 protein is increased or generated in a subcellular compartment of the organism or organism cell such as in an organelle like a plastid or mitochondria.
The sequence of b1556 from Escherichia coli (Accession NP_{—}416074) has been published in Blattner et al., Science 277 (5331), 1453-1474 (1997), and its activity is being defined as “Qin prophage”. Accordingly, in one embodiment, the process of the present invention comprises the use of a “Qin prophage” or its homolog, e.g. as shown herein, for the production of the fine chemical, meaning of sterols, in particular for increasing the amount of campesterol in free or bound form in an organism or a part thereof, as mentioned. In one embodiment, in the process of the present invention the activity of a b1556 protein is increased or generated, e.g. from Escherichia coli or a homolog thereof, preferably linked at least to one transit peptide as mentioned for example in table V.
In another embodiment, in the process of the present invention the activity of a b1556 protein is increased or generated in a subcellular compartment of the organism or organism cell such as in an organelle like a plastid or mitochondria.
The sequence of b1704 from Escherichia coli (Accession NP_{—}416219) has been published in Blattner et al., Science 277 (5331), 1453-1474 (1997), and its activity is being defined as “3-deoxy-D-arabinoheptulosonate-7-phosphate synthase (DAHP synthetase), tryptophan-repressible”. Accordingly, in one embodiment, the process of the present invention comprises the use of a “3-deoxy-D-arabinoheptulosonate-7-phosphate synthase (DAHP synthetase), tryptophan-repressible” or its homolog, e.g. as shown herein, for the production of the fine chemical, meaning of sterols, in particular for increasing the amount of stigmasterol in free or bound form in an organism or a part thereof, as mentioned. In one embodiment, in the process of the present invention the activity of a b1704 protein is increased or generated, e.g. from Escherichia coli or a homolog thereof, preferably linked at least to one transit peptide as mentioned for example in table V.
In another embodiment, in the process of the present invention the activity of a b1704 protein is increased or generated in a subcellular compartment of the organism or organism cell such as in an organelle like a plastid or mitochondria.
The sequence of b2022 from Escherichia coli (Accession NP_{—}416526) has been published in Blattner et al., Science 277 (5331), 1453-1474 (1997), and its activity is being defined as “bifunctional histidinol-phosphatase/imidazoleglycerol-phosphate dehydratase”. Accordingly, in one embodiment, the process of the present invention comprises the use of a “bifunctional histidinol-phosphatase/imidazoleglycerol-phosphate dehydratase” or its homolog, e.g. as shown herein, for the production of the fine chemical, meaning of sterols, in particular for increasing the amount of campesterol in free or bound form in an organism or a part thereof, as mentioned. In one embodiment, in the process of the present invention the activity of a b2022 protein is increased or generated, e.g. from Escherichia coli or a homolog thereof, preferably linked at least to one transit peptide as mentioned for example in table V.
In another embodiment, in the process of the present invention the activity of a b2022 protein is increased or generated in a subcellular compartment of the organism or organism cell such as in an organelle like a plastid or mitochondria.
The sequence of b3708 from Escherichia coli (Accession PIR:WZEC) has been published in Blattner et al., Science 277 (5331), 1453-1474 (1997), and its activity is being defined as “tryptophan deaminase, PLP-dependent”. Accordingly, in one embodiment, the process of the present invention comprises the use of a “tryptophan deaminase, PLP-dependent” or its homolog, e.g. as shown herein, for the production of the fine chemical, meaning of sterols, in particular for increasing the amount of campesterol in free or bound form in an organism or a part thereof, as mentioned. In one embodiment, in the process of the present invention the activity of a b3708 protein is increased or generated, e.g. from Escherichia coli or a homolog thereof, preferably linked at least to one transit peptide as mentioned for example in table V.
In another embodiment, in the process of the present invention the activity of a b3708 protein is increased or generated in a subcellular compartment of the organism or organism cell such as in an organelle like a plastid or mitochondria.
The sequence of YDR035W from Saccharomyces cerevisiae (NP_{—}010320) has been published in published in Jacq et al., Nature 387 (6632 Suppl), 75-78, 1997 and Goffeau, Science 274 (5287), 546-547, 1996, and its activity is being defined as “3-deoxy-D-arabino-heptulosonate 7-phosphate (DAHP) synthase”. Accordingly, in one embodiment, the process of the present invention comprises the use of a “3-deoxy-D-arabinoheptulosonate 7-phosphate (DAHP) synthase” or its homolog, e.g. as shown herein, for the production of the fine chemical, meaning of sterols, in particular for increasing the amount of beta-sitosterol and/or campesterol in free or bound form in an organism or a part thereof, as mentioned. In one embodiment, in the process of the present invention the activity of a YDR035W protein is increased or generated, e.g. from Saccharomyces cerevisiae or a homolog thereof, preferably linked at least to one transit peptide as mentioned for example in table V.
In another embodiment, in the process of the present invention the activity of a YDR035W protein is increased or generated in a subcellular compartment of the organism or organism cell such as in an organelle like a plastid or mitochondria.
The sequence of YLR027C from Saccharomyces cerevisiae (Accession NP_{—}013127) has been published in published in Jacq et al., Nature 387 (6632 Suppl), 75-78, 1997 and Goffeau, Science 274 (5287), 546-547, 1996, and its activity is being defined as “aspartate aminotransferase”. Accordingly, in one embodiment, the process of the present invention comprises the use of a “aspartate aminotransferase” or its homolog, e.g. as shown herein, for the production of the fine chemical, meaning of sterols, in particular for increasing the amount of campesterol and/or beta-sitosterol in free or bound form in an organism or a part thereof, as mentioned. In one embodiment, in the process of the present invention the activity of a YLR027C protein is increased or generated, e.g. from Saccharomyces cerevisiae or a homolog thereof, preferably linked at least to one transit peptide as mentioned for example in table V.
In another embodiment, in the process of the present invention the activity of a YLR027C protein is increased or generated in a subcellular compartment of the organism or organism cell such as in an organelle like a plastid or mitochondria.
The sequence of YNL241C from Saccharomyces cerevisiae (Accession NP_{—}014158) has been published in published in Jacq et al., Nature 387 (6632 Suppl), 75-78, 1997 and Goffeau, Science 274 (5287), 546-547, 1996, and its activity is being defined as “glucose-6-phosphate dehydrogenase”. Accordingly, in one embodiment, the process of the present invention comprises the use of a “glucose-6-phosphate dehydrogenase” or its homolog, e.g. as shown herein, for the production of the fine chemical, meaning of sterols, in particular for increasing the amount of campesterol in free or bound form in an organism or a part thereof, as mentioned. In one embodiment, in the process of the present invention the activity of a YNL241C protein is increased or generated, e.g. from Saccharomyces cerevisiae or a homolog thereof, preferably linked at least to one transit peptide as mentioned for example in table V.
In another embodiment, in the process of the present invention the activity of a YNL241C protein is increased or generated in a subcellular compartment of the organism or organism cell such as in an organelle like a plastid or mitochondria.

[3453] In one embodiment, the homolog of the b0931, b1410, b1556, b1704, 2022 and/or b3708 is a homolog having said activity and being derived from bacteria. In one embodiment, the homolog of the b0931, b1410, b1556, b1704, 2022 and/or b3708 is a homolog having said activity and being derived from Proteobacteria. In one embodiment, the homolog of the b0931, b1410, b1556, b1704, 2022 and/or b3708 is a homolog having said activity and being derived from Gammaproteobacteria. In one embodiment, the homolog of the b0931, b1410, b1556, b1704, 2022 and/or b3708 is a homolog having said activity and being derived from Enterobacteriales. In one embodiment, the homolog of the b0931, b1410, b1556, b1704, 2022 and/or b3708 is a homolog having said activity and being derived from Enterobacteriaceae. In one embodiment, the homolog of the b0931, b1410, b1556, b1704, 2022 and/or b3708 is a homolog having said activity and being derived from Escherichia, preferably from Escherichia coli.

In one embodiment, the homolog of the YDR035w, YLR027c and/or YNL241c is a homolog having said activity and being derived from an eukaryotic. In one embodiment, the homolog of the YDR035w, YLR027c and/or YNL241c is a homolog having said activity and being derived from Fungi. In one embodiment, the homolog of the YDR035w, YLR0276 and/or YNL241c is a homolog having said activity and being derived from Ascomyceta. In one embodiment, the homolog of the YDR035w, YLR027c and/or YNL241c is a homolog having said activity and being derived from Saccharomycotina. In one embodiment, the homolog of the YDR035w, YLR027c and/or YNL241c is a homolog having said activity and being derived from Saccharomycetes. In one embodiment, the homolog of the YDR035w, YLR027c and/or YNL241c is a homolog having said activity and being derived from Saccharomycetales. In one embodiment, the homolog of the YDR035w, YLR027c and/or YNL241c is a homolog having said activity and being derived from Saccharomycetaceae. In one embodiment, the homolog of the YDR035w, YLR027c and/or YNL241c is a homolog having said activity and being derived from Saccharomycetes.

[3454] Homologs of the polypeptide disclosed in table II, application no. 13, column 3 may be the polypeptides encoded by the nucleic acid molecules indicated in table I, application no. 13, column 7, resp., or may be the polypeptides indicated in table II, application no. 13, column 7, resp.

[3455] for the disclosure of this paragraph see paragraph [0038.0.0.0] above.

[3456] In accordance with the invention, a protein or polypeptide has the “activity of an protein as shown in table II, application no. 13, column 3” if its de novo activity, or its increased expression directly or indirectly leads to an increased in the level of the fine chemical indicated in the respective line of table II, application no. 13, column 6 “metabolite” in the organism or a part thereof, preferably in a cell of said organism, more preferably in an organelle such as a plastid or mitochondria of said organism. The protein has the above mentioned activities of a protein as shown in table II, application no. 13, column 3, preferably in the event the nucleic acid sequences encoding said proteins is functionally joined to the nucleic acid sequence of a transit peptide. Throughout the specification the activity or preferably the biological activity of such a protein or polypeptide or an nucleic acid molecule or sequence encoding such protein or polypeptide is identical or similar if it still has the biological or enzymatic activity of a protein as shown in table II, application no. 13, column 3, or which has at least 10% of the original enzymatic or biological activity, preferably 20%, particularly preferably 30%, most particularly preferably 40% in comparison to a protein as shown in the respective line of table II, application no. 13, column 3 of E. coli or Saccharomyces cerevisiae.

[3457] for the disclosure of the paragraphs [0040.0.0.12] to [0047.0.0.12] see paragraphs [0040.0.0.0] to [0047.0.0.0] above.

[3458] Preferably, the reference, control or wild type differs form the subject of the present invention only in the cellular activity, preferably of the plastidial activity of the polypeptide of the invention, e.g. as result of an increase in the level of the nucleic acid molecule of the present invention or an increase of the specific activity of the polypeptide of the invention, e.g. by or in the expression level or activity of an protein having the activity of a respective protein as shown in table II, application no. 13, column 3 its biochemical or genetical causes and the increased amount of the respective fine chemical.

[3459] for the disclosure of the paragraphs [0049.0.0.12] to [0051.0.0.12] see paragraphs [0049.0.0.0] to [0051.0.0.0] above.

[3460] For example, the molecule number or the specific activity of the polypeptide or the nucleic acid molecule may be increased. Larger amounts of the fine chemical can be produced if the polypeptide or the nucleic acid of the invention is expressed de novo in an organism lacking the activity of said protein, preferably the nucleic acid molecules as mentioned in table I, application no. 13, columns 5 and 7 alone or preferably in combination with a transit peptide for example as mentioned in table V or in another embodiment by introducing said nucleic acid molecules into an organelle such as an plastid or mitochondria in the transgenic organism. However, it is also possible to modify the expression of the gene which is naturally present in the organisms, for example by integrating a nucleic acid sequence, encoding a plastidic targeting sequence in front (5 prime) of the coding sequence, leading to a functional preprotein, which is directed for example to the plastids.

[3461] for the disclosure of the paragraphs [0053.0.0.12] to [0058.0.0.12] see paragraphs [0053.0.0.0] to [0058.0.0.0] above.

[3462] In case the activity of the Escherichia coli protein b0931 or its homologs, e.g. a “nicotinate phosphoribosyltransferase” is increased, advantageously in an organelle such as a plastid or mitochondria, preferably, an increase of the fine chemical, preferably of free beta sitosterol between 13% and 27% or more is conferred.

In case the activity of the Escherichia coli protein b1410 or its homologs, e.g. a “putative methylase with S-adenosyl-L-methionine-dependent methyltransferase domain and alpha/beta-hydrolase domain” is increased, advantageously in an organelle such as a plastid or mitochondria, preferably, an increase of the fine chemical, preferably of free beta-sitosterol between 20% and 26% or more is conferred.
In case the activity of the Escherichia coli protein b1410 or its homologs, e.g. a “putative methylase with S-adenosyl-L-methionine-dependent methyltransferase domain and alpha/beta-hydrolase domain” is increased, advantageously in an organelle such as a plastid or mitochondria, preferably, an increase of the fine chemical, preferably of free beta campesterol between 19% and 23% or more is conferred.
In case the activity of the Escherichia coli protein b1410 or its homologs, e.g. a “putative methylase with S-adenosyl-L-methionine-dependent methyltransferase domain and alpha/beta-hydrolase domain” is increased, advantageously in an organelle such as a plastid or mitochondria, preferably, an increase of the fine chemical, preferably of free beta-sitosterol between 20% and 26% or more and beta campesterol between 19% and 23% or more is conferred.
In case the activity of the Escherichia coli protein b1556 or its homologs, e.g. a “Qin prophage” is increased, advantageously in an organelle such as a plastid or mitochondria, preferably, an increase of the fine chemical, preferably of free campesterol between 26% and 52% or more is conferred.
In case the activity of the Escherichia coli protein b1704 or its homologs, e.g. a “3-deoxy-D-arabinoheptulosonate-7-phosphate synthase (DAHP synthetase), tryptophan-repressible” is increased, advantageously in an organelle such as a plastid or mitochondria, preferably, an increase of the fine chemical, preferably of free stigmasterol between 83% and 665% or more is conferred.
In case the activity of the Escherichia coli protein b2022 or its homologs, e.g. a “bifunctional histidinol-phosphatase/imidazoleglycerol-phosphate dehydratase” is increased, advantageously in an organelle such as a plastid or mitochondria, preferably, an increase of the fine chemical, preferably of free campesterol between 22% and 27% or more is conferred.
In case the activity of the Escherichia coli protein b3708 or its homologs, e.g. a “tryptophan deaminase, PLP-dependent” is increased, advantageously in an organelle such as a plastid or mitochondria, preferably, an increase of the fine chemical, preferably of free campesterol between 18% and 85% or more is conferred.
In case the activity of the Saccharomyces cerevisiae protein YDR035W or its homologs, e.g. a “3-deoxy-D-arabino-heptulosonate 7-phosphate (DAHP) synthase” is increased, advantageously in an organelle such as a plastid or mitochondria, preferably, an increase of the fine chemical, preferably of free beta-sitosterol between 15% and 22% or more is conferred.
In case the activity of the Saccharomyces cerevisiae protein YDR035W or its homologs, e.g. a “3-deoxy-D-arabino-heptulosonate 7-phosphate (DAHP) synthase” is increased, advantageously in an organelle such as a plastid or mitochondria, preferably, an increase of the fine chemical, preferably of free campesterol between 20% and 25% or more is conferred.
In case the activity of the Saccharomyces cerevisiae protein YDR035W or its homologs, e.g. a “3-deoxy-D-arabino-heptulosonate 7-phosphate (DAHP) synthase” is increased, advantageously in an organelle such as a plastid or mitochondria, preferably, an increase of the fine chemical, preferably of free beta-sitosterol between 15% and 22% or more and free campesterol between 20% and 25% or more is conferred.
In case the activity of the Saccharomyces cerevisiae protein YLR027C or its homologs, e.g. a “aspartate aminotransferase” is increased, advantageously in an organelle such as a plastid or mitochondria, preferably, an increase of the fine chemical, preferably of free campesterol between 22% and 285% or more is conferred
In case the activity of the Saccharomyces cerevisiae protein YLR027C or its homologs, e.g. a “aspartate aminotransferase” is increased, advantageously in an organelle such as a plastid or mitochondria, preferably, an increase of the fine chemical, preferably of free beta-sitosterol between 24% and 219% or more is conferred
In case the activity of the Saccharomyces cerevisiae protein YLR027C or its homologs, e.g. a “aspartate aminotransferase” is increased, advantageously in an organelle such as a plastid or mitochondria, preferably, an increase of the fine chemical, preferably of free campesterol between 22% and 285% or more and free beta-sitosterol between 24% and 219% or more is conferred
In case the activity of the Saccharomyces cerevisiae protein YNL241C or its homologs, e.g. a “glucose-6-phosphate dehydrogenase” is increased, advantageously in an organelle such as a plastid or mitochondria, preferably, an increase of the fine chemical, preferably of free campesterol between 21% and 31% or more is conferred

[3463] In one embodiment, the activity of the Escherichia coli protein b0931 or its homologs, e.g. a “nicotinate phosphoribosyltransferase” is advantageously increased in an organelle such as a plastid or mitochondria, preferably conferring an increase of the fine chemical beta-sitosterol indicated in column 6 “metabolites” for application no. 13 in any one of Tables I to IV.

In one embodiment, the activity of the Escherichia coli protein b1410 or its homologs, e.g. a “putative methylase with S-adenosyl-L-methionine-dependent methyltransferase domain and alpha/beta-hydrolase domain” is advantageously increased in an organelle such as a plastid or mitochondria, preferably conferring an increase of the fine chemical beta-sitosterol and/or campesterol as indicated in column 6 “metabolites” for application no. 13 in any one of Tables I to IV
In one embodiment, the activity of the Escherichia coli protein b1556 or its homologs, e.g. a “Qin prophage” is advantageously increased in an organelle such as a plastid or mitochondria, preferably conferring an increase of the fine chemical campesterol as indicated in column 6 “metabolites” for application no. 13 in any one of Tables I to IV

[3464] In one embodiment, the activity of the Escherichia coli protein b1704 or its homologs, e.g. a “3-deoxy-D-arabinoheptulosonate-7-phosphate synthase (DAHP synthetase), tryptophan-repressible” is advantageously increased in an organelle such as a plastid or mitochondria, preferably conferring an increase of the fine chemical stigmasterol as indicated in column 6 “metabolites” for application no. 13 in any one of Tables I to IV

In one embodiment, the activity of the Escherichia coli protein b2022 or its homologs, e.g. a “bifunctional histidinol-phosphatase/imidazoleglycerol-phosphate dehydratase” is advantageously increased in an organelle such as a plastid or mitochondria, preferably conferring an increase of the fine chemical campesterol as indicated in column 6 “metabolites” for application no. 13 in any one of Tables I to IV
In one embodiment, the activity of the Escherichia coli protein b3708 or its homologs, e.g. a “tryptophan deaminase, PLP-dependent” is advantageously increased in an organelle such as a plastid or mitochondria, preferably conferring an increase of the fine chemical campesterol as indicated in column 6 “metabolites” for application no. 13 in any one of Tables I to IV
In one embodiment, the activity of the Saccharomcyes cerevisiae protein YDR035w or its homologs, e.g. a “3-deoxy-D-arabino-heptulosonate 7-phosphate (DAHP) synthase” is advantageously increased in an organelle such as a plastid or mitochondria, preferably conferring an increase of the fine chemical beta-sitosterol and/or campesterol as indicated in column 6 “metabolites” for application no. 13 in any one of Tables I to IV
In one embodiment, the activity of the Saccharomcyes cerevisiae protein YLR027c or its homologs, e.g. a “aspartate aminotransferase” is advantageously increased in an organelle such as a plastid or mitochondria, preferably conferring an increase of the fine chemical beta-sitosterol and/or campesterol as indicated in column 6 “metabolites” for application no. 13 in any one of Tables I to IV
In one embodiment, the activity of the Saccharomcyes cerevisiae protein YNL241c or its homologs, e.g. a “glucose-6-phosphate dehydrogenase” is advantageously increased in an organelle such as a plastid or mitochondria, preferably conferring an increase of the fine chemical campesterol as indicated in column 6 “metabolites” for application no. 13 in any one of Tables I to IV

[3465] for the disclosure of the paragraphs [0061.0.0.12] and [0062.0.0.12] see paragraphs [0061.0.0.0] and [0062.0.0.0] above.

[3466] A protein having an activity conferring an increase in the amount or level of the fine chemical, preferably upon targeting to the plastids, has in one embodiment the structure of the polypeptide described herein, in particular of the polypeptides comprising the consensus sequence shown in table IV, application no. 13, column 7 or of the polypeptide as shown in the amino acid sequences as disclosed in table II, application no. 13, columns 5 and 7 or the functional homologues thereof as described herein, or is encoded by the nucleic acid molecule characterized herein or the nucleic acid molecule according to the invention, for example by the nucleic acid molecule as shown in table I, application no. 13, columns 5 and 7 or its herein described functional homologues and has the herein mentioned activity.

[3467] For the purposes of the present invention, the reference to the fine chemical, e.g. to the term “sterols”, also encompasses the corresponding salt, ester, e.g. the mono- or diesters of fatty acids, e.g. sterols dipalmitates, dimyristates or monomyristates, or sterols bound to proteins, e.g. lipoproteins or e.g. tuberlin, or bound to other compounds.

Sterols exist in a matrix in foods. Thus, in one embodiment, the fine chemical produced according to the process of the invention is a matrix comprising inter alia lipids, in particular cholesterol, phospholipid, and/or triglycerides, and sterols.

[3468] for the disclosure of the paragraphs [0065.0.0.12] and [0066.0.0.12] see paragraphs [0065.0.0.0] and [0066.0.0.0] above.

[3469] In one embodiment, the process of the present invention comprises one or more of the following steps
[3470] a) stabilizing a protein conferring the increased expression of a protein encoded by the nucleic acid molecule of the invention or of the polypeptide of the invention, e.g. of a polypeptide having the activity of a protein as indicated in table II, application no. 13, columns 5 and 7 or its homologs activity having herein-mentioned sterol increasing activity; and/or
[3471] b) stabilizing a mRNA conferring the increased expression of a protein encoded by the nucleic acid molecule of the invention, which is in the sense of the invention a fusion of a nucleic acid sequence encoding a transit peptide and of a nucleic acid sequence as shown in table I, application no. 13, columns 5 and 7, e.g. a nucleic acid sequence encoding a polypeptide having the activity of a protein as indicated in table II, application no. 13, columns 5 and 7 or its homologs activity or of a mRNA encoding the polypeptide of the present invention having herein-mentioned sterol increasing activity; and/or
[3472] c) increasing the specific activity of a protein conferring the increased expression of a protein encoded by the nucleic acid molecule of the invention or of the polypeptide of the present invention having herein-mentioned sterol increasing activity, e.g. of a polypeptide having the activity of a protein as indicated in table II, application no. 13, columns 5 and 7 or its homologs activity, or decreasing the inhibitory regulation of the polypeptide of the invention; and/or
[3473] d) generating or increasing the expression of an endogenous or artificial transcription factor mediating the expression of a protein conferring the increased expression of a protein encoded by the nucleic acid molecule of the invention or of the polypeptide of the invention having herein-mentioned sterol increasing activity, e.g. of a polypeptide having the activity of a protein as indicated in table II, application no. 13, columns 5 and 7 or its homologs activity; and/or
[3474] e) stimulating activity of a protein conferring the increased expression of a protein encoded by the nucleic acid molecule of the present invention or a polypeptide of the present invention having herein-mentioned sterol increasing activity, e.g. of a polypeptide having the activity of a protein as indicated in table II, application no. 13, columns 5 and 7 or its homologs activity, by adding one or more exogenous inducing factors to the organisms or parts thereof; and/or
[3475] f) expressing a transgenic gene encoding a protein conferring the increased expression of a polypeptide encoded by the nucleic acid molecule of the present invention or a polypeptide of the present invention, having herein-mentioned sterol increasing activity, e.g. of a polypeptide having the activity of a protein as indicated in table II, application no. 13, columns 5 and 7 or its homologs activity, and/or
[3476] g) increasing the copy number of a gene conferring the increased expression of a nucleic acid molecule encoding a polypeptide encoded by the nucleic acid molecule of the invention or the polypeptide of the invention having herein-mentioned sterol increasing activity, e.g. of a polypeptide having the activity of a protein as indicated in table II, application no. 13, columns 5 and 7 or its homologs activity; and/or
[3477] h) increasing the expression of the endogenous gene encoding the polypeptide of the invention, e.g. a polypeptide having the activity of a protein as indicated in table II, application no. 13, columns 5 and 7 or its homologs activity, by adding positive expression or removing negative expression elements, e.g. homologous recombination can be used to either introduce positive regulatory elements like for plants the 35S enhancer into the promoter or to remove repressor elements form regulatory regions. Further gene conversion methods can be used to disrupt repressor elements or to enhance to activity of positive elements. Positive elements can be randomly introduced in plants by T-DNA or transposon mutagenesis and lines can be identified in which the positive elements have be integrated near to a gene of the invention, the expression of which is thereby enhanced; and/or
[3478] i) modulating growth conditions of an organism in such a manner, that the expression or activity of the gene encoding the protein of the invention or the protein itself is enhanced for example microorganisms or plants can be grown for example under a higher temperature regime leading to an enhanced expression of heat shock proteins, which can lead an enhanced fine chemical production; and/or
[3479] j) selecting of organisms with especially high activity of the proteins of the invention from natural or from mutagenized resources and breeding them into the target organisms, eg the elite crops; and/or
[3480] k) directing a protein encoded by the nucleic acid molecule of the invention or of the polypeptide of the present invention having herein-mentioned sterol increasing activity, e.g. of polypeptide having the activity of a protein as indicated in table II, application no. 13, columns 5 and 7 or its homologs activity, to the plastids by the addition of a plastidial targeting sequence; and/or
[3481] l) generating the expression of a protein encoded by the nucleic acid molecule of the invention or of the polypeptide of the present invention having herein-mentioned sterol increasing activity, e.g. of a polypeptide having the activity of a protein as indicated in table II, application no. 13, columns 5 and 7 or its homologs activity in plastids by the stable or transient transformation advantageously stable transformation of organelles preferably plastids with an inventive nucleic acid sequence preferably in form of an expression cassette containing said sequence leading to the plastidial expression of the nucleic acids or polypeptides of the invention; and/or
[3482] m) generating the expression of a protein encoded by the nucleic acid molecule of the invention or of the polypeptide of the present invention having herein-mentioned sterol increasing activity, e.g. of a polypeptide having the activity of a protein as indicated in table II, application no. 13, columns 5 and 7 or its homologs activity in plastids by integration of a nucleic acid of the invention into the plastidal genome under control of preferable a plastidial promoter.

[3483] Preferably, said mRNA is the nucleic acid molecule of the present invention and/or the protein conferring the increased expression of a protein encoded by the nucleic acid molecule of the present invention alone or link to a transit nucleic acid sequence or transit peptide encoding nucleic acid sequence or the polypeptide having the herein mentioned activity, e.g. conferring the increase of the respective fine chemical as indicated in column 6 of application no. 13 in Table I to IV, resp., after increasing the expression or activity of the encoded polypeptide preferably in organelles such as plastids or having the activity of a polypeptide having an activity as the protein as shown in table II, application no. 13, column 3 or its homologs. Preferably the increase of the fine chemical takes place in plastids.

[3484] for the disclosure of the paragraphs [0069.0.0.12] to [0079.0.0.12] see paragraphs [0069.0.0.0] to [0079.0.0.0] above.

[3485] The activation of an endogenous polypeptide having above-mentioned activity, e.g. having the activity of a protein as shown in table II, application no. 13, column 3 or of the polypeptide of the invention, e.g. conferring the increase of the respective fine chemical after increase of expression or activity in the cytsol and/or in an organelle like a plastid, preferentially in the plastid, can also be increased by introducing a synthetic transcription factor, which binds close to the coding region of the gene encoding the protein as shown in table II, application no. 13, column 3 and activates its transcription. A chimeric zinc finger protein can be constructed, which comprises a specific DNA-binding domain and an activation domain as e.g. the VP16 domain of Herpes Simplex virus. The specific binding domain can bind to the regulatory region of the gene encoding the protein as shown in table II, application no. 13, column 3. The expression of the chimeric transcription factor in a organism, in particular in a plant, leads to a specific expression of the protein as shown in table II, application no. 13, column 3, see e.g. in WO01/52620, Oriz, Proc. Natl. Acad. Sci. USA, 2002, Vol. 99, 13290 or Guan, Proc. Natl. Acad. Sci. USA, 2002, Vol. 99, 13296.

[3486] For the disclosure of the paragraphs [0081.0.0.12] to [0084.0.0.12] see paragraphs [0081.0.0.0] to [0084.0.0.0] above.

[3487] Owing to the introduction of a gene or a plurality of genes conferring the expression of the nucleic acid molecule of the invention or the nucleic acid molecule used in the method of the invention or the polypeptide of the invention or the polypeptide used in the method of the invention as described below, for example the nucleic acid construct mentioned below into an organism alone or in combination with other genes, it is possible not only to increase the biosynthetic flux towards the end product, but also to increase, modify or create de novo an advantageous, preferably novel metabolites composition in the organism, e.g. an advantageous sterols containing composition comprising a higher content of (from a viewpoint of nutritional physiology limited), sterols or phytosterol(s), in particular campesterol, beta-sitosterol or stigmasterol, e.g. in combination with fatty acid(s), dietary oil(s), such as corn oil, and/or triglycerides, in particular medium-chain (e.g. C₄ to C₁₈-, in particular C₆ to C₁₄—) triglycerides, lipoproteins, e.g. HDL and/or VLDL, micelles, clathrate complexes, e.g. conjugated with bile salts, chylomicrons, chylomicron remnants, tuberlin and/or sterols It can also be advantageous to increase the level of a metabolic precursor of sterols in the organism or part thereof.

Depending on the choice of the organism used for the process according to the present invention, for example a microorganism or a plant, compositions or mixtures of various sterols can be produced.

[3488] for the disclosure of this paragraph see paragraph [0086.0.0.0] above.

[3489] By influencing the metabolism thus, it is possible to produce, in the process according to the invention, further advantageous compounds. Examples of such compounds are in addition to phytosterols further sterols, stanols or squalene, squalene epoxide or cycloartenol.

[3490] Accordingly, in one embodiment, the process according to the invention relates to a process, which comprises:
[3491] a) providing a non-human organism, preferably a microorganism, a non-human animal, a plant or animal cell, a plant or animal tissue or a plant, more preferably a microorganism, a plant or a plant tissue;
[3492] b) increasing the activity of a protein as shown in table II, application no. 13, column 3 or of a polypeptide being encoded by the nucleic acid molecule of the present invention and described below, e.g. conferring an increase of the respective fine chemical as indicated in any one of Tables I to IV, application no. 13, column 6 “metabolite” in the organism, preferably in the microorganism, the non-human animal, the plant or animal cell, the plant or animal tissue or the plant, more preferably a microorganism, a plant or a plant tissue, in the cytsol or in the plastids, preferentially in the plastids,
[3493] c) growing the organism, preferably the microorganism, the non-human animal, the plant or animal cell, the plant or animal tissue or the plant under conditions which permit the production of the respective fine chemical in the organism, preferably the microorganism, the plant cell, the plant tissue or the plant; and
[3494] d) if desired, recovering, optionally isolating, the respective free and/or bound the fine chemical as indicated in any one of Tables I to IV, application no. 13, column 6 “metabolite” and, optionally further free and/or bound sterols, in particular stigmasterol, beta-sitosterol or campesterol, synthesized by the organism, the microorganism, the non-human animal, the plant or animal cell, the plant or animal tissue or the plant.

[3495] The organism, in particular the microorganism, non-human animal, the plant or animal cell, the plant or animal tissue or the plant is advantageously grown in such a way that it is not only possible to recover, if desired isolate the free or bound the respective fine chemical or the free and bound the respective fine chemical but as option it is also possible to produce, recover and, if desired isolate, other free or/and bound sterols, in particular stigmasterol, beta-sitosterol or campesterol.

The organism such as microorganisms or plants or the recovered, and if desired isolated, respective fine chemical can then be processed further directly into foodstuffs or animal feeds or for other applications, for example according to the disclosures made in:
US 20040101829, which disclose a methods for treating hyperlipidemia and to reduce Low Density Lipoprotein (“LDL”) levels in a subject,
US 20040047971, which disclose the preparation of a fat composition containing sterol esters characterised by direct interesterification of sterol with triglyceride,
U.S. Pat. No. 5,965,449, which describes phytosterol-based compositions useful in preventing and treating cardiovascular disease and other disorders,
U.S. Pat. No. 5,523,087, which is for a pharmaceutical composition containing beta-sitosterol for the treatment of diabetic male sexual dysfunction;
U.S. Pat. No. 5,747,464, which discloses a composition for inhibiting absorption of fat and cholesterol from the gut comprising beta.-sitosterol bound irreversibly to pectin,
U.S. Pat. No. 4,588,717, which describes a vitamin supplement which comprises a fatty acid ester of a phytosterol,
U.S. Pat. No. 5,270,041, which teaches the use of small amounts of sterols, their fatty acid esters and glucosides for the treatment of tumours,
U.S. Pat. No. 6,087,353, which comprises methods of making a composition suitable for incorporation into foods, beverages, pharmaceuticals, nutraceuticals and the like which comprises condensing a suitable aliphatic acid with a phytosterol to form a phytosterol ester and subsequently hydrogenating the phytosterol ester to form a hydrogenated phytosterol ester,
which are expressly incorporated herein by reference.
The fermentation broth, fermentation products, plants or plant products can be treated with water and a mixture of organic solvents (hexane and acetone) in order to extract the phytosterols. Crude phytosterols are obtained from the organic phase by removal of the solvents, complexation of the sterols in the extract with calcium chloride in methanol, separation of the sterol-complexes by centrifugation, dissociation of the complexes by heating in water and removal of the water. The crude phytosterols can be further purified by crystallisation from isopropanol. According to an other production process the tall oil soap is first subjected to fractional distillation which removes volatile compounds. The resulting residue (tall oil pitch) containing sterols in esterified form is treated with alkali to liberate these sterols. After neutralisation, the material is subjected to a two-stage distillation process. The distillate is then dissolved in methanol/methylethylketone solvent and the sterols crystallizing from this solution are obtained by filtration, washed with solvent and dried. U.S. Pat. No. 4,420,427 teaches the preparation of sterols from vegetable oil sludge using solvents such as methanol. Alternatively, phytosterols may be obtained from tall oil pitch or soap, by-products of the forestry practise as described in PCT/CA95/00555, incorporated herein by reference. The extraction and crystallization may be performed by other methods known to the person skilled in the art and described herein below.
To form a phytosterol ester in accordance with the U.S. Pat. No. 6,087,353, the selected phytosterol and aliphatic acid or its ester with volatile alcohol are mixed together under reaction conditions to permit condensation of the phytosterol with the aliphatic acid to produce an ester. A most preferred method of preparing these esters which is widely used in the edible fat and oil industry is described in U.S. Pat. No. 5,502,045 (which is incorporated herein by reference). The stanol and/or sterol esters with the desired fatty acid composition can also be produced by direct, preferably catalytic esterification. methods, e.g. U.S. Pat. No. 5,892,068, between free fatty acids or fatty acid blends of the composition and the stanol and/or sterol. In addition, stanol and/or sterol esters can also be produced by enzymatic esterification e.g. as outlined in EP 195 311 (which are incorporated herein by reference).
Products of these different work-up procedures are phytosterols and/or esters and/or conjugates or compositions which still comprise fermentation broth, plant particles and cell components in different amounts, advantageously in the range of from 0 to 99% by weight, preferably below 80% by weight, especially preferably between below 50% by weight.

[3496] for the disclosure of the paragraphs [0090.0.0.12] to [0097.0.0.12] see paragraphs [0090.0.0.0] to [0097.0.0.0] above.

[3497] With regard to the nucleic acid sequence as depicted a nucleic acid construct which contains a nucleic acid sequence mentioned herein or an organism (=transgenic organism) which is transformed with said nucleic acid sequence or said nucleic acid construct, “transgene” means all those constructs which have been brought about by genetic manipulation methods, preferably in which either
[3498] a) the nucleic acid sequence as shown in table I, application no. 13, columns 5 and 7 or a derivative thereof, or
[3499] b) a genetic regulatory element, for example a promoter, which is functionally linked to the nucleic acid sequence as shown table I, application no. 13, columns 5 and 7 or a derivative thereof, or
[3500] c) (a) and (b)
   is/are not present in its/their natural genetic environment or has/have been modified by means of genetic manipulation methods, it being possible for the modification to be, by way of example, a substitution, addition, deletion, inversion or insertion of one or more nucleotide. “Natural genetic environment” means the natural chromosomal locus in the organism of origin or the presence in a genomic library. In the case of a genomic library, the natural, genetic environment of the nucleic acid sequence is preferably at least partially still preserved. The environment flanks the nucleic acid sequence at least on one side and has a sequence length of at least 50 bp, preferably at least 500 bp, particularly preferably at least 1000 bp, very particularly preferably at least 5000 bp.

[3501] The use of the nucleic acid sequence according to the invention or of the nucleic acid construct according to the invention for the generation of transgenic plants is therefore also subject matter of the invention. As mentioned above the inventive nucleic acid sequence consists advantageously of the nucleic acid sequences as depicted in the sequence protocol and disclosed in table I, application no. 13, columns 5 and 7 joined to a nucleic acid sequence encoding a transit peptide, or a targeting nucleic acid, sequence which directs the nucleic acid sequences disclosed in table I, application no. 13, columns 5 and 7 to the organelle preferentially the plastids. Alternatively the inventive nucleic acids sequences consist advantageously of the nucleic acid sequences as depicted in the sequence protocol and disclosed in table I, application no. 13, columns 5 and 7 joined preferably to a nucleic acids sequence mediating the stable integration of nucleic acids into the plastidial genome and optionally sequences mediating the transcription of the sequence in the plastidial compartment. A transient expression is in principal also desirable and possible.

[3502] Transgenic plants which comprise the phytosterol (preferably beta-sitosterol and/or stigmasterol and/or campesterol) synthesized in the process according to the invention can advantageously be marketed directly without there being any need for the phytosterols (preferably beta-sitosterol and/or campesterol and/or stigmasterol) (oils, lipids or fatty acids synthesized) to be isolated. Plants for the process according to the invention are listed as meaning intact plants and all plant parts, plant organs or plant parts such as leaf, stem, seeds, root, tubers, anthers, fibers, root hairs, stalks, embryos, calli, cotelydons, petioles, harvested material, plant tissue, reproductive tissue and cell cultures which are derived from the actual transgenic plant and/or can be used for bringing about the transgenic plant. In this context, the seed comprises all parts of the seed such as the seed coats, epidermal cells, seed cells, endosperm or embryonic tissue. However, the respective fine chemical produced in the process according to the invention can also be isolated from the organisms, advantageously plants, in the form of their oils, fats, lipids, esters and/or as extracts, e.g. ether, alcohol, or other organic solvents or water containing extract and/or free phytosterol(s). The respective fine chemical produced by this process can be obtained by harvesting the organisms, either from the crop in which they grow, or from the field. This can be done via pressing or extraction of the plant parts, preferably the plant seeds. To increase the efficiency of extraction it is beneficial to clean, to temper and if necessary to hull and to flake the plant material especially the seeds. In this context, the oils, fats, lipids, esters and/or free phytosterols can be obtained by what is known as cold beating or cold pressing without applying heat. To allow for greater ease of disruption of the plant parts, specifically the seeds, they are previously comminuted, steamed or roasted. The seeds, which have been pretreated in this manner can subsequently be pressed or extracted with solvents such as warm hexane. The solvent is subsequently removed. In the case of microorganisms, the latter are, after harvesting, for example extracted directly without further processing steps or else, after disruption, extracted via various methods with which the skilled worker is familiar. In this manner, more than 96% of the compounds produced in the process can be isolated. Thereafter, the resulting products are processed further, i.e. degummed and/or refined. In this process, substances such as the plant mucilages and suspended matter are first removed. What is known as desliming can be affected enzymatically or, for example, chemico-physically by addition of acid such as phosphoric acid.

Plant sterols (phytosterols) are by-products of traditional vegetable oil refining. The source may be commonly a blend of crude edible oils, consisting of soy bean oil or of other edible oils, e.g. corn, rapeseed, olive and palm oil in varying proportions. Hemp may also be a source of new oilseed, oil and food ingredients as well as Sea buckthorn (hippophaë rhamnoides). The crude oil, which is obtained by pressing or solvent extraction, may undergoes a series of refining processes to remove solvents, lecithins, free fatty acids, color bodies, off-odors and off-flavors. In one of these steps, the oil may be subjected to steam distillation at reduced pressure (deodorisation) and the resulting distillate contains the phytosterol fraction. From this fraction, fatty acids, lecithins and other compounds are removed by fractional distillation, ethanolysis/transesterification, distillation and crystallisation from a heptane solution, and the phytosterols are further purified by recrystallisation using food grade materials and good manufacturing practices. The extraction and purification steps are standard methods and similar to the procedures used traditionally by the food industry for the production of plant sterols. Phytosterol esters may be produced from the sterols using food grade vegetable oil-derived fatty acids or triglycerides and applying standard methods for esterification or transesterification commonly used in the fats and oils industry.
Phytosterol in microorganisms may be localized intracellularly, therefor their recovery essentials comes down to the isolation of the biomass. Well-established approaches for the harvesting of cells include filtration, centrifugation and coagulation/flocculation as described herein. Determination of tocopherols in cells has been described by Tan and Tsumura 1989, see also Biotechnology of Vitamins, Pigments and Growth Factors, Edited by Erik J. Vandamme, London, 1989, p. 96 to 103. Many further methods to determine the tocopherol content are known to the person skilled in the art.

[3503] In an advantageous embodiment of the invention, the organism takes the form of a plant whose sterol content is modified advantageously owing to the nucleic acid molecule of the present invention expressed. This is important for plant breeders since, for example, the nutritional value of plants for poultry is dependent on the abovementioned sterols in feed. Further, this is also important for the production of cosmetic compostions.

In another advantageous embodiment of the invention, the organism takes the form of a plant whose sterol content is modified advantageously owing to the nucleic acid molecule of the present invention expressed. This is important for plant breeders since, for example, the nutritional value of plants for poultry is dependent on the abovementioned sterols and the general amount of sterols as source in feed and/or food.
Further, this is also important since, for example a balanced content of different sterols induces stress resistance to plants.
After the activity of the protein as shown in table II, application no. 13, column 3 has been increased or generated, or after the expression of nucleic acid molecule or polypeptide according to the invention has been generated or increased, the transgenic plant generated thus is grown on or in a nutrient medium or else in the soil and subsequently harvested.

[3504] for the disclosure of the paragraphs [0102.0.0.12] to [0110.0.0.12] see paragraphs [0102.0.0.0] to [0110.0.0.0] above.

[3505] In a preferred embodiment, the respective fine chemical as indicated in any one of Tables I to IV, application no. 13, column 6 “metabolite” (sterols) is produced in accordance with the invention and, if desired, is isolated. The production of further vitamins, provitamins or carotenoids, e.g. carotenes or xanthophylls, or mixtures thereof or mixtures with other compounds by the process according to the invention is advantageous.

Thus, the content of plant components and preferably also further impurities is as low as possible, and the abovementioned sterols are obtained in as pure form as possible. In these applications, the content of plant components advantageously amounts to less than 10%, preferably 1%, more preferably 0.1%, very especially preferably 0.01% or less.

[3506] In another preferred embodiment of the invention a combination of the increased expression of the nucleic acid sequence or the protein of the invention together with the transformation of a protein or polypeptide or a compound, which functions as a sink for the desired fine chemical, for example sterols in the organism, is useful to increase the production of the respective fine chemical (as indicated in any one of Tables I to IV, application no. 13, column 6 “metabolite”).

[3507] In the case of the fermentation of microorganisms, the abovementioned sterols may accumulate in the medium and/or the cells. If microorganisms are used in the process according to the invention, the fermentation broth can be processed after the cultivation. Depending on the requirement, all or some of the biomass can be removed from the fermentation broth by separation methods such as, for example, centrifugation, filtration, decanting or a combination of these methods, or else the biomass can be left in the fermentation broth. The fermentation broth can subsequently be reduced, or concentrated, with the aid of known methods such as, for example, rotary evaporator, thin-layer evaporator, falling film evaporator, by reverse osmosis or by nanofiltration. Afterwards advantageously further compounds for formulation can be added such as corn starch or silicates. This concentrated fermentation broth advantageously together with compounds for the formulation can subsequently be processed by lyophilization, spray drying, spray granulation or by other methods. Preferably the respective fine chemical as indicated for application no. 13 in any one of Tables I to IV, column 6 “metabolite” or the sterols comprising compositions are isolated from the organisms, such as the microorganisms or plants or the culture medium in or on which the organisms have been grown, or from the organism and the culture medium, in the known manner, for example via extraction, distillation, crystallization, chromatography or a combination of these methods. These purification methods can be used alone or in combination with the aforementioned methods such as the separation and/or concentration methods.

[3508] Transgenic plants which comprise the sterols (preferably beta-sitosterol and/or campesterol an/or stigmasterol), synthesized in the process according to the invention can advantageously be marketed directly without there being any need for sterols synthesized to be isolated. Plants for the process according to the invention are listed as meaning intact plants and all plant parts, plant organs or plant parts such as leaf, stem, seeds, root, tubers, anthers, fibers, root hairs, stalks, embryos, calli, cotelydons, petioles, harvested material, plant tissue, reproductive tissue and cell cultures which are derived from the actual transgenic plant and/or can be used for bringing about the transgenic plant. In this context, the seed comprises all parts of the seed such as the seed coats, epidermal cells, seed cells, endosperm or embryonic tissue. The site of sterol biosynthesis in plants is, inter alia, the leaf tissue so that the isolation of leafs makes sense. However, this is not limiting, since the expression may also take place in a tissue-specific manner in all of the remaining parts of the plant, in particular in fat-containing seeds. A further preferred embodiment therefore relates to a seed-specific isolation of sterols.

However, the respective fine chemical as indicated for application no. 13 in any one of Tables I to IV, column 6, “metabolite” produced in the process according to the invention can also be isolated from the organisms, advantageously plants, in the form of their oils, fats, lipids as extracts, e.g. ether, alcohol, or other organic solvents or water containing extract and/or free sterols. The respective fine chemical produced by this process can be obtained by harvesting the organisms, either from the crop in which they grow, or from the field. This can be done via pressing or extraction of the plant parts, preferably the plant seeds. To increase the efficiency of oil extraction it is beneficial to clean, to temper and if necessary to hull and to flake the plant material especially the seeds. E.g the oils, fats, lipids, extracts, e.g. ether, alcohol, or other organic solvents or water containing extract and/or free sterols can be obtained by what is known as cold beating or cold pressing without applying heat. To allow for greater ease of disruption of the plant parts, specifically the seeds, they are previously comminuted, steamed or roasted. The seeds, which have been pretreated in this manner can subsequently be pressed or extracted with solvents such as preferably warm hexane. The solvent is subsequently removed. In the case of microorganisms, the latter are, after harvesting, for example extracted directly without further processing steps or else, after disruption, extracted via various methods with which the skilled worker is familiar. In this manner, more than 96% of the compounds produced in the process can be isolated. Thereafter, the resulting products are processed further, i.e. degummed and/or refined. In this process, substances such as the plant mucilages and suspended matter are first removed. What is known as desliming can be affected enzymatically or, for example, chemico-physically by addition of acid such as phosphoric acid.
Plant sterols (phytosterols) are by-products of traditional vegetable oil refining. The source may be commonly a blend of crude edible oils, consisting of soy bean oil or of other edible oils, e.g. corn, rapeseed, olive and palm oil in varying proportions. Hemp may also be a source of new oilseed, oil and food ingredients as well as Sea buckthorn (hippophaë rhamnoides). The crude oil, which is obtained by pressing or solvent extraction, may undergoes a series of refining processes to remove solvents, lecithins, free fatty acids, color bodies, off-odors and off-flavors. In one of these steps, the oil may be subjected to steam distillation at reduced pressure (deodorisation) and the resulting distillate contains the phytosterol fraction. From this fraction, fatty acids, lecithins and other compounds are removed by fractional distillation, ethanolysis/transesterification, distillation and crystallisation from a heptane solution, and the phytosterols are further purified by recrystallisation using food grade materials and good manufacturing practices. The extraction and purification steps are standard methods and similar to the procedures used traditionally by the food industry for the production of plant sterols. Phytosterol esters may be produced from the sterols using food grade vegetable oil-derived fatty acids or triglycerides and applying standard methods for esterification or transesterification commonly used in the fats and oils industry.
Because sterols in microorganisms may be localized intracellularly, their recovery essentially comes down to the isolation of the biomass. Well-established approaches for the harvesting of cells include filtration, centrifugation and coagulation/flocculation as described herein.

[3509] Sterols can for example be analyzed advantageously via HPLC, LC or GC separation methods and detected by MS oder MSMS methods. The unambiguous detection for the presence of sterols containing products can be obtained by analyzing recombinant organisms using analytical standard methods: GC, GC-MS, or TLC, as described on several occasions by Christie and the references therein (1997, in: Advances on Lipid Methodology, Fourth Edition: Christie, Oily Press, Dundee, 119-169; 1998, Gaschromatographie-Massenspektrometrie-Verfahren [Gas chromatography/mass spectrometric methods], Lipide 33:343-353). The material to be analyzed can be disrupted by sonication, grinding in a glass mill, liquid nitrogen and grinding, cooking, or via other applicable methods; see also Biotechnology of Vitamins, Pigments and Growth Factors, Edited by Erik J. Vandamme, London, 1989, p. 96 to 103.

[3510] In a preferred embodiment, the present invention relates to a process for the production of the respective fine chemical as indicated for application no. 13 in any one of Tables I to IV, column 6 “metabolite”, comprising or generating in an organism or a part thereof, preferably in a cell compartment such as a plastid or mitochondria, the expression of at least one nucleic acid molecule comprising a nucleic acid molecule selected from the group consisting of:
[3511] a) nucleic acid molecule encoding, preferably at least the mature form, of the polypeptide shown in table II, application no. 13, columns 5 and 7 or a fragment thereof, which confers an increase in the amount of the respective fine chemical in an organism or a part thereof;
[3512] b) nucleic acid molecule comprising, preferably at least the mature form, of the nucleic acid molecule shown in table I, application no. 13, columns 5 and 7;
[3513] c) nucleic acid molecule whose sequence can be deduced from a polypeptide sequence encoded by a nucleic acid molecule of (a) or (b) as result of the degeneracy of the genetic code and conferring an increase in the amount of the respective fine chemical in an organism or a part thereof;
[3514] d) nucleic acid molecule encoding a polypeptide which has at least 50% identity with the amino acid sequence of the polypeptide encoded by the nucleic acid molecule of (a) to (c) and conferring an increase in the amount of the respective fine chemical in an organism or a part thereof;
[3515] e) nucleic acid molecule which hybridizes with a nucleic acid molecule of (a) to (c) under stringent hybridisation conditions and conferring an increase in the amount of the respective fine chemical in an organism or a part thereof;
[3516] f) nucleic acid molecule encoding a polypeptide, the polypeptide being derived by substituting, deleting and/or adding one or more amino acids of the amino acid sequence of the polypeptide encoded by the nucleic acid molecules (a) to (d), preferably to (a) to (c) and conferring an increase in the amount of the respective fine chemical in an organism or a part thereof;
[3517] g) nucleic acid molecule encoding a fragment or an epitope of a polypeptide which is encoded by one of the nucleic acid molecules of (a) to (e), preferably to (a) to (c) and conferring an increase in the amount of the respective fine chemical in an organism or a part thereof;
[3518] h) nucleic acid molecule comprising a nucleic acid molecule which is obtained by amplifying nucleic acid molecules from a cDNA library or a genomic library using the primers shown in table III, application no. 13, column 7 and conferring an increase in the amount of the respective fine chemical in an organism or a part thereof;
[3519] i) nucleic acid molecule encoding a polypeptide which is isolated, e.g. from an expression library, with the aid of monoclonal antibodies against a polypeptide encoded by one of the nucleic acid molecules of (a) to (h), preferably to (a) to (c), and conferring an increase in the amount of the respective fine chemical in an organism or a part thereof;
[3520] j) nucleic acid molecule which encodes a polypeptide comprising the consensus sequence shown in table IV, application no. 13, column 7 and conferring an increase in the amount of the respective fine chemical in an organism or a part thereof;
[3521] k) nucleic acid molecule comprising one or more of the nucleic acid molecule encoding the amino acid sequence of a polypeptide encoding a domain of the polypeptide shown in table II, application no. 13, columns 5 and 7 and conferring an increase in the amount of the fine chemical in an organism or a part thereof; and
[3522] l) nucleic acid molecule which is obtainable by screening a suitable library under stringent conditions with a probe comprising one of the sequences of the nucleic acid molecule of (a) to (k), preferably to (a) to (c), or with a fragment of at least 15 nt, preferably 20 nt, 30 nt, 50 nt, 100 nt, 200 nt or 500 nt of the nucleic acid molecule characterized in (a) to (k), preferably to (a) to (c), and conferring an increase in the amount of the respective fine chemical in an organism or a part thereof;
   or which comprises a sequence which is complementary thereto.

[3523] In one embodiment, the nucleic acid molecule used in the process of the invention distinguishes over the sequence indicated in table I A, application no. 13, columns 5 and 7 by one or more nucleotides. In one embodiment, the nucleic acid molecule used in the process of the invention does not consist of the sequence indicated in table I A, application no. 13, columns 5 and 7. In one embodiment, the nucleic acid molecule used in the process of the invention is less than 100%, 99.999%, 99.99%, 99.9% or 99% identical to a sequence indicated in table I A, application no. 13, columns 5 and 7. In another embodiment, the nucleic acid molecule does not encode a polypeptide of a sequence indicated in table II A, application no. 13, columns 5 and 7.

[3524] In one embodiment, the nucleic acid molecule used in the process of the invention distinguishes over the sequence indicated in table I B, application no. 13, columns 5 and 7, by one or more nucleotides. In one embodiment, the nucleic acid molecule used in the process of the invention does not consist of the sequence indicated in table I B, application no. 13, columns 5 and 7. In one embodiment, the nucleic acid molecule used in the process of the invention is less than 100%, 99.999%, 99.99%, 99.9% or 99% identical to a sequence indicated in table I B, application no. 13, columns 5 and 7. In another embodiment, the nucleic acid molecule does not encode a polypeptide of a sequence indicated in table II B, application no. 13, columns 5 and 7.

[3525] In one embodiment, the nucleic acid molecule used in the process distinguishes over the sequence shown in table I, application no. 13, columns 5 and 7 by one or more nucleotides or does not consist of the sequence shown in table I, application no. 13, columns 5 and 7. In one embodiment, the nucleic acid molecule of the present invention is less than 100%, 99.999%, 99.99%, 99.9% or 99% identical to the sequence shown in table I, application no. 13, columns 5 and 7. In another embodiment, the nucleic acid molecule does not encode a polypeptide of the sequence shown in table II, application no. 13, columns 5 and 7.

[3526] for the disclosure of the paragraphs [0118.0.0.12] to [0120.0.0.12] see paragraphs [0118.0.0.0] to [0120.0.0.0] above.

[3527] The expression of nucleic acid molecules with the sequence shown in table I, application no. 13, columns 5 and 7, or nucleic acid molecules which are derived from the amino acid sequences shown in table II, application no. 13, columns 5 and 7 or from polypeptides comprising the consensus sequence shown in table IV, application no. 13, column 7, or their derivatives or homologues encoding polypeptides with the enzymatic or biological activity of a protein as shown in table II, application no. 13, column 3, and conferring an increase of the respective fine chemical (column 6 of application no. 13 in any one of Tables I to IV) after increasing its plastidic expression and/or specific activity in the plastids is advantageously increased in the process according to the invention by expression either in the cytsol or in an organelle such as a plastid or mitochondria or both, preferably in plastids.

[3528] for the disclosure of this paragraph see paragraph [0122.0.0.0] above.

[3529] Nucleic acid molecules, which are advantageous for the process according to the invention and which encode polypeptides with the activity of a protein as shown in table II, application no. 13, column 3 can be determined from generally accessible databases.

[3530] for the disclosure of this paragraph see paragraph [0124.0.0.0] above.

[3531] The nucleic acid molecules used in the process according to the invention take the form of isolated nucleic acid sequences, which encode polypeptides with the activity of the proteins as shown in table II, application no. 13, column 3 and which confer an increase in the level of the respective fine chemical indicated in table II, application no. 13, column 6 by being expressed either in the cytsol or in an organelle such as a plastid or mitochondria or both, preferably in plastids, and the gene product being localized in the plastid and other parts of the cell or in the plastid as described above.

[3532] for the disclosure of the paragraphs [0126.0.0.12] to [0133.0.0.12] see paragraphs [0126.0.0.0] to [0133.0.0.0] above.

[3533] Production strains which are also advantageously selected in the process according to the invention are microorganisms selected from the group of green algae, like Spongioccoccum exentricum, Chlorella sorokiniana (pyrenoidosa, 7-11-05), or algae of the genus Haematococcus, Phaedactylum tricornatum, Volvox or Dunaliella or form the group of fungi like fungi belonging to the Daccrymycetaceae family, or non-photosynthetic bacteria, like methylotrophs, flavobacteria, actinomycetes, like streptomyces chrestomyceticus, Mycobacteria like Mycobacterim phlei, Rhodobacter capsulatus, or Brevibacterium linens, Dunaliella spp., Phaffia rhodozyma, Phycomyces sp., Rhodotorula spp. Thus, the invention also contemplates embodiments in which a host lacks sterols or sterols precursors, such as the vinca. In a plant of the latter type, the inserted DNA includes genes that code for proteins producing sterols precursors (compounds that can be converted biologically into a compound with sterols activity) and one or more modifying enzymes which were originally absent in such a plant.

The invention also contemplates embodiments in which the sterols or sterols precursor compounds in the production of the respective fine chemical, are present in a photosynthetic active organisms chosen as the host; for example, cyanobacteria, moses, algae or plants which, even as a wild type, are capable of producing sterols.

[3534] However, it is also possible to use artificial sequences, which differ in one or more bases from the nucleic acid sequences found in organisms, or in one or more amino acid molecules from polypeptide sequences found in organisms, in particular from the polypeptide sequences shown in table II, application no. 13, columns 5 and 7 or the functional homologues thereof as described herein, preferably conferring above-mentioned activity, i.e. conferring an increase of the respective fine chemical after increasing its plastidic activity, e.g. after increasing the activity of a protein as shown in table II, application no. 13, column 3 by—for example—expression either in the cytsol or in an organelle such as a plastid or mitochondria or both, preferably in plastids and the gene product, e.g. the polypeptide, being localized in the plastid and other parts of the cell or in the plastid as described above.

[3535] for the disclosure of the paragraphs [0135.0.0.12] to [0140.0.0.12] see paragraphs [0135.0.0.0] to [0140.0.0.0] above.

[3536] Synthetic oligonucleotide primers for the amplification, e.g. as shown in table III, application no. 13, column 7, by means of polymerase chain reaction can be generated on the basis of a sequence shown herein, for example the sequence shown in table I, application no. 13, columns 5 and 7 or the sequences derived from table II, application no. 13, columns 5 and 7.

[3537] Moreover, it is possible to identify conserved regions from various organisms by carrying out protein sequence alignments with the polypeptide used in the process of the invention, in particular with sequences of the polypeptide of the invention, from which conserved regions, and in turn, degenerate primers can be derived. Conserved regions are those, which show a very little variation in the amino acid in one particular position of several homologs from different origin. The consensus sequences shown in table IV, application no. 13, column 7 are derived from said alignments.

[3538] Degenerated primers can then be utilized by PCR for the amplification of fragments of novel proteins having above-mentioned activity, e.g. conferring the increase of the fine chemical after increasing the expression or activity or having the activity of a protein as shown in table II, application no. 13, column 3 or further functional homologs of the polypeptide of the invention from other organisms.

[3539] for the disclosure of the paragraphs [0144.0.0.12] to [0151.0.0.12] see paragraphs [0144.0.0.0] to [0151.0.0.0] above.

[3540] Polypeptides having above-mentioned activity, i.e. conferring the increase of the respective fine chemical indicated in table I, application no. 13, column 6, and being derived from other organisms, can be encoded by other DNA sequences which hybridize to the sequences shown in table I, application no. 13, columns 5 and 7, preferably of table I B, application no. 13, columns 5 and 7 under relaxed hybridization conditions and which code on expression for peptides having the respective fine chemical, i.e. sterols increasing activity, when expressed in a way that the gene product, e.g. the polypeptide, being localized in the plastid and other parts of the cell or in the plastid as described above.

[3541] For the disclosure of the paragraphs [0153.0.0.12] to [0159.0.0.12] see paragraphs [0153.0.0.0] to [0159.0.0.0] above.

[3542] Further, the nucleic acid molecule of the invention comprises a nucleic acid molecule, which is a complement of one of the nucleotide sequences of above mentioned nucleic acid molecules or a portion thereof. A nucleic acid molecule which is complementary to one of the nucleotide sequences shown in table I, application no. 13, columns 5 and 7, preferably shown in table I B, application no. 13, columns 5 and 7 is one which is sufficiently complementary to one of the nucleotide sequences shown in table I, application no. 13, columns 5 and 7, preferably shown in table I B, application no. 13, columns 5 and 7 such that it can hybridize to one of the nucleotide sequences shown in table I, application no. 13, columns 5 and 7, preferably shown in table I B, application no. 13, columns 5 and 7, thereby forming a stable duplex. Preferably, the hybridisation is performed under stringent hybridization conditions. However, a complement of one of the herein disclosed sequences is preferably a sequence complement thereto according to the base pairing of nucleic acid molecules well known to the skilled person. For example, the bases A and G undergo base pairing with the bases T and U or C, resp. and visa versa. Modifications of the bases can influence the base-pairing partner.

[3543] The nucleic acid molecule of the invention comprises a nucleotide sequence which is at least about 30%, 35%, 40% or 45%, preferably at least about 50%, 55%, 60% or 65%, more preferably at least about 70%, 80%, or 90%, and even more preferably at least about 95%, 97%, 98%, 99% or more homologous to a nucleotide sequence shown in table I, application no. 13, columns 5 and 7, preferably shown in table I B, application no. 13, columns 5 and 7, or a portion thereof and preferably has above mentioned activity, in particular having a respective fine chemical increasing activity after increasing the activity or an activity of a gene product as shown in table II, application no. 13, column 3 by for example expression either in the cytsol or in an organelle such as a plastid or mitochondria or both, preferably in plastids, and the gene product, e.g. the polypeptide, being localized in the plastid and other parts of the cell or in the plastid as described above.

[3544] The nucleic acid molecule of the invention comprises a nucleotide sequence which hybridizes, preferably hybridizes under stringent conditions as defined herein, to one of the nucleotide sequences shown in table I, application no. 13, columns 5 and 7, preferably shown in table I B, application no. 13, columns 5 and 7, or a portion thereof and encodes a protein having above-mentioned activity, e.g. conferring of a sterol or triglycerides, lipids, oils and/or fats containing sterol increase by for example expression either in the cytsol or in an organelle such as a plastid or mitochondria or both, preferably in plastids, and optionally, the activity of a protein as shown in table II, application no. 13, column 3, and the gene product, e.g. the polypeptide, being localized in the plastid and other parts of the cell or in the plastid as described above.

[3545] Moreover, the nucleic acid molecule of the invention can comprise only a portion of the coding region of one of the sequences shown in table I, application no. 13, columns 5 and 7, preferably shown in table I B, application no. 13, columns 5 and 7, for example a fragment which can be used as a probe or primer or a fragment encoding a biologically active portion of the polypeptide of the present invention or of a polypeptide used in the process of the present invention, i.e. having above-mentioned activity, e.g. conferring an increase of the respective fine chemical indicated in Table I, application no. 13, column 6, if its activity is increased by for example expression either in the cytsol or in an organelle such as a plastid or mitochondria or both, preferably in plastids, and the gene product, e.g. the polypeptide, being localized in the plastid and other parts of the cell or in the plastid as described above. The nucleotide sequences determined from the cloning of the present protein-according-to-the-invention-encoding gene allows for the generation of probes and primers designed for use in identifying and/or cloning its homologues in other cell types and organisms. The probe/primer typically comprises substantially purified oligonucleotide. The oligonucleotide typically comprises a region of nucleotide sequence that hybridizes under stringent conditions to at least about 12, 15 preferably about 20 or 25, more preferably about 40, 50 or 75 consecutive nucleotides of a sense strand of one of the sequences set forth, e.g., in table I, application no. 13, columns 5 and 7, an anti-sense sequence of one of the sequences, e.g., set forth in table I, application no. 13, columns 5 and 7, preferably shown in table I B, application no. 13, columns 5 and 7, or naturally occurring mutants thereof. Primers based on a nucleotide of invention can be used in PCR reactions to clone homologues of the polypeptide of the invention or of the polypeptide used in the process of the invention, e.g. as the primers described in the examples of the present invention, e.g. as shown in the examples. A PCR with the primers shown in table Ill, application no. 13, column 7 will result in a fragment of the gene product as shown in table II, column 3.

[3546] for the disclosure of this paragraph see paragraph [0164.0.0.0] above.

[3547] The nucleic acid molecule of the invention encodes a polypeptide or portion thereof which includes an amino acid sequence which is sufficiently homologous to the amino acid sequence shown in table II, application no. 13, columns 5 and 7 such that the protein or portion thereof maintains the ability to participate in the fine chemical production, in particular an activity increasing the level of sterol increasing the activity as mentioned above or as described in the examples in plants or microorganisms is comprised.

[3548] As used herein, the language “sufficiently homologous” refers to proteins or portions thereof which have amino acid sequences which include a minimum number of identical or equivalent amino acid residues (e.g., an amino acid residue which has a similar side chain as an amino acid residue in one of the sequences of the polypeptide of the present invention) to an amino acid sequence shown in table II, application no. 13, columns 5 and 7 such that the protein or portion thereof is able to participate in the increase of the fine chemical production. For examples having the activity of a protein as shown in table II, column 3 and as described herein.

[3549] In one embodiment, the nucleic acid molecule of the present invention comprises a nucleic acid that encodes a portion of the protein of the present invention. The protein is at least about 30%, 35%, 40%, 45% or 50%, preferably at least about 55%, 60%, 65% or 70%, and more preferably at least about 75%, 80%, 85%, 90%, 91%, 92%, 93% or 94% and most preferably at least about 95%, 97%, 98%, 99% or more homologous to an entire amino acid sequence of table II, application no. 13, columns 5 and 7 and having above-mentioned activity, e.g. conferring preferably the increase of the respective fine chemical by for example expression either in the cytsol or in an organelle such as a plastid or mitochondria or both, preferably in plastids, and the gene product, e.g. the polypeptide, being localized in the plastid and other parts of the cell or in the plastid as described above.

[3550] for the disclosure of the paragraphs [0168.0.0.12] and [0169.0.0.12] see paragraphs [0168.0.0.0] and [0169.0.0.0] above.

[3551] The invention further relates to nucleic acid molecules that differ from one of the nucleotide sequences shown in table I, application no. 13, columns 5 and 7 (and portions thereof) due to degeneracy of the genetic code and thus encode a polypeptide of the present invention, in particular a polypeptide having above mentioned activity, e.g. conferring an increase in the respective fine chemical in a organism, e.g. as that polypeptides depicted by the sequence shown in table II, application no. 13, columns 5 and 7 or the functional homologues. Advantageously, the nucleic acid molecule of the invention comprises, or in an other embodiment has, a nucleotide sequence encoding a protein comprising, or in an other embodiment having, an amino acid sequence shown in table II, application no. 13, columns 5 and 7 or the functional homologues. In a still further embodiment, the nucleic acid molecule of the invention encodes a full length protein which is substantially homologous to an amino acid sequence shown in table II, application no. 13, columns 5 and 7 or the functional homologues. However, in a preferred embodiment, the nucleic acid molecule of the present invention does not consist of the sequence shown in table I, application no. 13, columns 5 and 7, preferably as indicated in table I A, application no. 13, columns 5 and 7. Preferably the nucleic acid molecule of the invention is a functional homologue or identical to a nucleic acid molecule indicated in table I B, application no. 13, columns 5 and 7.

[3552] for the disclosure of the paragraphs [0171.0.0.12] to [0173.0.0.12] see paragraphs [0171.0.0.0] to [0173.0.0.0] above.

[3553] Accordingly, in another embodiment, a nucleic acid molecule of the invention is at least 15, 20, 25 or 30 nucleotides in length. Preferably, it hybridizes under stringent conditions to a nucleic acid molecule comprising a nucleotide sequence of the nucleic acid molecule of the present invention or used in the process of the present invention, e.g. comprising the sequence shown in table I, application no. 13, columns 5 and 7. The nucleic acid molecule is preferably at least 20, 30, 50, 100, 250 or more nucleotides in length.

[3554] for the disclosure of this paragraph see paragraph [0175.0.0.0] above.

[3555] Preferably, nucleic acid molecule of the invention that hybridizes under stringent conditions to a sequence shown in table I, application no. 13, columns 5 and 7 corresponds to a naturally-occurring nucleic acid molecule of the invention. As used herein, a “naturally-occurring” nucleic acid molecule refers to an RNA or DNA molecule having a nucleotide sequence that occurs in nature (e.g., encodes a natural protein). Preferably, the nucleic acid molecule encodes a natural protein having abovementioned activity, e.g. conferring the respective fine chemical increase after increasing the expression or activity thereof or the activity of a protein of the invention or used in the process of the invention by for example expression the nucleic acid sequence of the gene product in the cytsol and/or in an organelle such as a plastid or mitochondria, preferably in plastids.

[3556] for the disclosure of this paragraph see paragraph [0177.0.0.0] above.

[3557] For example, nucleotide substitutions leading to amino acid substitutions at “non-essential” amino acid residues can be made in a sequence of the nucleic acid molecule of the invention or used in the process of the invention, e.g. shown in table I, application no. 13, columns 5 and 7.

[3558] For the disclosure of the paragraphs [0179.0.0.12] and [0180.0.0.12] see paragraphs [0179.0.0.0] and [0180.0.0.0] above.

[3559] Accordingly, the invention relates to nucleic acid molecules encoding a polypeptide having above-mentioned activity, e.g. conferring an increase in the the respective fine chemical in an organisms or parts thereof by for example expression either in the cytsol or in an organelle such as a plastid or mitochondria or both, preferably in plastids (as described), that contain changes in amino acid residues that are not essential for said activity. Such polypeptides differ in amino acid sequence from a sequence contained in the sequences shown in table II, application no. 13, columns 5 and 7, preferably shown in table II A, application no. 13, columns 5 and 7 yet retain said activity described herein. The nucleic acid molecule can comprise a nucleotide sequence encoding a polypeptide, wherein the polypeptide comprises an amino acid sequence at least about 50% identical to an amino acid sequence shown in table II, application no. 13, columns 5 and 7, preferably shown in table II A, application no. 13, columns 5 and 7 and is capable of participation in the increase of production of the fine chemical after increasing its activity, e.g. its expression by for example expression eithey in the cytsol or in an organelle such as a plastid or mitochondria or both, preferably in plastids and the gene product, e.g. the polypeptide, being localized in the plastid and other parts of the cell or in the plastid as described above. Preferably, the protein encoded by the nucleic acid molecule is at least about 60% identical to the sequence shown in table II, application no. 13, columns 5 and 7, preferably shown in table II A, application no. 13, columns 5 and 7, more preferably at least about 70% identical to one of the sequences shown in table II, application no. 13, columns 5 and 7, preferably shown in table II A, application no. 13, columns 5 and 7, even more preferably at least about 80%, 90%, 95% homologous to the sequence shown in table II, application no. 13, columns 5 and 7, preferably shown in table II A, application no. 13, columns 5 and 7, and most preferably at least about 96%, 97%, 98%, or 99% identical to the sequence shown in table II, application no. 13, columns 5 and 7, preferably shown in table II A, application no. 13, columns 5 and 7.

[3560] for the disclosure of the paragraphs [0182.0.0.12] to [0188.0.0.12] see paragraphs [0182.0.0.0] to [0188.0.0.0] above.

[3561] Functional equivalents derived from one of the polypeptides as shown in table II, application no. 13, columns 5 and 7, preferably shown in table II B, application no. 13, columns 5 and 7 resp., according to the invention by substitution, insertion or deletion have at least 30%, 35%, 40%, 45% or 50%, preferably at least 55%, 60%, 65% or 70% by preference at least 80%, especially preferably at least 85% or 90%, 91%, 92%, 93% or 94%, very especially preferably at least 95%, 97%, 98% or 99% homology with one of the polypeptides as shown in table II, application no. 13, columns 5 and 7, preferably shown in table II B, application no. 13, columns 5 and 7 resp., according to the invention and are distinguished by essentially the same properties as the polypeptide as shown in table II, application no. 13, columns 5 and 7, preferably shown in table. II B, application no. 13, columns 5 and 7.

[3562] Functional equivalents derived from the nucleic acid sequence as shown in table I, application no. 13, columns 5 and 7, preferably shown in table I B, application no. 13, columns 5 and 7 resp., according to the invention by substitution, insertion or deletion have at least 30%, 35%, 40%, 45% or 50%, preferably at least 55%, 60%, 65% or 70% by preference at least 80%, especially preferably at least 85% or 90%, 91%, 92%, 93% or 94%, very especially preferably at least 95%, 97%, 98% or 99% homology with one of the polypeptides as shown in table II, application no. 13, columns 5 and 7, preferably shown in table II B, application no. 13, columns 5 and 7 resp., according to the invention and encode polypeptides having essentially the same properties as the polypeptide as shown in table II, application no. 13, columns 5 and 7, preferably shown in table II B, application no. 13, columns 5 and 7.

[3563] for the disclosure of this paragraph see paragraph [0191.0.0.0] above.

[3564] A nucleic acid molecule encoding an homologous to a protein sequence of table II, application no. 13, columns 5 and 7, preferably shown in table II B, application no. 13, columns 5 and 7 resp., can be created by introducing one or more nucleotide substitutions, additions or deletions into a nucleotide sequence of the nucleic acid molecule of the present invention, in particular of table I, application no. 13, columns 5 and 7, preferably shown in table I B, application no. 13, columns 5 and 7 resp., such that one or more amino acid substitutions, additions or deletions are introduced into the encoded protein. Mutations can be introduced into the encoding sequences of table I, application no. 13, columns 5 and 7, preferably shown in table I B, application no. 13, columns 5 and 7 resp., by standard techniques, such as site-directed mutagenesis and PCR-mediated mutagenesis.

[3565] for the disclosure of the paragraphs [0193.0.0.12] to [0196.0.0.12] see paragraphs [0193.0.0.0] to [0196.0.0.0] above.

[3566] Homologues of the nucleic acid sequences used, with the sequence shown in table I, application no. 13, columns 5 and 7, preferably shown in table I B, application no. 13, columns 5 and 7, comprise also allelic variants with at least approximately 30%, 35%, 40% or 45% homology, by preference at least approximately 50%, 60% or 70%, more preferably at least approximately 90%, 91%_{,} 92%, 93%, 94% or 95% and even more preferably at least approximately 96%, 97%, 98%, 99% or more homology with one of the nucleotide sequences shown or the abovementioned derived nucleic acid sequences or their homologues, derivatives or analogues or parts of these. Allelic variants encompass in particular functional variants which can be obtained by deletion, insertion or substitution of nucleotides from the sequences shown, preferably from table I, application no. 13, columns 5 and 7, preferably shown in table I B, application no. 13, columns 5 and 7, or from the derived nucleic acid sequences, the intention being, however, that the enzyme activity or the biological activity of the resulting proteins synthesized is advantageously retained or increased.

[3567] In one embodiment of the present invention, the nucleic acid molecule of the invention or used in the process of the invention comprises the sequences shown in any of the table I, application no. 13, columns 5 and 7, preferably shown in table I B, application no. 13, columns 5 and 7. It is preferred that the nucleic acid molecule comprises as little as possible other nucleotides not shown in any one of table I, application no. 13, columns 5 and 7, preferably shown in table I B, application no. 13, columns 5 and 7. In one embodiment, the nucleic acid molecule comprises less than 500, 400, 300, 200, 100, 90, 80, 70, 60, 50 or 40 further nucleotides. In a further embodiment, the nucleic acid molecule comprises less than 30, 20 or 10 further nucleotides. In one embodiment, the nucleic acid molecule use in the process of the invention is identical to the sequences shown in table I, application no. 13, columns 5 and 7, preferably shown in table I B, application no. 13, columns 5 and 7.

[3568] Also preferred is that the nucleic acid molecule used in the process of the invention encodes a polypeptide comprising the sequence shown in table II, application no. 13, columns 5 and 7, preferably shown in table II B, application no. 13, columns 5 and 7. In one embodiment, the nucleic acid molecule encodes less than 150, 130, 100, 80, 60, 50, 40 or 30 further amino acids. In a further embodiment, the encoded polypeptide comprises less than 20, 15, 10, 9, 8, 7, 6 or 5 further amino acids. In one embodiment used in the inventive process, the encoded polypeptide is identical to the sequences shown in table II, application no. 13, columns 5 and 7, preferably shown in table II B, application no. 13, columns 5 and 7.

[3569] In one embodiment, the nucleic acid molecule of the invention or used in the process encodes a polypeptide comprising the sequence shown in table II, application no. 13, columns 5 and 7, preferably shown in table II B, application no. 13, columns 5 and 7 comprises less than 100 further nucleotides. In a further embodiment, said nucleic acid molecule comprises less than 30 further nucleotides. In one embodiment, the nucleic acid molecule used in the process is identical to a coding sequence of the sequences shown in table I, application no. 13, columns 5 and 7, preferably shown in table I B, application no. 13, columns 5 and 7.

[3570] Polypeptides (=proteins), which still have the essential biological or enzymatic activity of the polypeptide of the present invention conferring an increase of the respective fine chemical indicated in column 6 of Table I, application no. 13, i.e. whose activity is essentially not reduced, are polypeptides with at least 10% or 20%, by preference 30% or 40%, especially preferably 50% or 60%, very especially preferably 80% or 90 or more of the wild type biological activity or enzyme activity, advantageously, the activity is essentially not reduced in comparison with the activity of a polypeptide shown in table II, application no. 13, columns 5 and 7 expressed under identical conditions.

[3571] Homologues of table I, application no. 13, columns 5 and 7 or of the derived sequences of table II, application no. 13, columns 5 and 7 also mean truncated sequences, cDNA, single-stranded DNA or RNA of the coding and noncoding DNA sequence. Homologues of said sequences are also understood as meaning derivatives, which comprise noncoding regions such as, for example, UTRs, terminators, enhancers or promoter variants. The promoters upstream of the nucleotide sequences stated can be modified by one or more nucleotide substitution(s), insertion(s) and/or deletion(s) without, however, interfering with the functionality or activity either of the promoters, the open reading frame (=ORF) or with the 3′-regulatory region such as terminators or other 3′ regulatory regions, which are far away from the ORF. It is furthermore possible that the activity of the promoters is increased by modification of their sequence, or that they are replaced completely by more active promoters, even promoters from heterologous organisms. Appropriate promoters are known to the person skilled in the art and are mentioned herein below.

[3572] for the disclosure of the paragraphs [0203.0.0.12] to [0215.0.0.12] see paragraphs [0203.0.0.0] to [0215.0.0.0] above.

[3573] Accordingly, in one embodiment, the invention relates to a nucleic acid molecule, which comprises a nucleic acid molecule selected from the group consisting of:
[3574] a) nucleic acid molecule encoding, preferably at least the mature form, of the polypeptide shown in table II, application no. 13, columns 5 and 7, preferably in table II B, application no. 13, columns 5 and 7; or a fragment thereof conferring an increase in the amount of the fine chemical according to table II B, application no. 13, column 6 in an organism or a part thereof
[3575] b) nucleic acid molecule comprising, preferably at least the mature form, of the nucleic acid molecule shown in table I, application no. 13, columns 5 and 7, preferably in table I B, application no. 13, columns 5 and 7 or a fragment thereof conferring an increase in the amount of the fine chemical according to table II B, application no. 13, column 6 in an organism or a part thereof;
[3576] c) nucleic acid molecule whose sequence can be deduced from a polypeptide sequence encoded by a nucleic acid molecule of (a) or (b) as result of the degeneracy of the genetic code and conferring an increase in the amount of the fine chemical according to table II B, application no. 13, column 6 in an organism or a part thereof;
[3577] d) nucleic acid molecule encoding a polypeptide whose sequence has at least 50% identity with the amino acid sequence of the polypeptide encoded by the nucleic acid molecule of (a) to (c) and conferring an increase in the amount of the fine chemical according to table II B, application no. 13, column 6 in an organism or a part thereof;
[3578] e) nucleic acid molecule which hybridizes with a nucleic acid molecule of (a) to (c) under stringent hybridisation conditions and conferring an increase in the amount of the fine chemical according to table II B, application no. 13, column 6 in an organism or a part thereof;
[3579] f) nucleic acid molecule encoding a polypeptide, the polypeptide being derived by substituting, deleting and/or adding one or more amino acids of the amino acid sequence of the polypeptide encoded by the nucleic acid molecules (a) to (d), preferably to (a) to (c), and conferring an increase in the amount of the fine chemical according to table II B, application no. 13, column 6 in an organism or a part thereof;
[3580] g) nucleic acid molecule encoding a fragment or an epitope of a polypeptide which is encoded by one of the nucleic acid molecules of (a) to (e), preferably to (a) to (c) and conferring an increase in the amount of the fine chemical according to table II B, application no. 13, column 6 in an organism or a part thereof;
[3581] h) nucleic acid molecule comprising a nucleic acid molecule which is obtained by amplifying a cDNA library or a genomic library using the primers in table III, application no. 13, column 7 and conferring an increase in the amount of the fine chemical according to table II B, application no. 13, column 6 in an organism or a part thereof;
[3582] i) nucleic acid molecule encoding a polypeptide which is isolated, e.g. from a expression library, with the aid of monoclonal antibodies against a polypeptide encoded by one of the nucleic acid molecules of (a) to (g), preferably to (a) to (c) and conferring an increase in the amount of the fine chemical in an organism or a part thereof;
[3583] j) nucleic acid molecule which encodes a polypeptide comprising the consensus sequence shown in table IV, application no. 13, column 7 and conferring an increase in the amount of the fine chemical in an organism or a part thereof;
[3584] k) nucleic acid molecule encoding the amino acid sequence of a polypeptide encoding a domain of the polypeptide shown in table II, application no. 13, columns 5 and 7 and conferring an increase in the amount of the fine chemical according to table II B, application no. 13, column 6 in an organism or a part thereof; and
[3585] l) nucleic acid molecule which is obtainable by screening a suitable nucleic acid library under stringent hybridization conditions with a probe comprising one of the sequences of the nucleic acid molecule of (a) to (k) or with a fragment of at least 15 nt, preferably 20 nt, 30 nt, 50 nt, 100 nt, 200 nt or 500 nt of the nucleic acid molecule characterized in (a) to (h) or of the nucleic acid molecule shown in table I, application no. 13, columns 5 and 7 or a nucleic acid molecule encoding, preferably at least the mature form of, the polypeptide shown in table II, application no. 13, columns 5 and 7, and conferring an increase in the amount of the fine chemical according to table II B, application no. 13, column 6 in an organism or a part thereof; or which encompasses a sequence which is complementary thereto;
   whereby, preferably, the nucleic acid molecule according to (a) to (l) distinguishes over the sequence depicted in table I A and/or I B, application no. 13, columns 5 and 7 by one or more nucleotides. In one embodiment, the nucleic acid molecule of the invention does not consist of the sequence shown in table I A and/or I B, application no. 13, columns 5 and 7. In an other embodiment, the nucleic acid molecule of the present invention is at least 30% identical and less than 100%, 99.999%, 99.99%, 99.9% or 99% identical to the sequence shown in table I A and/or I B, application no. 13, columns 5 and 7. In a further embodiment the nucleic acid molecule does not encode the polypeptide sequence shown in table II A and/or II B, application no. 13, columns 5 and 7. Accordingly, in one embodiment, the nucleic acid molecule of the present invention encodes in one embodiment a polypeptide which differs at least in one or more amino acids from the polypeptide shown in table II A and/or II B, application no. 13, columns 5 and 7 does not encode a protein of the sequence shown in table II A and/or II B, application no. 13, columns 5 and 7. Accordingly, in one embodiment, the protein encoded by a sequence of a nucleic acid according to (a) to (l) does not consist of the sequence shown in table I A and/or I B, application no. 13, columns 5 and 7. In a further embodiment, the protein of the present invention is at least 30% identical to protein sequence depicted in table II A and/or II B, application no. 13, columns 5 and 7 and less than 100%, preferably less than 99.999%, 99.99% or 99.9%, more preferably less than 99%, 985, 97%, 96% or 95% identical to the sequence shown in table II A and/or II B, application no. 13, columns 5 and 7.

[3586] For the disclosure of the paragraphs [0217.0.0.12] to [0226.0.0.12] see paragraphs [0217.0.0.0] to [0226.0.0.0] above.

[3587] In general, vector systems preferably also comprise further cis-regulatory regions such as promoters and terminators and/or selection markers by means of which suitably transformed organisms can be identified. While vir genes and T-DNA sequences are located on the same vector in the case of cointegrated vector systems, binary systems are based on at least two vectors, one of which bears vir genes, but no T-DNA, while a second one bears T-DNA, but no vir gene. Owing to this fact, the last-mentioned vectors are relatively small, easy to manipulate and capable of replication in E. coli and in Agrobacterium. These binary vectors include vectors from the series pBIB-HYG, pPZP, pBecks, pGreen. Those which are preferably used in accordance with the invention are Bin19, pBI101, pBinAR, pGPTV and pCAMBIA. An overview of binary vectors and their use is given by Hellens et al, Trends in Plant Science (2000) 5, 446-451. The vectors are preferably modified in such a manner, that they already contain the nucleic acid coding for the transitpeptide and that the nucleic acids of the invention, preferentially the nucleic acid sequences encoding the polypeptides shown in table II, application no. 13, columns 5 and 7 can be cloned 3″ prime to the transitpeptide encoding sequence, leading to a functional preprotein, which is directed to the plastids and which means that the mature protein fulfills its biological activity.

[3588] For the disclosure of the paragraphs [0228.0.0.12] to [0239.0.0.12] see paragraphs [0228.0.0.0] to [0239.0.0.0] above.

[3589] The abovementioned nucleic acid molecules can be cloned into the nucleic acid constructs or vectors according to the invention in combination together with further genes, or else different genes are introduced by transforming several nucleic acid constructs or vectors (including plasmids) into a host cell, advantageously into a plant cell or a microorganisms.

In addition to the sequence mentioned in Table I, application no. 13, columns 5 and 7 or its derivatives, it is advantageous additionally to express and/or mutate further genes in the organisms. It can be especially advantageously, if additionally at least one further gene of the sterol biosynthetic pathway, is expressed in the organisms such as plants or microorganisms. It is also possible that the regulation of the natural genes has been modified advantageously so that the gene and/or its gene product is no longer subject to the regulatory mechanisms which exist in the organisms. This leads to an increased synthesis of the amino acids desired since, for example, feedback regulations no longer exist to the same extent or not at all. In addition it might be advantageously to combine the sequences shown in Table I, application no. 13, columns 5 and 7 with genes which generally support or enhances the growth or yield of the target organism, for example genes which lead to faster growth rate of microorganisms or genes which produces stress-, pathogen, or herbicide resistant plants.

[3590] In addition, it might be also advantageously to combine one or more of the sequences indicated in Table I, columns 5 or 7, application no. 13, with genes which modify plant architecture or flower development, in the way, that the plant either produces more flowers, or produces flowers with more petals in order to increase the respective fine chemical production capacity.

[3591] In a further embodiment of the process of the invention, therefore, organisms are grown, in which there is simultaneous direct or indirect overexpression of at least one nucleic acid or one of the genes which code for proteins involved in the sterol metabolism, in particular in synthesis of enzymes catalyzing the production of acetyl CoA_HMGCoA, mevalonate, mevalonate 5-phosphate, mevalonate 5pyrophosphate, isopentyl diphosphate, 5-pyrophosphatemevalonate, isopentyl pyrophosphate (PIP), dimethylallyl pyrophosphate (DMAPP), PIP+DMAPP, geranyl pyrophosphate+IPP, farnesyl pyrophosphate, 2 farnesyl pyrophosphate, squalene (squalene synthase) and squalene epoxide, or cycloartenol synthase controlling the cyclization of squalene epoxide, S-adenosyl-L-methionine:sterol C-24 methyl transferase (EC 2.1.1.41) (SMT1) catalyzing the transfer of a methyl group from a cofactor, SMT2 catalyzing the second methyl transfer reaction, sterol C-14 demethylase catalyzing the demethylation at C-14, removing the methyl group and creating a double bond Indirect overexpression might be brought about by the manipulation of the regulation of the endogenous gene, for example through promoter mutations or the expression of natural or artificial transcriptional regulators.

[3592] Further advantageous nucleic acid sequences which can be expressed in combination with the sequences used in the process and/or the abovementioned biosynthesis genes are the sequences encoding further genes of the sterol biosynthetic pathway. These genes may lead to an increased synthesis of sterols, in particular of stigmasterol, beta-sitosterol or campestrol.

[3593] In a further advantageous embodiment of the process of the invention, the organisms used in the process are those in which simultaneously a sterol degrading protein is attenuated, in particular by reducing the rate of expression of the corresponding gene.

[3594] The respective fine chemical produced can be isolated from the organism by methods with which the skilled worker is familiar. For example, via extraction, salt precipitation, and/or different chromatography methods. The process according to the invention can be conducted batchwise, semibatchwise or continuously. The respective fine chemical produced by this process can be obtained by harvesting the organisms, either from the crop in which they grow, or from the field. This can be done via pressing or extraction of the plant parts.

[3595] For the disclosure of the paragraphs [0243.0.0.12] to [0264.0.0.12] see paragraphs [0243.0.0.0] to [0264.0.0.0] above.

[3596] Other preferred sequences for use in operable linkage in gene expression constructs are targeting sequences, which are required for targeting the gene product into specific cell compartments (for a review, see Kermode, Crit. Rev. Plant Sci. 15, 4 (1996) 285-423 and references cited therein), for example into the vacuole, the nucleus, all types of plastids, such as amyloplasts, chloroplasts, chromoplasts, the extracellular space, the mitochondria, the endoplasmic reticulum, elaioplasts, peroxisomes, glycosomes, and other compartments of cells or extracellular preferred are sequences, which are involved in targeting to plastids as mentioned above. Sequences, which must be mentioned in this context are, in particular, the signal-peptide- or transit-peptide-encoding sequences which are known per se. For example, plastid-transit-peptide-encoding sequences enable the targeting of the expression product into the plastids of a plant cell. Targeting sequences are also known for eukaryotic and to a lower extent for prokaryotic organisms and can advantageously be operable linked with the nucleic acid molecule of the present invention as shown in table I, application no. 13, columns 5 and 7 and described herein to achieve an expression in one of said compartments or extracellular.

[3597] For the disclosure of the paragraphs [0266.0.0.12] to [0287.0.0.12] see paragraphs [0266.0.0.0] to [0287.0.0.0] above.

[3598] Accordingly, one embodiment of the invention relates to a vector where the nucleic acid molecule according to the invention is linked operably to regulatory sequences which permit the expression in a prokaryotic or eukaryotic or in a prokaryotic and eukaryotic host. A further preferred embodiment of the invention relates to a vector in which a nucleic acid sequence encoding one of the polypeptides shown in table II, application no. 13, columns 5 and 7 or their homologs is functionally linked to a plastidial targeting sequence. A further preferred embodiment of the invention relates to a vector in which a nucleic acid sequence encoding one of the polypeptides shown in table II, application no. 13, columns 5 and 7 or their homologs is functionally linked to a regulatory sequences which permit the expression in plastids.

[3599] For the disclosure of the paragraphs [0289.0.0.12] to [0296.0.0.12] see paragraphs [0289.0.0.0] to [0296.0.0.0] above.

[3600] Moreover, a native polypeptide conferring the increase of the respective fine chemical in an organism or part thereof can be isolated from cells (e.g., endothelial cells), for example using the antibody of the present invention as described herein, in particular, an antibody against polypeptides as shown in table II, application no. 13, columns 5 and 7, which can be produced by standard techniques utilizing the polypeptide of the present invention or fragment thereof, i.e., the polypeptide of this invention. Preferred are monoclonal antibodies.

[3601] for the disclosure of this paragraph see paragraph [0298.0.0.0] above.

[3602] In one embodiment, the present invention relates to a polypeptide having the sequence shown in table II, application no. 13, columns 5 and 7 or as coded by the nucleic acid molecule shown in table I, application no. 13, columns 5 and 7 or functional homologues thereof.

[3603] In one advantageous embodiment, in the method of the present invention the activity of a polypeptide is increased comprising or consisting of the consensus sequence shown in table IV, application no. 13, columns 7 and in one another embodiment, the present invention relates to a polypeptide comprising or consisting of the consensus sequence shown in table IV, application no. 13, column 7 whereby 20 or less, preferably 15 or 10, preferably 9, 8, 7, or 6, more preferred 5 or 4, even more preferred 3, even more preferred 2, even more preferred 1, most preferred 0 of the amino acids positions indicated can be replaced by any amino acid.

[3604] For the disclosure of the paragraphs [0301.0.0.12] to [0304.0.0.12] see paragraphs [0301.0.0.0] to [0304.0.0.0] above.

[3605] In one advantageous embodiment, the method of the present invention comprises the increasing of a polypeptide comprising or consisting of plant or microorganism specific consensus sequences.

In one embodiment, said polypeptide of the invention distinguishes over the sequence shown in table II A and/or II B, application no. 13, columns 5 and 7 by one or more amino acids. In one embodiment, polypeptide distinguishes form the sequence shown in table II A and/or II B, application no. 13, columns 5 and 7 by more than 5, 6, 7, 8 or 9 amino acids, preferably by more than 10, 15, 20, 25 or 30 amino acids, even more preferred are more than 40, 50, or 60 amino acids and, preferably, the sequence of the polypeptide of the invention distinguishes from the sequence shown in table II A and/or II B, application no. 13, columns 5 and 7 by not more than 80% or 70% of the amino acids, preferably not more than 60% or 50%, more preferred not more than 40% or 30%, even more preferred not more than 20% or 10%. In an other embodiment, said polypeptide of the invention does not consist of the sequence shown in table II A and/or II B, application no. 13, columns 5 and 7.

[3606] For the disclosure of this paragraph see paragraph [0306.0.0.0] above.

[3607] In one embodiment, the invention relates to polypeptide conferring an increase of level of the respective fine chemical indicated in Table II A and/or II B, application no. 13, column 6 in an organism or part being encoded by the nucleic acid molecule of the invention or used in the process of the invention and having a sequence which distinguishes from the sequence as shown in table II A and/or II B, application no. 13, columns 5 and 7 by one or more amino acids. In another embodiment, said polypeptide of the invention does not consist of the sequence shown in table II A and/or II B, application no. 13, columns 5 and 7. In a further embodiment, said polypeptide of the present invention is less than 100%, 99.999%, 99.99%, 99.9% or 99% identical. In one embodiment, said polypeptide does not consist of the sequence encoded by the nucleic acid molecules shown in table I A and/or I B, application no. 13, columns 5 and 7.

[3608] In one embodiment, the present invention relates to a polypeptide having the activity of the protein as shown in table II A and/or II B, application no. 13, column 3, which distinguishes over the sequence depicted in table II A and/or II B, application no. 13, columns 5 and 7 by one or more amino acids, preferably by more than 5, 6, 7, 8 or 9 amino acids, preferably by more than 10, 15, 20, 25 or 30 amino acids, even more preferred are more than 40, 50, or 60 amino acids but even more preferred by less than 70% of the amino acids, more preferred by less than 50%, even more preferred my less than 30% or 25%, more preferred are 20% or 15%, even more preferred are less than 10%. In a further preferred embodiment the polypeptide of the invention takes the form of a preprotein consisting of a plastidial transitpeptide joint to a polypeptide having the activity of the protein as shown in table II A and/or II B, column 3, from which the transitpeptide is preferably cleaved off upon transport of the preprotein into the organelle, for example into the plastid or mitochondria.

[3609] For the disclosure of the paragraphs [0309.0.0.12] to [0311.0.0.12] see paragraphs [0309.0.0.0] to [0311.0.0.0] above.

[3610] A polypeptide of the invention can participate in the process of the present invention. The polypeptide or a portion thereof comprises preferably an amino acid sequence, which is sufficiently homologous to an amino acid sequence shown in table II, application no. 13, columns 5 and 7.

[3611] Further, the polypeptide can have an amino acid sequence which is encoded by a nucleotide sequence which hybridizes, preferably hybridizes under stringent conditions as described above, to a nucleotide sequence of the nucleic acid molecule of the present invention. Accordingly, the polypeptide has an amino acid sequence which is encoded by a nucleotide sequence that is at least about 35%, 40%, 45%, 50%, 55%, 60%, 65% or 70%, preferably at least about 75%, 80%, 85% or 90, and more preferably at least about 91%, 92%, 93%, 94% or 95%, and even more preferably at least about 96%, 97%, 98%, 99% or more homologous to one of the amino acid sequences as shown in table II A and/or II B, application no. 13, columns 5 and 7. The preferred polypeptide of the present invention preferably possesses at least one of the activities according to the invention and described herein. A preferred polypeptide of the present invention includes an amino acid sequence encoded by a nucleotide sequence which hybridizes, preferably hybridizes under stringent conditions, to a nucleotide sequence of table I A and/or I B, application no. 13, columns 5 and 7 or which is homologous thereto, as defined above.

[3612] Accordingly the polypeptide of the present invention can vary from the sequences shown in table II A and/or II B, application no. 13, columns 5 and 7 in amino acid sequence due to natural variation or mutagenesis, as described in detail herein. Accordingly, the polypeptide comprise an amino acid sequence which is at least about 35%, 40%, 45%, 50%, 55%, 60%, 65% or 70%, preferably at least about 75%, 80%, 85% or 90, and more preferably at least about 91%, 92%, 93%, 94% or 95%, and most preferably at least about 96%, 97%, 98%, 99% or more homologous to an entire amino acid sequence shown in table II A and/or II B, application no. 13, columns 5 and 7.

[3613] For the disclosure of this paragraph see paragraph [0315.0.0.0] above.

[3614] Biologically active portions of an polypeptide of the present invention include peptides comprising amino acid sequences derived from the amino acid sequence of the polypeptide of the present invention or used in the process of the present invention, e.g., the amino acid sequence shown in table II, application no. 13, columns 5 and 7 or the amino acid sequence of a protein homologous thereto, which include fewer amino acids than a full length polypeptide of the present invention or used in the process of the present invention or the full length protein which is homologous to an polypeptide of the present invention or used in the process of the present invention depicted herein, and exhibit at least one activity of polypeptide of the present invention or used in the process of the present invention.

[3615] for the disclosure of this paragraph see paragraph [0317.0.0.0] above.

[3616] Manipulation of the nucleic acid molecule of the invention may result in the production of a protein having differences from the wild-type protein as shown in table II, application no. 13, column 3. Differences shall mean at least one amino acid different from the sequences as shown in table II, application no. 13, column 3, preferably at least 2, 3, 4, 5, 6, 7, 8, 9 or 10 amino acids, more preferably at least 15, 20, 25, 30, 35, 40, 45 or 50 amino acids different from the sequences as shown in table II, application no. 13, column 3. These proteins may be improved in efficiency or activity, may be present in greater numbers in the cell than is usual, or may be decreased in efficiency or activity in relation to the wild type protein.

[3617] Any mutagenesis strategies for the polypeptide of the present invention or the polypeptide used in the process of the present invention to result in increasing said activity are not meant to be limiting; variations on these strategies will be readily apparent to one skilled in the art. Using such strategies, and incorporating the mechanisms disclosed herein, the nucleic acid molecule and polypeptide of the invention may be utilized to generate plants or parts thereof, expressing wildtype proteins or mutated proteins of the proteins as shown in table II, application no. 13, column 3. The nucleic acid molecules and polypeptide molecules of the invention are expressed such that the yield, production, and/or efficiency of production of a desired compound is improved.

[3618] Preferably, the compound is a composition comprising the essentially pure fine chemical, i.e. sterol or a recovered or isolated sterol in free or in protein- or membrane-bound form.

[3619] For the disclosure of the paragraphs [0320.0.0.12] to [0322.0.0.12] see paragraphs [0320.0.0.0] to [0322.0.0.0] above.

[3620] In one embodiment, a protein (=polypeptide) as shown in table II, application no. 13, column 3 refers to a polypeptide having an amino acid sequence corresponding to the polypeptide of the invention or used in the process of the invention, whereas a “non-inventive protein or polypeptide” or “other polypeptide” refers to a polypeptide having an amino acid sequence corresponding to a protein which is not substantially homologous to a polypeptide of the invention, preferably which is not substantially homologous to a polypeptide or protein as shown in table II, application no. 13, column 3, e.g., a protein which does not confer the activity described herein and which is derived from the same or a different organism.

[3621] For the disclosure of the paragraphs [0324.0.0.12] to [0329.0.0.12] see paragraphs [0324.0.0.0] to [0329.0.0.0] above.

[3622] In an especially preferred embodiment, the polypeptide according to the invention furthermore also does not have the sequences of those proteins, which are encoded by the sequences shown in table II, application no. 13, columns 5 and 7.

[3623] For the disclosure of the paragraphs [0331.0.0.12] to [0346.0.0.12] see paragraphs [0331.0.0.0] to [0346.0.0.0] above.

[3624] Accordingly the present invention relates to any cell transgenic for any nucleic acid characterized as part of the invention, e.g. conferring the increase of the respective fine chemical indicated in column 6 of application no. 13 in any one of Talbes I to IV in a cell or an organism or a part thereof, e.g. the nucleic acid molecule of the invention, the nucleic acid construct of the invention, the antisense molecule of the invention, the vector of the invention or a nucleic acid molecule encoding the polypeptide of the invention, e.g. encoding a polypeptide having an activity as the protein as shown in table II, application no. 13, column 3. Due to the above mentioned activity the respective fine chemical content in a cell or an organism is increased. For example, due to modulation or manipulation, the cellular activity is increased preferably in organelles such as plastids or mitochondria, e.g. due to an increased expression or specific activity or specific targeting of the subject matters of the invention in a cell or an organism or a part thereof especially in organelles such as plastids or mitochondria. Transgenic for a polypeptide having a protein or activity means herein that due to modulation or manipulation of the genome, the activity of protein as shown in table II, application no. 13, column 3 or a protein as shown in table II, application no. 13, column 3-like activity is increased in the cell or organism or part thereof especially in organelles such as plastids or mitochondria. Examples are described above in context with the process of the invention.

[3625] For the disclosure of this paragraph see paragraph [0348.0.0.0] above.

[3626] A naturally occurring expression cassette—for example the naturally occurring combination of the promoter of the gene encoding a protein as shown in table II, application no. 13, column 3 with the corresponding encoding gene—becomes a transgenic expression cassette when it is modified by non-natural, synthetic “artificial” methods such as, for example, mutagenization. Such methods have been described (U.S. Pat. No. 5,565,350; WO 00/15815; also see above).

[3627] For the disclosure of the paragraphs [0350.0.0.12] to [0358.0.0.12] see paragraphs [0350.0.0.0] to [0358.0.0.0] above.

[3628] Transgenic plants comprising the respective fine chemical synthesized in the process according to the invention can be marketed directly without isolation of the compounds synthesized. In the process according to the invention, plants are understood as meaning all plant parts, plant organs such as leaf, stalk, root, tubers or seeds or propagation material or harvested material or the intact plant. In this context, the seed encompasses all parts of the seed such as the seed coats, epidermal cells, seed cells, endosperm or embryonic tissue. The respective fine chemical indicated in column 6 of any one of Tables I to IV, application no. 13 and being produced in the process according to the invention may, however, also be isolated from the plant as one of the above mentioned derivates of sterols or the sterols itself, in particular beta-sitosterol and/or campesterol and/or stigmasterol resp., can be isolated by harvesting the plants either from the culture in which they grow or from the field. This can be done for example via expressing, grinding and/or extraction of the plant parts, preferably the plant seeds, plant fruits, plant tubers and the like.

[3629] for the disclosure of the paragraphs [0360.0.0.12] to [0362.0.0.12] see paragraphs [0360.0.0.0] to [0362.0.0.0] above.

[3630] In this manner, more than 50% by weight, advantageously more than 60% by weight, preferably more than 70% by weight, especially preferably more than 80% by weight, very especially preferably more than 90% by weight, of the respective fine chemical produced in the process can be isolated. The resulting composition or fraction comprising the respective fine chemical can, if appropriate, subsequently be further purified, if desired mixed with other active ingredients such as fatty acids, vitamins, amino acids, carbohydrates, antibiotics, covitamins, antioxidants, carotenoids, and the like, and, if appropriate, formulated.

[3631] In one embodiment, the composition is the fine chemical.

[3632] The fine chemical indicated in column 6 of application no. 13 in Table I, and being obtained in the process of the invention are suitable as starting material for the synthesis of further products of value. For example, they can be used in combination with each other or alone for the production of pharmaceuticals, foodstuffs, animal feeds or cosmetics. Accordingly, the present invention relates a method for the production of pharmaceuticals, food stuff, animal feeds, nutrients or cosmetics comprising the steps of the process according to the invention, including the isolation of a composition comprising the fine chemical, e.g. sterols or the isolated respective fine chemical produced, if desired, and formulating the product with a pharmaceutical acceptable carrier or formulating the product in a form acceptable for an application in agriculture. A further embodiment according to the invention is the use of the respective fine chemical indicated in application no. 13, Table I, column 6, and being produced in the process or the use of the transgenic organisms in animal feeds, foodstuffs, medicines, food supplements, cosmetics or pharmaceuticals.

[3633] for the disclosure of the paragraphs [0366.0.0.12] to [0369.0.0.12] see paragraphs [0366.0.0.0] to [0369.0.0.0] above.

[3634] The fermentation broths obtained in this way, containing in particular the respective fine chemical indicated in column 6 of any one of Tables I to IV; application no. 13 or containing mixtures with other compounds, in particular with vitamins or e.g. with carotenoids, e.g. with astaxanthin, or fatty acids or containing microorganisms or parts of microorganisms, like plastids, normally have a dry matter content of from 7.5 to 25% by weight. The fermentation broth can be processed further. Depending on requirements, the biomass can be separated, such as, for example, by centrifugation, filtration, decantation, coagulation/flocculation or a combination of these methods, from the fermentation broth or left completely in it. The fermentation broth can be thickened or concentrated by known methods, such as, for example, with the aid of a rotary evaporator, thin-film evaporator, falling film evaporator, by reverse osmosis or by nanofiltration. This concentrated fermentation broth can then be worked up by extraction, freeze-drying, spray drying, spray granulation or by other processes.

[3635] As sterols are often localized in membranes or plastids, in one embodiment it is advantageous to avoid a leaching of the cells when the biomass is isolated entirely or partly by separation methods, such as, for example, centrifugation, filtration, decantation, coagulation/flocculation or a combination of these methods, from the fermentation broth. The dry biomass can directly be added to animal feed, provided the sterols concentration is sufficiently high and no toxic compounds are present. In view of the instability of sterols, conditions for drying, e.g. spray or flash-drying, can be mild and can be avoiding oxidation and cis/trans isomerization. For example antioxidants, e.g. BHT, ethoxyquin or other, can be added. In case the sterol concentration in the biomass is to dilute, solvent extraction can be used for their isolation, e.g. with alcohols, ether or other organic solvents, e.g. with methanol, ethanol, aceton, alcoholic potassium hydroxide, glycerol-phenol, liquefied phenol or for example with acids or bases, like trichloroacetatic acid or potassium hydroxide. A wide range of advantageous methods and techniques for the isolation of sterols can be found in the state of the art.

Accordingly, it is possible to further purify the produced sterols. For this purpose, the product-containing composition, e.g. a total or partial lipid extraction fraction using organic solvents, e.g. as described above, is subjected for example to a saponification to remove triglycerides, partition between e.g. hexane/methanol (separation of non-polar epiphase from more polar hypophasic derivates) and separation via e.g. an open column chromatography or HPLC in which case the desired product or the impurities are retained wholly or partly on the chromatography resin. These chromatography steps can be repeated if necessary, using the same or different chromatography resins. The skilled worker is familiar with the choice of suitable chromatography resins and their most effective use.

[3636] for the disclosure of the paragraphs [0372.0.0.12] to [0376.0.0.12], [0376.1.0.12] and [0377.0.0.12] see paragraphs [0372.0.0.0] to [0376.0.0.0], [0376.1.0.0] and [0377.0.0.0] above.

[3637] In one embodiment, the present invention relates to a method for the identification of a gene product conferring an increase in the fine chemical production in a cell, comprising the following steps:
[3638] (a) contacting e.g. hybridising, the nucleic acid molecules of a sample, e.g. cells, tissues, plants or microorganisms or a nucleic acid library, which can contain a candidate gene encoding a gene product conferring an increase in the respective fine chemical after expression, with the nucleic acid molecule of the present invention;
[3639] (b) identifying the nucleic acid molecules, which hybridize under relaxed stringent conditions with the nucleic acid molecule of the present invention in particular to the nucleic acid molecule sequence shown in table I, application no. 13, columns 5 and 7, preferably in table I B, application no. 13, columns 5 and 7, and, optionally, isolating the full length cDNA clone or complete genomic clone;
[3640] (c) introducing the candidate nucleic acid molecules in host cells, preferably in a plant cell or a microorganism, appropriate for producing the respective fine chemical;
[3641] (d) expressing the identified nucleic acid molecules in the host cells;
[3642] (e) assaying the respective fine chemical level in the host cells; and
[3643] (f) identifying the nucleic acid molecule and its gene product which expression confers an increase in the respective fine chemical as indicated for application no. 13 in any one of Tables I to IV level in the host cell after expression compared to the wild type.

[3644] for the disclosure of the paragraphs [0379.0.0.12] to [0383.0.0.12] see paragraphs [0379.0.0.0] to [0383.0.0.0] above.

[3645] The screen for a gene product or an agonist conferring an increase in the fine chemical production can be performed by growth of an organism for example a microorganism in the presence of growth reducing amounts of an inhibitor of the synthesis of the fine chemical. Better growth, eg higher dividing rate or high dry mass in comparison to the control under such conditions would identify a gene or gene product or an agonist conferring an increase in fine chemical production.

One can think to screen for increased fine chemical production by for example resistance to drugs blocking fine chemical synthesis and looking whether this effect is dependent on the proteins as shown in table II, application no. 13, column 3, eg comparing near identical organisms with low and high activity of the proteins as shown in table II, application no. 13, column 3.

[3646] for the disclosure of the paragraphs [0385.0.0.12] to [0404.0.0.12] see paragraphs [0385.0.0.0] to [0404.0.0.0] above.

[3647] Accordingly, the nucleic acid of the invention, the polypeptide of the invention, the nucleic acid construct of the invention, the organisms, the host cell, the microorganisms, the plant, plant tissue, plant cell, or the part thereof the invention, the vector of the invention, the agonist identified with the method of the invention, the nucleic acid molecule identified with the method of the present invention, can be used for the production of the respective fine chemical indicated in Column 6, Table I, application no. 13 or for the production of the respective fine chemical and one or more other carotenoids, vitamins or fatty acids. In one embodiment, in the process of the present invention, the produced sterols are used to protect fatty acids against oxidization, e.g. it is in a further step added in a pure form or only partly isolated to a composition comprising fatty acids.

Accordingly, the nucleic acid of the invention, or the nucleic acid molecule identified with the method of the present invention or the complement sequences thereof, the polypeptide of the invention, the nucleic acid construct of the invention, the organisms, the host cell, the microorganisms, the plant, plant tissue, plant cell, or the part thereof of the invention, the vector of the invention, the agonist identified with the method of the invention, the antibody of the present invention, can be used for the reduction of the respective fine chemical in a organism or part thereof, e.g. in a cell.

[3648] The nucleic acid molecule of the invention, the vector of the invention or the nucleic acid construct of the invention may also be useful for the production of organisms resistant to inhibitors of the sterol production biosynthesis pathways. In particular, the overexpression of the polypeptide of the present invention may protect an organism such as a microorganism or a plant against inhibitors, which block the phytosterol, in particular the respective fine chemical, synthesis in said organism. Examples of inhibitors or herbicides blocking the phytosterol synthesis in organism such as microorganism or plants are for example compounds which inhibit the cytochrom P450 such as Tetcyclasis, triazoles like Paclobutrazol or Epoxiconazol, pyridines like Obtusifoliol, demethylases inhibitors, or compounds like Mevilonin, which inhibits the HMG-CoA reductase.

[3649] In a further embodiment the present invention relates to the use of the antagonist of the present invention, the plant of the present invention or a part thereof, the microorganism or the host cell of the present invention or a part thereof for the production a cosmetic composition or a pharmaceutical compostion. Such a composition has an antioxidative activity, photoprotective activity, can be used to protect, treat or heal the above mentioned diseases, e.g. hypercholesterolemic or cardiovascular diseases, certain cancers, and cataract formation or can be used as an immunostimulatory agent.

The sterols can be also used as stabilizer of other colours or oxygen sensitive compounds, like fatty acids, in particular unsaturated fatty acids.

[3650] for the disclosure of the paragraphs [0406.0.0.12] to [0416.0.0.12] see paragraphs [0406.0.0.0] to [0416.0.0.0] above.

[3651] An in vivo mutagenesis of organisms such as algae (e.g. Spongiococcum sp, e.g. Spongiococcum exentricum, Chlorella sp., Haematococcus, Phaedactylum tricornatum, Volvox or Dunaliella), Synechocystis sp. PCC 6803, Physcometrella patens, Saccharomyces, Mortierella, Escherichia and others mentioned above, which are beneficial for the production of sterols can be carried out by passing a plasmid DNA (or another vector DNA) containing the desired nucleic acid sequence or nucleic acid sequences, e.g. the nucleic acid molecule of the invention or the vector of the invention, through E. coli and other microorganisms (for example Bacillus spp. or yeasts such as Saccharomyces cerevisiae) which are not capable of maintaining the integrity of its genetic information. Usual mutator strains have mutations in the genes for the DNA repair system [for example mutHLS, mutD, mutT and the like; for comparison, see Rupp, W. D. (1996) DNA repair mechanisms in Escherichia coli and Salmonella, pp. 2277-2294, ASM: Washington]. The skilled worker knows these strains. The use of these strains is illustrated for example in Greener, A. and Callahan, M. (1994) Strategies 7; 32-34.

In-vitro mutation methods such as increasing the spontaneous mutation rates by chemical or physical treatment are well known to the skilled person. Mutagens like 5-bromo-uracil, N-methyl-N-nitro-N-nitrosoguanidine (=NTG), ethyl methanesulfonate (=EMS), hydroxylamine and/or nitrous acid are widely used as chemical agents for random in-vitro mutagenesis. The most common physical method for mutagenesis is the treatment with UV irradiation. Another random mutagenesis technique is the error-prone PCR for introducing amino acid changes into proteins. Mutations are deliberately introduced during PCR through the use of error-prone DNA polymerases and special reaction conditions known to a person skilled in the art. For this method randomized DNA sequences are cloned into expression vectors and the resulting mutant libraries screened for altered or improved protein activity as described below.
Site-directed mutagenesis method such as the introduction of desired mutations with an M13 or phagemid vector and short oligonucleotides primers is a well-known approach for site-directed mutagenesis. The clou of this method involves cloning of the nucleic acid sequence of the invention into an M13 or phagemid vector, which permits recovery of single-stranded recombinant nucleic acid sequence. A mutagenic oligonucleotide primer is then designed whose sequence is perfectly complementary to nucleic acid sequence in the region to be mutated, but with a single difference: at the intended mutation site it bears a base that is complementary to the desired mutant nucleotide rather than the original. The mutagenic oligonucleotide is then allowed to prime new DNA synthesis to create a complementary full-length sequence containing the desired mutation. Another site-directed mutagenesis method is the PCR mismatch primer mutagenesis method also known to the skilled person. DpnI site-directed mutagenesis is a further known method as described for example in the Stratagene Quickchange™ site-directed mutagenesis kit protocol. A huge number of other methods are also known and used in common practice.
Positive mutation events can be selected by screening the organisms for the production of the desired fine chemical.

[3652] for the disclosure of the paragraphs [0418.0.0.12] to [0427.0.0.12] see paragraphs [0418.0.0.0] to [0427.0.0.0] above.

[3653] for the disclosure of the paragraphs [0427.1.9.12] see paragraphs [0428.1.9.9] above

[3654] for the disclosure of the paragraphs [0427.2.9.12] see paragraph [0428.2.9.9] above

[3655] for the disclosure of the paragraphs [0427.3.9.12] see paragraph [0428.3.9.9] above.

[3656] Sterols may be produced in Synechocystis spec. PCC 6803

The cells of each of independent Synechocystis spec. PCC 6803 strains cultured on the BG-11 km agar medium, and untransformed wild-type cells (on BG11 agar medium without kanamycin) can be used to inoculate liquid cultures. For this, cells of a mutant or of the wild-type Synechocystis spec. PCC 6803 are transferred from plate into 10 ml of liquid culture in each case. These cultures are cultivated at 28° C. and 30 μmol photons*(m²*s)⁻¹ (30 μE) for about 3 days. After determination of the OD₇₃₀ of the individual cultures, the OD₇₃₀ of all cultures is synchronized by appropriate dilutions with BG-11 (wild types) or e.g. BG-11 km (mutants). These cell density-synchronized cultures are used to inoculate three cultures of the mutant and of the wild-type control. It is thus possible to carry out biochemical analyses using in each case three independently grown cultures of a mutant and of the corresponding wild types. The cultures are grown until the optical density was OD₇₃₀=0.3.
The cell culture medium is removed by centrifugation in an Eppendorf bench centrifuge at 14000 rpm twice. The subsequent disruption of the cells and extraction of sterols takes place by incubation in an Eppendorf shaker at 30° C., 1000 rpm in 100% methanol for 15 minutes twice, combining the supernatants obtained in each case.

[3657] In order to avoid oxidation, the resulting extracts can be analyzed immediate after the extraction with the aid of a Waters Alliance 2690 HPLC system. Sterols can be separated on a reverse phase column and identified by means of a standard. The fluorescence of the substances which can be detected with the aid of a Jasco FP 920 fluorescence detector, can serve as detection system.

[3658] for the disclosure of the paragraphs [0428.0.0.12] to [0435.0.0.12] see paragraphs [0428.0.0.0] to [0435.0.0.0] above.

[3659] Sterol Production

Sterols can be detected via HPLC, e.g. reversed-phase HPLC, as described by Heftmann, E. and Hunter, I. R. (J Chromatogr 1979; 165: 283-299). As separating principles of HPLC and GC are complementary, preparative reversed-phase HPLC followed by GC-MS analysis of the obtained sterol fractions is a preferred method to analyze sterols from natural products (Bianchini, J.-P. et al.; J Chromatogr 1985; 329: 231-246).

[3660] for the disclosure of the paragraphs [0437.0.0.12] and [0438.0.0.12] see paragraphs [0437.0.0.0] and [0438.0.0.0] above.

### Example 8

### Analysis of the Effect of the Nucleic Acid Molecule on the Production of the Respective Fine Chemical Indicated in Table I, Application No. 13, Column 6

[3661] The effect of the genetic modification in plants, fungi, algae or ciliates on the production of a desired compound such as sterols can be determined by growing the modified microorganisms or the modified plant under suitable conditions (such as those described above) and analyzing the medium and/or the cellular components for the elevated production of desired product (i.e. of the lipids or a fatty acid). These analytical techniques are known to the skilled worker and comprise spectroscopy, thin-layer chromatography, various types of staining methods, enzymatic and microbiological methods and analytical chromatography such as high-performance liquid chromatography (see, for example, Ullman, Encyclopedia of Industrial Chemistry, Vol. A2, p. 89-90 and p. 443-613, VCH: Weinheim (1985); Fallon, A., et al., (1987) “Applications of HPLC in Biochemistry” in: Laboratory Techniques in Biochemistry and Molecular Biology, Vol. 17; Rehm et al. (1993) Biotechnology, Vol. 3, Chapter III: “Product recovery and purification”, p. 469-714, VCH: Weinheim; Belter, P. A., et al. (1988) Bioseparations: downstream processing for Biotechnology, John Wiley and Sons; Kennedy, J. F., and Cabral, J. M. S. (1992) Recovery processes for biological Materials, John Wiley and Sons; Shaeiwitz, J. A., and Henry, J. D. (1988) Biochemical Separations, in: Ullmann's Encyclopedia of Industrial Chemistry, Vol. B3; Chapter 11, p. 1-27, VCH: Weinheim; and Dechow, F. J. (1989) Separation and purification techniques in biotechnology, Noyes Publications).

Sterols can be detected advantageously as described above.

[3662] for the disclosure of this paragraph see [0441.0.0.0] above.

### Example 9

### Purification of the Sterols

[3663] One example is the analysis of phytosterol: the content of the phytosterols of the invention can be determinated by gas chromatography with flame ionisation detection (GC-FID; column SAC-5, 30 m×0.25 mm, 0.25 μm, samples not silylated) using standards for these phytosterols. Another method is the detection by gas chromatography-mass spectrometry (GC-MS) using the same type of column as indicated above.
For the analysis of the concentrations of sterols by gas chromatography mass spectrometry a Hewlett-Packard (HP) 5890 gas chromatograph equipped with an NB54 fused-silica capillary column (15 m×0.20 mm I.D.; Nordion, Helsinki, Finland) and interfaced with an HP 5970A mass spectrometry detector operating in electron impact mode (70 eV) can be used. The column oven is programmed from 230° C. to 285° C. at 10° C./min and injector and detector should be at 285° C. The lipids from the samples (200 μl) are extracted with chloroform/methanol (2:1) and transesterified with sodium methoxide. The released free sterols are trimethylsilylated as described previously (Gylling et al. J. Lipid Res 40: 593-600, 1999) and quantified by single ion monitoring technique using m/z 129 (cholesterol, campesterol and β-sitosterol), m/z 215 (β-sitostanol), m/z 343 (desmosterol), m/z 255 (lathosterol) and m/z 217 (5-α-cholestane, internal standard) as selected ions (Vaskonen, Dissertation, Biomedicum Helsinki, Jun. 19, 2002).

[3664] Abbreviations: GC-MS, gas liquid chromatography/mass spectrometry; TLC, thin-layer chromatography.

The unambiguous detection for the presence of sterols can be obtained by analyzing recombinant organisms using analytical standard methods: GC, GC-MS or TLC, as described (1997, in: Advances on Lipid Methodology, Fourth Edition: Christie, Oily Press, Dundee, 119-169; 1998, Gaschromatographie-Massenspektrometrie-Verfahren [Gas chromatography/mass spectrometric methods], Lipide 33:343-353).
The total sterols produced in the organism used in the inventive process can be analysed for example according to the following procedure:
The material such as yeasts, E. coli or plants to be analyzed can be disrupted by sonication, grinding in a glass mill, liquid nitrogen and grinding or via other applicable methods. Plant material is initially homogenized mechanically by comminuting in a pestle and mortar to make it more amenable to extraction.
A typical sample pretreatment consists of a total lipid extraction using such polar organic solvents as acetone or alcohols as methanol, or ethers, saponification, partition between phases, separation of non-polar epiphase from more polar hypophasic derivatives and chromatography.

[3665] Characterization of the Transgenic Plants

In order to confirm that sterols biosynthesis in the transgenic plants is influenced by the expression of the polypeptides described herein, the sterols content in leaves, seeds and/or preferably flowers of the plants transformed with the described constructs (Arabidopsis thaliana, Brassica napus and Nicotiana tabacum) is analyzed. For this purpose, the transgenic plants are grown in a greenhouse, and plants which express the gene coding for polypeptide of the invention or used in the method of the invention are identified at the Northern level. The sterols content in flowers, leaves or seeds of these plants is measured. In all, the sterols concentration is raised by comparison with untransformed plants.

[3666] If required and desired, further chromatography steps with a suitable resin may follow. Advantageously, the sterols can be further purified with a so-called RTHPLC. As eluent acetonitrile/water or chloroform/acetonitrile mixtures can be used. If necessary, these chromatography steps may be repeated, using identical or other chromatography resins. The skilled worker is familiar with the selection of suitable chromatography resin and the most effective use for a particular molecule to be purified.

[3667] In addition depending on the produced fine chemical purification is also possible with cristalisation or destilation. Both methods are well known to a person skilled in the art.

[3668] for the disclosure of the paragraphs [0446.0.0.12] to [0496.0.0.12] see paragraphs [0446.0.0.0] to [0496.0.0.0] above.

[3669] As an alternative, the sterols can be detected advantageously as described above.
[3670] The results of the different plant analyses can be seen from the table, which follows:

TABLE VI

| | | Method/ | Min.- | Max.- |
|---|---|---|---|---|
| ORF | Metabolite | Analytics | Value | Value |
| b0931 | beta-Sitosterol | GC | 1.13 | 1.27 |
| b1410 | beta-Sitosterol | GC | 1.20 | 1.26 |
| b1410 | Campesterol | GC | 1.19 | 1.23 |
| b1556 | Campesterol | GC | 1.26 | 1.52 |
| b1704 | Stigmasterol | GC | 1.83 | 7.65 |
| b2022 | Campesterol | GC | 1.22 | 1.27 |
| b3708 | Campesterol | GC | 1.18 | 1.85 |
| YDR035W | beta-Sitosterol | GC | 1.15 | 1.22 |
| YDR035W | Campesterol | GC | 1.20 | 1.25 |
| YLR027C | Campesterol | GC | 1.22 | 3.85 |
| YLR027C | beta-Sitosterol | GC | 1.24 | 3.19 |
| YNL241C | Campesterol | GC | 1.21 | 1.31 |

[3671] for the disclosure of the paragraphs [0499.0.0.12] and [0500.0.0.12] see paragraphs [0499.0.0.0] and [0500.0.0.0] above.

### Example 15a

### Engineering Ryegrass Plants by Over-Expressing b0931 from E. coli or Homologs of b0931 from Other Organisms

[3672] for the disclosure of the paragraphs [0502.0.0.12] to [0508.0.0.12] see paragraphs [0502.0.0.0] to [0508.0.0.0] above.

### Example 15b

### Engineering Soybean Plants by Over-Expressing b0931 from E. coli or Homologs of b0931 from Other Organisms

[3673] for the disclosure of the paragraphs [0510.0.0.12] to [0513.0.0.12] see paragraphs [0510.0.0.0] to [0513.0.0.0] above.

### Example 15c

### Engineering Corn Plants by Over-Expressing b0931 from E. coli or Homologs of b0931 from Other Organisms

[3674] for the disclosure of the paragraphs [0515.0.0.12] to [0540.0.0.12] see paragraphs [0515.0.0.0] to [0540.0.0.0] above.

### Example 15d

### Engineering Wheat Plants by Over-Expressing b0931 from E. coli or Homologs of b0931 from Other Organisms

[3675] for the disclosure of the paragraphs [0542.0.0.12] to [0544.0.0.12] see paragraphs [0542.0.0.0] to [0544.0.0.0] above.

### Example 15e

### Engineering Rapeseed/Canola Plants by Over-Expressing b0931 from E. coli or Homologs of b0931 from Other Organisms

[3676] for the disclosure of the paragraphs [0546.0.0.12] to [0549.0.0.12] see paragraphs [0544.0.0.0] to [0549.0.0.0] above.

### Example 15f

### Engineering Alfalfa Plants by Over-Expressing b0931 from E. coli or Homologs of b0931 from Other Organisms

[3677] for the disclosure of the paragraphs [0551.0.0.12] to [0554.0.0.12] see paragraphs [0551.0.0.0] to [0554.0.0.0] above.

### Example 16

### Metabolite Profiling Info from Zea mays

[3678] Zea mays plants were engineered as described in Example 15c.
Metabolic results were either obtained from regenerated primary transformants (T0) or from the following progeny generation (T1) in comparison to appropriate control plants. The results are shown in table VII as minimal (MIN) or maximal changes (MAX) in the respective fine chemical (column “metabolite”) in genetically modified corn plants expressing the sequence listed in column 1 (ORF):

TABLE VII

| ORF | Metabolite | MIN | MAX |
|---|---|---|---|
| YDR035W | Campesterol | 1.37 | 1.49 |
| YLR027C | beta-Sitosterol | 1.26 | 1.59 |

Table VII shows the increase in campesterol in genetically modified corn plants expressing the Saccharomyces cerevisiae nucleic acid sequence YDR035W.

[3679] In one embodiment, in case the activity of the Saccharomyces cerevisiae protein YDR035W or its homologs, e.g. a “3-deoxy-D-arabino-heptulosonate 7-phosphate (DAHP) synthase”, is increased in corn plants, preferably, an increase of the fine chemical campesterol between 37% and 49% is conferred.

Furthermore table VII shows the increase in beta-sitosterol in genetically modified corn plants expressing the Saccharomyces cerevisiae nucleic acid sequence YLR027C.
In one embodiment, in case the activity of the Saccharomyces cerevisiae protein YLR027C or its homologs, e.g. a “aspartate aminotransferase”, is increased in corn plants, preferably, an increase of the fine chemical campesterol between 26% and 59% is conferred.

[3680] for the disclosure of this paragraph see [0554.2.0.0] above.

[3681] for the disclosure of this paragraph see [0555.0.0.0] above.

[3682] for the disclosure of this paragraph see [0001.0.0.0].

[3683] for the disclosure of this paragraph see paragraph [0002.0.0.0] above.

[3684] L-alanine is used in various pharmaceutical and veterinary applications. For example, it is included, together with other amino acids, in preparations for infusion solutions or preparations for parenteral administration as clinical preoperative and postoperative foods, as well as an animal feed supplement. Furthermore, alanine is used as a food additive on account of its sweet taste. L-phenylalanine and L-aspartic acid have very important markets as key components in the manufacture of the sweetener aspartame. Aspartame (C14H18N2O5), L-aspartyl-L-phenylalanine methyl ester, is a compound of three components, which are methanol, aspartic acid and phenylalanine. L-aspartic acid is further used as a flavoring agent.

The amino acid L-citrulline is a metabolite in the urea cycle. Other amino acids in this cycle are L-arginine and L-ornithine. L-citrulline is involved in liver detoxification of ammonia, and has been shown to speed recover from fatigue. It has also been utilized in the treatment of Ornithine Transcarbamylase Deficiency and other Urea Cycle disorders. In cell metabolism, L-arginine and L-citrulline might serve as endogenous N sources (Ludwig et al., PLANT PHYSIOLOGY, Vol 101, Issue 2 429-434, 1993). Glycine is a valuable compound of wide use as food additives for processed foodstuffs and raw materials for agricultural chemicals and medicines. Glycine is the simplest amino acid, and is used in crop production as a chelating agent for micronutrients and has been used as a nitrogen fertilizer, at least on an experimental basis. As such, it is representative of amino acids used in crop production. Practically all commercial glycine is produced by synthetic processes such as the Strecker Synthesis, the reaction of formaldehyde, ammonia, and hydrogen cyanide, and hydrolysis of the resulting aminonitrile. Glycine is used as chelating/complexing agent for cation nutrients, plant growth regulators, substrate for microbiological products, fertilizer source of nitrogen.
Serine is a primary intermediate in the biosynthesis of a wide variety of cellular metabolites including such economically important compounds as choline, glycine, cysteine and tryptophan. In addition, serine acts as a single carbon donor and is responsible for 60% to 75% of the total need of the cell for C1 units through the production of 5,10-methylenetetrahydrofolate from tetrahydrofolate. These C1 units are used in a wide variety of biosynthetic pathways including the synthesis of methionine, inosine monophosphate, other purines and some pyrimidines (e.g., thymidine and hydroxymethyl cytidine).
The glycine-serine interconversion, catalysed by glycine decarboxylase and serine hydroxymethyltransferase, is an important reaction of primary metabolism in all organisms including plants, by providing one-carbon units for many biosynthetic reactions. In plants, in addition, it is an integral part of the photorespiratory metabolic pathway and produces large amounts of photorespiratory CO₂ within mitochondria (Bauwe et al., Journal of Experimental Botany, Vol. 54, No. 387, pp. 1523-1535, Jun. 1, 2003.)
The enzymatic conversion of phenylalanine to tyrosine is known in eukaryotes. Human phenylalanine hydroxylase is specifically expressed in the liver to convert L-phenylalanine to L-tyrosine (Wang et al. J. Biol. Chem. 269 (12): 9137-46 (1994)). Deficiency of the PAH enzyme causes classic phenylketonurea, a common genetic disorder.
Tyrosine and homoserine and their derivatives are also used in organic synthesis. For example, tyrosine is starting material in the synthesis of chatecolamines or DOPA (dihydroxy-phenyl-alanine) as well as a precursor of adrenaline, dopamine and norepinepherine. A variety of beta-amino-gamma-keto acids can be prepared from commercially available 1-homoserine.
5-Oxoproline, also named as pyroglutamic acid PCA and slats like sodium-PCA, is used as cosmetic ingredient, such as hair and skin conditioning agent. One optical isomer of PCA (the L form) is a naturally occurring component of mammalian tissue. 5-Oxoproline is further used as templates in the synthesis of homochiral glutamate antagonists.

[3685] for the disclosure of these paragraphs see paragraphs [0003.0.0.0] to [0008.0.0.0] above.

[3686] U.S. Pat. No. 5,498,532 disclose the production of various L-amino acids like glutamic acid, glutamine, lysine, threonine, isoleucine, valine, leucine, tryptophan, phenylalanine, tyrosine, histidine, arginine, ornithine, citrulline and proline by direct fermentation using, coryneform bacteria belonging to the genus Corynbacterium or Brevibacterium, which are inherently unable to assimilate lactose, but due to recombinant DNA technology able to assimilate lactose, which represent the carbon source.

An other method for producing amino acids such as homoserine is disclosed in US 20010049126, which use a bacterium belonging to the genus Escherichia which harbors a PTS, phosphotransferase system, gene.
The coproduction of glutamic acid and other amino acids including lysine, aspartic acid, alanine by an auxotroph of Bacillus methanolicus is described in U.S. Pat. No. 6,110,713. According to the teaching of U.S. Pat. No. 5,677,156 L-aspartic acid can be efficiently produced from maleic acid or fumaric acid by adding the aspartase-containing microorganism, like Brevibacterium flavum AB-41 strain (FERM BP-1498) and Eschirichia coli ATCC 11303.
U.S. Pat. No. 5,354,672 discloses a method of producing tyrosine, methionine, or phenylalanine by transiently incorporating a DNA inversion gene into the host cell, Escherichia coli cells, which induce hypersecretion of amino acids.
Known is also the production of citrulline in the small intestine as a product of glutamine metabolism, or in the arginine biosynthetic pathway, where ornithine carbamoyltransferases catalyse the production of citrulline from carbamoyl-phosphate and ornithine. Benninghoff et al. disclose the production of citrulline and ornithine by interfereon-gamma treated macrophages (International Immunology, Vol 3, 413-417, 1991).
There disclosed is a method for producing glycine in US 20030040085, which comprises subjecting an aqueous solution of glycinonitrile to a hydrolysis reaction in a hydrolysis reaction system under the action of a microbial enzyme, thereby converting the glycinonitrile to glycine while by-producing ammonia.
US 20040157290 discloses a process for preparing a serine-rich foreign protein comprising culturing a bacterium containing the cysteine synthase (cysK) gene and a gene encoding the foreign protein.
US 20030079255 disclose the production of Para-hydroxycinnamic acid by introducing genes encoding phenylalanine ammonia-lyase from C. violaceum or R. glutinis tyrosine into a host microorganism and as intermediates, tyrosine and cinnamic acid are also produced.
Production of single cell protein and selected amino acids by microbial fermentation is known, e.g., U.S. Pat. No. 4,652,527. One amino acid which has been produced on an industrial scale is lysine, see Tosaka et al., Trends in Biotechnology, 1: 70-74 (1983), Tosaka and Takinami, Progress in Industrial Microbiology, Ch. 24, pp. 152-172 (Aida et al., 1986). Another example is glutamic acid which has been produced using bacteria of the genera Corynebacterium, Brevibacterium, Microbacterium, and Arothrobacter by fermentation on molasses and starch hydrozylates. Aspartic acid and alanine are produced by enzymatic means from fumaric acid and ammonia. Bacillus species have been used in fermentation processes to produce amino acids, Tosaka et al.; Tosaka and Takinami, as named above.

[3687] for the disclosure of these paragraphs see paragraphs [0010.0.0.0] to [0011.0.0.0] above.

[3688] It is an object of the present invention to develop an inexpensive process for the synthesis of amino acids, preferably 5-oxoproline, alanine, aspartic acid, citrulline, glycine, homoserine, phenylalanine, serine and/or tyrosine. Amino acids are (depending on the organism) one of the most frequently limiting components of food or feed.

[3689] for the disclosure of this paragraphs see paragraphs [0013.0.0.0] above.

[3690] Accordingly, in a first embodiment, in context of paragraphs [0001.n.n.13] to [0555.n.n.13] the invention relates to a process for the production of a fine chemical, whereby the fine chemical are amino acids of the invention, e.g. “5-oxoproline”, “alanine”, “aspartic acid”, “citrulline”, “glycine”, “homoserine”, “phenylalanine”, “serine” and/or “tyrosine”. Accordingly, in the present invention, the term “the fine chemical” as used herein relates to “amino acids of the invention”. Further, the term “the fine chemicals” as used herein also relates to fine chemicals comprising amino acids of the invention.

[3691] In one embodiment, the term “the fine chemical” or “the respective fine chemical” or “amino acids of the invention” means at least one chemical compound with amino acid activity selected from the group of 5-oxoproline, alanine, aspartic acid, citrulline, glycine, homoserine, phenylalanine, serine and/or tyrosine.

In one embodiment, the term “the fine chemical” or “the respective fine chemical” or “or “amino acids of the invention”” or “one chemical compound with amino acid activity” means an organic amphoteric chemical compound comprising an amino group (NH2) and a carboxylic group (COOH) bound to the same or different carbon atoms of a hydrocarbonic backbone whereof optionally further functional groups, e.g. amino group (NH2), carboxylic group (COOH), carbonyl group (CO), hydroxy (OH) or mercapto group (SH) or aryls like phenyl.
In an preferred embodiment, the term “the fine chemical” or the term “amino acid” or “or “amino acids of the invention” the term “the respective fine chemical” means at least one chemical compound with amino acid activity selected from the group “5-oxoproline”, “alanine”, “aspartic acid”, “citrulline”, “glycine”, “homoserine”, “phenylalanine”, “serine” and/or “tyrosine.
An increased content normally means an increased total amino acid content. However, an increased amino acid content also means, in particular, a modified content of the above-described 9 compounds with amino acid activity, without the need for an inevitable increase in the total amino acid content. In a preferred embodiment, the term “the fine chemical” means amino acid in free form or its salts or its ester or bound.

[3692] Accordingly, the present invention relates to a process for the production of amino acids of the invention which comprises
[3693] (a) increasing or generating the activity of a protein as shown in table II, application no. 14, column 3 encoded by the nucleic acid sequences as shown in table I, application no. 14, column 5, in an organelle of a microorganism or plant, or
[3694] (b) increasing or generating the activity of a protein as shown in table II, application no. 14, column 3 encoded by the nucleic acid sequences as shown in table I, application no. 14, column 5 in the plastid of a microorganism or plant, or in one or more parts thereof; and
[3695] (c) growing the organism under conditions which permit the production of the fine chemical, thus amino acids of the invention or fine chemicals comprising amino acids of the invention, in said organism or in the culture medium surrounding the organism.

[3696] Accordingly, the term “the fine chemical” means in one embodiment “amino acids of the invention” in relation to all sequences listed in Table I to IV, application no. 15.

Accordingly, the term “the fine chemical” means in one embodiment “5-oxoproline” in relation to all sequences listed in Table I to IV, line 115 or homologs thereof and means in one embodiment “alanine” in relation to all sequences listed in Tables I to IV, lines 116 to 122 or homologs thereof and
means in one embodiment “aspartic acid” respectively “aspartate” in relation to all sequences listed in Table I, lines 123 to 128, and
means in one embodiment “citrulline” in relation to all sequences listed in Table I to IV, lines 129 to 137 and
means in one embodiment “glycine” in relation to all sequences listed in Table I to IV, lines 138 to 142 and
means in one embodiment “homoserine” in relation to all sequences listed in Table I to IV, lines 143 to 147 and
means in one embodiment “phenylalanine” in relation to all sequences listed in Table I to IV, lines 148 to 160 and
means in one embodiment “serine” in relation to all sequences listed in Table I to IV, lines 161 to 169 and
means in one embodiment “tyrosine” in relation to all sequences listed in Table I to IV, lines 170 to 180.
Accordingly, in one embodiment the term “the fine chemical” means any combination of 2, 3, 4 or all 5 of the fine chemicals, e.g. compounds, selected from the group of “alanine”, “citrulline”, “glycine”, “homoserine” and “serine”. in relation to all sequences listed in Table I to IV, lines 117, 129, 138, 144 and/or 161;
in one embodiment the term “the fine chemical” means “citrulline” and “phenylalanine” in relation to all sequences listed in Table I to IV, lines 130 and/or 150;
in one embodiment the term “the fine chemical” means “phenylalanine” and “glycine” in relation to all sequences listed in Table I to IV, lines 151 and/or 139;
in one embodiment the term “the fine chemical” means any combination of 2, 3, 4 or all 5 of the fine chemicals, e.g. compounds, selected from the group of “alanine”, “citrulline”, “glycine”, “homoserine” and “serine” in relation to all sequences listed in Table I to IV, lines 118, 131, 140, 145 and/or 162;
in one embodiment the term “the fine chemical” means “5-oxoproline” and “aspartate” in relation to all sequences listed in Table I to IV, lines 115 and/or 124;
in one embodiment the term “the fine chemical” means “phenylalanine” and “tyrosine” in relation to all sequences listed in Table I to IV, lines 152 and/or 171;
in one embodiment the term “the fine chemical” means any combination of 2 or all 3 of the fine chemicals, e.g. compounds, selected from the group of “citrulline”, “serine” and “aspartate” in relation to all sequences listed in Table I to IV, lines 132, 164 and/or 125;
in one embodiment the term “the fine chemical” means “citrulline” and “glycine” in relation to all sequences listed in Table I to IV, lines 133 and/or 141;
in one embodiment the term “the fine chemical” means “phenylalanine” and “tyrosine” in relation to all sequences listed in Table I to IV, lines 153 and/or 174;
in one embodiment the term “the fine chemical” means any combination of 2, 3 or all 4 of the fine chemicals, e.g. compounds, selected from the group of “phenylalanine”, “alanine”, “glycine” and “serine” in relation to all sequences listed in Table I to IV, lines 154, 119, 142 and/or 165;
in one embodiment the term “the fine chemical” means “phenylalanine” and “tyrosine” in relation to all sequences listed in Table I to IV, lines 155 and/or 175;
in one embodiment the term “the fine chemical” means “serine” and “homoserine” in relation to all sequences listed in Table I to IV, lines 167 and/or 146;
in one embodiment the term “the fine chemical” means “citrulline” and “serine” in relation to all sequences listed in Table I to IV, lines 137 and/or 168;
in one embodiment the term “the fine chemical” means “alanine” and “phenylalanine” in relation to all sequences listed in Table I to IV, lines 121 and/or 156;
in one embodiment the term “the fine chemical” means “tyrosine” and “phenylalanine” in relation to all sequences listed in Table I to IV, lines 177 and/or 157;
in one embodiment the term “the fine chemical” means “serine” and “phenylalanine” in relation to all sequences listed in Table I to IV, lines 169 and/or 159;
in one embodiment the term “the fine chemical” means “alanine” and “tyrosine” in relation to all sequences listed in Table I to IV, lines 122 and/or 180.
Accordingly, the term “the fine chemical” can mean “5-oxoproline”, “alanine”, “aspartic acid”, “citrulline”, “glycine”, “homoserine”, “phenylalanine”, “serine” and/or “tyrosine”, owing to circumstances and the context. In order to illustrate that the meaning of the term “the fine chemical” means “5-oxoproline”, “alanine”, “aspartic acid”, “citrulline”, “glycine”, “homoserine”, “phenylalanine”, “serine” and/or “tyrosine” the term “the respective fine chemical” is also used.

[3697] In another embodiment the present invention is related to a process for the production of amino acids of the invention, which comprises
[3698] (a) increasing or generating the activity of a protein as shown in table II, application no. 14 column 3 encoded by the nucleic acid sequences as shown in table I, application no. 14, column 5, in an organelle of a non-human organism, or
[3699] (b) increasing or generating the activity of a protein as shown in table II, application no. 14, column 3 encoded by the nucleic acid sequences as shown in table I, application no. 14, column 5, which are joined to a nucleic acid sequence encoding a transit peptide in a non-human organism, or in one or more parts thereof; or
[3700] (c) increasing or generating the activity of a protein as shown in table II, application no. 14, column 3 encoded by the nucleic acid sequences as shown in table I, application no. 14, column 5, which are joined to a nucleic acid sequence encoding chloroplast localization sequence, in a non-human organism, or in one or more parts thereof, and
[3701] (d) growing the organism under conditions which permit the production of amino acids in said organism.

[3702] In another embodiment, the present invention relates to a process for the production of amino acids of the invention, which comprises
[3703] (a) increasing or generating the activity of a protein as shown in table II, application no. 14, column 3 encoded by the nucleic acid sequences as shown in table I, application no. 14, column 5, in an organelle of a microorganism or plant through the transformation of the organelle, or
[3704] (b) increasing or generating the activity of a protein as shown in table II, application no. 14, column 3 encoded by the nucleic acid sequences as shown in table I, application no. 14, column 5 in the plastid of a microorganism or plant, or in one or more parts thereof through the transformation of the plastids; and
[3705] (c) growing the organism under conditions which permit the production of the fine chemical, thus, amino acids of the invention or fine chemicals comprising amino acids of the invention, in said organism or in the culture medium surrounding the organism.

[3706] Advantageously the activity of the protein as shown in table II, application no. 14, column 3 encoded by the nucleic acid sequences as shown in table I, application no. 14, column 5 is increased or generated in the abovementioned process in the plastid of a microorganism or plant.

[3707] for the disclosure of the paragraphs [0019.0.0.13] to [0024.0.0.13] see paragraphs [0019.0.0.0] and [0024.0.0.0] above.

[3708] Even more preferred nucleic acid sequences are encoding transit peptides as disclosed by von Heijne et al. [Plant Molecular Biology Reporter, Vol. 9 (2), 1991: 104-126], which are hereby incorporated by reference. Table V shows some examples of the transit peptide sequences disclosed by von Heijne et al. According to the disclosure of the invention especially in the examples the skilled worker is able to link other nucleic acid sequences disclosed by von Heijne et al. to the nucleic acid sequences shown in table I, application no. 14, columns 5 and 7. Most preferred nucleic acid sequences encoding transit peptides are derived from the genus Spinacia such as chloroplast 30S ribosomal protein PSrp-1, root acyl carrier protein II, acyl carrier protein, ATP synthase: γ subunit, ATP synthase: δ subunit, cytochrom f, ferredoxin I, ferredoxin NADP oxidoreductase (=FNR), nitrite reductase, phosphoribulokinase, plastocyanin or carbonic anhydrase. The skilled worker will recognize that various other nucleic acid sequences encoding transit peptides can easily isolated from plastid-localized proteins, which are expressed from nuclear genes as precursors and are then targeted to plastids. Such transit peptides encoding sequences can be used for the construction of other expression constructs. The transit peptides advantageously used in the inventive process and which are part of the inventive nucleic acid sequences and proteins are typically 20 to 120 amino acids, preferably 25 to 110, 30 to 100 or 35 to 90 amino acids, more preferably 40 to 85 amino acids and most preferably 45 to 80 amino acids in length and functions post-translationally to direct the protein to the plastid preferably to the chloroplast. The nucleic acid sequences encoding such transit peptides are localized upstream of nucleic acid sequence encoding the mature protein. For the correct molecular joining of the transit peptide encoding nucleic acid and the nucleic acid encoding the protein to be targeted it is sometimes necessary to introduce additional base pairs at the joining position, which forms restriction enzyme recognition sequences useful for the molecular joining of the different nucleic acid molecules. This procedure might lead to very few additional amino acids at the N-terminal of the mature imported protein, which usually and preferably do not interfere with the protein function. In any case, the additional base pairs at the joining position which forms restriction enzyme recognition sequences have to be chosen with care, in order to avoid the formation of stop codons or codons which encode amino acids with a strong influence on protein folding, like e.g. proline. It is preferred that such additional codons encode small n.d. structural flexible amino acids such as glycine or alanine.

[3709] As mentioned above the nucleic acid sequences coding for the proteins as shown in table II, application no. 14, column 3 and its homologs as disclosed in table I, application no. 14, columns 5 and 7 are joined to a nucleic acid sequence encoding a transit peptide, This nucleic acid sequence encoding a transit peptide ensures transport of the protein to the plastid. The nucleic acid sequence of the gene to be expressed and the nucleic acid sequence encoding the transit peptide are operably linked. Therefore the transit peptide is fused in frame to the nucleic acid sequence coding for proteins as shown in table II, application no. 14, column 3 and its homologs as disclosed in table I, application no. 14, columns 5 and 7.

[3710] for the disclosure of the paragraphs [0027.0.0.13] to [0029.0.0.13] see paragraphs [0027.0.0.0] and [0029.0.0.0] above.

[3711] Alternatively, nucleic acid sequences coding for the transit peptides may be chemically synthesized either in part or wholly according to structure of transit peptide sequences disclosed in the prior art. Said natural or chemically synthesized sequences can be directly linked to the sequences encoding the mature protein or via a linker nucleic acid sequence, which may be typically less than 500 base pairs, preferably less than 450, 400, 350, 300, 250 or 200 base pairs, more preferably less than 150, 100, 90, 80, 70, 60, 50, 40 or 30 base pairs and most preferably less than 25, 20, 15, 12, 9, 6 or 3 base pairs in length and are in frame to the coding sequence. Furthermore favorable nucleic acid sequences encoding transit peptides may comprise sequences derived from more than one biological and/or chemical source and may include a nucleic acid sequence derived from the amino-terminal region of the mature protein, which in its native state is linked to the transit peptide. In a preferred embodiment of the invention said amino-terminal region of the mature protein is typically less than 150 amino acids, preferably less than 140, 130, 120, 110, 100 or 90 amino acids, more preferably less than 80, 70, 60, 50, 40, 35, 30, 25 or 20 amino acids and most preferably less than 19, 18, 17, 16, 15, 14, 13, 12, 11 or 10 amino acids in length. But even shorter or longer stretches are also possible. In addition target sequences, which facilitate the transport of proteins to other cell compartments such as the vacuole, endoplasmic reticulum, Golgi complex, glyoxysomes, peroxisomes or mitochondria may be also part of the inventive nucleic acid sequence. The proteins translated from said inventive nucleic acid sequences are a kind of fusion proteins that means the nucleic acid sequences encoding the transit peptide for example the ones shown in table V, preferably the last one of the table are joint to the nucleic acid sequences shown in table I, application no. 13, columns 5 and 7. The person skilled in the art is able to join said sequences in a functional manner. Advantageously the transit peptide part is cleaved off from the protein part shown in table II, application no. 14, columns 5 and 7 during the transport preferably into the plastids. All products of the cleavage of the preferred transit peptide shown in the last line of table V have preferably the N-terminal amino acid sequences QIA CSS or QIA EFQLTT in front of the start methionine of the protein mentioned in table II, application no. 14, columns 5 and 7. Other short amino acid sequences of an range of 1 to 20 amino acids preferable 2 to 15 amino acids, more preferable 3 to 10 amino acids most preferably 4 to 8 amino acids are also possible in front of the start methionine of the protein mentioned in table II, application no. 14, columns 5 and 7. In case of the amino acid sequence QIA CSS the three amino acids in front of the start methionine are stemming from the LIC (=ligatation independent cloning) cassette. Said short amino acid sequence is preferred in the case of the expression of E. coli genes. In case of the amino acid sequence QIA EFQLTT the six amino acids in front of the start methionine are stemming from the LIC cassette. Said short amino acid sequence is preferred in the case of the expression of S. cerevisiae genes. The skilled worker knows that other short sequences are also useful in the expression of the genes mentioned in table I, application no. 14, columns 5 and 7. Furthermore the skilled worker is aware of the fact that there is not a need for such short sequences in the expression of the genes.

Table V: Examples of transit peptides disclosed by von Heijne et al.: for the disclosure of the Table V see Table V above, paragraphs [0030.0.0.0] above.

[3712] Alternatively to the targeting of the sequences shown in table II, application no. 14, columns 5 and 7 preferably of sequences in general encoded in the nucleus with the aid of the targeting sequences mentioned for example in table V alone or in combination with other targeting sequences preferably into the plastids, the nucleic acids of the invention can directly introduced into the plastidal genome. Therefore in a preferred embodiment the nucleic acid sequences shown in table I, application no. 14, columns 5 and 7 are directly introduced and expressed in plastids.

The term “introduced” in the context of this specification shall mean the insertion of a nucleic acid sequence into the organism by means of a “transfection”, “transduction” or preferably by “transformation”.
A plastid, such as a chloroplast, has been “transformed” by an exogenous (preferably foreign) nucleic acid sequence if nucleic acid sequence has been introduced into the plastid that means that this sequence has crossed the membrane or the membranes of the plastid. The foreign DNA may be integrated (covalently linked) into plastid DNA making up the genome of the plastid, or it may remain unintegrated (e.g., by including a chloroplast origin of replication). “Stably” integrated DNA sequences are those, which are inherited through plastid replication, thereby transferring new plastids, with the features of the integrated DNA sequence to the progeny.

[3713] for the disclosure of the paragraphs [0030.2.0.13] and [0030.3.0.13] see paragraphs [0030.2.0.0] and [0030.3.0.0] above.

[3714] For the inventive process it is of great advantage that by transforming the plastids the intraspecies specific transgene flow is blocked, because a lot of species such as corn, cotton and rice have a strict maternal inheritance of plastids. By placing the genes specified in table I, application no. 14, columns 5 and 7 or active fragments thereof in the plastids of plants, these genes will not be present in the pollen of said plants.

A further preferred embodiment of the invention relates to the use of so called “chloroplast localization sequences”, in which a first RNA sequence or molecule is capable of transporting or “chaperoning” a second RNA sequence, such as a RNA sequence transcribed from the sequences depicted in table 1, application no. 14, columns 5 and 7 or a sequence encoding a protein, as depicted in table II, application no. 14, columns 5 and 7, from an external environment inside a cell or outside a plastid into a chloroplast. In one embodiment the chloroplast localization signal is substantially similar or complementary to a complete or intact viroid sequence. The chloroplast localization signal may be encoded by a DNA sequence, which is transcribed into the chloroplast localization RNA. The term “viroid” refers to a naturally occurring single stranded RNA molecule (Flores, C R Acad Sci III. 2001 October; 324(10): 943-52). Viroids usually contain about 200-500 nucleotides and generally exist as circular molecules. Examples of viroids that contain chloroplast localization signals include but are not limited to ASBVd, PLMVd, CChMVd and ELVd. The viroid sequence or a functional part of it can be fused to the sequences depicted in table, 1, application no. 14, columns 5 and 7 or a sequence encoding a protein, as depicted in table II, application no. 14, columns 5 and 7 in such a manner that the viroid sequence transports a sequence transcribed from a sequence as depicted in table 1 application no. 14, columns 5 and 7 or a sequence encoding a protein as depicted in table II, application no. 14, columns 5 and 7 into the chloroplasts. A preferred embodiment uses a modified ASBVd (Navarro et al., Virology. 2000 Mar. 1; 268(1): 218-25).
In a further specific embodiment the protein to be expressed in the plastids such as the proteins depicted in table II, application no. 14, columns 5 and 7 are encoded by different nucleic acids. Such a method is disclosed in WO 2004/040973, which shall be incorporated by reference. WO 2004/040973 teaches a method, which relates to the translocation of an RNA corresponding to a gene or gene fragment into the chloroplast by means of a chloroplast localization sequence. The genes, which should be expressed in the plant or plants cells, are split into nucleic acid fragments, which are introduced into different compartments in the plant e.g. the nucleus, the plastids and/or mitochondria. Additionally plant cells are described in which the chloroplast contains a ribozyme fused at one end to an RNA encoding a fragment of a protein used in the inventive process such that the ribozyme can trans-splice the translocated fusion RNA to the RNA encoding the gene fragment to form and as the case may be reunite the nucleic acid fragments to an intact mRNA encoding a functional protein for example as disclosed in table II, application no. 14, columns 5 and 7.

[3715] In a preferred embodiment of the invention the nucleic acid sequences as shown in table I, application no. 14, columns 5 and 7 used in the inventive process are transformed into plastids, which are metabolical active. Those plastids should preferably maintain at a high copy number in the plant or plant tissue of interest, most preferably the chloroplasts found in green plant tissues, such as leaves or cotyledons or in seeds.

[3716] For a good expression in the plastids the nucleic acid sequences as shown in table I, application no. 14, columns 5 and 7 are introduced into an expression cassette using a preferably a promoter and terminator, which are active in plastids preferably a chloroplast promoter. Examples of such promoters include the psbA promoter from the gene from spinach or pea, the rbcL promoter, and the atpB promoter from corn.

[3717] for the disclosure of the paragraphs [0031.0.0.13] and [0032.0.0.13] see paragraphs [0031.0.0.0] and [0032.0.0.0] above.

[3718] Advantageously the process for the production of the fine chemical leads to an enhanced production of the fine chemical. The terms “enhanced” or “increase” mean at least a 10%, 20%, 30%, 40% or 50%, preferably at least 60%, 70%, 80%, 90% or 100%, more preferably 150%, 200%, 300%, 400% or 500% higher production of the fine chemical in comparison to the reference as defined below, e.g. that means in comparison to an organism without the aforementioned modification of the activity of a protein as shown in table II, application no. 14, column 3. Preferably the modification of the activity of a protein as shown in table II, application no. 14, column 3 or their combination can be achieved by joining the protein to a transit peptide.

[3719] Surprisingly it was found, that the transgenic expression of the E. coli proteins and/or Saccharomyces cerevisiae proteins shown in table II, application no. 14, column 3 in plastids of a plant such as Arabidopsis thaliana for example through the linkage to at least one targeting sequence—for example as mentioned in table V conferred an increase in the respective fine chemical indicated in column 6 “metabolite” of each table I to IV in the transformed plant.

Surprisingly it was found, that the transgenic expression of the E. coli protein b1640 in combination with a plastidal targeting sequence in Arabidopsis thaliana conferred an increase in 5-oxoproline.
Surprisingly it was found, that the transgenic expression of the E. coli protein b0342, b1062, b1264, b2965 and/or b4053 and/or the Saccharomyces cerevisiae protein YAL038W and/or YNL241C in combination with a plastidal targeting sequence in Arabidopsis thaliana conferred an increase in alanine.
Surprisingly it was found, that the transgenic expression of the E. coli protein b1556, b1640, b1758, b2066 and/or b2312, and/or the Saccharomyces cerevisiae protein YNR012W in combination with a plastidal targeting sequence in Arabidopsis thaliana conferred an increase in aspartate.
Surprisingly it was found, that the transgenic expression of the E. coli protein b1062, b1136, b1264, b1758, b2366, b2818, b3117, b3213 and/or b4139 in combination with a plastidal targeting sequence in Arabidopsis thaliana conferred an increase in citrulline.
Surprisingly it was found, that the transgenic expression of the E. coli protein b1062, b1223, b1264, b2366 and/or b2965 in combination with a plastidal targeting sequence in Arabidopsis thaliana conferred an increase in glycine.
Surprisingly it was found, that the transgenic expression of the E. coli protein b0628, b1062, b1264 and/or b3616, and/or the Saccharomyces cerevisiae protein YEL046C in combination with a plastidal targeting sequence in Arabidopsis thaliana conferred an increase in homoserine.
Surprisingly it was found, that the transgenic expression of the E. coli protein b0403, b0754, b1136, b1223, b1704, b2601, b2965 and/or b3390, and/or the Saccharomyces cerevisiae protein YAL038W, YDR035W, YDR430C, YKR043C and/or YOR353C in combination with a plastidal targeting sequence in Arabidopsis thaliana conferred an increase in phenylalanine.
Surprisingly it was found, that the transgenic expression of the E. coli protein b1062, b1264, b1611, b1758, b2965, b3429, b3616 and/or b4139, and/or the Saccharomyces cerevisiae protein YKR043C in combination with a plastidal targeting sequence in Arabidopsis thaliana conferred an increase in serine.
Surprisingly it was found, that the transgenic expression of the E. coli protein b0760, b1704, b2223, b2600, b2601 and/or b3390, and/or the Saccharomyces cerevisiae protein YBL082C, YDR035W, YDR497C, YLR174W, YNL241C in combination with a plastidal targeting sequence in Arabidopsis thaliana conferred an increase in tyrosine.

[3720] for the disclosure of this paragraph see paragraph [0035.0.0.0] above.

[3721] The sequence of b0342 (Accession number PIR:XXECTG) from Escherichia coli has been published in Blattner et al., Science 277 (5331), 1453-1474 (1997), and its activity is being defined as “thiogalactoside acetyltransferase”. Accordingly, in one embodiment, the process of the present invention comprises the use of a “thiogalactoside acetyltransferase” or its homolog, e.g. as shown herein, for the production of the fine chemical, meaning of amino acids of the invention, in particular for increasing the amount of alanine in free or bound form in an organism or a part thereof, as mentioned. In one embodiment, in the process of the present invention the activity of a b0342 protein is increased or generated, e.g. from Escherichia coli or a homolog thereof, preferably linked at least to one transit peptide as mentioned for example in table V.

In another embodiment, in the process of the present invention the activity of a b0342 protein is increased or generated in a subcellular compartment of the organism or organism cell such as in an organelle like a plastid or mitochondria.
The sequence of b0403 (Accession number PIR:C64769) from Escherichia coli has been published in Blattner et al., Science 277 (5331), 1453-1474 (1997), and its activity is being defined as “maltodextrin glucosidase”. Accordingly, in one embodiment, the process of the present invention comprises the use of a “maltodextrin glucosidase” or its homolog, e.g. as shown herein, for the production of the fine chemical, meaning of amino acids of the invention, in particular for increasing the amount of phenylalanine in free or bound form in an organism or a part thereof, as mentioned. In one embodiment, in the process of the present invention the activity of a b0403 protein is increased or generated, e.g. from Escherichia coli or a homolog thereof, preferably linked at least to one transit peptide as mentioned for example in table V.
In another embodiment, in the process of the present invention the activity of a b0403 protein is increased or generated in a subcellular compartment of the organism or organism cell such as in an organelle like a plastid or mitochondria.
The sequence of b0628 from Escherichia coli (Accession NP_{—}415161) has been published in Blattner et al., Science 277 (5331), 1453-1474 (1997), and its activity is being defined as “lipoate synthase” or “an iron-sulfur enzyme”. Accordingly, in one embodiment, the process of the present invention comprises the use of a “lipoate synthase” or “an iron-sulfur enzyme” or its homolog, e.g. as shown herein, for the production of the fine chemical, meaning of amino acids of the invention, in particular for increasing the amount of homoserine in free or bound form in an organism or a part thereof, as mentioned. In one embodiment, in the process of the present invention the activity of a b0628 protein is increased or generated, e.g. from Escherichia coli or a homolog thereof, preferably linked at least to one transit peptide as mentioned for example in table V.
In another embodiment, in the process of the present invention the activity of a b0628 protein is increased or generated in a subcellular compartment of the organism or organism cell such as in an organelle like a plastid or mitochondria.
The sequence of b0754 from Escherichia coli (Accession PIR:ADECHF) has been published in Blattner et al., Science 277 (5331), 1453-1474 (1997), and its activity is being defined as “3-deoxy-D-arabinoheptulosonate-7-phosphate synthase (DAHP synthetase, phenylalanine-repressible)”. Accordingly, in one embodiment, the process of the present invention comprises the use of a “3-deoxy-D-arabinoheptulosonate-7-phosphate synthase (DAHP synthetase, phenylalanine-repressible)” or its homolog, e.g. as shown herein, for the production of the fine chemical, meaning of amino acids of the invention, in particular for increasing the amount phenylalanine in free or bound form in an organism or a part thereof, as mentioned. In one embodiment, in the process of the present invention the activity of a b0754 protein is increased or generated, e.g. from Escherichia coli or a homolog thereof, preferably linked at least to one transit peptide as mentioned for example in table V.
In another embodiment, in the process of the present invention the activity of a b0754 protein is increased or generated in a subcellular compartment of the organism or organism cell such as in an organelle like a plastid or mitochondria.
The sequence of b0760 from Escherichia coli (Accession PIR:JC6038) has been published in Blattner et al., Science 277 (5331), 1453-1474 (1997), and its activity is being defined as “ATP-binding component of molybdate transport system”. Accordingly, in one embodiment, the process of the present invention comprises the use of a “ATP-binding component of molybdate transport system” or its homolog, e.g. as shown herein, for the production of the fine chemical, meaning of amino acids of the invention, in particular for increasing the amount of tyrosine in free or bound form in an organism or a part thereof, as mentioned. In one embodiment, in the process of the present invention the activity of a b0760 protein is increased or generated, e.g. from Escherichia coli or a homolog thereof, preferably linked at least to one transit peptide as mentioned for example in table V.
In another embodiment, in the process of the present invention the activity of a b0760 protein is increased or generated in a subcellular compartment of the organism or organism cell such as in an organelle like a plastid or mitochondria.
The sequence of b1062 from Escherichia coli (Accession PIR:DEECOO) has been published in Blattner et al., Science 277 (5331), 1453-1474 (1997), and its activity is being defined as “dihydro-orotase”. Accordingly, in one embodiment, the process of the present invention comprises the use of a “dihydro-orotase” or its homolog, e.g. as shown herein, for the production of the fine chemical, meaning of amino acids of the invention, in particular for increasing the amount of one or of any combination of 2, 3, 4 or all 5 of the fine chemicals, e.g. compounds, selected from the group of “alanine”, “citrulline”, “glycine”, “homoserine” and “serine” in free or bound form in an organism or a part thereof, as mentioned. In one embodiment, in the process of the present invention the activity of a b1062 protein is increased or generated, e.g. from Escherichia coli or a homolog thereof, preferably linked at least to one transit peptide as mentioned for example in table V.
In another embodiment, in the process of the present invention the activity of a b1062 protein is increased or generated in a subcellular compartment of the organism or organism cell such as in an organelle like a plastid or mitochondria.
The sequence of b1136 from Escherichia coli (Accession PIR:DCECIS) has been published in Blattner et al., Science 277 (5331), 1453-1474 (1997), and its activity is being defined as “isocitrate dehydrogenase (NADP)”. Accordingly, in one embodiment, the process of the present invention comprises the use of a “isocitrate dehydrogenase (NADP)” or its homolog, e.g. as shown herein, for the production of the fine chemical, meaning of amino acids of the invention, in particular for increasing the amount of citrulline and/or phenylalanine in free or bound form in an organism or a part thereof, as mentioned. In one embodiment, in the process of the present invention the activity of a b1136 protein is increased or generated, e.g. from Escherichia coli or a homolog thereof, preferably linked at least to one transit peptide as mentioned for example in table V.
In another embodiment, in the process of the present invention the activity of a b1136 protein is increased or generated in a subcellular compartment of the organism or organism cell such as in an organelle like a plastid or mitochondria.
The sequence of b1223 from Escherichia coli (Accession NP_{—}415741) has been published in Blattner et al., Science 277 (5331), 1453-1474 (1997), and its activity is being defined as “nitrite extrusion protein”. Accordingly, in one embodiment, the process of the present invention comprises the use of a “nitrite extrusion protein” or its homolog, e.g. as shown herein, for the production of the fine chemical, meaning of amino acids of the invention, in particular for increasing the amount of glycine and/or phenylalanine in free or bound form in an organism or a part thereof, as mentioned. In one embodiment, in the process of the present invention the activity of a b1223 protein is increased or generated, e.g. from Escherichia coli or a homolog thereof, preferably linked at least to one transit peptide as mentioned for example in table V.
In another embodiment, in the process of the present invention the activity of a b1223 protein is increased or generated in a subcellular compartment of the organism or organism cell such as in an organelle like a plastid or mitochondria.
The sequence of b1264 from Escherichia coli (Accession NP 415780) has been published in Blattner et al., Science 277 (5331), 1453-1474 (1997), and its activity is being defined as “anthranilate synthase”. Accordingly, in one embodiment, the process of the present invention comprises the use of a “anthranilate synthase” or its homolog, e.g. as shown herein, for the production of the fine chemical, meaning of amino acids of the invention, in particular for increasing the amount of one or of any combination of 2, 3, 4 or all 5 of the fine chemicals, e.g. compounds, selected from the group of “alanine”, “citrulline”, “glycine”, “homoserine” and “serine” in free or bound form in an organism or a part thereof, as mentioned. In one embodiment, in the process of the present invention the activity of a b1264 protein is increased or generated, e.g. from Escherichia coli or a homolog thereof, preferably linked at least to one transit peptide as mentioned for example in table V.
In another embodiment, in the process of the present invention the activity of a b1264 protein is increased or generated in a subcellular compartment of the organism or organism cell such as in an organelle like a plastid or mitochondria.
The sequence of b1556 (Accession number NP_{—}416074) from Escherichia coli has been published in Blattner et al., Science 277 (5331), 1453-1474 (1997), and its activity is being defined as “Qin prophage”. Accordingly, in one embodiment, the process of the present invention comprises the use of a “Qin prophage” or its homolog, e.g. as shown herein, for the production of the fine chemical, meaning of amino acids of the invention, in particular for increasing the amount of aspartate in free or bound form in an organism or a part thereof, as mentioned. In one embodiment, in the process of the present invention the activity of a b1556 protein is increased or generated, e.g. from Escherichia coli or a homolog thereof, preferably linked at least to one transit peptide as mentioned for example in table V.
In another embodiment, in the process of the present invention the activity of a b1556 protein is increased or generated in a subcellular compartment of the organism or organism cell such as in an organelle like a plastid or mitochondria.
The sequence of b1611 (Accession number NP_{—}416128) from Escherichia coli has been published in Blattner et al., Science 277 (5331), 1453-1474 (1997), and its activity is being defined as “fumarase C (fumarate hydratase Class II)”. Accordingly, in one embodiment, the process of the present invention comprises the use of a “fumarase C (fumarate hydratase Class II)” or its homolog, e.g. as shown herein, for the production of the fine chemical, meaning of amino acids of the invention, in particular for increasing the amount of serine in free or bound form in an organism or a part thereof, as mentioned. In one embodiment, in the process of the present invention the activity of a b1611 protein is increased or generated, e.g. from Escherichia coli or a homolog thereof, preferably linked at least to one transit peptide as mentioned for example in table V.
In another embodiment, in the process of the present invention the activity of a b1611 protein is increased or generated in a subcellular compartment of the organism or organism cell such as in an organelle like a plastid or mitochondria.
The sequence of b1640 (Accession number NP_{—}416157) from Escherichia coli has been published in Blattner et al., Science 277 (5331), 1453-1474 (1997), and its activity is being defined as “conserved hypothetical protein with actin-like ATPase domain”. Accordingly, in one embodiment, the process of the present invention comprises the use of a “conserved hypothetical protein with actin-like ATPase domain” or its homolog, e.g. as shown herein, for the production of the fine chemical, meaning of amino acids of the invention, in particular for increasing the amount of 5-oxoproline and/or aspartate in free or bound form in an organism or a part thereof, as mentioned. In one embodiment, in the process of the present invention the activity of a b1640 protein is increased or generated, e.g. from Escherichia coli or a homolog thereof, preferably linked at least to one transit peptide as mentioned for example in table V.
In another embodiment, in the process of the present invention the activity of a b1640 protein is increased or generated in a subcellular compartment of the organism or organism cell such as in an organelle like a plastid or mitochondria.

[3722] The sequence of b1704 from Escherichia coli (Accession NP_{—}416219) has been published in Blattner et al., Science 277 (5331), 1453-1474 (1997), and its activity is being defined as “3-deoxy-D-arabinoheptulosonate-7-phosphate synthase (DAHP synthetase), tryptophan-repressible”. Accordingly, in one embodiment, the process of the present invention comprises the use of a “3-deoxy-D-arabinoheptulosonate-7-phosphate synthase (DAHP synthetase), tryptophan-repressible” or its homolog, e.g. as shown herein, for the production of the fine chemical, meaning of amino acids of the invention, in particular for increasing the amount of phenylalanine and/or tyrosine in free or bound form in an organism or a part thereof, as mentioned. In one embodiment, in the process of the present invention the activity of a b1704 protein is increased or generated, e.g. from Escherichia coli or a homolog thereof, preferably linked at least to one transit peptide as mentioned for example in table V.

In another embodiment, in the process of the present invention the activity of a b1704 protein is increased or generated in a subcellular compartment of the organism or organism cell such as in an organelle like a plastid or mitochondria.
The sequence of b1758 from Escherichia coli (Accession NP_{—}416272) has been published in Blattner et al., Science 277 (5331), 1453-1474 (1997), and its activity is being defined as “cytochrome oxidase”. Accordingly, in one embodiment, the process of the present invention comprises the use of a “cytochrome oxidase” or its homolog, e.g. as shown herein, for the production of the fine chemical, meaning of amino acids of the invention, in particular for increasing the amount of one or any combination of 2 or all 3 of the fine chemicals, e.g. compounds, selected from the group of “citrulline”, “aspartate”, and “serine” in free or bound form in an organism or a part thereof, as mentioned.
In one embodiment, in the process of the present invention the activity of a b1758 protein is increased or generated, e.g. from Escherichia coli or a homolog thereof, preferably linked at least to one transit peptide as mentioned for example in table V.
In another embodiment, in the process of the present invention the activity of a b1758 protein is increased or generated in a subcellular compartment of the organism or organism cell such as in an organelle like a plastid or mitochondria.
The sequence of b2066 (Accession number NP_{—}416570) from Escherichia coli has been published in Blattner et al., Science 277 (5331), 1453-1474 (1997), and its activity is being defined as “uridine/cytidine kinase”. Accordingly, in one embodiment, the process of the present invention comprises the use of a “uridine/cytidine kinase” or its homolog, e.g. as shown herein, for the production of the fine chemical, meaning of amino acids of the invention, in particular for increasing the amount of aspartate in free or bound form in an organism or a part thereof, as mentioned. In one embodiment, in the process of the present invention the activity of a b2066 protein is increased or generated, e.g. from Escherichia coli or a homolog thereof, preferably linked at least to one transit peptide as mentioned for example in table V.
In another embodiment, in the process of the present invention the activity of a b2066 protein is increased or generated in a subcellular compartment of the organism or organism cell such as in an organelle like a plastid or mitochondria.
The sequence of b2223 (Accession number NP 416727) from Escherichia coli has been published in Blattner et al., Science 277 (5331), 1453-1474 (1997), and its activity is being defined as “short chain fatty acid transporter”. Accordingly, in one embodiment, the process of the present invention comprises the use of a “short chain fatty acid transporter” or its homolog, e.g. as shown herein, for the production of the fine chemical, meaning of amino acids of the invention, in particular for increasing the amount of tyrosine in free or bound form in an organism or a part thereof, as mentioned. In one embodiment, in the process of the present invention the activity of a b2223 protein is increased or generated, e.g. from Escherichia coli or a homolog thereof, preferably linked at least to one transit peptide as mentioned for example in table V.
In another embodiment, in the process of the present invention the activity of a b2223 protein is increased or generated in a subcellular compartment of the organism or organism cell such as in an organelle like a plastid or mitochondria.
The sequence of b2312 from Escherichia coli (Accession PIR:XQEC) has been published in Blattner et al., Science 277 (5331), 1453-1474 (1997), and its activity is being defined as “amidophosphoribosyltransferase (PRPP amidotransferase)”. Accordingly, in one embodiment, the process of the present invention comprises the use of a “amidophosphoribosyltransferase (PRPP amidotransferase)” or its homolog, e.g. as shown herein, for the production of the fine chemical, meaning of amino acids of the invention, in particular for increasing the amount of aspartate in free or bound form in an organism or a part thereof, as mentioned. In one embodiment, in the process of the present invention the activity of a b2312 protein is increased or generated, e.g. from Escherichia coli or a homolog thereof, preferably linked at least to one transit peptide as mentioned for example in table V.
In another embodiment, in the process of the present invention the activity of a b23122 protein is increased or generated in a subcellular compartment of the organism or organism cell such as in an organelle like a plastid or mitochondria.
The sequence of b2366 from Escherichia coli (Accession PIR:DWECS) has been published in Blattner et al., Science 277 (5331), 1453-1474 (1997), and its activity is being defined as “D-serine deaminase (dehydratase)”. Accordingly, in one embodiment, the process of the present invention comprises the use of a “D-serine deaminase (dehydratase)” or its homolog, e.g. as shown herein, for the production of the fine chemical, meaning of amino acids of the invention, in particular for increasing the amount of citrulline and/or glycine in free or bound form in an organism or a part thereof, as mentioned. In one embodiment, in the process of the present invention the activity of a b2366 protein is increased or generated, e.g. from Escherichia coli or a homolog thereof, preferably linked at least to one transit peptide as mentioned for example in table V.
In another embodiment, in the process of the present invention the activity of a b2366 protein is increased or generated in a subcellular compartment of the organism or organism cell such as in an organelle like a plastid or mitochondria.
The sequence of b2600 (Accession number NP 417091) from Escherichia coli has been published in Blattner et al., Science 277 (5331), 1453-1474 (1997), and its activity is being defined as “bifunctional chorismate mutase/prephenate dehydrogenase”. Accordingly, in one embodiment, the process of the present invention comprises the use of a “bifunctional chorismate mutase/prephenate dehydrogenase” or its homolog, e.g. as shown herein, for the production of the fine chemical, meaning of amino acids of the invention, in particular for increasing the amount of tyrosine in free or bound form in an organism or a part thereof, as mentioned. In one embodiment, in the process of the present invention the activity of a b2600 protein is increased or generated, e.g. from Escherichia coli or a homolog thereof, preferably linked at least to one transit peptide as mentioned for example in table V.
In another embodiment, in the process of the present invention the activity of a b2600 protein is increased or generated in a subcellular compartment of the organism or organism cell such as in an organelle like a plastid or mitochondria.
The sequence of b2601 (Accession number NP_{—}417092) from Escherichia coli has been published in Blattner et al., Science 277 (5331), 1453-1474 (1997), and its activity is being defined as “3-deoxy-D-arabinoheptulosonate-7-phosphate (DAHP) synthase, tryptophan-repressible”. Accordingly, in one embodiment, the process of the present invention comprises the use of a “3-deoxy-D-arabinoheptulosonate-7-phosphate (DAHP) synthase, trypothan-repressible” or its homolog, e.g. as shown herein, for the production of the fine chemical, meaning of amino acids of the invention, in particular for increasing the amount of phenylalanine and/or tyrosine in free or bound form in an organism or a part thereof, as mentioned. In one embodiment, in the process of the present invention the activity of a b2601 protein is increased or generated, e.g. from Escherichia coli or a homolog thereof, preferably linked at least to one transit peptide as mentioned for example in table V.
In another embodiment, in the process of the present invention the activity of a b2601 protein is increased or generated in a subcellular compartment of the organism or organism cell such as in an organelle like a plastid or mitochondria.
The sequence of b2818 (Accession number NP_{—}417295) from Escherichia coli has been published in Blattner et al., Science 277 (5331), 1453-1474 (1997), and its activity is being defined as “N-acetylglutamate synthase (amino acids of the invention N-acetyltransferase)”. Accordingly, in one embodiment, the process of the present invention comprises the use of a “N-acetylglutamate synthase” or its homolog, e.g. as shown herein, for the production of the fine chemical, meaning of amino acids of the invention, in particular for increasing the amount of citrulline in free or bound form in an organism or a part thereof, as mentioned. In one embodiment, in the process of the present invention the activity of a b2818 protein is increased or generated, e.g. from Escherichia coli or a homolog thereof, preferably linked at least to one transit peptide as mentioned for example in table V.
In another embodiment, in the process of the present invention the activity of a b2818 protein is increased or generated in a subcellular compartment of the organism or organism cell such as in an organelle like a plastid or mitochondria.
The sequence of b2965 (Accession number NP_{—}417440) from Escherichia coli has been published in Blattner et al., Science 277 (5331), 1453-1474 (1997), and its activity is being defined as “ornithine decarboxylase”. Accordingly, in one embodiment, the process of the present invention comprises the use of a “ornithine decarboxylase” or its homolog, e.g. as shown herein, for the production of the fine chemical, meaning of amino acids of the invention, in particular for increasing the amount of any combination of 2, 3, or all 4 of the fine chemicals, e.g. compounds, selected from the group of “phenylalanine”, “alanine”, “glycine” and “serine” in free or bound form in an organism or a part thereof, as mentioned. In one embodiment, in the process of the present invention the activity of a b2965 protein is increased or generated, e.g. from Escherichia coli or a homolog thereof, preferably linked at least to one transit peptide as mentioned for example in table V.
In another embodiment, in the process of the present invention the activity of a b2965 protein is increased or generated in a subcellular compartment of the organism or organism cell such as in an organelle like a plastid or mitochondria.
The sequence of b3117 (Accession number PIR:DWECTD) from Escherichia coli has been published in Blattner et al., Science 277 (5331), 1453-1474 (1997), and its activity is being defined as “threonine dehydratase, catabolic, PLP-dependent”. Accordingly, in one embodiment, the process of the present invention comprises the use of a “threonine dehydratase, catabolic, PLP-dependent” or its homolog, e.g. as shown herein, for the production of the fine chemical, meaning of amino acids of the invention, in particular for increasing the amount of citrulline in free or bound form in an organism or a part thereof, as mentioned. In one embodiment, in the process of the present invention the activity of a b3117 protein is increased or generated, e.g. from Escherichia coli or a homolog thereof, preferably linked at least to one transit peptide as mentioned for example in table V.
In another embodiment, in the process of the present invention the activity of a b3117 protein is increased or generated in a subcellular compartment of the organism or organism cell such as in an organelle like a plastid or mitochondria.
The sequence of b3213 (Accession number NP_{—}417680) from Escherichia coli has been published in Blattner et al., Science 277 (5331), 1453-1474 (1997), and its activity is being defined as “glutamate synthase (small subunit)”. Accordingly, in one embodiment, the process of the present invention comprises the use of a glutamate synthase (small subunit)” or its homolog, e.g. as shown herein, for the production of the fine chemical, meaning of amino acids of the invention, in particular for increasing the amount of citrulline in free or bound form in an organism or a part thereof, as mentioned. In one embodiment, in the process of the present invention the activity of a b3213 protein is increased or generated, e.g. from Escherichia coli or a homolog thereof, preferably linked at least to one transit peptide as mentioned for example in table V.
In another embodiment, in the process of the present invention the activity of a b3213 protein is increased or generated in a subcellular compartment of the organism or organism cell such as in an organelle like a plastid or mitochondria.
The sequence of b3390 (Accession number YP_{—}026215) from Escherichia coli has been published in Blattner et al., Science 277 (5331), 1453-1474 (1997), and its activity is being defined as a “shikimate kinase I”. Accordingly, in one embodiment, the process of the present invention comprises the use of a “shikimate kinase I” or its homolog, e.g. as shown herein, for the production of the fine chemical, meaning of amino acids of the invention, in particular for increasing the amount of phenylalanine and/or tyrosine in free or bound form in an organism or a part thereof, as mentioned. In one embodiment, in the process of the present invention the activity of a b3390 protein is increased or generated, e.g. from Escherichia coli or a homolog thereof, preferably linked at least to one transit peptide as mentioned for example in table V.
In another embodiment, in the process of the present invention the activity of a b3390 protein is increased or generated in a subcellular compartment of the organism or organism cell such as in an organelle like a plastid or mitochondria.
The sequence of b3429 (Accession number NP_{—}417887) from Escherichia coli has been published in Blattner et al., Science 277 (5331), 1453-1474 (1997), and its activity is being defined as “glycogen synthase (starch synthase)”. Accordingly, in one embodiment, the process of the present invention comprises the use of a “glycogen synthase (starch synthase)” or its homolog, e.g. as shown herein, for the production of the fine chemical, meaning of amino acids of the invention, in particular for increasing the amount of serine in free or bound form in an organism or a part thereof, as mentioned. In one embodiment, in the process of the present invention the activity of a b3429 protein is increased or generated, e.g. from Escherichia coli or a homolog thereof, preferably linked at least to one transit peptide as mentioned for example in table V.
In another embodiment, in the process of the present invention the activity of a b3429 protein is increased or generated in a subcellular compartment of the organism or organism cell such as in an organelle like a plastid or mitochondria.
The sequence of b3616 (Accession number NP_{—}418073) from Escherichia coli has been published in Blattner et al., Science 277 (5331), 1453-1474 (1997), and its activity is being defined as “threonine 3-dehydrogenase, NAD(P)-binding”. Accordingly, in one embodiment, the process of the present invention comprises the use of a “threonine 3dehydrogenase, NAD(P)-binding” or its homolog, e.g. as shown herein, for the production of the fine chemical, meaning of amino acids of the invention, in particular for increasing the amount of serine and/or homoserine in free or bound form in an organism or a part thereof, as mentioned. In one embodiment, in the process of the present invention the activity of a b3616 protein is increased or generated, e.g. from Escherichia coli or a homolog thereof, preferably linked at least to one transit peptide as mentioned for example in table V.
In another embodiment, in the process of the present invention the activity of a b3616 protein is increased or generated in a subcellular compartment of the organism or organism cell such as in an organelle like a plastid or mitochondria.

[3723] The sequence of b4053 (Accession number PIR:PC1296) from Escherichia coli has been published in Blattner et al., Science 277 (5331), 1453-1474 (1997), and its activity is being defined as “alanine racemase, PLP-binding”. Accordingly, in one embodiment, the process of the present invention comprises the use of a “alanine racemase, PLP-binding” or its homolog, e.g. as shown herein, for the production of the fine chemical, meaning of amino acids of the invention, in particular for increasing the amount of alanine in free or bound form in an organism or a part thereof, as mentioned. In one embodiment, in the process of the present invention the activity of a b4053 protein is increased or generated, e.g. from Escherichia coli or a homolog thereof, preferably linked at least to one transit peptide as mentioned for example in table V.

In another embodiment, in the process of the present invention the activity of a b4053 protein is increased or generated in a subcellular compartment of the organism or organism cell such as in an organelle like a plastid or mitochondria.
The sequence of b4139 (Accession number NP_{—}418562) from Escherichia coli has been published in Blattner et al., Science 277 (5331), 1453-1474 (1997), and its activity is being defined as “aspartate ammonia-lyase (aspartase)”. Accordingly, in one embodiment, the process of the present invention comprises the use of a “aspartate ammonia-lyase” or its homolog, e.g. as shown herein, for the production of the fine chemical, meaning of amino acids of the invention, in particular for increasing the amount of citrulline and/or serine in free or bound form in an organism or a part thereof, as mentioned. In one embodiment, in the process of the present invention the activity of a b4139 protein is increased or generated, e.g. from Escherichia coli or a homolog thereof, preferably linked at least to one transit peptide as mentioned for example in table V.
In another embodiment, in the process of the present invention the activity of a b4139 protein is increased or generated in a subcellular compartment of the organism or organism cell such as in an organelle like a plastid or mitochondria.
The sequence of YAL038W (Accession number NP_{—}009362) from Saccharomyces cerevisiae has been published in Goffeau et al., Science 274 (5287), 546-547, 1996 and Bussey et al., Proc. Natl. Acad. Sci. U.S.A. 92 (9), 3809-3813 (1995), and its activity is being defined as “pyruvate kinase”, which functions as a homotetramer in glycolysis to convert phosphoenolpyruvate to pyruvate (Cdc19p). Pyruvate is the input for aerobic (TCA cycle) or anaerobic (glucose fermentation) respiration. Accordingly, in one embodiment, the process of the present invention comprises the use of a “pyruvate kinase” or its homolog, e.g. as shown herein, for the production of the fine chemical, meaning of amino acids of the invention, in particular for increasing the amount of alanine and/or phenylalanine in free or bound form in an organism or a part thereof, as mentioned. In one embodiment, in the process of the present invention the activity of a YAL038W protein is increased or generated, e.g. from Saccharomyces cerevisiae or a homolog thereof, preferably linked at least to one transit peptide as mentioned for example in table V.
In another embodiment, in the process of the present invention the activity of an YAL038W protein is increased or generated in a subcellular compartment of the organism or organism cell such as in an organelle like a plastid or mitochondria.
The sequence of YBL082C (Accession number NP_{—}009471) from Saccharomyces cerevisiae has been published in Goffeau et al., Science 274 (5287), 546-547, 1996 and Feldmann et al. EMBO J. 13 (24), 5795-5809 (1994), and its activity is being defined as “Dol-P-Man dependent alpha(1-3) mannosyl-transferase”. Accordingly, in one embodiment, the process of the present invention comprises the use of a “Dol-P-Man dependent alpha(1-3) mannosyl-transferase” or its homolog, e.g. as shown herein, for the production of the fine chemical, meaning of amino acids of the invention, in particular for increasing the amount of tyrosine in free or bound form in an organism or a part thereof, as mentioned. In one embodiment, in the process of the present invention the activity of a YBL082C protein is increased or generated, e.g. from Saccharomyces cerevisiae or a homolog thereof, preferably linked at least to one transit peptide as mentioned for example in table V.
In another embodiment, in the process of the present invention the activity of an YBL082C protein is increased or generated in a subcellular compartment of the organism or organism cell such as in an organelle like a plastid or mitochondria.
The sequence of YDR035W from Saccharomyces cerevisiae (NP_{—}010320) has been published in published in Jacq et al., Nature 387 (6632 Suppl), 75-78, 1997 and Goffeau, Science 274 (5287), 546-547, 1996, and its activity is being defined as “3-deoxy-D-arabino-heptulosonate 7-phosphate (DAHP) synthase”. Accordingly, in one embodiment, the process of the present invention comprises the use of a “3-deoxy-D-arabinoheptulosonate 7-phosphate (DAHP) synthase” or its homolog, e.g. as shown herein, for the production of the fine chemical, meaning of amino acids of the invention, in particular for increasing the amount of tyrosine and/or phenylalanine in free or bound form in an organism or a part thereof, as mentioned. In one embodiment, in the process of the present invention the activity of a YDR035W protein is increased or generated, e.g. from Saccharomyces cerevisiae or a homolog thereof, preferably linked at least to one transit peptide as mentioned for example in table V.
In another embodiment, in the process of the present invention the activity of a YDR035W protein is increased or generated in a subcellular compartment of the organism or organism cell such as in an organelle like a plastid or mitochondria.
The sequence of YDR430C from Saccharomyces cerevisiae (Accession PIR:S69711) has been published in published in Jacq et al., Nature 387 (6632 Suppl), 75-78, 1997 and Goffeau, Science 274 (5287), 546-547, 1996, and its activity is being defined as “Metalloprotease”. Accordingly, in one embodiment, the process of the present invention comprises the use of a “Metalloprotease” or its homolog, e.g. as shown herein, for the production of the fine chemical, meaning of amino acids of the invention, in particular for increasing the amount of phenylalanine in free or bound form in an organism or a part thereof, as mentioned. In one embodiment, in the process of the present invention the activity of a YDR430C protein is increased or generated, e.g. from Saccharomyces cerevisiae or a homolog thereof, preferably linked at least to one transit peptide as mentioned for example in table V.
In another embodiment, in the process of the present invention the activity of a YDR430C protein is increased or generated in a subcellular compartment of the organism or organism cell such as in an organelle like a plastid or mitochondria.
The sequence of YDR497C (Accession number NP_{—}010785) from Saccharomyces cerevisiae has been published in Goffeau et al., Science 274 (5287), 546-547, 1996 and Jacq et al., Nature 387 (6632 Suppl), 75-78 (1997), and its activity is being defined as a “myo-inositol transporter”. Accordingly, in one embodiment, the process of the present invention comprises the use of a “myo-inositol transporter” or its homolog, e.g. as shown herein, for the production of the fine chemical, meaning of amino acids of the invention, in particular for increasing the amount of tyrosine in free or bound form in an organism or a part thereof; as mentioned. In one embodiment, in the process of the present invention the activity of a YDR497C protein is increased or generated, e.g. from Saccharomyces cerevisiae or a homolog thereof, preferably linked at least to one transit peptide as mentioned for example in table V.
In another embodiment, in the process of the present invention the activity of an YDR497C protein is increased or generated in a subcellular compartment of the organism or organism cell such as in an organelle like a plastid or mitochondria.
The sequence of YEL046C (Accession number NP_{—}010868) from Saccharomyces cerevisiae has been published in Goffeau et al., Science 274 (5287), 546-547, 1996 and Dietrich et al., Nature 387 (6632 Suppl), 78-81 (1997), and its activity is being defined as a “L-threonine aldolase”, which catalyzes cleavage of L-allo-threonine and L-threonine to Glycine (Gly1p). Accordingly, in one embodiment, the process of the present invention comprises the use of a “low specific L-threonine aldolase” or its homolog, e.g. as shown herein, for the production of the fine chemical, meaning of amino acids of the invention, in particular for increasing the amount of homoserine in free or bound form in an organism or a part thereof, as mentioned. In one embodiment, in the process of the present invention the activity of a YEL046C protein is increased or generated, e.g. from Saccharomyces cerevisiae or a homolog thereof, preferably linked at least to one transit peptide as mentioned for example in table V.
In another embodiment, in the process of the present invention the activity of an YEL046C protein is increased or generated in a subcellular compartment of the organism or organism cell such as in an organelle like a plastid or mitochondria.
The sequence of YKR043C (Accession number NP_{—}012969) from Saccharomyces cerevisiae has been published in Goffeau et al., Science 274 (5287), 546-547, 1996 and Dujon et al., Nature 369 (6479), 371-378 (1994), and its activity is being defined as a “phosphoglycerate mutase like protein”. Accordingly, in one embodiment, the process of the present invention comprises the use of a “phosphoglycerate mutase like protein” or its homolog, e.g. as shown herein, for the production of the fine chemical, meaning of amino acids of the invention, in particular for increasing the amount of serine and/or phenylalanine in free or bound form in an organism or a part thereof, as mentioned. In one embodiment, in the process of the present invention the activity of a YKR043C protein is increased or generated, e.g. from Saccharomyces cerevisiae or a homolog thereof, preferably linked at least to one transit peptide as mentioned for example in table V.
In another embodiment, in the process of the present invention the activity of an YKR043C protein is increased or generated in a subcellular compartment of the organism or organism cell such as in an organelle like a plastid or mitochondria.
The sequence of YLR174W (Accession number NP_{—}013275) from Saccharomyces cerevisiae has been published in Goffeau et al., Science 274 (5287), 546-547, 1996 and Johnston et al., Nature 387 (6632 Suppl), 87-90 (1997), and its activity is being defined as a “NADP-dependent isocitrate dehydrogenase”. Accordingly, in one embodiment, the process of the present invention comprises the use of a “NADP-dependent isocitrate dehydrogenase” or its homolog, e.g. as shown herein, for the production of the fine chemical, meaning of amino acids of the invention, in particular for increasing the amount of tyrosine in free or bound form in an organism or a part thereof, as mentioned. In one embodiment, in the process of the present invention the activity of a YLR174W protein is increased or generated, e.g. from Saccharomyces cerevisiae or a homolog thereof, preferably linked at least to one transit peptide as mentioned for example in table V.
In another embodiment, in the process of the present invention the activity of an YLR174W protein is increased or generated in a subcellular compartment of the organism or organism cell such as in an organelle like a plastid or mitochondria.
The sequence of YNL241C from Saccharomyces cerevisiae (Accession NP_{—}014158) has been published in published in Jacq et al., Nature 387 (6632 Suppl), 75-78, 1997 and Goffeau, Science 274 (5287), 546-547, 1996, and its activity is being defined as “glucose-6-phosphate dehydrogenase”. Accordingly, in one embodiment, the process of the present invention comprises the use of a “glucose-6-phosphate dehydrogenase” or its homolog, e.g. as shown herein, for the production of the fine chemical, meaning of amino acids of the invention, in particular for increasing the amount of alanine and/or tyrosine in free or bound form in an organism or a part thereof, as mentioned. In one embodiment, in the process of the present invention the activity of a YNL241C protein is increased or generated, e.g. from Saccharomyces cerevisiae or a homolog thereof, preferably linked at least to one transit peptide as mentioned for example in table V.
In another embodiment, in the process of the present invention the activity of a YNL241C protein is increased or generated in a subcellular compartment of the organism or organism cell such as in an organelle like a plastid or mitochondria.
The sequence of YNR012W (Accession number NP_{—}014409) from Saccharomyces cerevisiae has been published in Goffeau et al., Science 274 (5287), 546-547, 1996, and its activity is being defined as “uridine kinase”. Accordingly, in one embodiment, the process of the present invention comprises the use of a “uridine kinase” or its homolog, e.g. as shown herein, for the production of the fine chemical, meaning of amino acids of the invention, in particular for increasing the amount of aspartate in free or bound form in an organism or a part thereof, as mentioned. In one embodiment, in the process of the present invention the activity of a YNR012W protein is increased or generated, e.g. from Saccharomyces cerevisiae or a homolog thereof, preferably linked at least to one transit peptide as mentioned for example in table V.
In another embodiment, in the process of the present invention the activity of an YNR012W protein is increased or generated in a subcellular compartment of the organism or organism cell such as in an organelle like a plastid or mitochondria.
The sequence of YOR353C (Accession number NP_{—}014998) from Saccharomyces cerevisiae has been published in Goffeau et al., Science 274 (5287), 546-547, 1996, and its activity is being defined as “Protein required for cell morphogenesis and cell separation after mitosis; Sog2p”. Accordingly, in one embodiment, the process of the present invention comprises the use of a “Protein required for cell morphogenesis and cell separation after mitosis; Sog2p” or its homolog, e.g. as shown herein, for the production of the fine chemical, meaning of amino acids of the invention, in particular for increasing the amount of phenylalanine in free or bound form in an organism or a part thereof, as mentioned. In one embodiment, in the process of the present invention the activity of a YOR353C protein is increased or generated, e.g. from Saccharomyces cerevisiae or a homolog thereof, preferably linked at least to one transit peptide as mentioned for example in table V.
In another embodiment, in the process of the present invention the activity of an YOR353C protein is increased or generated in a subcellular compartment of the organism or organism cell such as in an organelle like a plastid or mitochondria.

[3724] In one embodiment, the homolog of the b0342, b0403, b0628, b0754, b0760, b1062, b1136, b1223, b1264, b1556, b1611, b1640, b1704, b1758, b2066, b2223, b2312, b2366, b2600, b2601, b2818, b2965, b3117, b3213, b3390, b3429, b3616, b4053 and/or b4139 is a homolog having said activity and being derived from bacteria. In one embodiment, the homolog of the b0342, b0403, b0628, b0754, b0760, b1062, b1136, b1223, b1264, b1556, b1611, b1640, b1704, b1758, b2066, b2223, b2312, b2366, b2600, b2601, b2818, b2965, b3117, b3213, b3390, b3429, b3616, b4053 and/or b4139 is a homolog having said activity and being derived from Proteobacteria. In one embodiment, the homolog of the b0342, b0403, b0628, b0754, b0760, b1062, b1136, b1223, b1264, b1556, b1611, b1640, b1704, b1758, b2066, b2223, b2312, b2366, b2600, b2601, b2818, b2965, b3117, b3213, b3390, b3429, b3616, b4053 and/or b4139 is a homolog having said activity and being derived from Gammaproteobacteria. In one embodiment, the homolog of the b0342, b0403, b0628, b0754, b0760, b1062, b1136, b1223, b1264, b1556, b1611, b1640, b1704, b1758, b2066, b2223, b2312, b2366, b2600, b2601, b2818, b2965, b3117, b3213, b3390, b3429, b3616, b4053 and/or b4139 is a homolog having said activity and being derived from Enterobacteriales. In one embodiment, the homolog of the b0342, b0403, b0628, b0754, b0760, b1062, b1136, b1223, b1264, b1556, b1611, b1640, b1704, b1758, b2066, b2223, b2312, b2366, b2600, b2601, b2818, b2965, b3117, b3213, b3390, b3429, b3616, b4053 and/or b4139 is a homolog having said activity and being derived from Enterobacteriaceae. In one embodiment, the homolog of the b0342, b0403, b0628, b0754, b0760, b1062, b1136, b1223, b1264, b1556, b1611, b1640, b1704, b1758, b2066, b2223, b2312, b2366, b2600, b2601, b2818, b2965, b3117, b3213, b3390, b3429, b3616, b4053 and/or b4139 is a homolog having said activity and being derived from Escherichia, preferably from Escherichia coli.

In one embodiment, the homolog of the YAL038W, YBL082C, YDR035W, YDR430C, YDR497C, YEL046C, YKR043C, YLR174W, YNL241C, YNR012W and/or YOR353C is a homolog having said activity and being derived from an eukaryotic. In one embodiment, the homolog of the YAL038W, YBL082C, YDR035W, YDR430C, YDR497C, YEL046C, YKR043C, YLR174W, YNL241C, YNR012W and/or YOR353C is a homolog having said activity and being derived from Fungi. In one embodiment, the homolog of the YAL038W, YBL082C, YDR035W, YDR430C, YDR497C, YEL046C, YKR043C, YLR174W, YNL241C, YNR012W and/or YOR353C is a homolog having said activity and being derived from Ascomyceta. In one embodiment, the homolog of the YAL038W, YBL082C, YDR035W, YDR430C, YDR497C, YEL046C, YKR043C, YLR174W, YNL241C, YNR012W and/or YOR353C is a homolog having said activity and being derived from Saccharomycotina. In one embodiment, the homolog of the YAL038W, YBL082C, YDR035W, YDR430C, YDR497C, YEL046C, YKR043C, YLR174W, YNL241C, YNR012W and/or YOR353C is a homolog having said activity and being derived from Saccharomycetes. In one embodiment, the homolog of the YAL038W, YBL082C, YDR035W, YDR430C, YDR497C, YEL046C, YKR043C, YLR174W, YNL241C, YNR012W and/or YOR353C is a homolog having said activity and being derived from Saccharomycetales. In one embodiment, the homolog of the YAL038W, YBL082C, YDR035W, YDR430C, YDR497C, YEL046C, YKR043C, YLR174W, YNL241C, YNR012W and/or YOR353C is a homolog having said activity and being derived from Saccharomycetaceae. In one embodiment, the homolog of the YAL038W, YBL082C, YDR035W, YDR430C, YDR497C, YEL046C, YKR043C, YLR174W, YNL241C, YNR012W and/or YOR353C is a homolog having said activity and being derived from Saccharomycetes.

[3725] Homologs of the polypeptide disclosed in table II, application no. 13, column 3 may be the polypeptides encoded by the nucleic acid molecules indicated in table I, application no. 13, column 7, resp., or may be the polypeptides indicated in table II, application no. 13, column 7, resp.

[3726] for the disclosure of this paragraph see paragraph [0038.0.0.0] above.

[3727] In accordance with the invention, a protein or polypeptide has the “activity of an protein as shown in table II, application no. 13, column 3” if its de novo activity, or its increased expression directly or indirectly leads to an increased in the level of the fine chemical indicated in the respective line of table II, application no. 13, column 6 “metabolite” in the organism or a part thereof, preferably in a cell of said organism, more preferably in an organelle such as a plastid or mitochondria of said organism. The protein has the above mentioned activities of a protein as shown in table II, application no. 13, column 3, preferably in the event the nucleic acid sequences encoding said proteins is functionally joined to the nucleic acid sequence of a transit peptide. Throughout the specification the activity or preferably the biological activity of such a protein or polypeptide or an nucleic acid molecule or sequence encoding such protein or polypeptide is identical or similar if it still has the biological or enzymatic activity of a protein as shown in table II, application no. 13, column 3, or which has at least 10% of the original enzymatic or biological activity, preferably 20%, particularly preferably 30%, most particularly preferably 40% in comparison to a protein as shown in the respective line of table II, application no. 13, column 3 of E. coli or Saccharomyces cerevisiae.

[3728] for the disclosure of the paragraphs [0040.0.0.13] to [0047.0.0.13] see paragraphs [0040.0.0.0] to [0047.0.0.0] above.

[3729] Preferably, the reference, control or wild type differs form the subject of the present invention only in the cellular activity, preferably of the plastidial activity of the polypeptide of the invention, e.g. as result of an increase in the level of the nucleic acid molecule of the present invention or an increase of the specific activity of the polypeptide of the invention, e.g. by or in the expression level or activity of an protein having the activity of a respective protein as shown in table II, application no. 13, column 3 its biochemical or genetical causes and the increased amount of the respective fine chemical.

[3730] for the disclosure of the paragraphs [0049.0.0.13] to [0051.0.0.13] see paragraphs [0049.0.0.0] to [0051.0.0.0] above.

[3731] For example, the molecule number or the specific activity of the polypeptide or the nucleic acid molecule may be increased. Larger amounts of the fine chemical can be produced if the polypeptide or the nucleic acid of the invention is expressed de novo in an organism lacking the activity of said protein, preferably the nucleic acid molecules as mentioned in table I, application no. 13, columns 5 and 7 alone or preferably in combination with a transit peptide for example as mentioned in table V or in another embodiment by introducing said nucleic acid molecules into an organelle such as an plastid or mitochondria in the transgenic organism. However, it is also possible to modify the expression of the gene which is naturally present in the organisms, for example by integrating a nucleic acid sequence, encoding a plastidic targeting sequence in front (5 prime) of the coding sequence, leading to a functional preprotein, which is directed for example to the plastids.

[3732] for the disclosure of the paragraphs [0053.0.0.13] to [0058.0.0.13] see paragraphs [0053.0.0.0] to [0058.0.0.0] above.

[3733] In case the activity of the Escherichia coli protein b0342 or its homologs, e.g. a “thiogalactoside acetyltransferase” is increased advantageously in an organelle such as a plastid or mitochondria, preferably, in one embodiment an increase of the fine chemical, preferably of alanine between 20% and 43% or more is conferred.

In case the activity of the Escherichia coli protein b0403 or its homologs, e.g. a “maltodextrin glucosidase” is increased advantageously in an organelle such as a plastid or mitochondria, preferably, in one embodiment an increase of the fine chemical, preferably of phenylalanine between 31% and 59% or more is conferred.
In case the activity of the Escherichia coli protein b0628 or its homologs, e.g. a “lipoate synthase, an iron-sulfur enzyme” is increased advantageously in an organelle such as a plastid or mitochondria, preferably, in one embodiment an increase of the fine chemical, preferably of homoserine between 34% and 47% or more is conferred.
In case the activity of the Escherichia coli protein b0754 or its homologs, e.g. a “3-deoxy-D-arabinoheptulosonate-7-phosphate synthase (DAHP synthetase, phenylalanine-repressible)” is increased advantageously in an organelle such as a plastid or mitochondria, preferably, in one embodiment an increase of the fine chemical, preferably of phenylalanine between 28% and 122% or more is conferred.
In case the activity of the Escherichia coli protein b0760 or its homologs, e.g. a “ATP-binding component of molybdate transport system” is increased advantageously in an organelle such as a plastid or mitochondria, preferably, in one embodiment an increase of the fine chemical, preferably of tyrosine between 22% and 37% or more is conferred.
In case the activity of the Escherichia coli protein b1062 or its homologs, e.g. a “dihydro-orotase” is increased advantageously in an organelle such as a plastid or mitochondria, preferably, in one embodiment an increase of the fine chemical, preferably of alanine between 26% and 61% or more and/or of citrulline between 39% and 90% or more and/or of glycine between 51% and 96% or more and/or of homoserine between 26% and 111% or more and/or of serine between 23% and 48% or more is conferred and/or an increase of any combination of 2, 3, 4 or all 5 of the said fine chemicals, e.g. compounds as mentioned above between 23% and 111% or more is conferred.
In case the activity of the Escherichia coli protein b1136 or its homologs, e.g. a “isocitrate dehydrogenase (NADP)” is increased advantageously in an organelle such as a plastid or mitochondria, preferably, in one embodiment an increase of the fine chemical, preferably of citrulline between 32% and 60% or more and/or of phenylalanine between 35% and 147% or more is conferred and/or an increase of both of the two said fine chemicals, e.g. compounds as mentioned above between 32% and 147% or more is conferred.
In case the activity of the Escherichia coli protein b1223 or its homologs, e.g. a “nitrite extrusion protein” is increased advantageously in an organelle such as a plastid or mitochondria, preferably, in one embodiment an increase of the fine chemical, preferably of glycine between 58% and 122% or more and/or of phenylalanine between 31% and 142% or more is conferred and/or an increase of both of the two said fine chemicals, e.g. compounds as mentioned above between 31% and 142% or more is conferred.
In case the activity of the Escherichia coli protein b1264 or its homologs, e.g. an “anthranilate synthase component I” is increased advantageously in an organelle such as a plastid or mitochondria, preferably, in one embodiment an increase of the fine chemical, preferably of alanine between 21% and 55% or more and/or of citrulline between 38% and 63% or more and/or of glycine between 37% and 73% or more and/or of homoserine between 25% and 44% or more and/or of serine between 35% and 96% or more is conferred and/or an increase of any combination of 2, 3, 4 or all 5 of the said fine chemicals, e.g. compounds as mentioned above between 21% and 96% or more is conferred.
In case the activity of the Escherichia coli protein b1556 or its homologs, e.g. a “Qin prophage” is increased advantageously in an organelle such as a plastid or mitochondria, preferably, in one embodiment an increase of the fine chemical, preferably of aspartate (aspartic acid) between 58% and 197% or more is conferred.
In case the activity of the Escherichia coli protein b1611 or its homologs, e.g. a “fumarase C (fumarate hydratase Class II)” is increased advantageously in an organelle such as a plastid or mitochondria, preferably, in one embodiment an increase of the fine chemical, preferably of serine between 24% and 41% or more is conferred.
In case the activity of the Escherichia coli protein b1640 or its homologs, e.g. a “conserved hypothetical protein with actin-like ATPase domain” is increased advantageously in an organelle such as a plastid or mitochondria, preferably, in one embodiment an increase of the fine chemical, preferably of 5-oxoproline between 24% and 33% or more and/or of aspartate between 46% and 60% or more is conferred and/or an increase of both of the two said fine chemicals, e.g. compounds as mentioned above between 24% and 60% or more is conferred.
In case the activity of the Escherichia coli protein b1704 or its homologs, e.g. a “3-deoxy-D-arabinoheptulosonate-7-phosphate synthase (DAHP synthetase), tryptophan-repressible” is increased advantageously in an organelle such as a plastid or mitochondria, preferably, in one embodiment an increase of the fine chemical, preferably of phenylalanine between 43% and 38655% or more and/or of tyrosine between 1014% and 10359% or more is conferred and/or an increase of both of the two said fine chemicals, e.g. compounds as mentioned above between 43% and 38655% or more is conferred.
In case the activity of the Escherichia coli protein b1758 or its homologs, e.g. a “cytochrome oxidase” is increased advantageously in an organelle such as a plastid or mitochondria, preferably, in one embodiment an increase of the fine chemical, preferably of aspartate between 51% and 109% or more and/or of citrulline between 40% and 96% or more and/or of serine between 24% and 47% or more is conferred and/or an increase of any combination of two or of all 3 of the said fine chemicals, e.g. compounds as mentioned above between 24% and 109% or more is conferred.
In case the activity of the Escherichia coli protein b2066 or its homologs, e.g. an “uridine/cytidine kinase” is increased advantageously in an organelle such as a plastid or mitochondria, preferably, in one embodiment an increase of the fine chemical, preferably of aspartate between 48% and 133% or more is conferred.
In case the activity of the Escherichia coli protein b2223 or its homologs, e.g. a “short chain fatty acid transporter” is increased advantageously in an organelle such as a plastid or mitochondria, preferably, in one embodiment an increase of the fine chemical, preferably of tyrosine between 39% and 77% or more is conferred.
In case the activity of the Escherichia coli protein b2312 or its homologs, e.g. a “amidophosphoribosyltransferase (PRPP amidotransferase)” is increased advantageously in an organelle such as a plastid or mitochondria, preferably, in one embodiment an increase of the fine chemical, preferably of aspartate between 52% and 114% or more is conferred.
In case the activity of the Escherichia coli protein b2366 or its homologs, e.g. a “D-serine deaminase (dehydratase)” is increased advantageously in an organelle such as a plastid or mitochondria, preferably, in one embodiment an increase of the fine chemical, preferably of citrulline between 32% and 66% or more and/or of glycine between 43% and 98% or more is conferred and/or an increase of both of the two said fine chemicals, e.g. compounds as mentioned above between 43% and 98% or more is conferred.
In case the activity of the Escherichia coli protein b2600 or its homologs, e.g. a “bifunctional chorismate mutase/prephenate dehydrogenase” is increased advantageously in an organelle such as a plastid or mitochondria, preferably, in one embodiment an increase of the fine chemical, preferably of tyrosine between 159% and 378% or more is conferred.
In case the activity of the Escherichia coli protein b2601 or its homologs, e.g. a “3-deoxy-D-arabinoheptulosonate-7-phosphate (DAHP) synthase” is increased advantageously in an organelle such as a plastid or mitochondria, preferably, in one embodiment an increase of the fine chemical, preferably of phenylalanine between 152% and 2064% or more and/or of tyrosine between 132% and 1567% or more is conferred and/or an increase of both of the two said fine chemicals, e.g. compounds as mentioned above between 132% and 2064% or more is conferred.
In case the activity of the Escherichia coli protein b2818 or its homologs, e.g. a “N-acetylglutamate synthase” is increased advantageously in an organelle such as a plastid or mitochondria, preferably, in one embodiment an increase of the fine chemical, preferably of citrulline between 181% and 328% or more is conferred.
In case the activity of the Escherichia coli protein b2965 or its homologs, e.g. an “ornithine decarboxylase” is increased advantageously in an organelle such as a plastid or mitochondria, preferably, in one embodiment an increase of the fine chemical, preferably of alanine between 21% and 72% or more and/or of glycine between 52% and 198% or more and/or of phenylalanine between 31% and 204% or more and/or of serine between 33% and 193% or more is conferred and/or an increase of any combination of 2, 3 or of all 4 of the said fine chemicals, e.g. compounds as mentioned above between 21% and 204% or more is conferred.
In case the activity of the Escherichia coli protein b3117 or its homologs, e.g. a “threonine dehydratase, catabolic, PLP-dependent” is increased advantageously in an organelle such as a plastid or mitochondria, preferably, in one embodiment an increase of the fine chemical, preferably of citrulline between 43% and 166% or more is conferred.
In case the activity of the Escherichia coli protein b3213 or its homologs, e.g. a “glutamate synthase (small subunit)” is increased advantageously in an organelle such as a plastid or mitochondria, preferably, in one embodiment an increase of the fine chemical, preferably of citrulline between 32% and 56% or more is conferred.
In case the activity of the Escherichia coli protein b3390 or its homologs, e.g. a “shikimate kinase I” is increased advantageously in an organelle such as a plastid or mitochondria, preferably, in one embodiment an increase of the fine chemical, preferably of phenylalanine between 100% and 241% or more and/or of tyrosine between 100% and 189% or more is conferred and/or an increase of both of the two said fine chemicals, e.g. compounds as mentioned above between 100% and 241% or more is conferred.
In case the activity of the Escherichia coli protein b3429 or its homologs, e.g. a “glycogen synthase (starch synthase)” is increased advantageously in an organelle such as a plastid or mitochondria, preferably, in one embodiment an increase of the fine chemical, preferably of serine between 25% and 70% or more is conferred.
In case the activity of the Escherichia coli protein b3616 or its homologs, e.g. a “threonine 3-dehydrogenase, NAD(P)-binding” is increased advantageously in an organelle such as a plastid or mitochondria, preferably, in one embodiment an increase of the fine chemical, preferably of homoserine between 26% and 101% or more and/or of serine between 23% and 87% or more is conferred and/or an increase of both of the two said fine chemicals, e.g. compounds as mentioned above between 23% and 101% or more is conferred.
In case the activity of the Escherichia coli protein b4053 or its homologs, e.g. a “alanine racemase, PLP-binding” is increased advantageously in an organelle such as a plastid or mitochondria, preferably, in one embodiment an increase of the fine chemical, preferably of alanine between 35% and 129% or more is conferred.
In case the activity of the Escherichia coli protein b4139 or its homologs, e.g. a aspartate ammonia-lyase (aspartase)” is increased advantageously in an organelle such as a plastid or mitochondria, preferably, in one embodiment an increase of the fine chemical, preferably of citruline between 145% and 522% or more and/or of serine between 130% and 478% or more is conferred and/or an increase of both of the two said fine chemicals, e.g. compounds as mentioned above between 145% and 522% or more is conferred.
In case the activity of the Saccharomyces cerevisiae protein YAL038W or its homologs, e.g. a “pyruvate kinase” is increased advantageously in an organelle such as a plastid or mitochondria, preferably, in one embodiment an increase of the fine chemical, preferably of alanine between 27% and 170% or more or phenylalanine between 25% and 51% or more is conferred and/or an increase of both of the two said fine chemicals, e.g. compounds as mentioned above between 25% and 170% or more is conferred.
In case the activity of the Saccharomyces cerevisiae protein YBL082C or its homologs, e.g. a “Dol-P-Man dependent alpha(1-3) mannosyl-transferase” is increased advantageously in an organelle such as a plastid or mitochondria, preferably, in one embodiment an increase of the fine chemical, preferably of tyrosine between 30% and 61% or more is conferred.
In case the activity of the Saccharomyces cerevisiae protein YDR035W or its homologs, e.g. a “3-deoxy-D-arabinoheptulosonate-7-phosphate synthase” is increased advantageously in an organelle such as a plastid or mitochondria, preferably, in one embodiment an increase of the fine chemical, preferably of phenylalanine between 40% and 2244% or more or tyrosine between 43% and 509% or more is conferred and/or an increase of both of the two said fine chemicals, e.g. compounds as mentioned above between 40% and 2244% or more is conferred.
In case the activity of the Saccharomyces cerevisiae protein YDR430C or its homologs, e.g. a “Metalloprotease” is increased advantageously in an organelle such as a plastid or mitochondria, preferably, in one embodiment an increase of the fine chemical, preferably of phenylalanine between 38% and 131% or more is conferred.
In case the activity of the Saccharomyces cerevisiae protein YDR497C or its homologs, e.g. a “myo-inositol transporter” is increased advantageously in an organelle such as a plastid or mitochondria, preferably, in one embodiment an increase of the fine chemical, preferably of tyrosine between 38% and 46% or more is conferred.
In case the activity of the Saccharomyces cerevisiae protein YEL046C or its homologs, e.g. a “L-threonine aldolase” is increased advantageously in an organelle such as a plastid or mitochondria, preferably, in one embodiment an increase of the fine chemical, preferably of homoserine between 26% and 117% or more is conferred.
In case the activity of the Saccharomyces cerevisiae protein YKR043C or its homologs, e.g. a “YKR043C protein activity” is increased, preferably, in one embodiment the increase of the fine chemical, preferably of phenylalanine between 35% and 340% or more or serine between 26% and 60% or more is conferred and/or an increase of both of the two said fine chemicals, e.g. compounds as mentioned above between 26% and 340% or more is conferred.
In case the activity of the Saccharomyces cerevisiae protein YLR174W or its homologs, e.g. a “cytosolic NADP-specific isocitrate dehydrogenase” is increased advantageously in an organelle such as a plastid or mitochondria, preferably, in one embodiment an increase of the fine chemical, preferably of tyrosine between 20% and 25% or more is conferred.
In case the activity of the Saccharomyces cerevisiae protein YNL241C or its homologs, e.g. a “glucose-6-phosphate dehydrogenase” is increased advantageously in an organelle such as a plastid or mitochondria, preferably, in one embodiment an increase of the fine chemical, preferably of (alanine between 66% and 115% or more or tyrosine between 29% and 35% or more is conferred and/or an increase of both of the two said fine chemicals, e.g. compounds as mentioned above between 29% and 115% or more is conferred.
In case the activity of the Saccharomyces cerevisiae protein YNR012W or its homologs, e.g. a “uridine kinase” is increased advantageously in an organelle such as a plastid or mitochondria, preferably, in one embodiment an increase of the fine chemical, preferably of aspartate between 48% and 73% or more is conferred.
In case the activity of the Saccharomyces cerevisiae protein YOR353C or its homologs, e.g. a “Protein required for cell morphogenesis and cell separation after mitosis; Sog2p” is increased advantageously in an organelle such as a plastid or mitochondria, preferably, in one embodiment an increase of the fine chemical, preferably phenylalanine between 41% and 106% or more is conferred.

[3734] In one embodiment, the activity of any on of the Escherichia coli proteins b0342, b0403, b0628, b0754, b0760, b1062, b1136, b1223, b1264, b1556, b1611, b1640, b1704, b1758, b2066, b2223, b2312, b2366, b2600, b2601, b2818, b2965, b3117, b3213, b3390, b3429, b3616, b4053 and/or b4139 and/or the activity of any on of the Saccharomyces cerevisiae proteins YAL038W, YBL082C, YDR035W, YDR430C, YDR497C, YEL046C, YKR043C, YLR174W, YNL241C, YNR012W and/or YOR353C or their homologs, is advantageously increased in an organelle such as a plastid or mitochondria, preferably conferring an increase of the fine chemical indicated in column 6 “metabolites” for application no. 14 in any one of Tables I to IV, resp.

[3735] for the disclosure of the paragraphs [0061.0.0.13] and [0062.0.0.13] see paragraphs [0061.0.0.0] and [0062.0.0.0] above.

[3736] A protein having an activity conferring an increase in the amount or level of the fine chemical, preferably upon targeting to the plastids, has in one embodiment the structure of the polypeptide described herein, in particular of the polypeptides comprising the consensus sequence shown in table IV, application no. 14, column 7 or of the polypeptide as shown in the amino acid sequences as disclosed in table II, application no. 14, columns 5 and 7 or the functional homologues thereof as described herein, or is encoded by the nucleic acid molecule characterized herein or the nucleic acid molecule according to the invention, for example by the nucleic acid molecule as shown in table I, application no. 14, columns 5 and 7 or its herein described functional homologues and has the herein mentioned activity.

[3737] For the purposes of the present invention, the terms “5-oxoproline”, “alanine”, “aspartic acid”, “citrulline”, “glycine”, “homoserine”, “phenylalanine”, “serine” and/or “tyrosine” also encompass the corresponding salts, such as, for example resulting in the reaction with acids like hydrochloride or the different sulphur containing acids.

[3738] for the disclosure of the paragraphs [0065.0.0.13] and [0066.0.0.13] see paragraphs [0065.0.0.0] and [0066.0.0.0] above.

[3739] In one embodiment, the process of the present invention comprises one or more of the following steps
[3740] a) stabilizing a protein conferring the increased expression of a protein encoded by the nucleic acid molecule of the invention or of the polypeptide of the invention, e.g. of a polypeptide having the activity of a protein as indicated in table II, application no. 14, columns 5 and 7 or its homologs activity having herein-mentioned amino acids of the invention increasing activity; and/or
[3741] b) stabilizing a mRNA conferring the increased expression of a protein encoded by the nucleic acid molecule of the invention, which is in the sense of the invention a fusion of a nucleic acid sequence encoding a transit peptide and of a nucleic acid sequence as shown in table I, application no. 14, columns 5 and 7, e.g. a nucleic acid sequence encoding a polypeptide having the activity of a protein as indicated in table II, application no. 14, columns 5 and 7 or its homologs activity or of a mRNA encoding the polypeptide of the present invention having herein-mentioned amino acids of the invention increasing activity; and/or
[3742] c) increasing the specific activity of a protein conferring the increased expression of a protein encoded by the nucleic acid molecule of the invention or of the polypeptide of the present invention having herein-mentioned sterol increasing activity, e.g. of a polypeptide having the activity of a protein as indicated in table II, application no. 14, columns 5 and 7 or its homologs activity, or decreasing the inhibitory regulation of the polypeptide of the invention; and/or
[3743] d) generating or increasing the expression of an endogenous or artificial transcription factor mediating the expression of a protein conferring the increased expression of a protein encoded by the nucleic acid molecule of the invention or of the polypeptide of the invention having herein-mentioned amino acids of the invention increasing activity, e.g. of a polypeptide having the activity of a protein as indicated in table II, application no. 14, columns 5 and 7 or its homologs activity; and/or
[3744] e) stimulating activity of a protein conferring the increased expression of a protein encoded by the nucleic acid molecule of the present invention or a polypeptide of the present invention having herein-mentioned amino acids of the invention increasing activity, e.g. of a polypeptide having the activity of a protein as indicated in table II, application no. 14, columns 5 and 7 or its homologs activity, by adding one or more exogenous inducing factors to the organisms or parts thereof; and/or
[3745] f) expressing a transgenic gene encoding a protein conferring the increased expression of a polypeptide encoded by the nucleic acid molecule of the present invention or a polypeptide of the present invention, having herein-mentioned amino acids of the invention increasing activity, e.g. of a polypeptide having the activity of a protein as indicated in table II, application no. 14, columns 5 and 7 or its homologs activity, and/or
[3746] g) increasing the copy number of a gene conferring the increased expression of a nucleic acid molecule encoding a polypeptide encoded by the nucleic acid molecule of the invention or the polypeptide of the invention having herein-mentioned amino acids of the invention increasing activity, e.g. of a polypeptide having the activity of a protein as indicated in table II, application no. 14, columns 5 and 7 or its homologs activity; and/or
[3747] h) increasing the expression of the endogenous gene encoding the polypeptide of the invention, e.g. a polypeptide having the activity of a protein as indicated in table II, application no. 14, columns 5 and 7 or its homologs activity, by adding positive expression or removing negative expression elements, e.g. homologous recombination can be used to either introduce positive regulatory elements like for plants the 35S enhancer into the promoter or to remove repressor elements form regulatory regions. Further gene conversion methods can be used to disrupt repressor elements or to enhance to activity of positive elements. Positive elements can be randomly introduced in plants by T-DNA or transposon mutagenesis and lines can be identified in which the positive elements have be integrated near to a gene of the invention, the expression of which is thereby enhanced; and/or
[3748] i) modulating growth conditions of an organism in such a manner, that the expression or activity of the gene encoding the protein of the invention or the protein itself is enhanced for example microorganisms or plants can be grown for example under a higher temperature regime leading to an enhanced expression of heat shock proteins, which can lead an enhanced fine chemical production; and/or
[3749] j) selecting of organisms with especially high activity of the proteins of the invention from natural or from mutagenized resources and breeding them into the target organisms, eg the elite crops; and/or
[3750] k) directing a protein encoded by the nucleic acid molecule of the invention or of the polypeptide of the present invention having herein-mentioned amino acids of the invention increasing activity, e.g. of polypeptide having the activity of a protein as indicated in table II, application no. 14, columns 5 and 7 or its homologs activity, to the plastids by the addition of a plastidial targeting sequence; and/or
[3751] l) generating the expression of a protein encoded by the nucleic acid molecule of the invention or of the polypeptide of the present invention having herein-mentioned amino acids of the invention increasing activity, e.g. of a polypeptide having the activity of a protein as indicated in table II, application no. 14, columns 5 and 7 or its homologs activity in plastids by the stable or transient transformation advantageously stable transformation of organelles preferably plastids with an inventive nucleic acid sequence preferably in form of an expression cassette containing said sequence leading to the plastidial expression of the nucleic acids or polypeptides of the invention; and/or
[3752] m) generating the expression of a protein encoded by the nucleic acid molecule of the invention or of the polypeptide of the present invention having herein-mentioned amino acids of the invention increasing activity, e.g. of a polypeptide having the activity of a protein as indicated in table II, application no. 14, columns 5 and 7 or its homologs activity in plastids by integration of a nucleic acid of the invention into the plastidal genome under control of preferable a plastidial promoter.

[3753] Preferably, said mRNA is the nucleic acid molecule of the present invention and/or the protein conferring the increased expression of a protein encoded by the nucleic acid molecule of the present invention alone or link to a transit nucleic acid sequence or transit peptide encoding nucleic acid sequence or the polypeptide having the herein mentioned activity, e.g. conferring the increase of the respective fine chemical as indicated in column 6 of application no. 14 in Table I to IV, resp., after increasing the expression or activity of the encoded polypeptide preferably in organelles such as plastids or having the activity of a polypeptide having an activity as the protein as shown in table II, application no. 14, column 3 or its homologs. Preferably the increase of the fine chemical takes place in plastids.

[3754] for the disclosure of the paragraphs [0069.0.0.13] to [0079.0.0.13] see paragraphs [0069.0.0.0] to [0079.0.0.0] above.

[3755] The activation of an endogenous polypeptide having above-mentioned activity, e.g. having the activity of a protein as shown in table II, application no. 14, column 3 or of the polypeptide of the invention, e.g. conferring the increase of the respective fine chemical after increase of expression or activity in the cytsol and/or in an organelle like a plastid, preferentially in the plastid, can also be increased by introducing a synthetic transcription factor, which binds close to the coding region of the gene encoding the protein as shown in table II, application no. 14, column 3 and activates its transcription. A chimeric zinc finger protein can be constructed, which comprises a specific DNA-binding domain and an activation domain as e.g. the VP16 domain of Herpes Simplex virus. The specific binding domain can bind to the regulatory region of the gene encoding the protein as shown in table II, application no. 13, column 3. The expression of the chimeric transcription factor in a organism, in particular in a plant, leads to a specific expression of the protein as shown in table II, application no. 13, column 3, see e.g. in WO01/52620, Oriz, Proc. Natl. Acad. Sci. USA, 2002, Vol. 99, 13290 or Guan, Proc. Natl. Acad. Sci. USA, 2002, Vol. 99, 13296.

[3756] For the disclosure of the paragraphs [0081.0.0.13] to [0084.0.0.13] see paragraphs [0081.0.0.0] to [0084.0.0.0] above.

[3757] Owing to the introduction of a gene or a plurality of genes conferring the expression of the nucleic acid molecule of the invention or the polypeptide of the invention, for example the nucleic acid construct mentioned below, or encoding the protein as shown in table II, application no. 14, column 3 into an organism alone or in combination with other genes, it is possible not only to increase the biosynthetic flux towards the end product, but also to increase, modify or create de novo an advantageous, preferably novel metabolite composition in the organism, e.g. an advantageous amino acid composition comprising a higher content of (from a viewpoint of nutritional physiology limited) amino acids alone or in combination in free or bound form.

[3758] for the disclosure of this paragraph see paragraph [0086.0.0.0] above.

[3759] By influencing the metabolism thus, it is possible to produce, in the process according to the invention, further advantageous compounds. Examples of such compounds are, in addition to 5-oxoproline, alanine, aspartic acid, citrulline, glycine, homoserine, phenylalanine, serine and/or tyrosine further amino acids or the respective precursors or catabolic products.

[3760] Accordingly, in one embodiment, the process according to the invention relates to a process, which comprises:
[3761] a) providing a non-human organism, preferably a microorganism, a non-human animal, a plant or animal cell, a plant or animal tissue or a plant, more preferably a microorganism, a plant or a plant tissue;
[3762] b) increasing the activity of a protein as shown in table II, application no. 14, column 3 or of a polypeptide being encoded by the nucleic acid molecule of the present invention and described below, e.g. conferring an increase of the respective fine chemical as indicated in any one of Tables I to IV, application no. 14, column 6 “metabolite” in the organism, preferably in the microorganism, the non-human animal, the plant or animal cell, the plant or animal tissue or the plant, more preferably a microorganism, a plant or a plant tissue, in the cytsol or in the plastids, preferentially in the plastids,
[3763] c) growing the organism, preferably the microorganism, the non-human animal, the plant or animal cell, the plant or animal tissue or the plant under conditions which permit the production of the respective fine chemical in the organism, preferably the microorganism, the plant cell, the plant tissue or the plant; and
[3764] d) if desired, recovering, optionally isolating, the respective free and/or bound the fine chemical as indicated in any one of Tables I to IV, application no. 14, column 6 “metabolite” and, optionally further free and/or bound amino acids, synthesized by the organism, the microorganism, the non-human animal, the plant or animal cell, the plant or animal tissue or the plant.

[3765] The organism, in particular the microorganism, non-human animal, the plant or animal cell, the plant or animal tissue or the plant is advantageously grown in such a way that it is not only possible to recover, if desired isolate the free or bound fine chemical but as option it is also possible to produce, recover and, if desired isolate, other free or/and bound amino acids for example in form of proteins. Such an concomitant increase of protein bound amino acids after enhancing the biosynthesis of an amino acid has previously been described. For example, Galili et al., Transgenic Res., 200, 9, 2, 137-144 reported that the heterologous expression of a bacterial gene for the amino acid biosynthesis confers the increase of free as well as of protein-bound amino acids.

[3766] for the disclosure of the paragraphs [0090.0.0.13] to [0097.0.0.13] see paragraphs [0090.0.0.0] to [0097.0.0.0] above.

[3767] With regard to the nucleic acid sequence as depicted a nucleic acid construct which contains a nucleic acid sequence mentioned herein or an organism (=transgenic organism) which is transformed with said nucleic acid sequence or said nucleic acid construct, “transgene” means all those constructs which have been brought about by genetic manipulation methods, preferably in which either
[3768] a) the nucleic acid sequence as shown in table I, application no. 14, columns 5 and 7 or a derivative thereof, or
[3769] b) a genetic regulatory element, for example a promoter, which is functionally linked to the nucleic acid sequence as shown table I, application no. 14, columns 5 and 7 or a derivative thereof, or
[3770] c) (a) and (b)
   is/are not present in its/their natural genetic environment or has/have been modified by means of genetic manipulation methods, it being possible for the modification to be, by way of example, a substitution, addition, deletion, inversion or insertion of one or more nucleotide. “Natural genetic environment” means the natural chromosomal locus in the organism of origin or the presence in a genomic library. In the case of a genomic library, the natural, genetic environment of the nucleic acid sequence is preferably at least partially still preserved. The environment flanks the nucleic acid sequence at least on one side and has a sequence length of at least 50 bp, preferably at least 500 bp, particularly preferably at least 1000 bp, very particularly preferably at least 5000 bp.

[3771] The use of the nucleic acid sequence according to the invention or of the nucleic acid construct according to the invention for the generation of transgenic plants is therefore also subject matter of the invention. As mentioned above the inventive nucleic acid sequence consists advantageously of the nucleic acid sequences as depicted in the sequence protocol and disclosed in table I, application no. 14, columns 5 and 7 joined to a nucleic acid sequence encoding a transit peptide, or a targeting nucleic acid sequence which directs the nucleic acid sequences disclosed in table I, application no. 14, columns 5 and 7 to the organelle preferentially the plastids. Alternatively the inventive nucleic acids sequences consist advantageously of the nucleic acid sequences as depicted in the sequence protocol and disclosed in table I, application no. 14, columns 5 and 7 joined preferably to a nucleic acids sequence mediating the stable integration of nucleic acids into the plastidial genome and optionally sequences mediating the transcription of the sequence in the plastidial compartment. A transient expression is in principal also desirable and possible.

[3772] for the disclosure of this paragraph [0100.0.0.13] see paragraph [0100.0.0.0] above.

[3773] In an advantageous embodiment of the invention, the organism takes the form of a plant whose amino acid content is modified advantageously owing to the nucleic acid molecule of the present invention expressed. This is important for plant breeders since, for example, the nutritional value of plants for animals is limited by a few amino acids.

[3774] for the disclosure of the paragraphs [0102.0.0.13] to [0110.0.0.13] see paragraphs [0102.0.0.0] to [0110.0.0.0] above.

[3775] In a preferred embodiment, the respective fine chemical as indicated in any one of Tables I to IV, application no. 14, column 6 “metabolite” (5-oxoproline, alanine, aspartic acid, citrulline, glycine, homoserine, phenylalanine, serine and/or tyrosine) is produced in accordance with the invention and, if desired, is isolated. The production of further amino acids or mixtures thereof or mixtures with other compounds by the process according to the invention is advantageous.

Thus, the content of plant components and preferably also further impurities is as low as possible, and the abovementioned amino acids are obtained in as pure form as possible. In these applications, the content of plant components advantageously amounts to less than 10%, preferably 1%, more preferably 0.1%, very especially preferably 0.01% or less.

[3776] for the disclosure of the paragraphs [0112.0.0.13] to [0115.0.0.13] see paragraphs [0112.0.0.0] to [0115.0.0.0] above.

[3777] In a preferred embodiment, the present invention relates to a process for the production of the respective fine chemical as indicated for application no. 14 in any one of Tables I to IV, column 6 “metabolite”, comprising or generating in an organism or a part thereof, preferably in a cell compartment such as a plastid or mitochondria, the expression of at least one nucleic acid molecule comprising a nucleic acid molecule selected from the group consisting of:
[3778] a) nucleic acid molecule encoding, preferably at least the mature form, of the polypeptide shown in table II, application no. 14, columns 5 and 7 or a fragment thereof, which confers an increase in the amount of the respective fine chemical in an organism or a part thereof;
[3779] b) nucleic acid molecule comprising, preferably at least the mature form, of the nucleic acid molecule shown in table I, application no. 14, columns 5 and 7;
[3780] c) nucleic acid molecule whose sequence can be deduced from a polypeptide sequence encoded by a nucleic acid molecule of (a) or (b) as result of the degeneracy of the genetic code and conferring an increase in the amount of the respective fine chemical in an organism or a part thereof;
[3781] d) nucleic acid molecule encoding a polypeptide which has at least 50% identity with the amino acid sequence of the polypeptide encoded by the nucleic acid molecule of (a) to (c) and conferring an increase in the amount of the respective fine chemical in an organism or a part thereof;
[3782] e) nucleic acid molecule which hybridizes with a nucleic acid molecule of (a) to (c) under stringent hybridisation conditions and conferring an increase in the amount of the respective fine chemical in an organism or a part thereof;
[3783] f) nucleic acid molecule encoding a polypeptide, the polypeptide being derived by substituting, deleting and/or adding one or more amino acids of the amino acid sequence of the polypeptide encoded by the nucleic acid molecules (a) to (d), preferably to (a) to (c) and conferring an increase in the amount of the respective fine chemical in an organism or a part thereof;
[3784] g) nucleic acid molecule encoding a fragment or an epitope of a polypeptide which is encoded by one of the nucleic acid molecules of (a) to (e), preferably to (a) to (c) and conferring an increase in the amount of the respective fine chemical in an organism or a part thereof;
[3785] h) nucleic acid molecule comprising a nucleic acid molecule which is obtained by amplifying nucleic acid molecules from a cDNA library or a genomic library using the primers shown in table III, application no. 14, column 7 and conferring an increase in the amount of the respective fine chemical in an organism or a part thereof;
[3786] i) nucleic acid molecule encoding a polypeptide which is isolated, e.g. from an expression library, with the aid of monoclonal antibodies against a polypeptide encoded by one of the nucleic acid molecules of (a) to (h), preferably to (a) to (c), and conferring an increase in the amount of the respective fine chemical in an organism or a part thereof;
[3787] j) nucleic acid molecule which encodes a polypeptide comprising the consensus sequence shown in table IV, application no. 14, column 7 and conferring an increase in the amount of the respective fine chemical in an organism or a part thereof;
[3788] k) nucleic acid molecule comprising one or more of the nucleic acid molecule encoding the amino acid sequence of a polypeptide encoding a domain of the polypeptide shown in table II, application no. 14, columns 5 and 7 and conferring an increase in the amount of the fine chemical in an organism or a part thereof; and
[3789] l) nucleic acid molecule which is obtainable by screening a suitable library under stringent conditions with a probe comprising one of the sequences of the nucleic acid molecule of (a) to (k), preferably to (a) to (c), or with a fragment of at least 15 nt, preferably 20 nt, 30 nt, 50 nt, 100 nt, 200 nt or 500 nt of the nucleic acid molecule characterized in (a) to (k), preferably to (a) to (c), and conferring an increase in the amount of the respective fine chemical in an organism or a part thereof;
   or which comprises a sequence which is complementary thereto.

[3790] In one embodiment, the nucleic acid molecule used in the process of the invention distinguishes over the sequence indicated in table I A, application no. 14, columns 5 and 7 by one or more nucleotides. In one embodiment, the nucleic acid molecule used in the process of the invention does not consist of the sequence indicated in table I A, application no. 14, columns 5 and 7. In one embodiment, the nucleic acid molecule used in the process of the invention is less than 100%, 99.999%, 99.99%, 99.9% or 99% identical to a sequence indicated in table I A, application no. 14, columns 5 and 7. In another embodiment, the nucleic acid molecule does not encode a polypeptide of a sequence indicated in table II A, application no. 14, columns 5 and 7.

[3791] In one embodiment, the nucleic acid molecule used in the process of the invention distinguishes over the sequence indicated in table I B, application no. 14, columns 5 and 7, by one or more nucleotides. In one embodiment, the nucleic acid molecule used in the process of the invention does not consist of the sequence indicated in table I B, application no. 14, columns 5 and 7. In one embodiment, the nucleic acid molecule used in the process of the invention is less than 100%, 99.999%, 99.99%, 99.9% or 99% identical to a sequence indicated in table I B, application no. 14, columns 5 and 7. In another embodiment, the nucleic acid molecule does not encode a polypeptide of a sequence indicated in table II B, application no. 14, columns 5 and 7.

[3792] In one embodiment, the nucleic acid molecule used in the process distinguishes over the sequence shown in table I, application no. 14, columns 5 and 7 by one or more nucleotides or does not consist of the sequence shown in table I, application no. 14, columns 5 and 7. In one embodiment, the nucleic acid molecule of the present invention is less than 100%, 99.999%, 99.99%, 99.9% or 99% identical to the sequence shown in table I, application no. 14, columns 5 and 7. In another embodiment, the nucleic acid molecule does not encode a polypeptide of the sequence shown in table II, application no. 14, columns 5 and 7.

[3793] for the disclosure of the paragraphs [0118.0.0.13] to [0120.0.0.13] see paragraphs [0118.0.0.0] to [0120.0.0.0] above.

[3794] The expression of nucleic acid molecules with the sequence shown in table I, application no. 14, columns 5 and 7, or nucleic acid molecules which are derived from the amino acid sequences shown in table II, application no. 14, columns 5 and 7 or from polypeptides comprising the consensus sequence shown in table IV, application no. 14, column 7, or their derivatives or homologues encoding polypeptides with the enzymatic or biological activity of a protein as shown in table II, application no. 14, column 3, and conferring an increase of the respective fine chemical (column 6 of application no. 14 in any one of Tables I to IV) after increasing its plastidic expression and/or specific activity in the plastids is advantageously increased in the process according to the invention by expression either in the cytsol or in an organelle such as a plastid or mitochondria or both, preferably in plastids.

[3795] for the disclosure of this paragraph see paragraph [0122.0.0.0] above.

[3796] Nucleic acid molecules, which are advantageous for the process according to the invention and which encode polypeptides with the activity of a protein as shown in table II, application no. 14, column 3 can be determined from generally accessible databases.

[3797] for the disclosure of this paragraph see paragraph [0124.0.0.0] above.

[3798] The nucleic acid molecules used in the process according to the invention take the form of isolated nucleic acid sequences, which encode polypeptides with the activity of the proteins as shown in table II, application no. 14, column 3 and which confer an increase in the level of the respective fine chemical indicated in table II, application no. 14, column 6 by being expressed either in the cytsol or in an organelle such as a plastid or mitochondria or both, preferably in plastids, and the gene product being localized in the plastid and other parts of the cell or in the plastid as described above.

[3799] for the disclosure of the paragraphs [0126.0.0.13] to [0133.0.0.13] see paragraphs [0126.0.0.0] to [0133.0.0.0] above.

[3800] Production strains which are also advantageously selected in the process according to the invention are microorganisms selected from the group of green algae, like Spongioccoccum exentricum, Chlorella sorokiniana (pyrenoidosa, 7-11-05), or algae of the genus Haematococcus, Phaedactylum tricornatum, Volvox or Dunaliella or form the group of fungi like fungi belonging to the Daccrymycetaceae family, or non-photosynthetic bacteria, like methylotrophs, flavobacteria, actinomycetes, like streptomyces chrestomyceticus, Mycobacteria like Mycobacterim phlei, Rhodobacter capsulatus, or Brevibacterium linens, Dunaliella spp., Phaffia rhodozyma, Phycomyces sp., Rhodotorula spp. Thus, the invention also contemplates embodiments in which a host lacks sterols or sterols precursors, such as the vinca. In a plant of the latter type, the inserted DNA includes genes that code for proteins producing sterols precursors (compounds that can be converted biologically into a compound with sterols activity) and one or more modifying enzymes which were originally absent in such a plant.

The invention also contemplates embodiments in which the amino acids of the invention or amino acids of the invention precursor compounds in the production of the respective fine chemical, are present in a photosynthetic active organisms chosen as the host; for example, cyanobacteria, moses, algae or plants which, even as a wild type, are capable of producing the amino acids of the invention.

[3801] However, it is also possible to use artificial sequences, which differ in one or more bases from the nucleic acid sequences found in organisms, or in one or more amino acid molecules from polypeptide sequences found in organisms, in particular from the polypeptide sequences shown in table II, application no. 14, columns 5 and 7 or the functional homologues thereof as described herein, preferably conferring above-mentioned activity, i.e. conferring an increase of the respective fine chemical after increasing its plastidic activity, e.g. after increasing the activity of a protein as shown in table II, application no. 14, column 3 by—for example—expression either in the cytsol or in an organelle such as a plastid or mitochondria or both, preferably in plastids and the gene product, e.g. the polypeptide, being localized in the plastid and other parts of the cell or in the plastid as described above.

for the disclosure of the paragraphs [0135.0.0.13] to [0140.0.0.13] see paragraphs [0135.0.0.0] to [0140.0.0.0] above.

[3802] Synthetic oligonucleotide primers for the amplification, e.g. as shown in table III, application no. 14, column 7, by means of polymerase chain reaction can be generated on the basis of a sequence shown herein, for example the sequence shown in table I, application no. 14, columns 5 and 7 or the sequences derived from table II, application no. 14, columns 5 and 7.

[3803] Moreover, it is possible to identify conserved regions from various organisms by carrying out protein sequence alignments with the polypeptide used in the process of the invention, in particular with sequences of the polypeptide of the invention, from which conserved regions, and in turn, degenerate primers can be derived. Conserved regions are those, which show a very little variation in the amino acid in one particular position of several homologs from different origin. The consensus sequences shown in table IV, application no. 14, column 7 are derived from said alignments.

[3804] Degenerated primers can then be utilized by PCR for the amplification of fragments of novel proteins having above-mentioned activity, e.g. conferring the increase of the fine chemical after increasing the expression or activity or having the activity of a protein as shown in table II, application no. 14, column 3 or further functional homologs of the polypeptide of the invention from other organisms.

[3805] for the disclosure of the paragraphs [0144.0.0.13] to [0151.0.0.13] see paragraphs [0144.0.0.0] to [0151.0.0.0] above.

[3806] Polypeptides having above-mentioned activity, i.e. conferring the increase of the respective fine chemical indicated in table I, application no. 14, column 6, and being derived from other organisms, can be encoded by other DNA sequences which hybridize to the sequences shown in table I, application no. 14, columns 5 and 7, preferably of table I B, application no. 14, columns 5 and 7 under relaxed hybridization conditions and which code on expression for peptides having the respective fine chemical, i.e. amino acids of the invention increasing activity, when expressed in a way that the gene product, e.g. the polypeptide, being localized in the plastid and other parts of the cell or in the plastid as described above.

[3807] For the disclosure of the paragraphs [0153.0.0.13] to [0159.0.0.13] see paragraphs [0153.0.0.0] to [0159.0.0.0] above.

[3808] Further, the nucleic acid molecule of the invention comprises a nucleic acid molecule, which is a complement of one of the nucleotide sequences of above mentioned nucleic acid molecules or a portion thereof. A nucleic acid molecule which is complementary to one of the nucleotide sequences shown in table I, application no. 14, columns 5 and 7, preferably shown in table I B, application no. 14, columns 5 and 7 is one which is sufficiently complementary to one of the nucleotide sequences shown in table I, application no. 14, columns 5 and 7, preferably shown in table I B, application no. 14, columns 5 and 7 such that it can hybridize to one of the nucleotide sequences shown in table I, application no. 14, columns 5 and 7, preferably shown in table I B, application no. 14, columns 5 and 7, thereby forming a stable duplex. Preferably, the hybridisation is performed under stringent hybridization conditions. However, a complement of one of the herein disclosed sequences is preferably a sequence complement thereto according to the base pairing of nucleic acid molecules well known to the skilled person. For example, the bases A and G undergo base pairing with the bases T and U or C, resp. and visa versa. Modifications of the bases can influence the base-pairing partner.

[3809] The nucleic acid molecule of the invention comprises a nucleotide sequence which is at least about 30%, 35%, 40% or 45%, preferably at least about 50%, 55%, 60% or 65%, more preferably at least about 70%, 80%, or 90%, and even more preferably at least about 95%, 97%, 98%, 99% or more homologous to a nucleotide sequence shown in table I, application no. 14, columns 5 and 7, preferably shown in table I B, application no. 14, columns 5 and 7, or a portion thereof and preferably has above mentioned activity, in particular having a respective fine chemical increasing activity after increasing the activity or an activity of a gene product as shown in table II, application no. 14, column 3 by for example expression either in the cytsol or in an organelle such as a plastid or mitochondria or both, preferably in plastids, and the gene product, e.g. the polypeptide, being localized in the plastid and other parts of the cell or in the plastid as described above.

[3810] The nucleic acid molecule of the invention comprises a nucleotide sequence which hybridizes, preferably hybridizes under stringent conditions as defined herein, to one of the nucleotide sequences shown in table I, application no. 14, columns 5 and 7, preferably shown in table I B, application no. 14, columns 5 and 7, or a portion thereof and encodes a protein having above-mentioned activity, e.g. conferring of a 5-oxoproline, alanine, aspartic acid (aspartate), citrulline, glycine, homoserine, phenylalanine, serine and/or tyrosine increase by for example expression either in the cytsol or in an organelle such as a plastid or mitochondria or both, preferably in plastids, and optionally, the activity of a protein as shown in table II, application no. 14, column 3, and the gene product, e.g. the polypeptide, being localized in the plastid and other parts of the cell or in the plastid as described above.

[3811] Moreover, the nucleic acid molecule of the invention can comprise only a portion of the coding region of one of the sequences shown in table I, application no. 1314 columns 5 and 7, preferably shown in table I B, application no. 14, columns 5 and 7, for example a fragment which can be used as a probe or primer or a fragment encoding a biologically active portion of the polypeptide of the present invention or of a polypeptide used in the process of the present invention, i.e. having above-mentioned activity, e.g. conferring an increase of the respective fine chemical indicated in Table I, application no. 14, column 6, if its activity is increased by for example expression either in the cytsol or in an organelle such as a plastid or mitochondria or both, preferably in plastids, and the gene product, e.g. the polypeptide, being localized in the plastid and other parts of the cell or in the plastid as described above. The nucleotide sequences determined from the cloning of the present protein-according-to-the-invention-encoding gene allows for the generation of probes and primers designed for use in identifying and/or cloning its homologues in other cell types and organisms. The probe/primer typically comprises substantially purified oligonucleotide. The oligonucleotide typically comprises a region of nucleotide sequence that hybridizes under stringent conditions to at least about 12, 15 preferably about 20 or 25, more preferably about 40, 50 or 75 consecutive nucleotides of a sense strand of one of the sequences set forth, e.g., in table I, application no. 14, columns 5 and 7, an anti-sense sequence of one of the sequences, e.g., set forth in table I, application no. 14, columns 5 and 7, preferably shown in table I B, application no. 14, columns 5 and 7, or naturally occurring mutants thereof. Primers based on a nucleotide of invention can be used in PCR reactions to clone homologues of the polypeptide of the invention or of the polypeptide used in the process of the invention, e.g. as the primers described in the examples of the present invention, e.g. as shown in the examples. A PCR with the primers shown in table Ill, application no. 14, column 7 will result in a fragment of the gene product as shown in table II, column 3.

[3812] for the disclosure of this paragraph see paragraph [0164.0.0.0] above.

[3813] The nucleic acid molecule of the invention encodes a polypeptide or portion thereof which includes an amino acid sequence which is sufficiently homologous to the amino acid sequence shown in table II, application no. 14, columns 5 and 7 such that the protein or portion thereof maintains the ability to participate in the fine chemical production, in particular an activity increasing the level of 5-oxoproline, alanine, aspartic acid (aspartate), citrulline, glycine, homoserine, phenylalanine, serine and/or tyrosine, increasing the activity as mentioned above or as described in the examples in plants or microorganisms is comprised.

[3814] As used herein, the language “sufficiently homologous” refers to proteins or portions thereof which have amino acid sequences which include a minimum number of identical or equivalent amino acid residues (e.g., an amino acid residue which has a similar side chain as an amino acid residue in one of the sequences of the polypeptide of the present invention) to an amino acid sequence shown in table II, application no. 14, columns 5 and 7 such that the protein or portion thereof is able to participate in the increase of the fine chemical production. For examples having the activity of a protein as shown in table II, column 3 and as described herein.

[3815] In one embodiment, the nucleic acid molecule of the present invention comprises a nucleic acid that encodes a portion of the protein of the present invention. The protein is at least about 30%, 35%, 40%, 45% or 50%, preferably at least about 55%, 60%, 65% or 70%, and more preferably at least about 75%, 80%, 85%, 90%, 91%, 92%, 93% or 94% and most preferably at least about 95%, 97%, 98%, 99% or more homologous to an entire amino acid sequence of table II, application no. 14, columns 5 and 7 and having above-mentioned activity, e.g. conferring preferably the increase of the respective fine chemical by for example expression either in the cytsol or in an organelle such as a plastid or mitochondria or both, preferably in plastids, and the gene product, e.g. the polypeptide, being localized in the plastid and other parts of the cell or in the plastid as described above.

[3816] for the disclosure of the paragraphs [0168.0.0.13] and [0169.0.0.13] see paragraphs [0168.0.0.0] and [0169.0.0.0] above.

[3817] The invention further relates to nucleic acid molecules that differ from one of the nucleotide sequences shown in table I, application no. 14, columns 5 and 7 (and portions thereof) due to degeneracy of the genetic code and thus encode a polypeptide of the present invention, in particular a polypeptide having above mentioned activity, e.g. conferring an increase in the respective fine chemical in a organism, e.g. as that polypeptides depicted by the sequence shown in table II, application no. 14, columns 5 and 7 or the functional homologues. Advantageously, the nucleic acid molecule of the invention comprises, or in an other embodiment has, a nucleotide sequence encoding a protein comprising, or in an other embodiment having, an amino acid sequence shown in table II, application no. 14, columns 5 and 7 or the functional homologues. In a still further embodiment, the nucleic acid molecule of the invention encodes a full length protein which is substantially homologous to an amino acid sequence shown in table II, application no. 14, columns 5 and 7 or the functional homologues. However, in a preferred embodiment, the nucleic acid molecule of the present invention does not consist of the sequence shown in table I, application no. 14, columns 5 and 7, preferably as indicated in table I A, application no. 14, columns 5 and 7. Preferably the nucleic acid molecule of the invention is a functional homologue or identical to a nucleic acid molecule indicated in table I B, application no. 14, columns 5 and 7.

[3818] for the disclosure of the paragraphs [0171.0.0.13] to [0173.0.0.13] see paragraphs [0171.0.0.0] to [0173.0.0.0] above.

[3819] Accordingly, in another embodiment, a nucleic acid molecule of the invention is at least 15, 20, 25 or 30 nucleotides in length. Preferably, it hybridizes under stringent conditions to a nucleic acid molecule comprising a nucleotide sequence of the nucleic acid molecule of the present invention or used in the process of the present invention, e.g. comprising the sequence shown in table I, application no. 14, columns 5 and 7. The nucleic acid molecule is preferably at least 20, 30, 50, 100, 250 or more nucleotides in length.

[3820] for the disclosure of this paragraph see paragraph [0175.0.0.0] above.

[3821] Preferably, nucleic acid molecule of the invention that hybridizes under stringent conditions to a sequence shown in table I, application no. 14, columns 5 and 7 corresponds to a naturally-occurring nucleic acid molecule of the invention. As used herein, a “naturally-occurring” nucleic acid molecule refers to an RNA or DNA molecule having a nucleotide sequence that occurs in nature (e.g., encodes a natural protein). Preferably, the nucleic acid molecule encodes a natural protein having abovementioned activity, e.g. conferring the respective fine chemical increase after increasing the expression or activity thereof or the activity of a protein of the invention or used in the process of the invention by for example expression the nucleic acid sequence of the gene product in the cytsol and/or in an organelle such as a plastid or mitochondria, preferably in plastids.

[3822] for the disclosure of this paragraph see paragraph [0177.0.0.0] above.

[3823] For example, nucleotide substitutions leading to amino acid substitutions at “non-essential” amino acid residues can be made in a sequence of the nucleic acid molecule of the invention or used in the process of the invention, e.g. shown in table I, application no. 14, columns 5 and 7.

[3824] For the disclosure of the paragraphs [0179.0.0.13] and [0180.0.0.13] see paragraphs [0179.0.0.0] and [0180.0.0.0] above.

[3825] Accordingly, the invention relates to nucleic acid molecules encoding a polypeptide having above-mentioned activity, e.g. conferring an increase in the the respective fine chemical in an organisms or parts thereof by for example expression either in the cytsol or in an organelle such as a plastid or mitochondria or both, preferably in plastids (as described), that contain changes in amino acid residues that are not essential for said activity. Such polypeptides differ in amino acid sequence from a sequence contained in the sequences shown in table II, application no. 14, columns 5 and 7, preferably shown in table II A, application no. 14, columns 5 and 7 yet retain said activity described herein. The nucleic acid molecule can comprise a nucleotide sequence encoding a polypeptide, wherein the polypeptide comprises an amino acid sequence at least about 50% identical to an amino acid sequence shown in table II, application no. 14, columns 5 and 7, preferably shown in table II A, application no. 14, columns 5 and 7 and is capable of participation in the increase of production of the fine chemical after increasing its activity, e.g. its expression by for example expression either in the cytsol or in an organelle such as a plastid or mitochondria or both, preferably in plastids and the gene product, e.g. the polypeptide, being localized in the plastid and other parts of the cell or in the plastid as described above. Preferably, the protein encoded by the nucleic acid molecule is at least about 60% identical to the sequence shown in table II, application no. 14, columns 5 and 7, preferably shown in table II A, application no. 14, columns 5 and 7, more preferably at least about 70% identical to one of the sequences shown in table II, application no. 14, columns 5 and 7, preferably shown in table II A, application no. 14, columns 5 and 7, even more preferably at least about 80%, 90%, 95% homologous to the sequence shown in table II, application no. 14, columns 5 and 7, preferably shown in table II A, application no. 13, columns 5 and 7, and most preferably at least about 96%, 97%, 98%, or 99% identical to the sequence shown in table II, application no. 14, columns 5 and 7, preferably shown in table II A, application no. 14, columns 5 and 7.

[3826] for the disclosure of the paragraphs [0182.0.0.13] to [0188.0.0.13] see paragraphs [0182.0.0.0] to [0188.0.0.0] above.

[3827] Functional equivalents derived from one of the polypeptides as shown in table II, application no. 14, columns 5 and 7, preferably shown in table II B, application no. 14, columns 5 and 7 resp., according to the invention by substitution, insertion or deletion have at least 30%, 35%, 40%, 45% or 50%, preferably at least 55%, 60%, 65% or 70% by preference at least 80%, especially preferably at least 85% or 90%, 91%, 92%, 93% or 94%, very especially preferably at least 95%, 97%, 98% or 99% homology with one of the polypeptides as shown in table II, application no. 14, columns 5 and 7, preferably shown in table II B, application no. 14, columns 5 and 7 resp., according to the invention and are distinguished by essentially the same properties as the polypeptide as shown in table II, application no. 14, columns 5 and 7, preferably shown in table II B, application no. 14, columns 5 and 7.

[3828] Functional equivalents derived from the nucleic acid sequence as shown in table I, application no. 14, columns 5 and 7, preferably shown in table I B, application no. 14, columns 5 and 7 resp., according to the invention by substitution, insertion or deletion have at least 30%, 35%, 40%, 45% or 50%, preferably at least 55%, 60%, 65% or 70% by preference at least 80%, especially preferably at least 85% or 90%, 91%, 92%, 93% or 94%, very especially preferably at least 95%, 97%, 98% or 99% homology with one of the polypeptides as shown in table II, application no. 14, columns 5 and 7, preferably shown in table II B, application no. 14, columns 5 and 7 resp., according to the invention and encode polypeptides having essentially the same properties as the polypeptide as shown in table II, application no. 14, columns 5 and 7, preferably shown in table II B, application no. 14, columns 5 and 7.

[3829] for the disclosure of this paragraph see paragraph [0191.0.0.0] above.

[3830] A nucleic acid molecule encoding an homologous to a protein sequence of table II, application no. 14, columns 5 and 7, preferably shown in table II B, application no. 14, columns 5 and 7 resp., can be created by introducing one or more nucleotide substitutions, additions or deletions into a nucleotide sequence of the nucleic acid molecule of the present invention, in particular of table I, application no. 14, columns 5 and 7, preferably shown in table I B, application no. 14, columns 5 and 7 resp., such that one or more amino acid substitutions, additions or deletions are introduced into the encoded protein. Mutations can be introduced into the encoding sequences of table I, application no. 14, columns 5 and 7, preferably shown in table I B, application no. 14, columns 5 and 7 resp., by standard techniques, such as site-directed mutagenesis and PCR-mediated mutagenesis.

[3831] for the disclosure of the paragraphs [0193.0.0.13] to [0196.0.0.13] see paragraphs [0193.0.0.0] to [0196.0.0.0] above.

[3832] Homologues of the nucleic acid sequences used, with the sequence shown in table I, application no. 14, columns 5 and 7, preferably shown in table I B, application no. 14, columns 5 and 7, comprise also allelic variants with at least approximately 30%, 35%, 40% or 45% homology, by preference at least approximately 50%, 60% or 70%, more preferably at least approximately 90%, 91%, 92%, 93%, 94% or 95% and even more preferably at least approximately 96%, 97%, 98%, 99% or more homology with one of the nucleotide sequences shown or the abovementioned derived nucleic acid sequences or their homologues, derivatives or analogues or parts of these. Allelic variants encompass in particular functional variants which can be obtained by deletion, insertion or substitution of nucleotides from the sequences shown, preferably from table I, application no. 14, columns 5 and 7, preferably shown in table I B, application no. 14, columns 5 and 7, or from the derived nucleic acid sequences, the intention being, however, that the enzyme activity or the biological activity of the resulting proteins synthesized is advantageously retained or increased.

[3833] In one embodiment of the present invention, the nucleic acid molecule of the invention or used in the process of the invention comprises the sequences shown in any of the table I, application no. 14, columns 5 and 7, preferably shown in table I B, application no. 14, columns 5 and 7. It is preferred that the nucleic acid molecule comprises as little as possible other nucleotides not shown in any one of table I, application no. 14, columns 5 and 7, preferably shown in table I B, application no. 14, columns 5 and 7. In one embodiment, the nucleic acid molecule comprises less than 500, 400, 300, 200, 100, 90, 80, 70, 60, 50 or 40 further nucleotides. In a further embodiment, the nucleic acid molecule comprises less than 30, 20 or 10 further nucleotides. In one embodiment, the nucleic acid molecule use in the process of the invention is identical to the sequences shown in table I, application no. 14, columns 5 and 7, preferably shown in table I B, application no. 14, columns 5 and 7.

[3834] Also preferred is that the nucleic acid molecule used in the process of the invention encodes a polypeptide comprising the sequence shown in table II, application no. 14, columns 5 and 7, preferably shown in table II B, application no. 14, columns 5 and 7. In one embodiment, the nucleic acid molecule encodes less than 150, 130, 100, 80, 60, 50, 40 or 30 further amino acids. In a further embodiment, the encoded polypeptide comprises less than 20, 15, 10, 9, 8, 7, 6 or 5 further amino acids. In one embodiment used in the inventive process, the encoded polypeptide is identical to the sequences shown in table II, application no. 14, columns 5 and 7, preferably shown in table II B, application no. 14, columns 5 and 7.

[3835] In one embodiment, the nucleic acid molecule of the invention or used in the process encodes a polypeptide comprising the sequence shown in table II, application no. 14, columns 5 and 7, preferably shown in table II B, application no. 14, columns 5 and 7 comprises less than 100 further nucleotides. In a further embodiment, said nucleic acid molecule comprises less than 30 further nucleotides. In one embodiment, the nucleic acid molecule used in the process is identical to a coding sequence of the sequences shown in table I, application no. 14, columns 5 and 7, preferably shown in table I B, application no. 14, columns 5 and 7.

[3836] Polypeptides (=proteins), which still have the essential biological or enzymatic activity of the polypeptide of the present invention conferring an increase of the respective fine chemical indicated in column 6 of Table I, application no. 14, i.e. whose activity is essentially not reduced, are polypeptides with at least 10% or 20%, by preference 30% or 40%, especially preferably 50% or 60%, very especially preferably 80% or 90 or more of the wild type biological activity or enzyme activity, advantageously, the activity is essentially not reduced in comparison with the activity of a polypeptide shown in table II, application no. 14, columns 5 and 7 expressed under identical conditions.

[3837] Homologues of table I, application no. 14, columns 5 and 7 or of the derived sequences of table II, application no. 14, columns 5 and 7 also mean truncated sequences, cDNA, single-stranded DNA or RNA of the coding and noncoding DNA sequence. Homologues of said sequences are also understood as meaning derivatives, which comprise noncoding regions such as, for example, UTRs, terminators, enhancers or promoter variants. The promoters upstream of the nucleotide sequences stated can be modified by one or more nucleotide substitution(s), insertion(s) and/or deletion(s) without, however, interfering with the functionality or activity either of the promoters, the open reading frame (=ORF) or with the 3′-regulatory region such as terminators or other 3′ regulatory regions, which are far away from the ORF. It is furthermore possible that the activity of the promoters is increased by modification of their sequence, or that they are replaced completely by more active promoters, even promoters from heterologous organisms. Appropriate promoters are known to the person skilled in the art and are mentioned herein below.

[3838] for the disclosure of the paragraphs [0203.0.0.13] to [0215.0.0.13] see paragraphs [0203.0.0.0] to [0215.0.0.0] above.

[3839] Accordingly, in one embodiment, the invention relates to a nucleic acid molecule, which comprises a nucleic acid molecule selected from the group consisting of:
[3840] a) nucleic acid molecule encoding, preferably at least the mature form, of the polypeptide shown in table II, application no. 14, columns 5 and 7, preferably in table II B, application no. 14, columns 5 and 7; or a fragment thereof conferring an increase in the amount of the fine chemical according to table II B, application no. 14, column 6 in an organism or a part thereof
[3841] b) nucleic acid molecule comprising, preferably at least the mature form, of the nucleic acid molecule shown in table I, application no. 14, columns 5 and 7, preferably in table I B, application no. 14, columns 5 and 7 or a fragment thereof conferring an increase in the amount of the fine chemical according to table II B, application no. 14, column 6 in an organism or a part thereof;
[3842] c) nucleic acid molecule whose sequence can be deduced from a polypeptide sequence encoded by a nucleic acid molecule of (a) or (b) as result of the degeneracy of the genetic code and conferring an increase in the amount of the fine chemical according to table II B, application no. 14, column 6 in an organism or a part thereof;
[3843] d) nucleic acid molecule encoding a polypeptide whose sequence has at least 50% identity with the amino acid sequence of the polypeptide encoded by the nucleic acid molecule of (a) to (c) and conferring an increase in the amount of the fine chemical according to table II B, application no. 14, column 6 in an organism or a part thereof;
[3844] e) nucleic acid molecule which hybridizes with a nucleic acid molecule of (a) to (c) under stringent hybridisation conditions and conferring an increase in the amount of the fine chemical according to table II B, application no. 14, column 6 in an organism or a part thereof;
[3845] f) nucleic acid molecule encoding a polypeptide, the polypeptide being derived by substituting, deleting and/or adding one or more amino acids of the amino acid sequence of the polypeptide encoded by the nucleic acid molecules (a) to (d), preferably to (a) to (c), and conferring an increase in the amount of the fine chemical according to table II B, application no. 14, column 6 in an organism or a part thereof;
[3846] g) nucleic acid molecule encoding a fragment or an epitope of a polypeptide which is encoded by one of the nucleic acid molecules of (a) to (e), preferably to (a) to (c) and conferring an increase in the amount of the fine chemical according to table II B, application no. 14, column 6 in an organism or a part thereof;
[3847] h) nucleic acid molecule comprising a nucleic acid molecule which is obtained by amplifying a cDNA library or a genomic library using the primers in table III, application no. 14, column 7 and conferring an increase in the amount of the fine chemical according to table II B, application no. 14, column 6 in an organism or a part thereof;
[3848] i) nucleic acid molecule encoding a polypeptide which is isolated, e.g. from a expression library, with the aid of monoclonal antibodies against a polypeptide encoded by one of the nucleic acid molecules of (a) to (g), preferably to (a) to (c) and conferring an increase in the amount of the fine chemical in an organism or a part thereof;
[3849] j) nucleic acid molecule which encodes a polypeptide comprising the consensus sequence shown in table IV, application no. 14, column 7 and conferring an increase in the amount of the fine chemical in an organism or a part thereof;
[3850] k) nucleic acid molecule encoding the amino acid sequence of a polypeptide encoding a domain of the polypeptide shown in table II, application no. 14, columns 5 and 7 and conferring an increase in the amount of the fine chemical according to table II B, application no. 14, column 6 in an organism or a part thereof; and
[3851] l) nucleic acid molecule which is obtainable by screening a suitable nucleic acid library under stringent hybridization conditions with a probe comprising one of the sequences of the nucleic acid molecule of (a) to (k) or with a fragment of at least 15 nt, preferably 20 nt, 30 nt, 50 nt, 100 nt, 200 nt or 500 nt of the nucleic acid molecule characterized in (a) to (h) or of the nucleic acid molecule shown in table I, application no. 14, columns 5 and 7 or a nucleic acid molecule encoding, preferably at least the mature form of, the polypeptide shown in table II, application no. 14, columns 5 and 7, and conferring an increase in the amount of the fine chemical according to table II B, application no. 14, column 6 in an organism or a part thereof; or which encompasses a sequence which is complementary thereto;
   whereby, preferably, the nucleic acid molecule according to (a) to (l) distinguishes over the sequence depicted in table I A and/or I B, application no. 14, columns 5 and 7 by one or more nucleotides. In one embodiment, the nucleic acid molecule of the invention does not consist of the sequence shown in table I A and/or I B, application no. 14, columns 5 and 7. In an other embodiment, the nucleic acid molecule of the present invention is at least 30% identical and less than 100%, 99.999%, 99.99%, 99.9% or 99% identical to the sequence shown in table IA and/or I B, application no. 14, columns 5 and 7. In a further embodiment the nucleic acid molecule does not encode the polypeptide sequence shown in table IIA and/or II B, application no. 14, columns 5 and 7. Accordingly, in one embodiment, the nucleic acid molecule of the present invention encodes in one embodiment a polypeptide which differs at least in one or more amino acids from the polypeptide shown in table II A and/or II B, application no. 14, columns 5 and 7 does not encode a protein of the sequence shown in table II A and/or II B, application no. 14, columns 5 and 7. Accordingly, in one embodiment, the protein encoded by a sequence of a nucleic acid according to (a) to (l) does not consist of the sequence shown in table IA and/or I B, application no. 14, columns 5 and 7. In a further embodiment, the protein of the present invention is at least 30% identical to protein sequence depicted in table II A and/or II B, application no. 14, columns 5 and 7 and less than 100%, preferably less than 99.999%, 99.99% or 99.9%, more preferably less than 99%, 985, 97%, 96% or 95% identical to the sequence shown in table II A and/or II B, application no. 14, columns 5 and 7.

[3852] For the disclosure of the paragraphs [0217.0.0.13] to [0226.0.0.13] see paragraphs [0217.0.0.0] to [0226.0.0.0] above.

[3853] In general, vector systems preferably also comprise further cis-regulatory regions such as promoters and terminators and/or selection markers by means of which suitably transformed organisms can be identified. While vir genes and T-DNA sequences are located on the same vector in the case of cointegrated vector systems, binary systems are based on at least two vectors, one of which bears vir genes, but no T-DNA, while a second one bears T-DNA, but no vir gene. Owing to this fact, the last-mentioned vectors are relatively small, easy to manipulate and capable of replication in E. coli and in Agrobacterium. These binary vectors include vectors from the series pBIB-HYG, pPZP, pBecks, pGreen. Those which are preferably used in accordance with the invention are Bin19, pBI101, pBinAR, pGPTV and pCAMBIA. An overview of binary vectors and their use is given by Hellens et al, Trends in Plant Science (2000) 5, 446-451. The vectors are preferably modified in such a manner, that they already contain the nucleic acid coding for the transitpeptide and that the nucleic acids of the invention, preferentially the nucleic acid sequences encoding the polypeptides shown in table II, application no. 14, columns 5 and 7 can be cloned 3″ prime to the transitpeptide encoding sequence, leading to a functional preprotein, which is directed to the plastids and which means that the mature protein fulfills its biological activity.

[3854] For the disclosure of the paragraphs [0228.0.0.13] to [0239.0.0.13] see paragraphs [0228.0.0.0] to [0239.0.0.0] above.

[3855] The abovementioned nucleic acid molecules can be cloned into the nucleic acid constructs or vectors according to the invention in combination together with further genes, or else different genes are introduced by transforming several nucleic acid constructs or vectors (including plasmids) into a host cell, advantageously into a plant cell or a microorganisms.

In addition to the sequence mentioned in Table I, application no. 14, columns 5 and 7 or its derivatives, it is advantageous additionally to express and/or mutate further genes in the organisms. It can be especially advantageously, if additionally at least one further gene of the amino acid of the invention biosynthetic pathway, is expressed in the organisms such as plants or microorganisms. It is also possible that the regulation of the natural genes has been modified advantageously so that the gene and/or its gene product is no longer subject to the regulatory mechanisms which exist in the organisms. This leads to an increased synthesis of the amino acids desired since, for example, feedback regulations no longer exist to the same extent or not at all. In addition it might be advantageously to combine the sequences shown in Table I, application no. 14, columns 5 and 7 with genes which generally support or enhances the growth or yield of the target organism, for example genes which lead to faster growth rate of microorganisms or genes which produces stress-, pathogen, or herbicide resistant plants.

[3856] In addition, it might be also advantageously to combine one or more of the sequences indicated in Table I, columns 5 or 7, application no. 14, with genes which modify plant architecture or flower development, in the way, that the plant either produces more flowers, or produces flowers with more petals in order to increase the respective fine chemical production capacity.

[3857] For the disclosure of the paragraphs

[3858] [0241.0.0.13] to [0264.0.0.13] see paragraphs [0241.0.0.0] to [0264.0.0.0] above.

[3859] Other preferred sequences for use in operable linkage in gene expression constructs are targeting sequences, which are required for targeting the gene product into specific cell compartments (for a review, see Kermode, Crit. Rev. Plant Sci. 15, 4 (1996) 285-423 and references cited therein), for example into the vacuole, the nucleus, all types of plastids, such as amyloplasts, chloroplasts, chromoplasts, the extracellular space, the mitochondria, the endoplasmic reticulum, elaioplasts, peroxisomes, glycosomes, and other compartments of cells or extracellular preferred are sequences, which are involved in targeting to plastids as mentioned above. Sequences, which must be mentioned in this context are, in particular, the signal-peptide- or transit-peptide-encoding sequences which are known per se. For example, plastid-transit-peptide-encoding sequences enable the targeting of the expression product into the plastids of a plant cell. Targeting sequences are also known for eukaryotic and to a lower extent for prokaryotic organisms and can advantageously be operable linked with the nucleic acid molecule of the present invention as shown in table I, application no. 14, columns 5 and 7 and described herein to achieve an expression in one of said compartments or extracellular.

[3860] For the disclosure of the paragraphs [0266.0.0.13] to [0287.0.0.13] see paragraphs [0266.0.0.0] to [0287.0.0.0] above.

[3861] Accordingly, one embodiment of the invention relates to a vector where the nucleic acid molecule according to the invention is linked operably to regulatory sequences which permit the expression in a prokaryotic or eukaryotic or in a prokaryotic and eukaryotic host. A further preferred embodiment of the invention relates to a vector in which a nucleic acid sequence encoding one of the polypeptides shown in table II, application no. 14, columns 5 and 7 or their homologs is functionally linked to a plastidial targeting sequence. A further preferred embodiment of the invention relates to a vector in which a nucleic acid sequence encoding one of the polypeptides shown in table II, application no. 14, columns 5 and 7 or their homologs is functionally linked to a regulatory sequences which permit the expression in plastids.

[3862] For the disclosure of the paragraphs [0289.0.0.13] to [0296.0.0.13] see paragraphs [0289.0.0.0] to [0296.0.0.0] above.

[3863] Moreover, a native polypeptide conferring the increase of the respective fine chemical in an organism or part thereof can be isolated from cells (e.g., endothelial cells), for example using the antibody of the present invention as described herein, in particular, an antibody against polypeptides as shown in table II, application no. 14, columns 5 and 7, which can be produced by standard techniques utilizing the polypeptide of the present invention or fragment thereof, i.e., the polypeptide of this invention. Preferred are monoclonal antibodies.

[3864] for the disclosure of this paragraph see paragraph [0298.0.0.0] above.

[3865] In one embodiment, the present invention relates to a polypeptide having the sequence shown in table II, application no. 14, columns 5 and 7 or as coded by the nucleic acid molecule shown in table I, application no. 14, columns 5 and 7 or functional homologues thereof.

[3866] In one advantageous embodiment, in the method of the present invention the activity of a polypeptide is increased comprising or consisting of the consensus sequence shown in table IV, application no. 14, columns 7 and in one another embodiment, the present invention relates to a polypeptide comprising or consisting of the consensus sequence shown in table IV, application no. 14, column 7 whereby 20 or less, preferably 15 or 10, preferably 9, 8, 7, or 6, more preferred 5 or 4, even more preferred 3, even more preferred 2, even more preferred 1, most preferred 0 of the amino acids positions indicated can be replaced by any amino acid.

[3867] For the disclosure of the paragraphs [0301.0.0.13] to [0304.0.0.13] see paragraphs [0301.0.0.0] to [0304.0.0.0] above.

[3868] In one advantageous embodiment, the method of the present invention comprises the increasing of a polypeptide comprising or consisting of plant or microorganism specific consensus sequences.

In one embodiment, said polypeptide of the invention distinguishes over the sequence shown in table II A and/or II B, application no. 14, columns 5 and 7 by one or more amino acids. In one embodiment, polypeptide distinguishes form the sequence shown in table II A and/or II B, application no. 14, columns 5 and 7 by more than 5, 6, 7, 8 or 9 amino acids, preferably by more than 10, 15, 20, 25 or 30 amino acids, even more preferred are more than 40, 50, or 60 amino acids and, preferably, the sequence of the polypeptide of the invention distinguishes from the sequence shown in table II A and/or II B, application no. 14, columns 5 and 7 by not more than 80% or 70% of the amino acids, preferably not more than 60% or 50%, more preferred not more than 40% or 30%, even more preferred not more than 20% or 10%. In an other embodiment, said polypeptide of the invention does not consist of the sequence shown in table II A and/or II B, application no. 14, columns 5 and 7.

[3869] For the disclosure of this paragraph see paragraph [0306.0.0.0] above.

[3870] In one embodiment, the invention relates to polypeptide conferring an increase of level of the respective fine chemical indicated in Table II A and/or II B, application no. 14, column 6 in an organism or part being encoded by the nucleic acid molecule of the invention or used in the process of the invention and having a sequence which distinguishes from the sequence as shown in table II A and/or II B, application no. 14, columns 5 and 7 by one or more amino acids. In another embodiment, said polypeptide of the invention does not consist of the sequence shown in table II A and/or II B, application no. 14, columns 5 and 7. In a further embodiment, said polypeptide of the present invention is less than 100%, 99.999%, 99.99%, 99.9% or 99% identical. In one embodiment, said polypeptide does not consist of the sequence encoded by the nucleic acid molecules shown in table I A and/or I B, application no. 14, columns 5 and 7.

[3871] In one embodiment, the present invention relates to a polypeptide having the activity of the protein as shown in table II A and/or II B, application no. 14, column 3, which distinguishes over the sequence depicted in table II A and/or II B, application no. 14, columns 5 and 7 by one or more amino acids, preferably by more than 5, 6, 7, 8 or 9 amino acids, preferably by more than 10, 15, 20, 25 or 30 amino acids, even more preferred are more than 40, 50, or 60 amino acids but even more preferred by less than 70% of the amino acids, more preferred by less than 50%, even more preferred my less than 30% or 25%, more preferred are 20% or 15%, even more preferred are less than 10%. In a further preferred embodiment the polypeptide of the invention takes the form of a preprotein consisting of a plastidial transitpeptide joint to a polypeptide having the activity of the protein as shown in table II A and/or II B, column 3, from which the transitpeptide is preferably cleaved off upon transport of the preprotein into the organelle, for example into the plastid or mitochondria.

[3872] For the disclosure of the paragraphs [0309.0.0.13] to [0311.0.0.13] see paragraphs [0309.0.0.0] to [0311.0.0.0] above.

[3873] A polypeptide of the invention can participate in the process of the present invention. The polypeptide or a portion thereof comprises preferably an amino acid sequence, which is sufficiently homologous to an amino acid sequence shown in table II, application no. 14, columns 5 and 7.

[3874] Further, the polypeptide can have an amino acid sequence which is encoded by a nucleotide sequence which hybridizes, preferably hybridizes under stringent conditions as described above, to a nucleotide sequence of the nucleic acid molecule of the present invention. Accordingly, the polypeptide has an amino acid sequence which is encoded by a nucleotide sequence that is at least about 35%, 40%, 45%, 50%, 55%, 60%, 65% or 70%, preferably at least about 75%, 80%, 85% or 90, and more preferably at least about 91%, 92%, 93%, 94% or 95%, and even more preferably at least about 96%, 97%, 98%, 99% or more homologous to one of the amino acid sequences as shown in table II A and/or II B, application no. 14, columns 5 and 7. The preferred polypeptide of the present invention preferably possesses at least one of the activities according to the invention and described herein. A preferred polypeptide of the present invention includes an amino acid sequence encoded by a nucleotide sequence which hybridizes, preferably hybridizes under stringent conditions, to a nucleotide sequence of table I A and/or I B, application no. 14, columns 5 and 7 or which is homologous thereto, as defined above.

[3875] Accordingly the polypeptide of the present invention can vary from the sequences shown in table II A and/or II B, application no. 14, columns 5 and 7 in amino acid sequence due to natural variation or mutagenesis, as described in detail herein. Accordingly, the polypeptide comprise an amino acid sequence which is at least about 35%, 40%, 45%, 50%, 55%, 60%, 65% or 70%, preferably at least about 75%, 80%, 85% or 90, and more preferably at least about 91%, 92%, 93%, 94% or 95%, and most preferably at least about 96%, 97%, 98%, 99% or more homologous to an entire amino acid sequence shown in table II A and/or II B, application no. 14, columns 5 and 7.

[3876] For the disclosure of this paragraph see paragraph [0315.0.0.0] above.

[3877] Biologically active portions of an polypeptide of the present invention include peptides comprising amino acid sequences derived from the amino acid sequence of the polypeptide of the present invention or used in the process of the present invention, e.g., the amino acid sequence shown in table II, application no. 14, columns 5 and 7 or the amino acid sequence of a protein homologous thereto, which include fewer amino acids than a full length polypeptide of the present invention or used in the process of the present invention or the full length protein which is homologous to an polypeptide of the present invention or used in the process of the present invention depicted herein, and exhibit at least one activity of polypeptide of the present invention or used in the process of the present invention.

[3878] for the disclosure of this paragraph see paragraph [0317.0.0.0] above.

[3879] Manipulation of the nucleic acid molecule of the invention may result in the production of a protein having differences from the wild-type protein as shown in table II, application no. 14, column 3. Differences shall mean at least one amino acid different from the sequences as shown in table II, application no. 14, column 3, preferably at least 2, 3, 4, 5, 6, 7, 8, 9 or 10 amino acids, more preferably at least 15, 20, 25, 30, 35, 40, 45 or 50 amino acids different from the sequences as shown in table II, application no. 14, column 3. These proteins may be improved in efficiency or activity, may be present in greater numbers in the cell than is usual, or may be decreased in efficiency or activity in relation to the wild type protein.

[3880] Any mutagenesis strategies for the polypeptide of the present invention or the polypeptide used in the process of the present invention to result in increasing said activity are not meant to be limiting; variations on these strategies will be readily apparent to one skilled in the art. Using such strategies, and incorporating the mechanisms disclosed herein, the nucleic acid molecule and polypeptide of the invention may be utilized to generate plants or parts thereof, expressing wildtype proteins or mutated proteins of the proteins as shown in table II, application no. 14, column 3. The nucleic acid molecules and polypeptide molecules of the invention are expressed such that the yield, production, and/or efficiency of production of a desired compound is improved.

[3881] Preferably, the compound is a composition comprising the essentially pure fine chemical, i.e. amino acid of the invention, e.g. 5-oxoproline, alanine, aspartic acid (aspartate), citrulline, glycine, homoserine, phenylalanine, serine and/or tyrosine or a recovered or isolated amino acid of the invention in free or in protein- or membrane-bound form.

[3882] For the disclosure of the paragraphs [0320.0.0.13] to [0322.0.0.13] see paragraphs [0320.0.0.0] to [0322.0.0.0] above.

[3883] In one embodiment, a protein (=polypeptide) as shown in table II, application no. 14, column 3 refers to a polypeptide having an amino acid sequence corresponding to the polypeptide of the invention or used in the process of the invention, whereas a “non-inventive protein or polypeptide” or “other polypeptide” refers to a polypeptide having an amino acid sequence corresponding to a protein which is not substantially homologous to a polypeptide of the invention, preferably which is not substantially homologous to a polypeptide or protein as shown in table II, application no. 14, column 3, e.g., a protein which does not confer the activity described herein and which is derived from the same or a different organism.

[3884] For the disclosure of the paragraphs [0324.0.0.13] to [0329.0.0.13] see paragraphs [0324.0.0.0] to [0329.0.0.0] above.

[3885] In an especially preferred embodiment, the polypeptide according to the invention furthermore also does not have the sequences of those proteins, which are encoded by the sequences shown in table II, application no. 14, columns 5 and 7.

[3886] For the disclosure of the paragraphs [0331.0.0.13] to [0346.0.0.13] see paragraphs [0331.0.0.0] to [0346.0.0.0] above.

[3887] Accordingly the present invention relates to any cell transgenic for any nucleic acid characterized as part of the invention, e.g. conferring the increase of the respective fine chemical indicated in column 6 of application no. 14 in any one of Tables I to IV in a cell or an organism or a part thereof, e.g. the nucleic acid molecule of the invention, the nucleic acid construct of the invention, the antisense molecule of the invention, the vector of the invention or a nucleic acid molecule encoding the polypeptide of the invention, e.g. encoding a polypeptide having an activity as the protein as shown in table II, application no. 14, column 3. Due to the above mentioned activity the respective fine chemical content in a cell or an organism is increased. For example, due to modulation or manipulation, the cellular activity is increased preferably in organelles such as plastids or mitochondria, e.g. due to an increased expression or specific activity or specific targeting of the subject matters of the invention in a cell or an organism or a part thereof especially in organelles such as plastids or mitochondria. Transgenic for a polypeptide having a protein or activity means herein that due to modulation or manipulation of the genome, the activity of protein as shown in table II, application no. 14, column 3 or a protein as shown in table II, application no. 14, column 3-like activity is increased in the cell or organism or part thereof especially in organelles such as plastids or mitochondria. Examples are described above in context with the process of the invention.

[3888] For the disclosure of this paragraph see paragraph [0348.0.0.0] above.

[3889] A naturally occurring expression cassette—for example the naturally occurring combination of the promoter of the gene encoding a protein as shown in table II, application no. 14, column 3 with the corresponding encoding gene—becomes a transgenic expression cassette when it is modified by non-natural, synthetic “artificial” methods such as, for example, mutagenization. Such methods have been described (U.S. Pat. No. 5,565,350; WO 00/15815; also see above).

[3890] for the disclosure of the paragraphs [0350.0.0.13] to [0369.0.0.13] see paragraphs [0350.0.0.0] to [0369.0.0.0] above.

[3891] The fermentation broths obtained in this way, containing in particular the respective fine chemical indicated in column 6 of any one of Tables I to IV; application no. 14 or containing mixtures with other compounds, in particular with other amino acids, vitamins or fatty acids or containing microorganisms or parts of microorganisms, like plastids, normally have a dry matter content of from 7.5 to 25% by weight. The fermentation broth can be processed further. Depending on requirements, the biomass can be separated, such as, for example, by centrifugation, filtration, decantation, coagulation/flocculation or a combination of these methods, from the fermentation broth or left completely in it. The fermentation broth can be thickened or concentrated by known methods, such as, for example, with the aid of a rotary evaporator, thin-film evaporator, falling film evaporator, by reverse osmosis or by nanofiltration. This concentrated fermentation broth can then be worked up by extraction, freeze-drying, spray drying, spray granulation or by other processes.

[3892] for the disclosure of the paragraphs [0371.0.0.13] to [0376.0.0.13], [0376.1.0.13] and [0377.0.0.13] see paragraphs [0371.0.0.0] to [0376.0.0.0], [0376.1.0.0] and [0377.0.0.0] above.

[3893] In one embodiment, the present invention relates to a method for the identification of a gene product conferring an increase in the fine chemical production in a cell, comprising the following steps:
[3894] (a) contacting e.g. hybridising, the nucleic acid molecules of a sample, e.g. cells, tissues, plants or microorganisms or a nucleic acid library, which can contain a candidate gene encoding a gene product conferring an increase in the respective fine chemical after expression, with the nucleic acid molecule of the present invention;
[3895] (b) identifying the nucleic acid molecules, which hybridize under relaxed stringent conditions with the nucleic acid molecule of the present invention in particular to the nucleic acid molecule sequence shown in table I, application no. 14, columns 5 and 7, preferably in table I B, application no. 14, columns 5 and 7, and, optionally, isolating the full length cDNA clone or complete genomic clone;
[3896] (c) introducing the candidate nucleic acid molecules in host cells, preferably in a plant cell or a microorganism, appropriate for producing the respective fine chemical;
[3897] (d) expressing the identified nucleic acid molecules in the host cells;
[3898] (e) assaying the respective fine chemical level in the host cells; and
[3899] (f) identifying the nucleic acid molecule and its gene product which expression confers an increase in the respective fine chemical as indicated for application no. 14 in any one of Tables I to IV level in the host cell after expression compared to the wild type.

[3900] for the disclosure of the paragraphs [0379.0.0.13] to [0383.0.0.13] see paragraphs [0379.0.0.0] to [0383.0.0.0] above.

[3901] The screen for a gene product or an agonist conferring an increase in the fine chemical production can be performed by growth of an organism for example a microorganism in the presence of growth reducing amounts of an inhibitor of the synthesis of the fine chemical. Better growth, eg higher dividing rate or high dry mass in comparison to the control under such conditions would identify a gene or gene product or an agonist conferring an increase in fine chemical production.

One can think to screen for increased fine chemical production by for example resistance to drugs blocking fine chemical synthesis and looking whether this effect is dependent on the proteins as shown in table II, application no. 14, column 3, eg comparing near identical organisms with low and high activity of the proteins as shown in table II, application no. 14, column 3.

[3902] for the disclosure of the paragraphs [0385.0.0.13] to [0416.0.0.13] see paragraphs [0385.0.0.0] to [0416.0.0.0] above.

[3903] An in vivo mutagenesis of organisms such as algae (e.g. Spongiococcum sp, e.g. Spongiococcum exentricum, Chlorella sp., Haematococcus, Phaedactylum tricornatum, Volvox or Dunaliella), Synechocystis sp. PCC 6803, Physcometrella patens, Saccharomyces, Mortierella, Escherichia and others mentioned above, which are beneficial for the production of amino acids of the invention can be carried out by passing a plasmid DNA (or another vector DNA) containing the desired nucleic acid sequence or nucleic acid sequences, e.g. the nucleic acid molecule of the invention or the vector of the invention, through E. coli and other microorganisms (for example Bacillus spp. or yeasts such as Saccharomyces cerevisiae) which are not capable of maintaining the integrity of its genetic information. Usual mutator strains have mutations in the genes for the DNA repair system [for example mutHLS, mutD, mutT and the like; for comparison, see Rupp, W. D. (1996) DNA repair mechanisms in Escherichia coli and Salmonella, pp. 2277-2294, ASM: Washington]. The skilled worker knows these strains. The use of these strains is illustrated for example in Greener, A. and Callahan, M. (1994) Strategies 7; 32-34.

In-vitro mutation methods such as increasing the spontaneous mutation rates by chemical or physical treatment are well known to the skilled person. Mutagens like 5-bromo-uracil, N-methyl-N-nitro-N-nitrosoguanidine (=NTG), ethyl methanesulfonate (=EMS), hydroxylamine and/or nitrous acid are widely used as chemical agents for random in-vitro mutagenesis. The most common physical method for mutagenesis is the treatment with UV irradiation. Another random mutagenesis technique is the error-prone PCR for introducing amino acid changes into proteins. Mutations are deliberately introduced during PCR through the use of error-prone DNA polymerases and special reaction conditions known to a person skilled in the art. For this method randomized DNA sequences are cloned into expression vectors and the resulting mutant libraries screened for altered or improved protein activity as described below.
Site-directed mutagenesis method such as the introduction of desired mutations with an M13 or phagemid vector and short oligonucleotides primers is a well-known approach for site-directed mutagenesis. The clou of this method involves cloning of the nucleic acid sequence of the invention into an M13 or phagemid vector, which permits recovery of single-stranded recombinant nucleic acid sequence. A mutagenic oligonucleotide primer is then designed whose sequence is perfectly complementary to nucleic acid sequence in the region to be mutated, but with a single difference: at the intended mutation site it bears a base that is complementary to the desired mutant nucleotide rather than the original. The mutagenic oligonucleotide is then allowed to prime new DNA synthesis to create a complementary full-length sequence containing the desired mutation. Another site-directed mutagenesis method is the PCR mismatch primer mutagenesis method also known to the skilled person. DpnI site-directed mutagenesis is a further known method as described for example in the Stratagene Quickchange™ site-directed mutagenesis kit protocol. A huge number of other methods are also known and used in common practice.
Positive mutation events can be selected by screening the organisms for the production of the desired fine chemical.

[3904] for the disclosure of the paragraphs [0418.0.0.13] to [0435.0.0.13] see paragraphs [0418.0.0.0] to [0435.0.0.0] above.

[3905] Production of Amino Acid of the Invention, Preferably 5-Oxoproline, Alanine, Aspartic Acid (Aspartate), Citrulline, Glycine, Homoserine, Phenylalanine, Serine and/or Tyrosine

The production of the amino acid of the invention can be analysed as mentioned above. The proteins and nucleic acids can be analysed as mentioned below.

[3906] for the disclosure of the paragraphs [0437.0.0.13] to [0497.0.0.13] see paragraphs [0437.0.0.0] to [0497.0.0.0] above.

[3907] The results of the different plant analyses can be seen from the table, which follows:

TABLE VI

| | | Method/ | Min.- | Max.- |
|---|---|---|---|---|
| ORF | Metabolite | Analytics | Value | Value |
| b0342 | Alanine | GC | 1.20 | 1.43 |
| b0403 | Phenylalanine | LC | 1.31 | 1.59 |
| b0628 | Homoserine | GC | 1.34 | 1.47 |
| b0754 | Phenylalanine | GC | 1.28 | 2.22 |
| b0760 | Tyrosine | GC | 1.22 | 1.37 |
| b1062 | Alanine | GC | 1.26 | 1.61 |
| b1062 | Citrulline | LC | 1.39 | 1.90 |
| b1062 | Glycine | GC | 1.51 | 1.96 |
| b1062 | Homoserine | GC | 1.26 | 2.11 |
| b1062 | Serine | GC | 1.23 | 1.48 |
| b1136 | Citrulline | LC | 1.32 | 1.60 |
| b1136 | Phenylalanine | GC | 1.35 | 2.47 |
| b1223 | Glycine | GC | 1.58 | 2.22 |
| b1223 | Phenylalanine | LC | 1.31 | 2.42 |
| b1264 | Alanine | GC | 1.21 | 1.55 |
| b1264 | Citrulline | LC | 1.38 | 1.63 |
| b1264 | Glycine | GC | 1.37 | 1.73 |
| b1264 | Homoserine | GC | 1.25 | 1.44 |
| b1264 | Serine | GC | 1.35 | 1.96 |
| b1556 | Aspartate | GC | 1.58 | 2.97 |
| b1611 | Serine | GC | 1.24 | 1.41 |
| b1640 | 5-Oxoproline | GC | 1.24 | 1.33 |
| b1640 | Aspartate | GC | 1.46 | 1.60 |
| b1704 | Phenylalanine | GC | 1.43 | 387.55 |
| b1704 | Tyrosine | GC | 11.14 | 104.59 |
| b1758 | Aspartate | GC | 1.51 | 2.09 |
| b1758 | Citrulline | LC | 1.40 | 1.96 |
| b1758 | Serine | GC | 1.24 | 1.47 |
| b2066 | Aspartate | GC | 1.48 | 2.33 |
| b2223 | Tyrosine | LC | 1.39 | 1.77 |
| b2312 | Aspartate | GC | 1.52 | 2.14 |
| b2366 | Citrulline | LC | 1.32 | 1.66 |
| b2366 | Glycine | GC | 1.43 | 1.98 |
| b2600 | Tyrosine | GC | 2.59 | 4.78 |
| b2601 | Phenylalanine | GC | 2.52 | 21.64 |
| b2601 | Tyrosine | GC | 2.32 | 16.67 |
| b2818 | Citrulline | LC | 2.81 | 4.28 |
| b2965 | Alanine | GC | 1.21 | 1.72 |
| b2965 | Glycine | GC | 1.52 | 2.98 |
| b2965 | Phenylalanine | LC | 1.31 | 3.04 |
| b2965 | Serine | GC | 1.33 | 2.93 |
| b3117 | Citrulline | LC | 1.43 | 2.66 |
| b3213 | Citrulline | LC | 1.32 | 1.56 |
| b3390 | Phenylalanine | LC | 3.41 | 3.41 |
| b3390 | Tyrosine | LC | 2.89 | 2.89 |
| b3429 | Serine | GC | 1.25 | 1.70 |
| b3616 | Homoserine | GC | 1.26 | 2.01 |
| b3616 | Serine | GC | 1.23 | 1.87 |
| b4053 | Alanine | GC | 1.35 | 2.29 |
| b4139 | Citrulline | LC | 2.45 | 6.22 |
| b4139 | Serine | GC | 2.30 | 5.78 |
| YAL038W | Alanine | GC | 1.27 | 2.70 |
| YAL038W | Phenylalanine | GC | 1.25 | 1.51 |
| YBL082C | Tyrosine | GC | 1.30 | 1.61 |
| YDR035W | Phenylalanine | GC | 1.40 | 23.44 |
| YDR035W | Tyrosine | LC | 1.43 | 6.09 |
| YDR430C | Phenylalanine | GC | 1.38 | 2.31 |
| YDR497C | Tyrosine | GC | 1.38 | 1.46 |
| YEL046C | Homoserine | GC | 1.26 | 2.17 |
| YKR043C | Phenylalanine | GC | 1.35 | 4.40 |
| YKR043C | Serine | GC | 1.26 | 1.60 |
| YLR174W | Tyrosine | GC | 1.20 | 1.25 |
| YNL241C | Alanine | GC | 1.66 | 2.15 |
| YNL241C | Tyrosine | GC | 1.29 | 1.35 |
| YNR012W | Aspartate | GC | 1.48 | 1.73 |
| YOR353C | Phenylalanine | GC | 1.41 | 2.06 |

[3908] for the disclosure of the paragraphs [0499.0.0.13] to [0554.0.0.13] see paragraphs [0551.0.0.1] to [0554.0.0.1] above.

### Example 16

### Metabolite Profiling Info from Zea mays

[3909] Zea mays plants were engineered as described in Example 15c.
Metabolic results were either obtained from regenerated primary transformants (T0) or from the following progeny generation (T1) in comparison to appropriate control plants. The results are shown in table VII as minimal (MIN) or maximal changes (MAX) in the respective fine chemical (column “metabolite”) in genetically modified corn plants expressing the sequence listed in column 1 (ORF).

TABLE VII

| ORF | Metabolite | MIN | MAX |
|---|---|---|---|
| b0754 | Phenylalanine | 1.55 | 3.25 |
| b1704 | Phenylalanine | 3.07 | 18.75 |
| b1704 | Tyrosine | 1.83 | 5.36 |
| b2066 | Aspartic acid | 1.56 | 1.78 |
| b2601 | Phenylalanine | 1.47 | 10.95 |
| b2601 | Tyrosine | 1.75 | 7.71 |
| b2818 | Citrulline | 1.96 | 2.36 |
| b4053 | Alanine | 1.58 | 2.69 |
| b4139 | Citrulline | 1.61 | 2.92 |
| b4139 | Serine | 1.45 | 1.67 |
| YAL038W | Alanine | 1.96 | 6.28 |
| YAL038W | Phenylalanine | 1.61 | 5.39 |
| YBL082C | Tyrosine | 1.40 | 4.08 |
| YDR035W | Tyrosine | 1.63 | 6.29 |
| YDR035W | Phenylalanine | 7.07 | 20.09 |
| YDR497C | Tyrosine | 1.52 | 1.64 |
| YKR043C | Serine | 1.23 | 16.90 |
| YKR043C | Phenylalanine | 4.47 | 9.96 |
| YNL241C | Tyrosine | 1.37 | 2.27 |
| YNR012W | Aspartic acid | 2.03 | 6.97 |

In one embodiment, in case the activity of the protein listed in column 1 of Table VII or its homologs, is increased in corn plants, preferably, an increase of the respective fine chemical as indicated in column 2 (Metabolite) is in the range between the minimal value shown in the line “MIN” and the maximal value shown in the line “MAX is conferred.

[3910] for the disclosure of this paragraph see [0554.2.0.0] above.

[3911] for the disclosure of this paragraph see [0555.0.0.0] above.

[3912] for the disclosure of this paragraph see [0001.0.0.0].

[3913] for the disclosure of this paragraph see [0002.0.7.7] above.

[3914] Oils and fats, which chemically are glycerol esters of fatty acids (triacylglycerols (TAGs)), play a major role in nutrition but more and more in nonfood applications such as lubricants, hydraulic oil, biofuel, or oleochemicals for coatings, plasticizer, soaps, and detergents (W. Lohs and W. Friedt, in Designer Oil Crops, D. J. Murphy, Ed. (VCH, Weinheirn, Germany, 1993)). The ideal oil for industrial application would consist of a particular type of fatty acid that could be supplied constantly at a competitively low price as compared with raw materials based on mineral oil products. Furthermore, such a fatty acid may have a reactive group in addition to the carboxyl function to provide an additional target for chemical modifications (Töpfer et al., Science, Vol. 268, 681-686, 1995).

[3915] for the disclosure of the paragraph [0004.0.7.14] see paragraph [00004.0.7.7] above.

[3916] Further sources of fatty acids are membrane lipids of organisms. Preferably lipids are phospholipids and/or glycolipids, more preferably glycerophospholipids, galactolipids and/or sphingolipids.

[3917] Margaric acid was first mentioned in the early 1800s. 1813 M. E. Chevreul discovered that fats are composed of fatty acids and named one of these “margaric acid” because it glistened with lustrous pearly drops that reminded him of the Greek word for pearl, margaron or margarites. In the middle of the 1800s W. H. Heintz showed that “margaric acid” discovered by Chevreul was an indefinite mixture of palmitic and stearic acids.

Today, the term “margaric acid” is the trivial name for heptadecanoic acid (17:0), which is naturally occurring in minor amounts.
The fatty acid with odd number of carbon atoms is present in trace amounts in plants, in triglycerides from Brazil-nut oil, Dracocephalum moldavica oil, Poppy-seed, Palm, Almond, Sunflower or Soybean. Margaric acid can be isolated from tallow (1%), specially from subcutaneous adipose tissue in subcutaneous fat from lambs.
Margaric acid can be ingredient of satiety agents or fungicide composition. It is further used as ingredient in cosmetics, pharmaceuticals and in feed and food, like baking adjuvants as disclosed in US 20030143312 or according to US 20040097392 as component in surfactant systems.
The heptadecanoic acid is mainly used as an internal standard in quantification of fatty acids. It can be further useful in treatment of neurological diseases which may be caused by yeast, fungi or prions based on yeast or fungal etiology (U.S. Pat. No. 6,652,866) or in antikeratolytic-wound healing compositions (U.S. Pat. No. 5,641,814).Heptadecanoic acid was produced up to now in higher amount primarily by organic synthesis.

[3918] 2-Hydroxy fatty acids are synthesised in animal and plant tissues, and are often major constituents of the sphingolipids. Sphingolipids with 2-hydroxy fatty acid are found in most organisms including plants, yeast, worms, vertebrate animals, and some bacterial species.

In plants more than 95% of the fatty acid component of the ceramides and sphingolipids is alpha-hydroxylated. The acyl groups of ceramides tend to consist of long-chain (C16 up to C26 but occasionally longer) odd- and even-numbered saturated or monoenoic fatty acids and related 2-D-hydroxy fatty acids, both in plant and animal tissues. Typical plant sphingolipids are made up by the long-chain sphingosine backbone which is glycosylated and amide-linked to an usually hydroxylated (very-)-long-chain fatty acid, called cerebroside. Cerebrosides are essential constituents of the plasma membrane involved in various physiological functions including signaling, exocytosis, anchoring of proteins, and vesicular protein transport (Matthes et al., Z. Naturforsch. 57C, 843-852, 2002).
In mammals, 2-hydroxysphingolipids are present abundantly in brain because the major myelin lipids galactosylceramides and sulfatides contain 2-hydroxy fatty acids. In mammals, 2-hydroxy fatty acid-containing sphingolipids are uniquely abundant in nervous and epidermal tissues. In mammalian central and peripheral nervous systems, galactosylceramides and sulfatides (3-sulfate ester of galactosylceramide) are major lipid components of myelin. These glycosphingolipids contain a high proportion (about 50%) of 2-hydroxy fatty acid and are critical components of myelin (4, 5).
In the yeast Saccharomyces cerevisiae most sphingolipids contain 2-hydroxy fatty acid. COS7 cells expressing human FA2H contained 3-20-fold higher levels of 2-hydroxyceramides (C16, C18, C24, and C24:1) and 2-hydroxy fatty acids compared with control cells (Alderson et al., J. Biol. Chem. Vol. 279, No. 47, 48562-48568, 2004).
The 2-hydroxylation occurs during de novo ceramide synthesis and is catalyzed by fatty acid 2-hydroxylase (also known as fatty acid alpha-hydroxylase). No free hydroxy fatty acid or hydroxy fatty acid CoA has ever been reported; the hydroxylated product always appeared as a component of ceramide or cerebroside (Hoshi et al., J. Biol. Chem. 248, 4123-4130, 1973). The alpha-hydroxylation involves the direct hydroxylation of a sphingolipid-bound fatty acid. (Kayal et al., J. Biol. Chem. Vol. 259, No. 6, 3548-3553, 1984).
Hydroxylated fatty acids initiate inflammation in the soft tissues and regulate the immune response.
The 2-hydroxyl group in sphingolipids has a profound effect in the lipid organization within membranes because of its hydrogenbonding capability.
Alpha-hydroxy-palmitic acid (hC 16:0) is mainly a building block of plant sphingolipids, for example soy glucosylceramide (GlcCer), which consists predominantly of a 4,8sphingadiene backbone and alpha-hydroxy-palmitic acid. Soy GlcCer suppress tumorigenesis and gene expression in mice (Symolon et al., J. Nutr. 2004 May; 134(5):1157-61).
A monoglucosecerebroside (pinelloside) with strong antimicrobial properties (against Gram-positive and -negative bacteria and against fungi) was described in the tuber of Pinella ternata (Araceae), one component of decoctions used in traditional Chinese medicine (Chen et al., Phytochemistry 2003, 64, 903). Its structure was shown to include a glucose moiety and the unusual 4,11-sphingadienine linked to a 2-hydroxy-palmitic acid.
Another hydroxylated fatty acid being a building block of cerrebrosides is the 2-hydroxy-nervonic acid (2-OH-C24:1). 2-hydroxy-15-tetracosenoic acid (hydroxynervonic acid) is constituent of the ceramide part of cerebrosides (glycosphingolipides found mainly in nervous tissue and in little amount in plants). The occurrence of 2-hydroxy nervonic acid is characteristic for the leaf cerebrosides of some chilling-resistant cereals (Sperling et al., BBA 1632, 1-15, 2003).
The hydroxylated fatty acid may be used in a method for producing fats or oils according to US 20030054509 or in lanolin-free cosmetic composition according to US 20040166130.

[3919] Monounsaturated fatty acids most frequently occur in higher concentrations in plant foods such as olive oil, most nuts, and avocados. When contrasted to saturated fatty acids, dietary monounsaturated fatty acids are healthful because they lower blood cholesterol concentrations, specially they help lower LDL-cholesterol when they are substituted for foods high in saturated fat.

Oleic acid, a nonessential fatty acid with one double bond is the most common dietary monounsaturated, it is the major fatty acid in olive oil and canola oil.
There is evidence that oleic acid, found in the olive oil or carp oil, may have a important role in treating cancer, due to its antitumor and antimetastatic effects (Annals of Oncology. 2005 and Kimura et al., J. Nutr. 132:2069-2075, 2002).
Oleic acid is also used to reduce the population of the bacterial flora of poultry skin as reported by Hinton et al., J Food Prot. 2000 September; 63(9):1282-6. His findings indicate that oleic acid reduces the number of bacteria on the skin of processed broilers and that the fatty acid is bactericidal to several spoilage and pathogenic bacteria associated with poultry.
Oleic acid may be also used in making soap and cosmetics and ointments and lubricating oils or electrical insulation fluids (U.S. Pat. No. 6,645,404).
Further monounsaturated fatty acids are prevalent in most diets because of the widespread use of hydrogenated oils by manufacturers of margarine, bakery products, and peanut butters. One of them is headecenoic acid. Specially the 9-hexadecenoic acid is to be found in the two isoforms cis and trans, also known as palmitoleic and palmitelaidic acid respectively. Okuyama et al. report high level of a 9-trans-hexadecenoic acid (C 16:1 9t) found in the phospholipids of a psychrophilic bacterium, Vibrio sp. strain ABE-1 cultivated at 20° C. (Journal of Bacteriology 172(6) 3515-3518). The same author further reports the cis/trans isomerization of the double bond the fatty acid (Biochim Biophys Acta. 1991 Jun. 19; 1084(1):13-20). The isomerase which catalyzes the cis-trans conversion of the abundant unsaturated membrane fatty acids 9-cis-hexadecenoic acid in Pseudomonas oleovorans was identified by Pedrotta et al. (J Bacteriol. 1999 May; 181(10): 3256-3261).A

[3920] Whether oils with unsaturated or with saturated fatty acids are preferred depends on the intended purpose; thus, for example, lipids with unsaturated fatty acids, specifically polyunsaturated fatty acids, are preferred in human nutrition since they have a positive effect on the cholesterol level in the blood and thus on the possibility of heart disease. They are used in a variety of dietetic foodstuffs or medicaments. In addition PUFAs are commonly used in food, feed and in the cosmetic industry. Poly unsaturated ω-3- and/or ω-6-fatty acids are an important part of animal feed and human food. Because of the common composition of human food polyunsaturated ω-3fatty acids, which are an essential component of fish oil, should be added to the food to increase the nutritional value of the food; thus, for example, polyunsaturated fatty acids such as DHA or EPA are added as mentioned above to infant formula to increase its nutritional value. The true essential fatty acids linoleic and linolenic fatty acid have a lot of positive effects in the human body such as a positive effect on healthy heart, arteries and skin. They bring for example relieve from eczema, diabetic neuropathy or PMS and cyclical breast pain.

[3921] Further poly unsaturated ω-3- and/or ω-6-fatty acids important part of animal feed and human food are delta 7, 10 hexadecadienic acid (16:2(n-6)) and delta 7, 10, 13 hexadecatrienic acid (16:3(n-3)).

Hexadecadienic acid is a minor component of some seed and fish oils, and of plant leaves but the precursor of hexadecatrienic acid 16:3(n-3), which is a common constituent of leaf lipids. This acid is known to occur in photosynthetic leaves, such as for example Arabidopsis thaliana, rape leaves, fern lipid, ginko leaves, potato leaves, tomato leaves and spinach. It may also occur in the leaves of Brassicaceae plants, such as horse radish, cabbage, turnip, Chinese mustard, cauliflower and watercress.
In higher plants, the galactolipids contain a high proportion of polyunsaturated fatty acids, up to 95% of which can be linolenic acid (18:3(n-3)). In this instance, the most abundant molecular species of mono- and digalactosyldiacylglycerols must have 18:3 at both sn-I and sn-2 positions of the glycerol backbone. Plants such as the pea, which have 18:3 as almost the only fatty acid in the monogalactosyldiacylglycerols, have been termed “18:3 plants”. Other species, and Arabidopsis thaliana is an example, contain appreciable amounts of hexadecatrienoic acid (16:3(n-3)) in the monogalactosyldiacylglycerols, and they are termed “16:3 plants”.
As mentioned, polyunsaturated fatty acid are further used in the cosmetic industry. The application US 20030039672 discloses a cosmetic method for treating aged, sensitive, dry, flaky, wrinkled and/or photodamaged skin through topical application of a composition which comprises an unsaturated C16 fatty acid having at least three double bonds, which may be preferably hexadecatrienoic acid.

[3922] for the disclosure of this paragraph see [0009.0.7.7] above.

[3923] for the disclosure of this paragraph see [0010.0.7.7] above.

[3924] for the disclosure of this paragraph see [0011.0.7.7] above.

[3925] for the disclosure of this paragraph see [0012.0.7.7] above.

[3926] for the disclosure of this paragraph see [0013.0.0.0] above.

[3927] Accordingly, in a first embodiment, in context of paragraphs [0001.n.n.14] to [0555.n.n.14] the invention relates to a process for the production of a fine chemical, whereby the fine chemical is

hexadecenoic acid, preferably 9-hexadecenoic acid, more preferably trans-9hexadecenoic acid ((E)-9-Hexadecenoic acid; palmitelaidic acid; trans-9-hexadecenoic acid; trans-palmitoleic acid, CAS Registry No.: 10030-73-6) and/or
2-hydroxy palmitic acid (2-OH-C16:0, alfa-hydroxy palmitic acid, C16:0 OH) and/or heptadecanoic acid (C17:0, margaric acid) and/or
2-hydroxy-tetracosenoic-acid, preferably 2-hydroxy-15-tetracosenoic acid (hydroxynervonic acid, alfa-hydroxy-tetracosenoic-acid, C24:1 (n-9) OH, 2-hydroxy-cis 9tetracosenoic-acid, delta 9 hydroxy-tetracosenoic-acid) and/or
hexadecadienoic acid, preferably delta 7,10 hexadecadienoic acid (C16:2 (n-6), cis 7cis 10-hexadecadienoic acid) and/or
octadecenoic acid, preferably 9-Octadecenoic acid, more preferably (Z)-9-octadecenoic acid (9-Octadecenoic acid, (Z)-; oleic acid) and/or
hexadecatrienoic acid, preferably delta 7,10,13 hexadecatrienoic acid (C16:3 (n-3), cis 7-cis 10-cis 13-hexadecatrienoic acid, hiragonic acid)
or tryglycerides, lipids, oils or fats containing
hexadecenoic acid, preferably 9-hexadecenoic acid, more preferably trans-9hexadecenoic acid ((E)-9-Hexadecenoic acid; palmitelaidic acid; trans-9-hexadecenoic acid; trans-palmitoleic acid, CAS Registry No.: 10030-73-6) and/or
2-hydroxy palmitic acid (2-0H-C16:0, alfa-hydroxy palmitic acid, C16:0 OH) and/or heptadecanoic acid (C17:0, margaric acid) and/or
2-hydroxy-tetracosenoic-acid, preferably 2-hydroxy-15-tetracosenoic acid (hydroxynervonic acid, alfa-hydroxy-tetracosenoic-acid, C24:1 (n-9) OH, 2-hydroxy-cis 9tetracosenoic-acid, delta 9 hydroxy-tetracosenoic-acid) and/or
hexadecadienoic acid, preferably delta 7,10 hexadecadienoic acid (C16:2 (n-6), cis 7cis 10-hexadecadienoic acid) and/or
octadecenoic acid, preferably 9-Octadecenoic acid, more preferably (Z)-9-octadecenoic acid (9-Octadecenoic acid, (Z)-; oleic acid) and/or
hexadecatrienoic acid, preferably delta 7,10,13 hexadecatrienoic acid (C16:3 (n-3), cis 7-cis 10-cis 13-hexadecatrienoic acid, hiragonic acid).
Accordingly, in the present invention of paragraphs [0001.n.n.14] to [0555.n.n.14], the term “the fine chemical” as used herein relates to
“hexadecenoic acid”, preferably “9-hexadecenoic acid”, more preferably “trans-9hexadecenoic acid” and/or
“2-hydroxy palmitic acid” and/or
“heptadecanoic acid” and/or
“2-hydroxy-tetracosenoic-acid”, preferably “2-hydroxy-15-tetracosenoic acid” and/or
“hexadecadienoic acid”, preferably “delta 7,10 hexadecadienoic acid” and/or
“octadecenoic acid”, preferably “9-Octadecenoic acid”, more preferably “(Z)-9-octadecenoic acid” and/or
“hexadecatrienoic acid, preferably delta 7,10,13 hexadecatrienoic acid”
or “tryglycerides, lipids, oils or fats containing hexadecenoic acid, preferably 9hexadecenoic acid, more preferably trans-9-hexadecenoic acid and/or
2-hydroxy palmitic acid and/or
heptadecanoic acid and/or
2-hydroxy-tetracosenoic-acid, preferably 2-hydroxy-15-tetracosenoic acid and/or
hexadecadienoic acid, preferably delta 7,10 hexadecadienoic acid (C16:2 (n-6), cis 7cis 10-hexadecadienoic acid) and/or
octadecenoic acid, preferably 9-Octadecenoic acid, more preferably (Z)-9-octadecenoic acid and/or
hexadecatrienoic acid, preferably delta 7,10,13 hexadecatrienoic acid”. Further, the term “the fine chemicals” as used herein also relates to fine chemicals comprising hexadecenoic acid, preferably 9-hexadecenoic acid, more preferably trans-9hexadecenoic acid and/or
2-hydroxy palmitic acid and/or
heptadecanoic acid and/or
2-hydroxy-tetracosenoic-acid, preferably 2-hydroxy-15-tetracosenoic acid and/or
hexadecadienoic acid, preferably delta 7,10 hexadecadienoic acid (C16:2 (n-6), cis 7cis 10-hexadecadienoic acid) and/or
octadecenoic acid, preferably 9-Octadecenoic acid, more preferably (Z)-9-octadecenoic acid and/or
hexadecatrienoic acid, preferably delta 7,10,13 hexadecatrienoic acid or tryglycerides, lipids, oils or fats containing hexadecenoic acid, preferably 9-hexadecenoic acid, more preferably trans-9-hexadecenoic acid and/or
2-hydroxy palmitic acid and/or
heptadecanoic acid and/or
2-hydroxy-tetracosenoic-acid, preferably 2-hydroxy-15-tetracosenoic acid and/or
hexadecadienoic acid, preferably delta 7,10 hexadecadienoic acid (C16:2 (n-6), cis 7cis 10-hexadecadienoic acid) and/or
octadecenoic acid, preferably 9-Octadecenoic acid, more preferably (Z)-9-octadecenoic acid and/or
hexadecatrienoic acid, preferably delta 7,10,13 hexadecatrienoic acid.

[3928] In one embodiment, the term “the fine chemical” or “the respective fine chemical” means hexadecenoic acid, preferably 9-hexadecenoic acid, more preferably trans-9-hexadecenoic acid and/or

2-hydroxy palmitic acid and/or
heptadecanoic acid and/or
2-hydroxy-tetracosenoic-acid, preferably 2-hydroxy-15-tetracosenoic acid and/or
hexadecadienoic acid, preferably delta 7,10 hexadecadienoic acid (C16:2 (n-6), cis 7cis 10-hexadecadienoic acid) and/or
octadecenoic acid, preferably 9-Octadecenoic acid, more preferably (Z)-9-octadecenoic acid and/or
hexadecatrienoic acid, preferably delta 7,10,13 hexadecatrienoic acid or tryglycerides, lipids, oils or fats containing hexadecenoic acid, preferably 9-hexadecenoic acid, more preferably trans-9-hexadecenoic acid and/or
2-hydroxy palmitic acid and/or
heptadecanoic acid and/or
2-hydroxy-tetracosenoic-acid, preferably 2-hydroxy-15-tetracosenoic acid and/or hexadecadienoic acid, preferably delta 7,10 hexadecadienoic acid (C16:2 (n-6), cis 7cis 10-hexadecadienoic acid) and/or
octadecenoic acid, preferably 9-Octadecenoic acid, more preferably (Z)-9-octadecenoic acid and/or
hexadecatrienoic acid, preferably delta 7,10,13 hexadecatrienoic acid. Throughout the specification of paragraphs [0001.n.n.14] to [0555.n.n.14] the term “the fine chemical” of paragraphs [0001.n.n.14] to [0555.n.n.14] or “the respective fine chemical” of paragraphs [0001.n.n.14] to [0555.n.n.14] means hexadecenoic acid, preferably 9hexadecenoic acid, more preferably trans-9-hexadecenoic acid and/or
2-hydroxy palmitic acid and/or
heptadecanoic acid and/or
2-hydroxy-tetracosenoic-acid, preferably 2-hydroxy-15-tetracosenoic acid and/or
hexadecadienoic acid, preferably delta 7,10 hexadecadienoic acid (C16:2 (n-6), cis 7cis 10-hexadecadienoic acid) and/or
octadecenoic acid, preferably 9-Octadecenoic acid, more preferably (Z)-9-octadecenoic acid and/or
hexadecatrienoic acid, preferably delta 7,10,13 hexadecatrienoic acid or tryglycerides, lipids, oils or fats containing hexadecenoic acid, preferably 9-hexadecenoic acid, more preferably trans-9-hexadecenoic acid and/or
2-hydroxy palmitic acid and/or
heptadecanoic acid and/or
2-hydroxy-tetracosenoic-acid, preferably 2-hydroxy-15-tetracosenoic acid and/or
hexadecadienoic acid, preferably delta 7,10 hexadecadienoic acid (C16:2 (n-6), cis 7cis 10-hexadecadienoic acid) and/or
octadecenoic acid, preferably 9-Octadecenoic acid, more preferably (Z)-9-octadecenoic acid and/or
hexadecatrienoic acid, preferably delta 7,10,13 hexadecatrienoic acid, and the salts, ester, thioester of hexadecenoic acid, preferably 9-hexadecenoic acid, more preferably trans-9-hexadecenoic acid and/or
2-hydroxy palmitic acid and/or
heptadecanoic acid and/or
2-hydroxy-tetracosenoic-acid, preferably 2-hydroxy-15-tetracosenoic acid and/or
hexadecadienoic acid, preferably delta 7,10 hexadecadienoic acid (C16:2 (n-6), cis 7cis 10-hexadecadienoic acid) and/or
octadecenoic acid, preferably 9-Octadecenoic acid, more preferably (Z)-9-octadecenoic acid and/or
hexadecatrienoic acid, preferably delta 7,10,13 hexadecatrienoic acid or hexadecenoic acid, preferably 9-hexadecenoic acid, more preferably trans-9hexadecenoic acid and/or
2-hydroxy palmitic acid and/or
heptadecanoic acid and/or
2-hydroxy-tetracosenoic-acid, preferably 2-hydroxy-15-tetracosenoic acid and/or
hexadecadienoic acid, preferably delta 7,10 hexadecadienoic acid (C16:2 (n-6), cis 7cis 10-hexadecadienoic acid) and/or
octadecenoic acid, preferably 9-Octadecenoic acid, more preferably (Z)-9-octadecenoic acid and/or
hexadecatrienoic acid, preferably delta 7,10,13 hexadecatrienoic acid in free form or bound to other compounds such as triglycerides, glycolipids, phospholipids etc. In a preferred embodiment, the term “the fine chemical” of paragraphs [0001.n.n.14] to [0555.n.n.14] means hexadecenoic acid, preferably 9-hexadecenoic acid, more preferably trans-9-hexadecenoic acid and/or
2-hydroxy palmitic acid and/or
heptadecanoic acid and/or
2-hydroxy-tetracosenoic-acid, preferably 2-hydroxy-15-tetracosenoic acid and/or
hexadecadienoic acid, preferably delta 7,10 hexadecadienoic acid (C16:2 (n-6), cis 7cis 10-hexadecadienoic acid) and/or
octadecenoic acid, preferably 9-Octadecenoic acid, more preferably (Z)-9-octadecenoic acid and/or
hexadecatrienoic acid, preferably delta 7,10,13 hexadecatrienoic acid, in free form or its salts or bound to triglycerides. Triglycerides, lipids, oils, fats or lipid mixture thereof shall mean any triglyceride, lipid, oil and/or fat containing any bound or free hexadecenoic acid, preferably 9-hexadecenoic acid, more preferably trans-9-hexadecenoic acid and/or
2-hydroxy palmitic acid and/or
heptadecanoic acid and/or
2-hydroxy-tetracosenoic-acid, preferably 2-hydroxy-15-tetracosenoic acid and/or
hexadecadienoic acid, preferably delta 7,10 hexadecadienoic acid (C16:2 (n-6), cis 7cis 10-hexadecadienoic acid) and/or
octadecenoic acid, preferably 9-Octadecenoic acid, more preferably (Z)-9-octadecenoic acid and/or
hexadecatrienoic acid, preferably delta 7,10,13 hexadecatrienoic acid for example sphingolipids, phosphoglycerides, lipids, glycolipids such as glycosphingolipids, phospholipids such as phosphatidylethanolamine, phosphatidylcholine, phosphatidylserine, phosphatidylglycerol, phosphatidylinositol or diphosphatidylglycerol, or as monoacylglyceride, diacylglyceride or triacylglyceride or other fatty acid esters such as acetyl Coenzym A thioester, which contain further saturated or unsaturated fatty acids in the fatty acid molecule.
In one embodiment, the term “the fine chemical” and the term “the respective fine chemical” mean at least one chemical compound with an activity of the abovementioned fine chemical.

[3929] Accordingly, the present invention relates to a process for the production of hexadecenoic acid, preferably 9-hexadecenoic acid, more preferably trans-9hexadecenoic acid and/or

2-hydroxy palmitic acid and/or
heptadecanoic acid and/or
2-hydroxy-tetracosenoic-acid, preferably 2-hydroxy-15-tetracosenoic acid and/or
hexadecadienoic acid, preferably delta 7,10 hexadecadienoic acid (C16:2 (n-6), cis 7cis 10-hexadecadienoic acid) and/or
octadecenoic acid, preferably 9-Octadecenoic acid, more preferably (Z)-9-octadecenoic acid and/or
hexadecatrienoic acid, preferably delta 7,10,13 hexadecatrienoic acid, which comprises
(a) increasing or generating the activity of a protein as shown in table II, application no. 15, column 3 encoded by the nucleic acid sequences as shown in table I, application no. 15, column 5, in an organelle of a microorganism or plant, or
(b) increasing or generating the activity of a protein as shown in table II, application no. 15, column 3 encoded by the nucleic acid sequences as shown in table I, application no. 15, column 5 in the plastid of a microorganism or plant, or in one or more parts thereof; and
(b) growing the organism under conditions which permit the production of the fine chemical, thus, hexadecenoic acid, preferably 9-hexadecenoic acid, more preferably trans-9-hexadecenoic acid and/or
2-hydroxy palmitic acid and/or
heptadecanoic acid and/or
2-hydroxy-tetracosenoic-acid, preferably 2-hydroxy-15-tetracosenoic acid and/or
hexadecadienoic acid, preferably delta 7,10 hexadecadienoic acid (C16:2 (n-6), cis 7cis 10-hexadecadienoic acid) and/or
octadecenoic acid, preferably 9-Octadecenoic acid, more preferably (Z)-9-octadecenoic acid and/or
hexadecatrienoic acid, preferably delta 7,10,13 hexadecatrienoic acid or fine chemicals comprising hexadecenoic acid, preferably 9-hexadecenoic acid, more preferably trans-9-hexadecenoic acid and/or
2-hydroxy palmitic acid and/or
heptadecanoic acid and/or
2-hydroxy-tetracosenoic-acid, preferably 2-hydroxy-15-tetracosenoic acid and/or
hexadecadienoic acid, preferably delta 7,10 hexadecadienoic acid (C16:2 (n-6), cis 7cis 10-hexadecadienoic acid) and/or
octadecenoic acid, preferably 9-Octadecenoic acid, more preferably (Z)-9-octadecenoic acid and/or
hexadecatrienoic acid, preferably delta 7,10,13 hexadecatrienoic acid, in said organism or in the culture medium surrounding the organism.

[3930] Accordingly, the term “the fine chemical” means in one embodiment “hexadecenoic acid, preferably 9-hexadecenoic acid, more preferably trans-9hexadecenoic acid” in relation to all sequences listed in Table I to IV, lines 182 to 183 or homologs thereof;

and means in one embodiment “2-hydroxy palmitic acid” in relation to all sequences listed in Tables I to IV, lines 184 to 189 or homologs thereof;
and means in one embodiment “heptadecanoic acid” in relation to all sequences listed in Tables I to IV, line 190 or homologs thereof;
and means in one embodiment “2-hydroxy-tetracosenoic-acid” in relation to all sequences listed in Table I, lines 191 to 202, or homologs thereof;
and means in one embodiment “hexadecadienoic acid” in relation to all sequences listed in Table I to IV, lines 203 to 206 or homologs thereof;
and means in one embodiment “octadecenoic acid, preferably 9-Octadecenoic acid, more preferably (Z)-9-octadecenoic acid” in relation to all sequences listed in Table I, lines 207, or homologs thereof;
and means in one embodiment “hexadecatrienoic acid, preferably delta 7,10,13 hexadecatrienoic acid” in relation to all sequences listed in Table I to IV, lines 208 to 210 or homologs thereof.
Accordingly, in one embodiment the term “the fine chemical” means “hexadecenoic acid, preferably 9-hexadecenoic acid, more preferably trans-9-hexadecenoic acid” and “2-hydroxy-tetracosenoic-acid, preferably 2-hydroxy-15-tetracosenoic acid” in relation to all sequences listed in Table I to IV, lines 183 and 201. In one embodiment the term “the fine chemical” means “2-hydroxy palmitic acid” and “2-hydroxy-tetracosenoic-acid, preferably 2-hydroxy-15-tetracosenoic acid” in relation to all sequences listed in Table I to IV, lines 185 and 194. In one embodiment the term “the fine chemical” means “2-hydroxy palmitic acid” and “oleic acid” in relation to all sequences listed in Table I to IV, lines 187 and 207. In one embodiment the term “the fine chemical” means any combination of two or all three fine chemicals selected from the group consisting of “2-hydroxy palmitic acid” and “hexadecadienoic acid, preferably delta 7,10 hexadecadienoic acid” and/or “hexadecatrienoic acid, preferably delta 7,10,13 hexadecatrienoic acid” in relation to all sequences listed in Table I to IV, lines 189, 204 and 209. In one embodiment the term “the fine chemical” means “hexadecadienoic acid, preferably delta 7,10 hexadecadienoic acid” and/or “hexadecatrienoic acid, preferably delta 7,10,13 hexadecatrienoic acid” in relation to all sequences listed in Table I to IV, lines 203 and 208. In one embodiment the term “the fine chemical” means “hexadecadienoic acid, preferably delta 7,10 hexadecadienoic acid” and/or “hexadecatrienoic acid, preferably delta 7,10,13 hexadecatrienoic acid” in relation to all sequences listed in Table I to IV, lines 206 and 210.
Accordingly, the term “the fine chemical” can mean “hexadecenoic acid”, preferably “9hexadecenoic acid”, more preferably “trans-9-hexadecenoic acid” and/or
“2-hydroxy palmitic acid” and/or
“heptadecanoic acid” and/or
“2-hydroxy-tetracosenoic-acid”, preferably “2-hydroxy-15-tetracosenoic acid” and/or
“hexadecadienoic acid”, preferably “delta 7,10 hexadecadienoic acid” and/or
“octadecenoic acid”, preferably “9-Octadecenoic acid”, more preferably “(Z)-9-octadecenoic acid” and/or
“hexadecatrienoic acid, preferably delta 7,10,13 hexadecatrienoic acid”,
owing to circumstances and the context. In order to illustrate that the meaning of the term “the fine chemical” means “hexadecenoic acid”, preferably “9-hexadecenoic acid”, more preferably “trans-9-hexadecenoic acid” and/or
“2-hydroxy palmitic acid” and/or
“heptadecanoic acid” and/or
“2-hydroxy-tetracosenoic-acid”, preferably “2-hydroxy-15-tetracosenoic acid” and/or
“hexadecadienoic acid”, preferably “delta 7,10 hexadecadienoic acid” and/or
“octadecenoic acid”, preferably “9-Octadecenoic acid”, more preferably “(Z)-9-octadecenoic acid” and/or
“hexadecatrienoic acid, preferably delta 7,10,13 hexadecatrienoic acid” the term “the respective fine chemical” is also used.

[3931] In another embodiment the present invention is related to a process for the production of hexadecenoic acid, preferably 9-hexadecenoic acid, more preferably trans-9-hexadecenoic acid and/or

2-hydroxy palmitic acid and/or
heptadecanoic acid and/or
2-hydroxy-tetracosenoic-acid, preferably 2-hydroxy-15-tetracosenoic acid and/or
hexadecadienoic acid, preferably delta 7,10 hexadecadienoic acid (C16:2 (n-6), cis 7cis 10-hexadecadienoic acid) and/or
octadecenoic acid, preferably 9-Octadecenoic acid, more preferably (Z)-9-octadecenoic acid and/or
hexadecatrienoic acid, preferably delta 7,10,13 hexadecatrienoic acid, which comprises
[3932] (a) increasing or generating the activity of a protein as shown in table II, application no. 15, column 3 encoded by the nucleic acid sequences as shown in table I, application no. 15, column 5, in an organelle of a non-human organism, or
[3933] (b) increasing or generating the activity of a protein as shown in table II, application no. 15, column 3 encoded by the nucleic acid sequences as shown in table I, application no. 15, column 5, which are joined to a nucleic acid sequence encoding a transit peptide in a non-human organism, or in one or more parts thereof; or
[3934] (c) increasing or generating the activity of a protein as shown in table II, application no. 15, column 3 encoded by the nucleic acid sequences as shown in table I, application no. 15, column 5, which are joined to a nucleic acid sequence encoding chloroplast localization sequence, in a non-human organism, or in one or more parts thereof, and
[3935] (d) growing the organism under conditions which permit the production of hexadecenoic acid, preferably 9-hexadecenoic acid, more preferably trans-9hexadecenoic acid and/or
   2-hydroxy palmitic acid and/or
   heptadecanoic acid and/or
   2-hydroxy-tetracosenoic-acid, preferably 2-hydroxy-15-tetracosenoic acid and/or hexadecadienoic acid, preferably delta 7,10 hexadecadienoic acid (C16:2 (n-6), cis 7-cis 10-hexadecadienoic acid) and/or
   octadecenoic acid, preferably 9-Octadecenoic acid, more preferably (Z)-9-octadecenoic acid and/or
   hexadecatrienoic acid, preferably delta 7,10,13 hexadecatrienoic acid in said organism.

[3936] In another embodiment, the present invention relates to a process for the production of hexadecenoic acid, preferably 9-hexadecenoic acid, more preferably trans-9-hexadecenoic acid and/or

2-hydroxy palmitic acid and/or
heptadecanoic acid and/or
2-hydroxy-tetracosenoic-acid, preferably 2-hydroxy-15-tetracosenoic acid and/or hexadecadienoic acid, preferably delta 7,10 hexadecadienoic acid (C16:2 (n-6), cis 7cis 10-hexadecadienoic acid) and/or
octadecenoic acid, preferably 9-Octadecenoic acid, more preferably (Z)-9-octadecenoic acid and/or
hexadecatrienoic acid, preferably delta 7,10,13 hexadecatrienoic acid, which comprises
[3937] (a) increasing or generating the activity of a protein as shown in table II, application no. 15, column 3 encoded by the nucleic acid sequences as shown in table I, application no. 15, column 5, in an organelle of a microorganism or plant through the transformation of the organelle, or
[3938] (b) increasing or generating the activity of a protein as shown in table II, application no. 15, column 3 encoded by the nucleic acid sequences as shown in table I, application no. 15, column 5 in the plastid of a microorganism or plant, or in one or more parts thereof through the transformation of the plastids; and
[3939] (c) growing the organism under conditions which permit the production of the fine chemical, thus, hexadecenoic acid, preferably 9-hexadecenoic acid, more preferably trans-9-hexadecenoic acid and/or
   [3940] 2-hydroxy palmitic acid and/or
   [3941] heptadecanoic acid and/or
   [3942] 2-hydroxy-tetracosenoic-acid, preferably 2-hydroxy-15-tetracosenoic acid and/or
   [3943] hexadecadienoic acid, preferably delta 7,10 hexadecadienoic acid (C16:2 (n-6), cis 7-cis 10-hexadecadienoic acid) and/or
   [3944] octadecenoic acid, preferably 9-Octadecenoic acid, more preferably (Z)-9-octadecenoic acid and/or
   [3945] hexadecatrienoic acid, preferably delta 7,10,13 hexadecatrienoic acid or fine chemicals comprising hexadecenoic acid, preferably 9-hexadecenoic acid, more preferably trans-9-hexadecenoic acid and/or
   [3946] 2-hydroxy palmitic acid and/or
   [3947] heptadecanoic acid and/or
   [3948] 2-hydroxy-tetracosenoic-acid, preferably 2-hydroxy-15-tetracosenoic acid and/or
   [3949] hexadecadienoic acid, preferably delta 7,10 hexadecadienoic acid (C16:2 (n-6), cis 7-cis 10-hexadecadienoic acid) and/or
   [3950] octadecenoic acid, preferably 9-Octadecenoic acid, more preferably (Z)-9-octadecenoic acid and/or
   [3951] hexadecatrienoic acid, preferably delta 7,10,13 hexadecatrienoic acid acid, in said organism or in the culture medium surrounding the organism.

[3952] Advantageously the activity of the protein as shown in table II, application no. 15, column 3 encoded by the nucleic acid sequences as shown in table I, application no. 15, column 5 is increased or generated in the abovementioned process in the plastid of a microorganism or plant.

[3953] for the disclosure of the paragraphs [0019.0.0.14] to [0024.0.0.14] see paragraphs [0019.0.0.0] and [0024.0.0.0] above.

[3954] Even more preferred nucleic acid sequences are encoding transit peptides as disclosed by von Heijne et al. [Plant Molecular Biology Reporter, Vol. 9 (2), 1991: 104-126], which are hereby incorporated by reference. Table V shows some examples of the transit peptide sequences disclosed by von Heijne et al. According to the disclosure of the invention especially in the examples the skilled worker is able to link other nucleic acid sequences disclosed by von Heijne et al. to the nucleic acid sequences shown in table I, application no. 15, columns 5 and 7. Most preferred nucleic acid sequences encoding transit peptides are derived from the genus Spinacia such as chloroplast 30S ribosomal protein PSrp-1, root acyl carrier protein II, acyl carrier protein, ATP synthase: γ subunit, ATP synthase: δ subunit, cytochrom f, ferredoxin I, ferredoxin NADP oxidoreductase (=FNR), nitrite reductase, phosphoribulokinase, plastocyanin or carbonic anhydrase. The skilled worker will recognize that various other nucleic acid sequences encoding transit peptides can easily isolated from plastid-localized proteins, which are expressed from nuclear genes as precursors and are then targeted to plastids. Such transit peptides encoding sequences can be used for the construction of other expression constructs. The transit peptides advantageously used in the inventive process and which are part of the inventive nucleic acid sequences and proteins are typically 20 to 120 amino acids, preferably 25 to 110, 30 to 100 or 35 to 90 amino acids, more preferably 40 to 85 amino acids and most preferably 45 to 80 amino acids in length and functions post-translationally to direct the protein to the plastid preferably to the chloroplast. The nucleic acid sequences encoding such transit peptides are localized upstream of nucleic acid sequence encoding the mature protein. For the correct molecular joining of the transit peptide encoding nucleic acid and the nucleic acid encoding the protein to be targeted it is sometimes necessary to introduce additional base pairs at the joining position, which forms restriction enzyme recognition sequences useful for the molecular joining of the different nucleic acid molecules. This procedure might lead to very few additional amino acids at the N-terminal of the mature imported protein, which usually and preferably do not interfere with the protein function. In any case, the additional base pairs at the joining position which forms restriction enzyme recognition sequences have to be chosen with care, in order to avoid the formation of stop codons or codons which encode amino acids with a strong influence on protein folding, like e.g. proline. It is preferred that such additional codons encode small n.d. structural flexible amino acids such as glycine or alanine.

[3955] As mentioned above the nucleic acid sequences coding for the proteins as shown in table II, application no. 15, column 3 and its homologs as disclosed in table I, application no. 15, columns 5 and 7 are joined to a nucleic acid sequence encoding a transit peptide, This nucleic acid sequence encoding a transit peptide ensures transport of the protein to the plastid. The nucleic acid sequence of the gene to be expressed and the nucleic acid sequence encoding the transit peptide are operably linked. Therefore the transit peptide is fused in frame to the nucleic acid sequence coding for proteins as shown in table II, application no. 15, column 3 and its homologs as disclosed in table I, application no. 15, columns 5 and 7.

[3956] for the disclosure of the paragraphs [0027.0.0.14] to [0029.0.0.14] see paragraphs [0027.0.0.0] and [0029.0.0.0] above.

[3957] Alternatively, nucleic acid sequences coding for the transit peptides may be chemically synthesized either in part or wholly according to structure of transit peptide sequences disclosed in the prior art. Said natural or chemically synthesized sequences can be directly linked to the sequences encoding the mature protein or via a linker nucleic acid sequence, which may be typically less than 500 base pairs, preferably less than 450, 400, 350, 300, 250 or 200 base pairs, more preferably less than 150, 100, 90, 80, 70, 60, 50, 40 or 30 base pairs and most preferably less than 25, 20, 15, 12, 9, 6 or 3 base pairs in length and are in frame to the coding sequence. Furthermore favorable nucleic acid sequences encoding transit peptides may comprise sequences derived from more than one biological and/or chemical source and may include a nucleic acid sequence derived from the amino-terminal region of the mature protein, which in its native state is linked to the transit peptide. In a preferred embodiment of the invention said amino-terminal region of the mature protein is typically less than 150 amino acids, preferably less than 140, 130, 120, 110, 100 or 90 amino acids, more preferably less than 80, 70, 60, 50, 40, 35, 30, 25 or 20 amino acids and most preferably less than 19, 18, 17, 16, 15, 14, 13, 12, 11 or 10 amino acids in length. But even shorter or longer stretches are also possible. In addition target sequences, which facilitate the transport of proteins to other cell compartments such as the vacuole, endoplasmic reticulum, Golgi complex, glyoxysomes, peroxisomes or mitochondria may be also part of the inventive nucleic acid sequence. The proteins translated from said inventive nucleic acid sequences are a kind of fusion proteins that means the nucleic acid sequences encoding the transit peptide for example the ones shown in table V, preferably the last one of the table are joint to the nucleic acid sequences shown in table I, application no. 15, columns 5 and 7. The person skilled in the art is able to join said sequences in a functional manner. Advantageously the transit peptide part is cleaved off from the protein part shown in table II, application no. 15, columns 5 and 7 during the transport preferably into the plastids. All products of the cleavage of the preferred transit peptide shown in the last line of table V have preferably the N-terminal amino acid sequences QIA CSS or QIA EFQLTT in front of the start methionine of the protein mentioned in table II, application no. 15, columns 5 and 7. Other short amino acid sequences of an range of 1 to 20 amino acids preferable 2 to 15 amino acids, more preferable 3 to 10 amino acids most preferably 4 to 8 amino acids are also possible in front of the start methionine of the protein mentioned in table II, application no. 15, columns 5 and 7. In case of the amino acid sequence QIA CSS the three amino acids in front of the start methionine are stemming from the LIC (=ligatation independent cloning) cassette. Said short amino acid sequence is preferred in the case of the expression of E. coli genes. In case of the amino acid sequence QIA EFQLTT the six amino acids in front of the start methionine are stemming from the LIC cassette. Said short amino acid sequence is preferred in the case of the expression of S. cerevisiae genes. The skilled worker knows that other short sequences are also useful in the expression of the genes mentioned in table I, application no. 15, columns 5 and 7. Furthermore the skilled worker is aware of the fact that there is not a need for such short sequences in the expression of the genes.

[3958] Table V: Examples of transit peptides disclosed by von Heijne et al.: for the disclosure of the Table V see paragraphs [0030.2.0.0] above.

[3959] Alternatively to the targeting of the sequences shown in table II, application no. 15, columns 5 and 7 preferably of sequences in general encoded in the nucleus with the aid of the targeting sequences mentioned for example in table V alone or in combination with other targeting sequences preferably into the plastids, the nucleic acids of the invention can directly introduced into the plastidal genome. Therefore in a preferred embodiment the nucleic acid sequences shown in table I, application no. 15, columns 5 and 7 are directly introduced and expressed in plastids.

The term “introduced” in the context of this specification shall mean the insertion of a nucleic acid sequence into the organism by means of a “transfection”, “transduction” or preferably by “transformation”.
A plastid, such as a chloroplast, has been “transformed” by an exogenous (preferably foreign) nucleic acid sequence if nucleic acid sequence has been introduced into the plastid that means that this sequence has crossed the membrane or the membranes of the plastid. The foreign DNA may be integrated (covalently linked) into plastid DNA making up the genome of the plastid, or it may remain unintegrated (e.g., by including a chloroplast origin of replication). “Stably” integrated DNA sequences are those, which are inherited through plastid replication, thereby transferring new plastids, with the features of the integrated DNA sequence to the progeny.

[3960] for the disclosure of the paragraphs [0030.2.0.14] and [0030.3.0.14] see paragraphs [0030.2.0.0] and [0030.3.0.0] above.

[3961] For the inventive process it is of great advantage that by transforming the plastids the intraspecies specific transgene flow is blocked, because a lot of species such as corn, cotton and rice have a strict maternal inheritance of plastids. By placing the genes specified in table I, application no. 15, columns 5 and 7 or active fragments thereof in the plastids of plants, these genes will not be present in the pollen of said plants.

A further preferred embodiment of the invention relates to the use of so called “chloroplast localization sequences”, in which a first RNA sequence or molecule is capable of transporting or “chaperoning” a second RNA sequence, such as a RNA sequence transcribed from the sequences depicted in table I, application no. 15, columns 5 and 7 or a sequence encoding a protein, as depicted in table II, application no. 15, columns 5 and 7, from an external environment inside a cell or outside a plastid into a chloroplast. In one embodiment the chloroplast localization signal is substantially similar or complementary to a complete or intact viroid sequence. The chloroplast localization signal may be encoded by a DNA sequence, which is transcribed into the chloroplast localization RNA. The term “viroid” refers to a naturally occurring single stranded RNA molecule (Flores, C R Acad Sci III. 2001 October; 324(10): 943-52). Viroids usually contain about 200-500 nucleotides and generally exist as circular molecules. Examples of viroids that contain chloroplast localization signals include but are not limited to ASBVd, PLMVd, CChMVd and ELVd. The viroid sequence or a functional part of it can be fused to the sequences depicted in table I, application no. 15, columns 5 and 7 or a sequence encoding a protein, as depicted in table II, application no. 15, columns 5 and 7 in such a manner that the viroid sequence transports a sequence transcribed from a sequence as depicted in table I, application no. 15, columns 5 and 7 or a sequence encoding a protein as depicted in table II, application no. 15, columns 5 and 7 into the chloroplasts. A preferred embodiment uses a modified ASBVd (Navarro et al., Virology. 2000 Mar. 1; 268(1): 218-25).
In a further specific embodiment the protein to be expressed in the plastids such as the proteins depicted in table II, application no. 15, columns 5 and 7 are encoded by different nucleic acids. Such a method is disclosed in WO 2004/040973, which shall be incorporated by reference. WO 2004/040973 teaches a method, which relates to the translocation of an RNA corresponding to a gene or gene fragment into the chloroplast by means of a chloroplast localization sequence. The genes, which should be expressed in the plant or plants cells, are split into nucleic acid fragments, which are introduced into different compartments in the plant e.g. the nucleus, the plastids and/or mitochondria. Additionally plant cells are described in which the chloroplast contains a ribozyme fused at one end to an RNA encoding a fragment of a protein used in the inventive process such that the ribozyme can trans-splice the translocated fusion RNA to the RNA encoding the gene fragment to form and as the case may be reunite the nucleic acid fragments to an intact mRNA encoding a functional protein for example as disclosed in table II, application no. 15, columns 5 and 7.

[3962] In a preferred embodiment of the invention the nucleic acid sequences as shown in table I, application no. 15, columns 5 and 7 used in the inventive process are transformed into plastids, which are metabolical active. Those plastids should preferably maintain at a high copy number in the plant or plant tissue of interest, most preferably the chloroplasts found in green plant tissues, such as leaves or cotyledons or in seeds.

[3963] For a good expression in the plastids the nucleic acid sequences as shown in table I, application no. 15, columns 5 and 7 are introduced into an expression cassette using a preferably a promoter and terminator, which are active in plastids preferably a chloroplast promoter. Examples of such promoters include the psbA promoter from the gene from spinach or pea, the rbcL promoter, and the atpB promoter from corn.

[3964] for the disclosure of the paragraphs [0031.0.0.14] and [0032.0.0.14] see paragraphs [0031.0.0.0] and [0032.0.0.0] above.

[3965] Advantageously the process for the production of the fine chemical leads to an enhanced production of the fine chemical. The terms “enhanced” or “increase” mean at least a 10%, 20%, 30%, 40% or 50%, preferably at least 60%, 70%, 80%, 90% or 100%, more preferably 150%, 200%, 300%, 400% or 500% higher production of the fine chemical in comparison to the reference as defined below, e.g. that means in comparison to an organism without the aforementioned modification of the activity of a protein as shown in table II, application no. 15, column 3. Preferably the modification of the activity of a protein as shown in table II, application no. 15, column 3 or their combination can be achieved by joining the protein to a transit peptide.

[3966] Surprisingly it was found, that the transgenic expression of the Saccharomyces cerevisiae protein as shown in table II, application no. 15, column 3 in plastids of a plant such as Arabidopsis thaliana for example through the linkage to at least one targeting sequence for example as mentioned in table V conferred an increase in the fine chemical content of the transformed plants.

[3967] for the disclosure of this paragraph see paragraph [0035.0.0.0] above.

[3968] The sequence of b0403 (Accession numberPIR:C64769) from Escherichia coli has been published in Blattner et al., Science 277 (5331), 1453-1474 (1997), and its activity is being defined as “maltodextrin glucosidase”. Accordingly, in one embodiment, the process of the present invention comprises the use of a “maltodextrin glucosidase” or its homolog, e.g. as shown herein, for the production of the fine chemical, meaning of 2-hydroxy-tetracosenoic-acid, preferably 2-hydroxy-15tetracosenoic acid and/or tryglycerides, lipids, oils and/or fats containing 2-hydroxy-tetracosenoic-acid, preferably 2-hydroxy-15-tetracosenoic acid, in particular for increasing the amount of 2-hydroxy-tetracosenoic-acid, preferably 2-hydroxy-15-tetracosenoic acid in free or bound form in an organism or a part thereof, as mentioned. In one embodiment, in the process of the present invention the activity of a b0403 protein is increased or generated, e.g. from Escherichia coli or a homolog thereof, preferably linked at least to one transit peptide as mentioned for example in table V.

In another embodiment, in the process of the present invention the activity of a b0403 protein is increased or generated in a subcellular compartment of the organism or organism cell such as in an organelle like a plastid or mitochondria.
The sequence of b0488 (Accession number NP_{—}415021) from Escherichia coli has been published in Blattner et al., Science 277 (5331), 1453-1474 (1997). Accordingly, in one embodiment, the process of the present invention comprises the use of its homolog, e.g. as shown herein, for the production of the fine chemical, meaning of 2-hydroxy palmitic acid and/or tryglycerides, lipids, oils and/or fats containing 2-hydroxy palmitic acid, in particular for increasing the amount of 2-hydroxy palmitic acid in free or bound form in an organism or a part thereof, as mentioned. In one embodiment, in the process of the present invention the activity of a b0488 protein is increased or generated, e.g. from Escherichia coli or a homolog thereof, preferably linked at least to one transit peptide as mentioned for example in table V.
In another embodiment, in the process of the present invention the activity of a b0488 protein is increased or generated in a subcellular compartment of the organism or organism cell such as in an organelle like a plastid or mitochondria.
The sequence of b0598 (Accession number PIR:QOECNA) from Escherichia coli has been published in Blattner et al., Science 277 (5331), 1453-1474 (1997), and its activity is being defined as “carbon starvation protein”. Accordingly, in one embodiment, the process of the present invention comprises the use of a “carbon starvation protein” or its homolog, e.g. as shown herein, for the production of the fine chemical, meaning of 2-hydroxy-tetracosenoic-acid, preferably 2-hydroxy-15-tetracosenoic acid and/or tryglycerides, lipids, oils and/or fats containing 2-hydroxy-tetracosenoic-acid, preferably 2-hydroxy-15-tetracosenoic acid, in particular for increasing the amount of 2-hydroxy-tetracosenoic-acid, preferably 2-hydroxy-15-tetracosenoic acid in free or bound form in an organism or a part thereof, as mentioned. In one embodiment, in the process of the present invention the activity of a b0598 protein is increased or generated, e.g. from Escherichia coli or a homolog thereof, preferably linked at least to one transit peptide as mentioned for example in table V.
In another embodiment, in the process of the present invention the activity of a b0598 protein is increased or generated in a subcellular compartment of the organism or organism cell such as in an organelle like a plastid or mitochondria.
The sequence of b0621 (Accession number PIR:C64796) from Escherichia coli has been published in Blattner et al., Science 277 (5331), 1453-1474 (1997), and its activity is being defined as “dicarboxylate transport protein (DcuC family)”. Accordingly, in one embodiment, the process of the present invention comprises the use of a “dicarboxylate transport protein (DcuC family)” or its homolog, e.g. as shown herein, for the production of the fine chemical, meaning of 2-hydroxy-tetracosenoic-acid, preferably 2-hydroxy-15-tetracosenoic acid and/or tryglycerides, lipids, oils and/or fats containing 2-hydroxy-tetracosenoic-acid, preferably 2-hydroxy-15-tetracosenoic acid, in particular for increasing the amount of 2-hydroxy-tetracosenoic-acid, preferably 2-hydroxy-15tetracosenoic acid in free or bound form in an organism or a part thereof, as mentioned. In one embodiment, in the process of the present invention the activity of a b0621 protein is increased or generated, e.g. from Escherichia coli or a homolog thereof, preferably linked at least to one transit peptide as mentioned for example in table V.
In another embodiment, in the process of the present invention the activity of a b0621 protein is increased or generated in a subcellular compartment of the organism or organism cell such as in an organelle like a plastid or mitochondria.
The sequence of b0720 (Accession number NP_{—}415248) from Escherichia coli has been published in Blattner et al., Science 277 (5331), 1453-1474 (1997) and its activity is being defined as a “citrate synthase” Accordingly, in one embodiment, the process of the present invention comprises the use of a “citrate synthase” or its homolog, e.g. as shown herein, for the production of the fine chemical, meaning of 2-hydroxy palmitic acid and/or 2-hydroxy-tetracosenoic-acid, preferably 2-hydroxy-15-tetracosenoic acid and/or tryglycerides, lipids, oils and/or fats containing 2-hydroxy palmitic acid and/or 2-hydroxy-tetracosenoic-acid, preferably 2-hydroxy-15-tetracosenoic acid, in particular for increasing the amount of 2-hydroxy palmitic acid and/or 2-hydroxy-tetracosenoic-acid, preferably 2-hydroxy-15-tetracosenoic acid in free or bound form in an organism or a part thereof, as mentioned. In one embodiment, in the process of the present invention the activity of a b0720 protein is increased or generated, e.g. from Escherichia coli or a homolog thereof, preferably linked at least to one transit peptide as mentioned for example in table V.
In another embodiment, in the process of the present invention the activity of a b0720 protein is increased or generated in a subcellular compartment of the organism or organism cell such as in an organelle like a plastid or mitochondria.
The sequence of b0931 (Accession number PIR:JQ0756) from Escherichia coli has been published in Blattner et al., Science 277 (5331), 1453-1474 (1997), and its activity is being defined as “nicotinate phosphoribosyltransferase”. Accordingly, in one embodiment, the process of the present invention comprises the use of a “nicotinate phosphoribosyltransferase” or its homolog, e.g. as shown herein, for the production of the fine chemical, meaning of 2-hydroxy palmitic acid and/or tryglycerides, lipids, oils and/or fats containing 2-hydroxy palmitic acid, in particular for increasing the amount of 2-hydroxy palmitic acid in free or bound form in an organism or a part thereof, as mentioned. In one embodiment, in the process of the present invention the activity of a b0931 protein is increased or generated, e.g. from Escherichia coli or a homolog thereof, preferably linked at least to one transit peptide as mentioned for example in table V.
In another embodiment, in the process of the present invention the activity of a b0931 protein is increased or generated in a subcellular compartment of the organism or organism cell such as in an organelle like a plastid or mitochondria.
The sequence of b1095 (Accession number NP_{—}415613) from Escherichia coli has been published in Blattner et al., Science 277 (5331), 1453-1474 (1997), and its activity is being defined as “3-oxoacyl-[acyl-carrier-protein] synthase II”. Accordingly, in one embodiment, the process of the present invention comprises the use of a “3-oxoacyl[acyl-carrier-protein] synthase II” or its homolog, e.g. as shown herein, for the production of the fine chemical, meaning of hexadecenoic acid, preferably 9-hexadecenoic acid, more preferably trans-9-hexadecenoic acid and/or tryglycerides, lipids, oils and/or fats containing hexadecenoic acid, preferably 9-hexadecenoic acid, more preferably trans-9-hexadecenoic acid, in particular for increasing the amount of hexadecenoic acid, preferably 9-hexadecenoic acid, more preferably trans-9-hexadecenoic acid in free or bound form in an organism or a part thereof, as mentioned. In one embodiment, in the process of the present invention the activity of a b1095 protein is increased or generated, e.g. from Escherichia coli or a homolog thereof, preferably linked at least to one transit peptide as mentioned for example in table V.
In another embodiment, in the process of the present invention the activity of a b1095 protein is increased or generated in a subcellular compartment of the organism or organism cell such as in an organelle like a plastid or mitochondria.
The sequence of b1625 (Accession number PIR:C64919) from Escherichia coli has been published in Blattner et al., Science 277 (5331), 1453-1474 (1997), and its activity is being defined as “putative hemolysin expression modulating protein HHA domain”.

[3969] Accordingly, in one embodiment, the process of the present invention comprises the use of a “putative hemolysin expression modulating protein HHA domain” or its homolog, e.g. as shown herein, for the production of the fine chemical, meaning of 2-hydroxy-tetracosenoic-acid, preferably 2-hydroxy-15-tetracosenoic acid and/or tryglycerides, lipids, oils and/or fats containing 2-hydroxy-tetracosenoic-acid, preferably 2-hydroxy-15-tetracosenoic acid, in particular for increasing the amount of 2-hydroxy-tetracosenoic-acid, preferably 2-hydroxy-15-tetracosenoic acid in free or bound form in an organism or a part thereof, as mentioned. In one embodiment, in the process of the present invention the activity of a b1625 protein is increased or generated, e.g. from Escherichia coli or a homolog thereof, preferably linked at least to one transit peptide as mentioned for example in table V.

In another embodiment, in the process of the present invention the activity of a b1625 protein is increased or generated in a subcellular compartment of the organism or organism cell such as in an organelle like a plastid or mitochondria.
The sequence of b1627 (Accession number: NP_{—}416144_) from Escherichia coli has been published in Blattner et al., Science 277 (5331), 1453-1474 (1997), and its activity is being defined as “putative oxidoreductase, inner membrane protein”. Accordingly, in one embodiment, the process of the present invention comprises the use of a “putative oxidoreductase, inner membrane protein” or its homolog, e.g. as shown herein, for the production of the fine chemical, meaning of 2-hydroxy-tetracosenoic-acid, preferably 2-hydroxy-15-tetracosenoic acid and/or tryglycerides, lipids, oils and/or fats containing 2-hydroxy-tetracosenoic-acid, preferably 2-hydroxy-15-tetracosenoic acid, in particular for increasing the amount of 2-hydroxy-tetracosenoic-acid, preferably 2-hydroxy-15tetracosenoic acid in free or bound form in an organism or a part thereof, as mentioned. In one embodiment, in the process of the present invention the activity of a b1627 protein is increased or generated, e.g. from Escherichia coli or a homolog thereof, preferably linked at least to one transit peptide as mentioned for example in table V.
In another embodiment, in the process of the present invention the activity of a b1627 protein is increased or generated in a subcellular compartment of the organism or organism cell such as in an organelle like a plastid or mitochondria.
The sequence of b1700 (Accession number NP_{—}416215) from Escherichia coli has been published in Blattner et al., Science 277 (5331), 1453-1474 (1997), and its activity is being defined as “putative 4Fe-4S ferredoxin-type protein”. Accordingly, in one embodiment, the process of the present invention comprises the use of a “putative 4Fe-4S ferredoxin-type protein” or its homolog, e.g. as shown herein, for the production of the fine chemical, meaning of 2-hydroxy palmitic acid and/or octadecenoic acid, preferably 9-Octadecenoic acid, more preferably (Z)-9-octadecenoic acid and/or tryglycerides, lipids, oils and/or fats containing 2-hydroxy palmitic acid and/or octadecenoic acid, preferably 9-Octadecenoic acid, more preferably (Z)-9-octadecenoic acid, in particular for increasing the amount of 2-hydroxy palmitic acid and/or octadecenoic acid, preferably 9-Octadecenoic acid, more preferably (Z)-9-octadecenoic acid in free or bound form in an organism or a part thereof, as mentioned. In one embodiment, in the process of the present invention the activity of a b1700 protein is increased or generated, e.g. from Escherichia coli or a homolog thereof, preferably linked at least to one transit peptide as mentioned for example in table V.
In another embodiment, in the process of the present invention the activity of a b1700 protein is increased or generated in a subcellular compartment of the organism or organism cell such as in an organelle like a plastid or mitochondria.
The sequence of b1900 (Accession number: PIR:S01074) from Escherichia coli has been published in Blattner et al., Science 277 (5331), 1453-1474 (1997), and its activity is being defined as “high-affinity L-arabinose transport protein (ABC superfamily, atp_bind)”. Accordingly, in one embodiment, the process of the present invention comprises the use of a “high-affinity L-arabinose transport protein (ABC superfamily, atp_bind)” or its homolog, e.g. as shown herein, for the production of the fine chemical, meaning of 2-hydroxy-tetracosenoic-acid, preferably 2-hydroxy-15-tetracosenoic acid and/or tryglycerides, lipids, oils and/or fats containing 2-hydroxy-tetracosenoic-acid, preferably 2-hydroxy-15-tetracosenoic acid, in particular for increasing the amount of 2-hydroxy-tetracosenoic-acid, preferably 2-hydroxy-15-tetracosenoic acid in free or bound form in an organism or a part thereof, as mentioned. In one embodiment, in the process of the present invention the activity of a b1900 protein is increased or generated, e.g. from Escherichia coli or a homolog thereof, preferably linked at least to one transit peptide as mentioned for example in table V.
In another embodiment, in the process of the present invention the activity of a b1900 protein is increased or generated in a subcellular compartment of the organism or organism cell such as in an organelle like a plastid or mitochondria.
The sequence of b1933 (Accession number PIR: B64957) from Escherichia coli has been published in Blattner et al., Science 277 (5331), 1453-1474 (1997), and its activity has not been characterized. Accordingly, in one embodiment, the process of the present invention comprises the use of a “b1933 protein” or its homolog, e.g. as shown herein, for the production of the fine chemical, meaning of 2-hydroxy-tetracosenoic-acid, preferably 2-hydroxy-15-tetracosenoic acid and/or tryglycerides, lipids, oils and/or fats containing 2-hydroxy-tetracosenoic-acid, preferably 2-hydroxy-15-tetracosenoic acid, in particular for increasing the amount of 2-hydroxy-tetracosenoic-acid, preferably 2-hydroxy-15-tetracosenoic acid in free or bound form in an organism or a part thereof, as mentioned. In one embodiment, in the process of the present invention the activity of a b1933 protein is increased or generated, e.g. from Escherichia coli or a homolog thereof, preferably linked at least to one transit peptide as mentioned for example in table V.
In another embodiment, in the process of the present invention the activity of a b1933 protein is increased or generated in a subcellular compartment of the organism or organism cell such as in an organelle like a plastid or mitochondria.
The sequence of b1980 (Accession number F64962) from Escherichia coli has been published in Blattner et al., Science 277 (5331), 1453-1474 (1997), and its activity is being defined as “putative transport protein”. Accordingly, in one embodiment, the process of the present invention comprises the use of a “putative transport protein” or its homolog, e.g. as shown herein, for the production of the fine chemical, meaning of 2-hydroxy palmitic acid and/or tryglycerides, lipids, oils and/or fats containing 2-hydroxy palmitic acid, in particular for increasing the amount of 2-hydroxy palmitic acid in free or bound form in an organism or a part thereof, as mentioned. In one embodiment, in the process of the present invention the activity of a b1980 protein is increased or generated, e.g. from Escherichia coli or a homolog thereof, preferably linked at least to one transit peptide as mentioned for example in table V.
In another embodiment, in the process of the present invention the activity of a b1980 protein is increased or generated in a subcellular compartment of the organism or organism cell such as in an organelle like a plastid or mitochondria.
The sequence of b2284 (Accession number: PIR:B65000) from Escherichia coli has been published in Blattner et al., Science 277 (5331), 1453-1474 (1997), and its activity is being defined as “NADH2 dehydrogenase “. Accordingly, in one embodiment, the process of the present invention comprises the use of a “NADH2 dehydrogenase” or its homolog, e.g. as shown herein, for the production of the fine chemical, meaning of 2-hydroxy-tetracosenoic-acid, preferably 2-hydroxy-15-tetracosenoic acid and/or tryglycerides, lipids, oils and/or fats containing 2-hydroxy-tetracosenoic-acid, preferably 2-hydroxy-15-tetracosenoic acid, in particular for increasing the amount of 2-hydroxy-tetracosenoic-acid, preferably 2-hydroxy-15-tetracosenoic acid in free or bound form in an organism or a part thereof, as mentioned. In one embodiment, in the process of the present invention the activity of a b2284 protein is increased or generated, e.g. from Escherichia coli or a homolog thereof, preferably linked at least to one transit peptide as mentioned for example in table V.
In another embodiment, in the process of the present invention the activity of a b2284 protein is increased or generated in a subcellular compartment of the organism or organism cell such as in an organelle like a plastid or mitochondria.
The sequence of b2799 (Accession number: PIR:RDECLA) from Escherichia coli has been published in Blattner et al., Science 277 (5331), 1453-1474 (1997), and its activity is being defined as “lactaldehyde reductase”. Accordingly, in one embodiment, the process of the present invention comprises the use of a “lactaldehyde reductase” or its homolog, e.g. as shown herein, for the production of the fine chemical, meaning of 2-hydroxy-tetracosenoic-acid, preferably 2-hydroxy-15-tetracosenoic acid and/or tryglycerides, lipids, oils and/or fats containing 2-hydroxy-tetracosenoic-acid, preferably 2-hydroxy-15-tetracosenoic acid, in particular for increasing the amount of 2-hydroxy-tetracosenoic-acid, preferably 2-hydroxy-15-tetracosenoic acid in free or bound form in an organism or a part thereof, as mentioned. In one embodiment, in the process of the present invention the activity of a b2799 protein is increased or generated, e.g. from Escherichia coli or a homolog thereof, preferably linked at least to one transit peptide as mentioned for example in table V.
In another embodiment, in the process of the present invention the activity of a b2799 protein is increased or generated in a subcellular compartment of the organism or organism cell such as in an organelle like a plastid or mitochondria.
The sequence of b3429 (Accession number NP_{—}417887) from Escherichia coli has been published in Blattner et al., Science 277 (5331), 1453-1474 (1997), and its activity is being defined as “glycogen synthase”. Accordingly, in one embodiment, the process of the present invention comprises the use of a “glycogen synthase” or its homolog, e.g. as shown herein, for the production of the fine chemical, meaning of hexadecadienoic acid, preferably delta 7,10 hexadecadienoic acid and/or hexadecatrienoic acid, preferably delta 7,10,13 hexadecatrienoic acid, and/or tryglycerides, lipids, oils and/or fats containing hexadecadienoic acid, preferably delta 7,10 hexadecadienoic acid and/or hexadecatrienoic acid, preferably delta 7,10,13 hexadecatrienoic acid, in particular for increasing the amount of hexadecadienoic acid, preferably delta 7,10 hexadecadienoic acid and/or hexadecatrienoic acid, preferably delta 7,10,13 hexadecatrienoic acid in free or bound form in an organism or a part thereof, as mentioned. In one embodiment, in the process of the present invention the activity of a b3429 protein is increased or generated, e.g. from Escherichia coli or a homolog thereof, preferably linked at least to one transit peptide as mentioned for example in table V.
In another embodiment, in the process of the present invention the activity of a b3429 protein is increased or generated in a subcellular compartment of the organism or organism cell such as in an organelle like a plastid or mitochondria.
The sequence of b3568 (Accession number PIR:S47789) from Escherichia coli has been published in Blattner et al., Science 277 (5331), 1453-1474 (1997), and its activity is being defined as “xylose transport permease protein xylH”. Accordingly, in one embodiment, the process of the present invention comprises the use of a “V” or its homolog, e.g. as shown herein, for the production of the fine chemical, meaning of hexadecenoic acid, preferably 9-hexadecenoic acid, more preferably trans-9-hexadecenoic acid and/or 2-hydroxy-tetracosenoic-acid, preferably 2-hydroxy-15-tetracosenoic acid, and/or tryglycerides, lipids, oils and/or fats containing hexadecenoic acid, preferably 9hexadecenoic acid, more preferably trans-9-hexadecenoic acid and/or 2-hydroxy-tetracosenoic-acid, preferably 2-hydroxy-15-tetracosenoic acid, in particular for increasing the amount of hexadecenoic acid, preferably 9-hexadecenoic acid, more preferably trans-9-hexadecenoic acid and/or 2-hydroxy-tetracosenoic-acid, preferably 2-hydroxy15-tetracosenoic acid in free or bound form in an organism or a part thereof, as mentioned. In one embodiment, in the process of the present invention the activity of a b3568 protein is increased or generated, e.g. from Escherichia coli or a homolog thereof, preferably linked at least to one transit peptide as mentioned for example in table V.
In another embodiment, in the process of the present invention the activity of a b3568 protein is increased or generated in a subcellular compartment of the organism or organism cell such as in an organelle like a plastid or mitochondria.
The sequence of b3708 (Accession number PIR:WZEC) from Escherichia coli has been published in Blattner et al., Science 277 (5331), 1453-1474 (1997), and its activity is being defined as “tryptophan deaminase PLP dependent”. Accordingly, in one embodiment, the process of the present invention comprises the use of a “tryptophan deaminase” or its homolog, e.g. as shown herein, for the production of the fine chemical, meaning of 2-hydroxy palmitic acid and/or hexadecadienoic acid, preferably delta 7,10 hexadecadienoic acid and/or hexadecatrienoic acid, preferably delta 7,10,13 hexadecatrienoic acid and/or any combination of two or all three of the fine chemicals selected from the group consisting of 2-hydroxy palmitic acid, hexadecadienoic acid, preferably delta 7,10 hexadecadienoic acid and hexadecatrienoic acid, preferably delta 7,10,13 hexadecatrienoic acid and/or tryglycerides, lipids, oils and/or fats containing 2-hydroxy palmitic acid and/or hexadecadienoic acid, preferably delta 7,10 hexadecadienoic acid and/or any combination of two or all three of the fine chemicals selected from the group consisting of 2-hydroxy palmitic acid, hexadecadienoic acid, preferably delta 7,10 hexadecadienoic acid and hexadecatrienoic acid, preferably delta 7,10,13 hexadecatrienoic acid, in particular for increasing the amount of 2-hydroxy palmitic acid and/or hexadecadienoic acid, preferably delta 7,10 hexadecadienoic acid and/or hexadecatrienoic acid, preferably delta 7,10,13 hexadecatrienoic acid and/or any combination of two or all three of the fine chemicals selected from the group consisting of 2-hydroxy palmitic acid, hexadecadienoic acid, preferably delta 7,10 hexadecadienoic acid and hexadecatrienoic acid, preferably delta 7,10,13 hexadecatrienoic acid in free or bound form in an organism or a part thereof, as mentioned. In one embodiment, in the process of the present invention the activity of a b3708 protein is increased or generated, e.g. from Escherichia coli or a homolog thereof, preferably linked at least to one transit peptide as mentioned for example in table V.
In another embodiment, in the process of the present invention the activity of a b3708 protein is increased or generated in a subcellular compartment of the organism or organism cell such as in an organelle like a plastid or mitochondria.
The sequence of b3728 (Accession number PIR:BYECPR) from Escherichia coli has been published in Blattner et al., Science 277 (5331), 1453-1474 (1997), and its activity is being defined as “high affinity phosphate transport protein (ABC superfamily peri bind)”. Accordingly, in one embodiment, the process of the present invention comprises the use of a “high affinity phosphate transport protein” or its homolog, e.g. as shown herein, for the production of the fine chemical, meaning of 2-hydroxy-tetracosenoic-acid, preferably 2-hydroxy-15-tetracosenoic acid and/or tryglycerides, lipids, oils and/or fats containing 2-hydroxy-tetracosenoic-acid, preferably 2-hydroxy-15-tetracosenoic acid, in particular for increasing the amount of -hydroxy-tetracosenoic-acid, preferably 2-hydroxy-15-tetracosenoic acid in free or bound form in an organism or a part thereof, as mentioned. In one embodiment, in the process of the present invention the activity of a b3728 protein is increased or generated, e.g. from Escherichia coli or a homolog thereof, preferably linked at least to one transit peptide as mentioned for example in table V.
In another embodiment, in the process of the present invention the activity of a b3728 protein is increased or generated in a subcellular compartment of the organism or organism cell such as in an organelle like a plastid or mitochondria.
The sequence of YDR035W (Accession number NP_{—}010320) from Saccharomyces cerevisiae has been published in Goffeau et al., Science 274 (5287), 546-547, 1996 and Jacq et al., Nature 387 (6632 Suppl), 75-78 (1997), and its activity is being defined as a “3-deoxy-D-arabino-heptulosonate-7-phosphate (DAHP) synthase” which catalyzes the first step in aromatic amino acid biosynthesis and is feedback-inhibited by phenylalanine (Aro3p). Accordingly, in one embodiment, the process of the present invention comprises the use of a “3-deoxy-D-arabino-heptulosonate-7-phosphate synthase” or its homolog, e.g. as shown herein, for the production of the fine chemical, meaning of heptadecanoic acid, and/or tryglycerides, lipids, oils and/or fats containing heptadecanoic acid, in particular for increasing the amount of heptadecanoic acid in free or bound form in an organism or a part thereof, as mentioned. In one embodiment, in the process of the present invention the activity of a YDR035W protein is increased or generated, e.g. from Saccharomyces cerevisiae or a homolog thereof, preferably linked at least to one transit peptide as mentioned for example in table V.
In another embodiment, in the process of the present invention the activity of an YDR035W protein is increased or generated in a subcellular compartment of the organism or organism cell such as in an organelle like a plastid or mitochondria.
The sequence of YJR073C (Accession number PIR:B28443) from Saccharomyces cerevisiae has been published in Goffeau et al., Science 274 (5287), 546-547, 1996 and Jacq et al., Nature 387 (6632 Suppl), 75-78 (1997), and its activity is being defined as a “unsaturated phospholipid N-methyltransferase (methylene-fatty-acyl-phospholipid synthase)”. Accordingly, in one embodiment, the process of the present invention comprises the use of a “unsaturated phospholipid N-methyltransferase (methylene-fatty-acyl-phospholipid synthase)” or its homolog, e.g. as shown herein, for the production of the fine chemical, meaning of hexadecadienoic acid, preferably delta 7,10 hexadecadienoic acid, and/or tryglycerides, lipids, oils and/or fats containing hexadecadienoic acid, preferably delta 7,10 hexadecadienoic acid, in particular for increasing the amount of hexadecadienoic acid, preferably delta 7,10 hexadecadienoic acid in free or bound form in an organism or a part thereof, as mentioned. In one embodiment, in the process of the present invention the activity of a YJR073C protein is increased or generated, e.g. from Saccharomyces cerevisiae or a homolog thereof, preferably linked at least to one transit peptide as mentioned for example in table V.
In another embodiment, in the process of the present invention the activity of an YJR073C protein is increased or generated in a subcellular compartment of the organism or organism cell such as in an organelle like a plastid or mitochondria.
The sequence of YNL241C (Accession number NP_{—}014158) from Saccharomyces cerevisiae has been published in Goffeau et al., Science 274 (5287), 546-547, 1996 and Philippsen et al., Nature 387 (6632 Suppl), 93-98 (1997), and its activity is being defined as “glucose-6-phosphate dehydrogenase (Zwf1p)”. Accordingly, in one embodiment, the process of the present invention comprises the use of said “glucose-6-phosphate dehydrogenase” or its homolog, e.g. as shown herein, for the production of the fine chemical, meaning of hexadecadienoic acid, preferably delta 7,10 hexadecadienoic acid and/or hexadecatrienoic acid, preferably delta 7,10,13 hexadecatrienoic acid, and/or tryglycerides, lipids, oils and/or fats containing hexadecadienoic acid, preferably delta 7,10 hexadecadienoic acid and/or hexadecatrienoic acid, preferably delta 7,10,13 hexadecatrienoic acid, in particular for increasing the amount of hexadecadienoic acid, preferably delta 7,10 hexadecadienoic acid and/or hexadecatrienoic acid, preferably delta 7,10,13 hexadecatrienoic acid in free or bound form in an organism or a part thereof, as mentioned. In one embodiment, in the process of the present invention the activity of a YNL241C protein is increased or generated, e.g. from Saccharomyces cerevisiae or a homolog thereof, preferably linked at least to one transit peptide as mentioned for example in table V.
In another embodiment, in the process of the present invention the activity of an YNL241C protein is increased or generated in a subcellular compartment of the organism or organism cell such as in an organelle like a plastid or mitochondria.

[3970] In one embodiment, the homolog of the YDR035W, YJR073C and/or YNL241C, is a homolog having said activity and being derived from Eukaryot. In one embodiment, the homolog of the b0403, b0488, b0598, b0621, b0720, b0931, b1095, b1625, b1627, b1700, b1900, b1933, b1980, b2284, b2799, b3429, b3568, b3708 and/or b3728 is a homolog having said activity and being derived from bacteria. In one embodiment, the homolog of the YDR035W, YJR073C and/or YNL241C is a homolog having said activity and being derived from Fungi. In one embodiment, the homolog of the b0403, b0488, b0598, b0621, b0720, b0931, b1095, b1625, b1627, b1700, b1900, b1933, b1980, b2284, b2799, b3429, b3568, b3708 and/or b3728 is a homolog having said activity and being derived from Proteobacteria. In one embodiment, the homolog of the YDR035W, YJR073C and/or YNL241C is a homolog having said activity and being derived from Ascomycota. In one embodiment, the homolog of the b0403, b0488, b0598, b0621, b0720, b0931, b1095, b1625, b1627, b1700, b1900, b1933, b1980, b2284, b2799, b3429, b3568, b3708 and/or b3728 is a homolog having said activity and being derived from Gammaproteobacteria. In one embodiment, the homolog of the YDR035W, YJR073C and/or YNL241C is a homolog having said activity and being derived from Saccharomycotina. In one embodiment, the homolog of the b0403, b0488, b0598, b0621, b0720, b0931, b1095, b1625, b1627, b1700, b1900, b1933, b1980, b2284, b2799, b3429, b3568, b3708 and/or b3728 is a homolog having said activity and being derived from Enterobacteriales. In one embodiment, the homolog of the YDR035W, YJR073C and/or YNL241C is a homolog having said activity and being derived from Saccharomycetes. In one embodiment, the homolog of the b0403, b0488, b0598, b0621, b0720, b0931, b1095, b1625, b1627, b1700, b1900, b1933, b1980, b2284, b2799, b3429, b3568, b3708 and/or b3728 is a homolog having said activity and being derived from Enterobacteriaceae. In one embodiment, the homolog of the YDR035W, YJR073C and/or YNL241C is a homolog having said activity and being derived from Saccharomycetales. In one embodiment, the homolog of the b0403, b0488, b0598, b0621, b0720, b0931, b1095, b1625, b1627, b1700, b1900, b1933, b1980, b2284, b2799, b3429, b3568, b3708 and/or b3728 is a homolog having said activity and being derived from Escherichia, preferably from Escherichia coli. In one embodiment, the homolog of the YDR035W, YJR073C and/or YNL241C is a homolog having said activity and being derived from Saccharomycetaceae. In one embodiment, the homolog of the YDR035W, YJR073C and/or YNL241C is a homolog having said activity and being derived from Saccharomycetes, preferably from Saccharomyces cerevisiae.

[3971] Homologs of the polypeptide table II, application no. 15, column 5may be the polypeptides encoded by the nucleic acid molecules indicated in table I, application no. 15, column 7, resp., or may be the polypeptides indicated in table II, application no. 15, column 7, resp.

[3972] for the disclosure of this paragraph see paragraph [0038.0.0.0] above.

[3973] In accordance with the invention, a protein or polypeptide has the “activity of an protein as shown in table II, application no. 15, column 3” if its de novo activity, or its increased expression directly or indirectly leads to an increased in the fine chemical level in the organism or a part thereof, preferably in a cell of said organism, more preferably in an organelle such as a plastid or mitochondria of said organism and the protein has the above mentioned activities of a protein as shown in table II, application no. 15, column 3, preferably in the event the nucleic acid sequences encoding said proteins is functionally joined to the nucleic acid sequence of a transit peptide. Throughout the specification the activity or preferably the biological activity of such a protein or polypeptide or an nucleic acid molecule or sequence encoding such protein or polypeptide is identical or similar if it still has the biological or enzymatic activity of a protein as shown in table II, application no. 15, column 3, or which has at least 10% of the original enzymatic activity, preferably 20%, particularly preferably 30%, most particularly preferably 40% in comparison to a protein as shown in table II, application no. 7, column 3 of Saccharomyces cerevisiae.

[3974] for the disclosure of the paragraphs [0040.0.0.14] to [0047.0.0.14] see paragraphs [0040.0.0.0] to [0047.0.0.0] above.

[3975] Preferably, the reference, control or wild type differs form the subject of the present invention only in the cellular activity, preferably of the plastidial activity of the polypeptide of the invention, e.g. as result of an increase in the level of the nucleic acid molecule of the present invention or an increase of the specific activity of the polypeptide of the invention, e.g. by or in the expression level or activity of an protein having the activity of a respective protein as shown in table II, application no. 15, column 3 its biochemical or genetical causes and the increased amount of the fine chemical.

[3976] for the disclosure of the paragraphs [0049.0.0.14] to [0051.0.0.14] see paragraphs [0049.0.0.0] to [0051.0.0.0] above.

[3977] For example, the molecule number or the specific activity of the polypeptide or the nucleic acid molecule may be increased. Larger amounts of the fine chemical can be produced if the polypeptide or the nucleic acid of the invention is expressed de novo in an organism lacking the activity of said protein, preferably the nucleic acid molecules as mentioned in table I, application no. 15, columns 5 and 7 alone or preferably in combination with a transit peptide for example as mentioned in table V or in another embodiment by introducing said nucleic acid molecules into an organelle such as an plastid or mitochondria in the transgenic organism. However, it is also possible to modify the expression of the gene which is naturally present in the organisms, for example by integrating a nucleic acid sequence, encoding a plastidic targeting sequence in front (5 prime) of the coding sequence, leading to a functional preprotein, which is directed for example to the plastids.

[3978] for the disclosure of the paragraphs [0053.0.0.14] to [0058.0.0.14] see paragraphs [0053.0.0.0] to [0058.0.0.0] above.

[3979] In case the activity of the Escherichia coli protein b0403 or its homologs, e.g. a “maltodextrin glucosidase” is increased advantageously in an organelle such as a plastid or mitochondria, preferably, in one embodiment an increase of the fine chemical, preferably of 2-hydroxy-tetracosenoic-acid, preferably 2-hydroxy-15tetracosenoic acid and/or tryglycerides, lipids, oils and/or fats containing 2-hydroxy-tetracosenoic-acid, preferably 2-hydroxy-15-tetracosenoic acid between 23% and 43% or more is conferred.

In case the activity of the Escherichia coli protein b0488 or its homologs is increased advantageously in an organelle such as a plastid or mitochondria, preferably, in one embodiment an increase of the fine chemical, preferably of 2-hydroxy palmitic and/or tryglycerides, lipids, oils and/or fats containing 2-hydroxy palmitic between 20% and 29% or more is conferred.
In case the activity of the Escherichia coli protein b0598 or its homologs e.g. a “carbon starvation protein” is increased advantageously in an organelle such as a plastid or mitochondria, preferably, in one embodiment an increase of the fine chemical, preferably of 2-hydroxy-tetracosenoic-acid, preferably 2-hydroxy-15-tetracosenoic acid and/or tryglycerides, lipids, oils and/or fats containing 2-hydroxy-tetracosenoic-acid, preferably 2-hydroxy-15-tetracosenoic acid between 24% and 38% or more is conferred.
In case the activity of the Escherichia coli protein b0621 or its homologs e.g. a “dicarboxylate transport protein (DcuC family)” is increased advantageously in an organelle such as a plastid or mitochondria, preferably, in one embodiment an increase of the fine chemical, preferably of 2-hydroxy-tetracosenoic-acid, preferably 2-hydroxy-15tetracosenoic acid and/or tryglycerides, lipids, oils and/or fats containing 2-hydroxy-tetracosenoic-acid, preferably 2-hydroxy-15-tetracosenoic acid between 24% and 34% or more is conferred.
In case the activity of the Escherichia coli protein b0720 or its homologs e.g. a “citrate synthase” is increased advantageously in an organelle such as a plastid or mitochondria, preferably, in one embodiment an increase of the fine chemical, preferably of 2-hydroxy palmitic acid and/or tryglycerides, lipids, oils and/or fats containing 2-hydroxy palmitic acid between 18% and 28% or more is conferred and/or of 2-hydroxy-tetracosenoic-acid, preferably 2-hydroxy-15-tetracosenoic acid and/or tryglycerides, lipids, oils and/or fats containing 2-hydroxy-tetracosenoic-acid, preferably 2-hydroxy-15-tetracosenoic acid between 22% and 59% or more is conferred.
In case the activity of the Escherichia coli protein b0931 or its homologs, e.g. a “nicotinate phosphoribosyltransferase” is increased advantageously in an organelle such as a plastid or mitochondria, preferably, in one embodiment an increase of the fine chemical, preferably of 2-hydroxy palmitic acid and/or tryglycerides, lipids, oils and/or fats containing 2-hydroxy palmitic acid between 20% and 33% or more is conferred.
In case the activity of the Escherichia coli protein b1095 or its homologs, e.g. a “3-oxoacyl-[acyl-carrier-protein] synthase II” is increased advantageously in an organelle such as a plastid or mitochondria, preferably, in one embodiment an increase of the fine chemical, preferably of hexadecenoic acid, preferably 9-hexadecenoic acid, more preferably trans-9-hexadecenoic acid and/or tryglycerides, lipids, oils and/or fats containing hexadecenoic acid, preferably 9-hexadecenoic acid, more preferably trans-9hexadecenoic acid between 24% and 52% or more is conferred.
In case the activity of the Escherichia-coli protein b1625 or its homologs, e.g. a “putative hemolysin expression modulating protein HHA domain” is increased advantageously in an organelle such as a plastid or mitochondria, preferably, in one embodiment an increase of the fine chemical, preferably of 2-hydroxy-tetracosenoic-acid, preferably 2-hydroxy-15-tetracosenoic acid and/or tryglycerides, lipids, oils and/or fats containing 2-hydroxy-tetracosenoic-acid, preferably 2-hydroxy-15-tetracosenoic acid between 23% and 39% or more is conferred.
In case the activity of the Escherichia coli protein b1627 or its homologs, e.g. a “putative oxidoreductase, inner membrane protein” is increased advantageously in an organelle such as a plastid or mitochondria, preferably, in one embodiment an increase of the fine chemical, preferably of 2-hydroxy-tetracosenoic-acid, preferably 2-hydroxy-15-tetracosenoic and/or tryglycerides, lipids, oils and/or fats containing 2-hydroxy-tetracosenoic-acid, preferably 2-hydroxy-15-tetracosenoic between 25% and 42% or more is conferred.
In case the activity of the Escherichia coli protein b1700 or its homologs, e.g. a “putative 4Fe-4S ferredoxin-type protein” is increased advantageously in an organelle such as a plastid or mitochondria, preferably, in one embodiment an increase of the fine chemical, preferably of oleic acid and/or tryglycerides, lipids, oils and/or fats containing oleic acid between 23% and 87% or more is conferred and or of 2-hydroxy palmitic acid and/or tryglycerides, lipids, oils and/or fats containing 2-hydroxy palmitic acid between 17% and 20% or more is conferred
In case the activity of the Escherichia coli protein b1900 or its homologs, e.g. a “high-affinity L-arabinose transport protein (ABC superfamily, atp_bind)” is increased advantageously in an organelle such as a plastid or mitochondria, preferably, in one embodiment an increase of the fine chemical, preferably of 2-hydroxy-tetracosenoic-acid, preferably 2-hydroxy-15-tetracosenoic acid and/or tryglycerides, lipids, oils and/or fats containing 2-hydroxy-tetracosenoic-acid, preferably 2-hydroxy-15-tetracosenoic acid between 25% and 35% or more is conferred.
In case the activity of the Escherichia coli protein b1933 or its homologs, e.g. a “b1933 protein with unknown biological function” is increased advantageously in an organelle such as a plastid or mitochondria, preferably, in one embodiment an increase of the fine chemical, preferably of 2-hydroxy-tetracosenoic-acid, preferably 2-hydroxy-15tetracosenoic acid and/or tryglycerides, lipids, oils and/or fats containing 2-hydroxy-tetracosenoic-acid, preferably 2-hydroxy-15-tetracosenoic acid between 22% and 26% or more is conferred.
In case the activity of the Escherichia coli protein b1980 or its homologs, e.g. a “putative transport protein” is increased advantageously in an organelle such as a plastid or mitochondria, preferably, in one embodiment an increase of the fine chemical, preferably of 2-hydroxy palmitic acid and/or tryglycerides, lipids, oils and/or fats containing 2-hydroxy palmitic acid between 20% and 27% or more is conferred.
In case the activity of the Escherichia coli protein b2284 or its homologs, e.g. a “NADH2 dehydrogenase” is increased advantageously in an organelle such as a plastid or mitochondria, preferably, in one embodiment an increase of the fine chemical, preferably of 2-hydroxy-tetracosenoic-acid, preferably 2-hydroxy-15-tetracosenoic acid and/or tryglycerides, lipids, oils and/or fats containing 2-hydroxy-tetracosenoic-acid, preferably 2-hydroxy-15-tetracosenoic acid between 30% and 65% or more is conferred.
In case the activity of the Escherichia coli protein b2799 or its homologs, e.g. a “lactaldehyde reductase” is increased advantageously in an organelle such as a plastid or mitochondria, preferably, in one embodiment an increase of the fine chemical, preferably of 2-hydroxy-tetracosenoic-acid, preferably 2-hydroxy-15-tetracosenoic acid and/or tryglycerides, lipids, oils and/or fats containing 2-hydroxy-tetracosenoic-acid, preferably 2-hydroxy-15-tetracosenoic acid between 27% and 43% or more is conferred.
In case the activity of the Escherichia coli protein b3429 or its homologs, e.g. a “glycogen synthase” is increased advantageously in an organelle such as a plastid or mitochondria, preferably, in one embodiment an increase of the fine chemical, preferably of hexadecadienoic acid, preferably delta 7,10 hexadecadienoic acid and/or tryglycerides, lipids, oils and/or fats containing hexadecadienoic acid, preferably delta 7, 10 hexadecadienoic acid between 31% and 83% or more and/or of hexadecatrienoic acid, preferably delta 7,10,13 hexadecatrienoic acid and/or tryglycerides, lipids, oils and/or fats containing hexadecatrienoic acid, preferably delta 7,10,13 hexadecatrienoic acid between 13% and 39% or more is conferred.
In case the activity of the Escherichia coli protein b3568 or its homologs, e.g. a “xylose transport permease protein xylH” is increased advantageously in an organelle such as a plastid or mitochondria, preferably, in one embodiment an increase of the fine chemical, preferably of 2-hydroxy-tetracosenoic-acid, preferably 2-hydroxy-15-tetracosenoic acid and/or tryglycerides, lipids, oils and/or fats containing 2-hydroxy-tetracosenoic-acid, preferably 2-hydroxy-15-tetracosenoic acid between 22% and 49% or more and/or of hexadecenoic acid, preferably 9-hexadecenoic acid, more preferably trans-9hexadecenoic acid and/or tryglycerides, lipids, oils and/or fats containing hexadecenoic acid, preferably 9-hexadecenoic acid, more preferably trans-9-hexadecenoic acid between 22% and 38% or more is conferred.
In case the activity of the Escherichia coli protein b3708 or its homologs, e.g. a “tryptophan deaminase PLP dependent” is increased advantageously in an organelle such as a plastid or mitochondria, preferably, in one embodiment an increase of the fine chemical, preferably of 2-hydroxy palmitic acid and/or tryglycerides, lipids, oils and/or fats containing 2-hydroxy palmitic acid between 22% and 29% or more and/or of hexadecadienoic acid, preferably delta 7,10 hexadecadienoic acid and/or tryglycerides, lipids, oils and/or fats containing hexadecadienoic acid, preferably delta 7,10 hexadecadienoic acid between 23% and 84% or more and/or of hexadecatrienoic acid, preferably delta 7,10,13 hexadecatrienoic acid and/or tryglycerides, lipids, oils and/or fats containing hexadecatrienoic acid, preferably delta 7,10,13 hexadecatrienoic acid between 16% and 32% or more and/or an increase of any combination of two or all three of the fine chemicals selected from the group consisting of 2-hydroxy palmitic acid, hexadecadienoic acid, preferably delta 7,10 hexadecadienoic acid and hexadecatrienoic acid, preferably delta 7,10,13 hexadecatrienoic acid of 16% to 84% or more is conferred.
In case the activity of the Escherichia coli protein b3728 or its homologs, e.g. a “high affinity phosphate transport protein (ABC superfamily peri bind)” is increased advantageously in an organelle such as a plastid or mitochondria, preferably, in one embodiment an increase of the fine chemical, preferably of 2-hydroxy-tetracosenoic-acid, preferably 2-hydroxy-15-tetracosenoic acid and/or tryglycerides, lipids, oils and/or fats containing 2-hydroxy-tetracosenoic-acid, preferably 2-hydroxy-15-tetracosenoic acid between 22% and 30% or more is conferred.
In case the activity of the Saccharomyces cerevisiae protein YDR035W or its homologs, e.g. a “3-deoxy-D-arabinoheptulosonate-7-phosphate synthase” is increased advantageously in an organelle such as a plastid or mitochondria, preferably, in one embodiment an increase of the fine chemical, preferably of heptadecanoic acid and/or tryglycerides, lipids, oils and/or fats containing heptadecanoic acid between 21% and 40% or more is conferred.
In case the activity of the Saccharomyces cerevisiae protein YJR073C or its homologs, e.g. a “unsaturated phospholipid N-methyltransferase (methylene-fatty-acyl-phospholipid synthase)” is increased advantageously in an organelle such as a plastid or mitochondria, preferably, in one embodiment an increase of the fine chemical, preferably of hexadecadienoic acid, preferably delta 7,10 hexadecadienoic acid and/or tryglycerides, lipids, oils and/or fats containing hexadecadienoic acid, preferably delta 7,10 hexadecadienoic acid between 22% and 41% or more is conferred.
In case the activity of the Saccharomyces cerevisiae protein YNL241C or its homologs, e.g. a “glucose-6-phosphate dehydrogenase” is increased advantageously in an organelle such as a plastid or mitochondria, preferably, in one embodiment an increase of the fine chemical, preferably of hexadecadienoic acid, preferably delta 7,10 hexadecadienoic acid, and/or tryglycerides, lipids, oils and/or fats containing hexadecadienoic acid, preferably delta 7,10 hexadecadienoic acid between 22% and 36% or more and/or of hexadecatrienoic acid, preferably delta 7,10,13 hexadecatrienoic acid and/or tryglycerides, lipids, oils and/or fats containing hexadecatrienoic acid, preferably delta 7,10,13 hexadecatrienoic acid between 17% and 24% or more is conferred.

[3980] In case the activity of any of the Escherichia coli proteins b0403, b0488, b0598, b0621, b0720, b0931, b1095, b1625, b1627, b1700, b1900, b1933, b1980, b2284, b2799, b3429, b3568, b3708 and/or b3728 or their homologs,” are increased advantageously in an organelle such as a plastid or mitochondria, preferably an increase of the fine chemical indicated in column 6 “metabolites” for application no. 15 in any one of Tables I to IV, resp., and/or tryglycerides, lipids, oils and/or fats containing the fine chemical indicated in column 6 “metabolites” for application no. 15 in any one of Tables I to IV, resp., is conferred.

In case the activity of the Saccharomyces cerevisiae protein YDR035W, YJR073C and/or YNL241C or its homologs is increased advantageously in an organelle such as a plastid or mitochondria, preferably an increase of the fine chemical indicated in column 6 “metabolites” for application no. 15 in any one of Tables I to IV, resp., and/or tryglycerides, lipids, oils and/or fats containing the fine chemical indicated in column 6 “metabolites” for application no. 15 in any one of Tables I to IV, resp., is conferred.

[3981] for the disclosure of the paragraphs [0061.0.0.14] and [0062.0.0.14] see paragraphs [0061.0.0.0] and [0062.0.0.0] above.

[3982] A protein having an activity conferring an increase in the amount or level of the fine chemical, preferably upon targeting to the plastids preferably has in one embodiment the structure of the polypeptide described herein, in particular of the polypeptides comprising the consensus sequence shown in table IV, application no. 15, column 7 or of the polypeptide as shown in the amino acid sequences as disclosed in table II, application no. 15, columns 5 and 7 or the functional homologues thereof as described herein, or is encoded by the nucleic acid molecule characterized herein or the nucleic acid molecule according to the invention, for example by the nucleic acid molecule as shown in table I, application no. 15, columns 5 and 7 or its herein described functional homologues and has the herein mentioned activity.

[3983] For the purposes of the present invention, the reference to the fine chemical, e.g. to the term “hexadecenoic acid, preferably 9-hexadecenoic acid, more preferably trans-9-hexadecenoic acid and/or

2-hydroxy palmitic acid and/or
heptadecanoic acid and/or
2-hydroxy-tetracosenoic-acid, preferably 2-hydroxy-15-tetracosenoic acid and/or
hexadecadienoic acid, preferably delta 7,10 hexadecadienoic acid and/or
octadecenoic acid, preferably 9-Octadecenoic acid, more preferably (Z)-9-octadecenoic acid and/or
hexadecatrienoic acid, preferably delta 7,10,13 hexadecatrienoic acid”, also encompasses the corresponding salts, such as, for example, the potassium or sodium salts or the salts with amines such as diethylamine as well as tryglycerides, lipids, oils and/or
fats containing the respective fine chemical as indicated in column 6 “metabolites” for application no. 15 in any one of Tables I to IV, resp.

[3984] for the disclosure of the paragraphs [0065.0.0.14] and [0066.0.0.14] see paragraphs [0065.0.0.0] and [0066.0.0.0] above.

[3985] In one embodiment, the process of the present invention comprises one or more of the following steps
[3986] a) stabilizing a protein conferring the increased expression of a protein encoded by the nucleic acid molecule of the invention or of the polypeptide of the invention, e.g. of a polypeptide having the activity of a protein as indicated in table II, application no. 15, columns 5 and 7 or its homologs activity having herein-mentioned hexadecenoic acid, preferably 9-hexadecenoic acid, more preferably trans-9hexadecenoic acid and/or
   [3987] 2-hydroxy palmitic acid and/or
   [3988] heptadecanoic acid and/or
   [3989] 2-hydroxy-tetracosenoic-acid, preferably 2-hydroxy-15-tetracosenoic acid and/or
   [3990] hexadecadienoic acid, preferably delta 7,10 hexadecadienoic acid and/or
   [3991] octadecenoic acid, preferably 9-Octadecenoic acid, more preferably (Z)-9-octadecenoic acid and/or
   [3992] hexadecatrienoic acid, preferably delta 7,10,13 hexadecatrienoic acid increasing activity; and/or
[3993] b) stabilizing a mRNA conferring the increased expression of a protein encoded by the nucleic acid molecule of the invention, which is in the sense of the invention a fusion of a nucleic acid sequence encoding a transit peptide and of a nucleic acid sequence as shown in table I, application no. 15, columns 5 and 7, e.g. a nucleic acid sequence encoding a polypeptide having the activity of a protein as indicated in table II, application no. 15, columns 5 and 7 or its homologs activity or of a mRNA encoding the polypeptide of the present invention having herein-mentioned hexadecenoic acid, preferably 9-hexadecenoic acid, more preferably trans-9-hexadecenoic acid and/or
   [3994] 2-hydroxy palmitic acid and/or
   [3995] heptadecanoic acid and/or
   [3996] 2-hydroxy-tetracosenoic-acid, preferably 2-hydroxy-15-tetracosenoic acid and/or
   [3997] hexadecadienoic acid, preferably delta 7,10 hexadecadienoic acid and/or
   [3998] octadecenoic acid, preferably 9-Octadecenoic acid, more preferably (Z)-9-octadecenoic acid and/or
   [3999] hexadecatrienoic acid, preferably delta 7,10,13 hexadecatrienoic acid increasing activity; and/or
[4000] c) increasing the specific activity of a protein conferring the increased expression of a protein encoded by the nucleic acid molecule of the invention or of the polypeptide of the present invention having herein-mentioned hexadecenoic acid, preferably 9-hexadecenoic acid, more preferably trans-9-hexadecenoic acid and/or
   [4001] 2-hydroxy palmitic acid and/or
   [4002] heptadecanoic acid and/or
   [4003] 2-hydroxy-tetracosenoic-acid, preferably 2-hydroxy-15-tetracosenoic acid and/or
   [4004] hexadecadienoic acid, preferably delta 7,10 hexadecadienoic acid and/or
   [4005] octadecenoic acid, preferably 9-Octadecenoic acid, more preferably (Z)-9-octadecenoic acid and/or
   [4006] hexadecatrienoic acid, preferably delta 7,10,13 hexadecatrienoic acid increasing activity, e.g. of a polypeptide having the activity of a protein as indicated in table II, application no. 15, columns 5 and 7 or its homologs activity, or decreasing the inhibitory regulation of the polypeptide of the invention; and/or
[4007] d) generating or increasing the expression of an endogenous or artificial transcription factor mediating the expression of a protein conferring the increased expression of a protein encoded by the nucleic acid molecule of the invention or of the polypeptide of the invention having herein-mentioned hexadecenoic acid, preferably 9-hexadecenoic acid, more preferably trans-9-hexadecenoic acid and/or
   [4008] 2-hydroxy palmitic acid and/or
   [4009] heptadecanoic acid and/or
   [4010] 2-hydroxy-tetracosenoic-acid, preferably 2-hydroxy-15-tetracosenoic acid and/or
   [4011] hexadecadienoic acid, preferably delta 7,10 hexadecadienoic acid and/or
   [4012] octadecenoic acid, preferably 9-Octadecenoic acid, more preferably (Z)-9-octadecenoic acid and/or
   [4013] hexadecatrienoic acid, preferably delta 7,10,13 hexadecatrienoic acid increasing activity, e.g. of a polypeptide having the activity of a protein as indicated in table II, application no. 15, columns 5 and 7 or its homologs activity; and/or
[4014] e) stimulating activity of a protein conferring the increased expression of a protein encoded by the nucleic acid molecule of the present invention or a polypeptide of the present invention having herein-mentioned hexadecenoic acid, preferably 9hexadecenoic acid, more preferably trans-9-hexadecenoic acid and/or
   [4015] 2-hydroxy palmitic acid and/or
   [4016] heptadecanoic acid and/or
   [4017] 2-hydroxy-tetracosenoic-acid, preferably 2-hydroxy-15-tetracosenoic acid and/or hexadecadienoic acid, preferably delta 7,10 hexadecadienoic acid and/or
   [4018] octadecenoic acid, preferably 9-Octadecenoic acid, more preferably (Z)-9-octadecenoic acid and/or
   [4019] hexadecatrienoic acid, preferably delta 7,10,13 hexadecatrienoic acid increasing activity, e.g. of a polypeptide having the activity of a protein as indicated in table II, application no. 15, columns 5 and 7 or its homologs activity, by adding one or more exogenous inducing factors to the organisms or parts thereof; and/or
[4020] f) expressing a transgenic gene encoding a protein conferring the increased expression of a polypeptide encoded by the nucleic acid molecule of the present invention or a polypeptide of the present invention, having herein-mentioned hexadecenoic acid, preferably 9-hexadecenoic acid, more preferably trans-9hexadecenoic acid and/or
   [4021] 2-hydroxy palmitic acid and/or
   [4022] heptadecanoic acid and/or
   [4023] 2-hydroxy-tetracosenoic-acid, preferably 2-hydroxy-15-tetracosenoic acid and/or
   [4024] hexadecadienoic acid, preferably delta 7,10 hexadecadienoic acid and/or
   [4025] octadecenoic acid, preferably 9-Octadecenoic acid, more preferably (Z)-9-octadecenoic acid and/or
   [4026] hexadecatrienoic acid, preferably delta 7,10,13 hexadecatrienoic acid increasing activity, e.g. of a polypeptide having the activity of a protein as indicated in table II, application no. 15, columns 5 and 7 or its homologs activity, and/or
[4027] g) increasing the copy number of a gene conferring the increased expression of a nucleic acid molecule encoding a polypeptide encoded by the nucleic acid molecule of the invention or the polypeptide of the invention having herein-mentioned hexadecenoic acid, preferably 9-hexadecenoic acid, more preferably trans-9hexadecenoic acid and/or
   [4028] 2-hydroxy palmitic acid and/or
   [4029] heptadecanoic acid and/or
   [4030] 2-hydroxy-tetracosenoic-acid, preferably 2-hydroxy-15-tetracosenoic acid and/or hexadecadienoic acid, preferably delta 7,10 hexadecadienoic acid and/or
   [4031] octadecenoic acid, preferably 9-Octadecenoic acid, more preferably (Z)-9-octadecenoic acid and/or
   [4032] hexadecatrienoic acid, preferably delta 7,10,13 hexadecatrienoic acid increasing activity, e.g. of a polypeptide having the activity of a protein as indicated in table II, application no. 15, columns 5 and 7 or its homologs activity; and/or
[4033] h) increasing the expression of the endogenous gene encoding the polypeptide of the invention, e.g. a polypeptide having the activity of a protein as indicated in table II, application no. 15, columns 5 and 7 or its homologs activity, by adding positive expression or removing negative expression elements, e.g. homologous recombination can be used to either introduce positive regulatory elements like for plants the 35S enhancer into the promoter or to remove repressor elements form regulatory regions. Further gene conversion methods can be used to disrupt repressor elements or to enhance to activity of positive elements. Positive elements can be randomly introduced in plants by T-DNA or transposon mutagenesis and lines can be identified in which the positive elements have be integrated near to a gene of the invention, the expression of which is thereby enhanced; and/or
[4034] i) modulating growth conditions of an organism in such a manner, that the expression or activity of the gene encoding the protein of the invention or the protein itself is enhanced for example microorganisms or plants can be grown for example under a higher temperature regime leading to an enhanced expression of heat shock proteins, which can lead an enhanced fine chemical production; and/or
[4035] j) selecting of organisms with especially high activity of the proteins of the invention from natural or from mutagenized resources and breeding them into the target organisms, eg the elite crops; and/or
[4036] k) directing a protein encoded by the nucleic acid molecule of the invention or of the polypeptide of the present invention having herein-mentioned hexadecenoic acid, preferably 9-hexadecenoic acid, more preferably trans-9-hexadecenoic acid and/or
   [4037] 2-hydroxy palmitic acid and/or
   [4038] heptadecanoic acid and/or
   [4039] 2-hydroxy-tetracosenoic-acid, preferably 2-hydroxy-15-tetracosenoic acid and/or
   [4040] hexadecadienoic acid, preferably delta 7,10 hexadecadienoic acid and/or
   [4041] octadecenoic acid, preferably 9-Octadecenoic acid, more preferably (Z)-9-octadecenoic acid and/or
   [4042] hexadecatrienoic acid, preferably delta 7,10,13 hexadecatrienoic acid increasing activity, e.g. of polypeptide having the activity of a protein as indicated in table II, application no. 15, columns 5 and 7 or its homologs activity, to the plastids by the addition of a plastidial targeting sequence; and/or
[4043] l) generating the expression of a protein encoded by the nucleic acid molecule of the invention or of the polypeptide of the present invention having herein-mentioned Palmitic acid increasing activity, e.g. of a polypeptide having the activity of a protein as indicated in table II, application no. 15, columns 5 and 7 or its homologs activity in plastids by the stable or transient transformation advantageously stable transformation of organelles preferably plastids with an inventive nucleic acid sequence preferably in form of an expression cassette containing said sequence leading to the plastidial expression of the nucleic acids or polypeptides of the invention; and/or
[4044] m) generating the expression of a protein encoded by the nucleic acid molecule of the invention or of the polypeptide of the present invention having herein-mentioned hexadecenoic acid, preferably 9-hexadecenoic acid, more preferably trans-9-hexadecenoic acid and/or
   [4045] 2-hydroxy palmitic acid and/or
   [4046] heptadecanoic acid and/or
   [4047] 2-hydroxy-tetracosenoic-acid, preferably 2-hydroxy-15-tetracosenoic acid and/or
   [4048] hexadecadienoic acid, preferably delta 7,10 hexadecadienoic acid and/or octadecenoic acid, preferably 9-Octadecenoic acid, more preferably (Z)-9-octadecenoic acid and/or
   [4049] hexadecatrienoic acid, preferably delta 7,10,13 hexadecatrienoic acid increasing activity, e.g. of a polypeptide having the activity of a protein as indicated in table II, application no. 15, columns 5 and 7 or its homologs activity in plastids by integration of a nucleic acid of the invention into the plastidal genome under control of preferable a plastidial promoter.

[4050] Preferably, said mRNA is the nucleic acid molecule of the present invention and/or the protein conferring the increased expression of a protein encoded by the nucleic acid molecule of the present invention alone or link to a transit nucleic acid sequence or transit peptide encoding nucleic acid sequence or the polypeptide having the herein mentioned activity, e.g. conferring the increase of the fine chemical after increasing the expression or activity of the encoded polypeptide preferably in organelles such as plastids or having the activity of a polypeptide having an activity as the protein as shown in table II, application no. 15, column 3 or its homologs. Preferably the increase of the fine chemical takes place in plastids.

[4051] for the disclosure of the paragraphs [0069.0.0.14] to [0079.0.0.14] see paragraphs [0069.0.0.0] to [0079.0.0.0] above.

[4052] The activation of an endogenous polypeptide having abovementioned activity, e.g. having the activity of a protein as shown in table II, application no. 15, column 3 or of the polypeptide of the invention, e.g. conferring the increase of the respective fine chemical after increase of expression or activity in the cytsol and/or in an organelle like a plastid, preferentially in the plastid, can also be increased by introducing a synthetic transcription factor, which binds close to the coding region of the gene encoding the protein as shown in table II, application no. 15, column 3 and activates its transcription. A chimeric zinc finger protein can be constructed, which comprises a specific DNA-binding domain and an activation domain as e.g. the VP16 domain of Herpes Simplex virus. The specific binding domain can bind to the regulatory region of the gene encoding the protein as shown in table II, application no. 15, column 3. The expression of the chimeric transcription factor in a organism, in particular in a plant, leads to a specific expression of the protein as shown in table II, application no. 15, column 3, see e.g. in WO01/52620, Oriz, Proc. Natl. Acad. Sci. USA, 2002, Vol. 99, 13290 or Guan, Proc. Natl. Acad. Sci. USA, 2002, Vol. 99, 13296.

[4053] for the disclosure of the paragraphs [0081.0.0.14] to [0084.0.0.14] see paragraphs [0081.0.0.0] to [0084.0.0.0] above.

[4054] for the disclosure of the paragraph [0085.0.8.14] see paragraphs [0085.0.8.8] above.

[4055] for the disclosure of this paragraph see paragraph [0086.0.0.0] above.

[4056] By influencing the metabolism thus, it is possible to produce, in the process according to the invention, further advantageous compounds. Examples of such compounds are, in addition to the fine chemical of the invention as indicated in column 6 “metabolites” for application no. 15 in any one of Tables I to IV, resp., triglycerides, lipids, oils and/or fats containing these compounds like other fatty acids such as palmitate, stearate, palmitoleate, oleate, linoleate and/or linoleate or erucic acid and/or, arachidonic acid.

[4057] Accordingly, in one embodiment, the process according to the invention relates to a process, which comprises:
[4058] a) providing a non-human organism, preferably a microorganism, a non-human animal, a plant or animal cell, a plant or animal tissue or a plant, more preferably a microorganism, a plant or a plant tissue;
[4059] b) increasing the activity of a protein as shown in table II, application no. 15, column 3 or of a polypeptide being encoded by the nucleic acid molecule of the present invention and described below, e.g. conferring an increase of the fine chemical in the organism, preferably in the microorganism, the non-human animal, the plant or animal cell, the plant or animal tissue or the plant, more preferably a microorganism, a plant or a plant tissue, in the cytsol or in the plastids, preferentially in the plastids,
[4060] c) growing the organism, preferably the microorganism, the non-human animal, the plant or animal cell, the plant or animal tissue or the plant under conditions which permit the production of the fine chemical in the organism, preferably the microorganism, the plant cell, the plant tissue or the plant; and
[4061] d) if desired, recovering, optionally isolating, the free and/or bound the fine chemical and, optionally further free and/or bound fatty acids synthesized by the organism, the microorganism, the non-human animal, the plant or animal cell, the plant or animal tissue or the plant.

[4062] The organism, in particular the microorganism, non-human animal, the plant or animal cell, the plant or animal tissue or the plant is advantageously grown in such a way that it is not only possible to recover, if desired isolate the free or bound the fine chemical or the free and bound the fine chemical but as option it is also possible to produce, recover and, if desired isolate, other free or/and bound fatty acids, in particular palmitate, stearate, palmitoleate, oleate, linoleate and/or linoleate or erucic acid and/or, arachidonic acid.

[4063] for the disclosure of the paragraphs [0090.0.0.14] to [0097.0.0.14] see paragraphs [0090.0.0.0] to [0097.0.0.0] above.

[4064] With regard to the nucleic acid sequence as depicted a nucleic acid construct which contains a nucleic acid sequence mentioned herein or an organism (=transgenic organism) which is transformed with said nucleic acid sequence or said nucleic acid construct, “transgene” means all those constructs which have been brought about by genetic manipulation methods, preferably in which either
[4065] a) the nucleic acid sequence as shown in table I, application no. 15, columns 5 and 7 or a derivative thereof, or
[4066] b) a genetic regulatory element, for example a promoter, which is functionally linked to the nucleic acid sequence as shown table I, application no. 15, columns 5 and 7 or a derivative thereof, or
[4067] c) (a) and (b)
   is/are not present in its/their natural genetic environment or has/have been modified by means of genetic manipulation methods, it being possible for the modification to be, by way of example, a substitution, addition, deletion, inversion or insertion of one or more nucleotide. “Natural genetic environment” means the natural chromosomal locus in the organism of origin or the presence in a genomic library. In the case of a genomic library, the natural, genetic environment of the nucleic acid sequence is preferably at least partially still preserved. The environment flanks the nucleic acid sequence at least on one side and has a sequence length of at least 50 bp, preferably at least 500 bp, particularly preferably at least 1000 bp, very particularly preferably at least 5000 bp.

[4068] The use of the nucleic acid sequence according to the invention or of the nucleic acid construct according to the invention for the generation of transgenic plants is therefore also subject matter of the invention. As mentioned above the inventive nucleic acid sequence consists advantageously of the nucleic acid sequences as depicted in the sequence protocol and disclosed in table I, application no. 15, columns 5 and 7 joined to a nucleic acid sequence encoding a transit peptide, or a targeting nucleic acid sequence which directs the nucleic acid sequences disclosed in table I, application no. 15, columns 5 and 7 to the organelle preferentially the plastids. Alternatively the inventive nucleic acids sequences consist advantageously of the nucleic acid sequences as depicted in the sequence protocol and disclosed in table I, application no. 15, columns 5 and 7 joined preferably to a nucleic acids sequence mediating the stable integration of nucleic acids into the plastidial genome and optionally sequences mediating the transcription of the sequence in the plastidial compartment. A transient expression is in principal also desirable and possible.

[4069] for the disclosure of this paragraph see paragraph [0100.0.0.0] above.

[4070] In an advantageous embodiment of the invention, the organism takes the form of a plant whose fatty acid content is modified advantageously owing to the nucleic acid molecule of the present invention expressed. This is important for plant breeders since, for example, the nutritional value of plants for poultry is dependent on the abovementioned essential fatty acids and the general amount of fatty acids as energy source in feed. After the activity of the protein as shown in table II, application no. 15, column 3 has been increased or generated, or after the expression of nucleic acid molecule or polypeptide according to the invention has been generated or increased, the transgenic plant generated thus is grown on or in a nutrient medium or else in the soil and subsequently harvested.

[4071] for the disclosure of the paragraphs [0102.0.0.14] to [0110.0.0.14] see paragraphs [0102.0.0.0] to [0110.0.0.0] above.

[4072] In a preferred embodiment, the fine chemical (as indicated in column 6 “metabolites” for application no. 15 in any one of Tables I to IV, resp.) is produced in accordance with the invention and, if desired, is isolated. The production of further fatty acids such as palmitate, stearate, palmitoleate, oleate, linoleate and/or linoleate or erucic acid and/or, arachidonic acid and/or mixtures thereof or mixtures of other fatty acids by the process according to the invention is advantageous. It may be advantageous to increase the pool of free fatty acids in the transgenic organisms by the process according to the invention in order to isolate high amounts of the pure fine chemical.

[4073] In another preferred embodiment of the invention a combination of the increased expression of the nucleic acid sequence or the protein of the invention together with the transformation of a nucleic acid encoding a protein or polypeptide for example a fatty acid transporter protein or a compound, which functions as a sink for the desired fatty acid in the organism is useful to increase the production of the respective fine chemical (see Bao and Ohlrogge, Plant Physiol. 1999 August; 120 (4): 1057-1062). Such fatty acid transporter protein may serve as a link between the location of fatty acid synthesis and the so called sink tissue, in which fatty acids, triglycerides, oils and fats are stored.

[4074] for the disclosure of the paragraphs [0113.0.5.14] to [0115.0.0.14] see paragraphs [0113.0.5.5] to [0115.0.5.5] above.

[4075] In a preferred embodiment, the present invention relates to a process for the production of the fine chemical comprising or generating in an organism or a part thereof, preferably in a cell compartment such as a plastid or mitochondria, the expression of at least one nucleic acid molecule comprising a nucleic acid molecule selected from the group consisting of:
[4076] a) nucleic acid molecule encoding, preferably at least the mature form, of the polypeptide shown in table II, application no. 15, columns 5 and 7 or a fragment thereof, which confers an increase in the amount of the respective fine chemical in an organism or a part thereof;
[4077] b) nucleic acid molecule comprising, preferably at least the mature form, of the nucleic acid molecule shown in table I, application no. 15, columns 5 and 7;
[4078] c) nucleic acid molecule whose sequence can be deduced from a polypeptide sequence encoded by a nucleic acid molecule of (a) or (b) as result of the degeneracy of the genetic code and conferring an increase in the amount of the respective fine chemical in an organism or a part thereof;
[4079] d) nucleic acid molecule encoding a polypeptide which has at least 50% identity with the amino acid sequence of the polypeptide encoded by the nucleic acid molecule of (a) to (c) and conferring an increase in the amount of the fine chemical in an organism or a part thereof;
[4080] e) nucleic acid molecule which hybridizes with a nucleic acid molecule of (a) to (c) under stringent hybridisation conditions and conferring an increase in the amount of the respective fine chemical in an organism or a part thereof;
[4081] f) nucleic acid molecule encoding a polypeptide, the polypeptide being derived by substituting, deleting and/or adding one or more amino acids of the amino acid sequence of the polypeptide encoded by the nucleic acid molecules (a) to (d), preferably to (a) to (c) and conferring an increase in the amount of the respective fine chemical in an organism or a part thereof;
[4082] g) nucleic acid molecule encoding a fragment or an epitope of a polypeptide which is encoded by one of the nucleic acid molecules of (a) to (e), preferably to (a) to (c) and conferring an increase in the amount of the respective fine chemical in an organism or a part thereof;
[4083] h) nucleic acid molecule comprising a nucleic acid molecule which is obtained by amplifying nucleic acid molecules from a cDNA library or a genomic library using the primers shown in table III, application no. 15, column 7 and conferring an increase in the amount of the respective fine chemical in an organism or a part thereof;
[4084] i) nucleic acid molecule encoding a polypeptide which is isolated, e.g. from an expression library, with the aid of monoclonal antibodies against a polypeptide encoded by one of the nucleic acid molecules of (a) to (h), preferably to (a) to (c), and conferring an increase in the amount of the respective fine chemical in an organism or a part thereof;
[4085] j) nucleic acid molecule which encodes a polypeptide comprising the consensus sequence shown in table IV, application no. 15, column 7 and conferring an increase in the amount of the respective fine chemical in an organism or a part thereof;
[4086] k) nucleic acid molecule comprising one or more of the nucleic acid molecule encoding the amino acid sequence of a polypeptide encoding a domain of the polypeptide shown in table II, application no. 15, columns 5 and 7 and conferring an increase in the amount of the respective fine chemical in an organism or a part thereof; and
[4087] l) nucleic acid molecule which is obtainable by screening a suitable library under stringent conditions with a probe comprising one of the sequences of the nucleic acid molecule of (a) to (k), preferably to (a) to (c), or with a fragment of at least 15 nt, preferably 20 nt, 30 nt, 50 nt, 100 nt, 200 nt or 500 nt of the nucleic acid molecule characterized in (a) to (k), preferably to (a) to (c), and conferring an increase in the amount of the respective fine chemical in an organism or a part thereof;
   or which comprises a sequence which is complementary thereto.

[4088] In one embodiment, the nucleic acid molecule used in the process of the invention distinguishes over the sequence indicated in table I A, application no. 15, columns 5 and 7 by one or more nucleotides. In one embodiment, the nucleic acid molecule used in the process of the invention does not consist of the sequence indicated in table I A, application no. 15, columns 5 and 7. In one embodiment, the nucleic acid molecule used in the process of the invention is less than 100%, 99.999%, 99.99%, 99.9% or 99% identical to a sequence indicated in table I A, application no. 15, columns 5 and 7. In another embodiment, the nucleic acid molecule does not encode a polypeptide of a sequence indicated in table II A, application no. 15, columns 5 and 7.

[4089] In one embodiment, the nucleic acid molecule used in the process of the invention distinguishes over the sequence indicated in table I B, application no. 15, columns 5 and 7, by one or more nucleotides. In one embodiment, the nucleic acid molecule used in the process of the invention does not consist of the sequence indicated in table I B, application no. 15, columns 5 and 7. In one embodiment, the nucleic acid molecule used in the process of the invention is less than 100%, 99.999%, 99.99%, 99.9% or 99% identical to a sequence indicated in table I B, application no. 15, columns 5 and 7. In another embodiment, the nucleic acid molecule does not encode a polypeptide of a sequence indicated in table II B, application no. 15, columns 5 and 7.

[4090] In one embodiment, the nucleic acid molecule used in the process distinguishes over the sequence shown in table I, application no. 15, columns 5 and 7 by one or more nucleotides or does not consist of the sequence shown in table I, application no. 15, columns 5 and 7. In one embodiment, the nucleic acid molecule of the present invention is less than 100%, 99.999%, 99.99%, 99.9% or 99% identical to the sequence shown in table I, application no. 15, columns 5 and 7. In another embodiment, the nucleic acid molecule does not encode a polypeptide of the sequence shown in table II, application no. 15, columns 5 and 7.

[4091] for the disclosure of the paragraphs [0118.0.0.14] to [0120.0.0.14] see paragraphs [0118.0.0.0] to [0120.0.0.0] above.

[4092] Nucleic acid molecules with the sequence shown in table I, application no. 15, columns 5 and 7, nucleic acid molecules which are derived from the amino acid sequences shown in table II, application no. 15, columns 5 and 7 or from polypeptides comprising the consensus sequence shown in table IV, application no. 15, column 7, or their derivatives or homologues encoding polypeptides with the enzymatic or biological activity of a protein as shown in table II, application no. 15, column 3 or conferring the fine chemical increase after increasing its expression or activity are advantageously increased in the process according to the invention by expression either in the cytsol or in an organelle such as a plastid or mitochondria or both, preferably in plastids.

[4093] for the disclosure of this paragraph see paragraph [0122.0.0.0] above.

[4094] Nucleic acid molecules, which are advantageous for the process according to the invention and which encode polypeptides with the activity of a protein as shown in table II, application no. 15, column 3 can be determined from generally accessible databases.

[4095] for the disclosure of this paragraph see paragraph [0124.0.0.0] above.

[4096] The nucleic acid molecules used in the process according to the invention take the form of isolated nucleic acid sequences, which encode polypeptides with the activity of the proteins as shown in table II, application no. 15, column 3 and conferring the fine chemical increase by expression either in the cytsol or in an organelle such as a plastid or mitochondria or both, preferably in plastids.

[4097] for the disclosure of the paragraphs [0126.0.0.14] to [0133.0.0.14] see paragraphs [0126.0.0.0] to [0133.0.0.0] above.

[4098] However, it is also possible to use artificial sequences, which differ in one or more bases from the nucleic acid sequences found in organisms, or in one or more amino acid molecules from polypeptide sequences found in organisms, in particular from the polypeptide sequences shown in table II, application no. 15, columns 5 and 7 or the functional homologues thereof as described herein, preferably conferring above-mentioned activity, i.e. conferring the fine chemical increase after increasing its activity, e.g. after increasing the activity of a protein as shown in table II, application no. 15, column 3 by for example expression either in the cytsol or in an organelle such as a plastid or mitochondria or both, preferably in plastids.

[4099] for the disclosure of the paragraphs [0135.0.0.14] to [0140.0.0.14] see paragraphs [0135.0.0.0] to [0140.0.0.0] above.

[4100] Synthetic oligonucleotide primers for the amplification, e.g. as shown in table Ill, application no. 15, column 7, by means of polymerase chain reaction can be generated on the basis of a sequence shown herein, for example the sequence shown in table I, application no. 15, columns 5 and 7 or the sequences derived from table II, application no. 15, columns 5 and 7.

[4101] Moreover, it is possible to identify conserved regions from various organisms by carrying out protein sequence alignments with the polypeptide used in the process of the invention, in particular with sequences of the polypeptide of the invention, from which conserved regions, and in turn, degenerate primers can be derived. Conserved regions are those, which show a very little variation in the amino acid in one particular position of several homologs from different origin. The consensus sequence shown in table IV, application no. 15, column 7 is derived from said alignments.

[4102] Degenerated primers can then be utilized by PCR for the amplification of fragments of novel proteins having above-mentioned activity, e.g. conferring the increase of the fine chemical after increasing the expression or activity or having the activity of a protein as shown in table II, application no. 15, column 3 or further functional homologs of the polypeptide of the invention from other organisms.

[4103] for the disclosure of the paragraphs [0144.0.0.14] to [0151.0.0.14] see paragraphs [0144.0.0.0] to [0151.0.0.0] above.

[4104] Polypeptides having above-mentioned activity, i.e. conferring the fine chemical increase, derived from other organisms, can be encoded by other DNA sequences which hybridize to the sequences shown in table I, application no. 15, columns 5 and 7, preferably of table I B, application no. 15, columns 5 and 7 under relaxed hybridization conditions and which code on expression for peptides having the hexadecenoic acid, preferably 9-hexadecenoic acid, more preferably trans-9hexadecenoic acid and/or

2-hydroxy palmitic acid and/or
heptadecanoic acid and/or
2-hydroxy-tetracosenoic-acid, preferably 2-hydroxy-15-tetracosenoic acid and/or
hexadecadienoic acid, preferably delta 7,10 hexadecadienoic acid and/or
octadecenoic acid, preferably 9-Octadecenoic acid, more preferably (Z)-9-octadecenoic acid and/or
hexadecatrienoic acid, preferably delta 7,10,13 hexadecatrienoic acid, triglycerides, lipids, oils and/or fats containing hexadecenoic acid, preferably 9-hexadecenoic acid, more preferably trans-9-hexadecenoic acid and/or
2-hydroxy palmitic acid and/or
heptadecanoic acid and/or
2-hydroxy-tetracosenoic-acid, preferably 2-hydroxy-15-tetracosenoic acid and/or
hexadecadienoic acid, preferably delta 7,10 hexadecadienoic acid and/or
octadecenoic acid, preferably 9-Octadecenoic acid, more preferably (Z)-9-octadecenoic acid and/or
hexadecatrienoic acid, preferably delta 7,10,13 hexadecatrienoic acid increasing activity.

[4105] for the disclosure of the paragraphs [0153.0.0.14] to [0159.0.0.14] see paragraphs [0153.0.0.0] to [0159.0.0.0] above.

[4106] Further, the nucleic acid molecule of the invention comprises a nucleic acid molecule, which is a complement of one of the nucleotide sequences of above mentioned nucleic acid molecules or a portion thereof. A nucleic acid molecule which is complementary to one of the nucleotide sequences shown in table I, application no. 15, columns 5 and 7, preferably shown in table I B, application no. 15, columns 5 and 7 is one which is sufficiently complementary to one of the nucleotide sequences shown in table I, application no. 15, columns 5 and 7, preferably shown in table I B, application no. 15, columns 5 and 7 such that it can hybridize to one of the nucleotide sequences shown in table I, application no. 15, columns 5 and 7, preferably shown in table I B, application no. 15, columns 5 and 7, thereby forming a stable duplex. Preferably, the hybridisation is performed under stringent hybridization conditions. However, a complement of one of the herein disclosed sequences is preferably a sequence complement thereto according to the base pairing of nucleic acid molecules well known to the skilled person. For example, the bases A and G undergo base pairing with the bases T and U or C, resp. and visa versa. Modifications of the bases can influence the base-pairing partner.

[4107] The nucleic acid molecule of the invention comprises a nucleotide sequence which is at least about 30%, 35%, 40% or 45%, preferably at least about 50%, 55%, 60% or 65%, more preferably at least about 70%, 80%, or 90%, and even more preferably at least about 95%, 97%, 98%, 99% or more homologous to a nucleotide sequence shown in table I, application no. 15, columns 5 and 7, preferably shown in table I B, application no. 15, columns 5 and 7, or a portion thereof and preferably has above mentioned activity, in particular having a fine chemical increasing activity after increasing the activity or an activity of a gene product as shown in table II, application no. 15, column 3 by for example expression either in the cytsol or in an organelle such as a plastid or mitochondria or both, preferably in plastids.

[4108] The nucleic acid molecule of the invention comprises a nucleotide sequence which hybridizes, preferably hybridizes under stringent conditions as defined herein, to one of the nucleotide sequences shown in table I, application no. 15, columns 5 and 7, preferably shown in table I B, application no. 15, columns 5 and 7, or a portion thereof and encodes a protein having above-mentioned activity, e.g. conferring of a hexadecenoic acid, preferably 9-hexadecenoic acid, more preferably trans-9hexadecenoic acid and/or

2-hydroxy palmitic acid and/or
heptadecanoic acid and/or
2-hydroxy-tetracosenoic-acid, preferably 2-hydroxy-15-tetracosenoic acid and/or
hexadecadienoic acid, preferably delta 7,10 hexadecadienoic acid and/or
octadecenoic acid, preferably 9-Octadecenoic acid, more preferably (Z)-9-octadecenoic acid and/or
hexadecatrienoic acid, preferably delta 7,10,13 hexadecatrienoic acid, triglycerides, lipids, oils and/or fats containing hexadecenoic acid, preferably 9-hexadecenoic acid, more preferably trans-9-hexadecenoic acid and/or
2-hydroxy palmitic acid and/or
heptadecanoic acid and/or
2-hydroxy-tetracosenoic-acid, preferably 2-hydroxy-15-tetracosenoic acid and/or hexadecadienoic acid, preferably delta 7,10 hexadecadienoic acid and/or
octadecenoic acid, preferably 9-Octadecenoic acid, more preferably (Z)-9-octadecenoic acid and/or
hexadecatrienoic acid, preferably delta 7,10,13 hexadecatrienoic acid increase by for example expression either in the cytsol or in an organelle such as a plastid or mitochondria or both, preferably in plastids, and optionally, the activity of a protein as shown in table II, application no. 15, column 3.

[4109] Moreover, the nucleic acid molecule of the invention can comprise only a portion of the coding region of one of the sequences shown in table I, application no. 15, columns 5 and 7, preferably shown in table I B, application no. 15, columns 5 and 7, for example a fragment which can be used as a probe or primer or a fragment encoding a biologically active portion of the polypeptide of the present invention or of a polypeptide used in the process of the present invention, i.e. having above-mentioned activity, e.g. conferring an increase of the fine chemical if its activity is increased by for example expression either in the cytsol or in an organelle such as a plastid or mitochondria or both, preferably in plastids. The nucleotide sequences determined from the cloning of the present protein-according-to-the-invention-encoding gene allows for the generation of probes and primers designed for use in identifying and/or cloning its homologues in other cell types and organisms. The probe/primer typically comprises substantially purified oligonucleotide. The oligonucleotide typically comprises a region of nucleotide sequence that hybridizes under stringent conditions to at least about 12, 15 preferably about 20 or 25, more preferably about 40, 50 or 75 consecutive nucleotides of a sense strand of one of the sequences set forth, e.g., in table I, application no. 15, columns 5 and 7, an anti-sense sequence of one of the sequences, e.g., set forth in table I, application no. 15, columns 5 and 7, preferably shown in table I B, application no. 15, columns 5 and 7, or naturally occurring mutants thereof. Primers based on a nucleotide of invention can be used in PCR reactions to clone homologues of the polypeptide of the invention or of the polypeptide used in the process of the invention, e.g. as the primers described in the examples of the present invention, e.g. as shown in the examples. A PCR with the primers shown in table III, application no. 15, column 7 will result in a fragment of the gene product as shown in table II, column 3.

[4110] for the disclosure of this paragraph see paragraph [0164.0.0.0] above.

[4111] The nucleic acid molecule of the invention encodes a polypeptide or portion thereof which includes an amino acid sequence which is sufficiently homologous to the amino acid sequence shown in table II, application no. 15, columns 5 and 7 such that the protein or portion thereof maintains the ability to participate in the fine chemical production, in particular a hexadecenoic acid, preferably 9-hexadecenoic acid, more preferably trans-9-hexadecenoic acid and/or

2-hydroxy palmitic acid and/or
heptadecanoic acid and/or
2-hydroxy-tetracosenoic-acid, preferably 2-hydroxy-15-tetracosenoic acid and/or
hexadecadienoic acid, preferably delta 7,10 hexadecadienoic acid and/or
octadecenoic acid, preferably 9-Octadecenoic acid, more preferably (Z)-9-octadecenoic acid and/or
hexadecatrienoic acid, preferably delta 7,10,13 hexadecatrienoic acid, triglycerides, lipids, oils and/or fats containing hexadecenoic acid, preferably 9-hexadecenoic acid, more preferably trans-9-hexadecenoic acid and/or
2-hydroxy palmitic acid and/or
heptadecanoic acid and/or
2-hydroxy-tetracosenoic-acid, preferably 2-hydroxy-15-tetracosenoic acid and/or
hexadecadienoic acid, preferably delta 7,10 hexadecadienoic acid and/or
octadecenoic acid, preferably 9-Octadecenoic acid, more preferably (Z)-9-octadecenoic acid and/or
hexadecatrienoic acid, preferably delta 7,10,13 hexadecatrienoic acid increasing the activity as mentioned above or as described in the examples in plants or microorganisms is comprised.

[4112] As used herein, the language “sufficiently homologous” refers to proteins or portions thereof which have amino acid sequences which include a minimum number of identical or equivalent amino acid residues (e.g., an amino acid residue which has a similar side chain as an amino acid residue in one of the sequences of the polypeptide of the present invention) to an amino acid sequence shown in table II, application no. 15, columns 5 and 7 such that the protein or portion thereof is able to participate in the increase of the fine chemical production. For examples having the activity of a protein as shown in table II, column 3 and as described herein.

[4113] In one embodiment, the nucleic acid molecule of the present invention comprises a nucleic acid that encodes a portion of the protein of the present invention. The protein is at least about 30%, 35%, 40%, 45% or 50%, preferably at least about 55%, 60%, 65% or 70%, and more preferably at least about 75%, 80%, 85%, 90%, 91%, 92%, 93% or 94% and most preferably at least about 95%, 97%, 98%, 99% or more homologous to an entire amino acid sequence of table II, application no. 15, columns 5 and 7 and having above-mentioned activity, e.g. conferring preferably the increase of the fine chemical by for example expression either in the cytsol or in an organelle such as a plastid or mitochondria or both, preferably in plastids.

[4114] for the disclosure of the paragraphs [0168.0.0.14] and [0169.0.0.14] see paragraphs [0168.0.0.0] and [0169.0.0.0] above.

[4115] The invention further relates to nucleic acid molecules that differ from one of the nucleotide sequences shown in table I, application no. 15, columns 5 and 7 (and portions thereof) due to degeneracy of the genetic code and thus encode a polypeptide of the present invention, in particular a polypeptide having above mentioned activity, e.g. conferring an increase in the fine chemical in a organism, e.g. as that polypeptides depicted by the sequence shown in table II, application no. 15, columns 5 and 7 or the functional homologues. Advantageously, the nucleic acid molecule of the invention comprises, or in an other embodiment has, a nucleotide sequence encoding a protein comprising, or in an other embodiment having, an amino acid sequence shown in table II, application no. 15, columns 5 and 7 or the functional homologues. In a still further embodiment, the nucleic acid molecule of the invention encodes a full length protein which is substantially homologous to an amino acid sequence shown in table II, application no. 15, columns 5 and 7 or the functional homologues. However, in a preferred embodiment, the nucleic acid molecule of the present invention does not consist of the sequence shown in table I, application no. 15, columns 5 and 7, preferably as indicated in table I A, application no. 15, columns 5 and 7. Preferably the nucleic acid molecule of the invention is a functional homologue or identical to a nucleic acid molecule indicated in table I B, application no. 15, columns 5 and 7.

[4116] for the disclosure of the paragraphs [0171.0.0.14] to [0173.0.0.14] see paragraphs [0171.0.0.0] to [0173.0.0.0] above.

[4117] Accordingly, in another embodiment, a nucleic acid molecule of the invention is at least 15, 20, 25 or 30 nucleotides in length. Preferably, it hybridizes under stringent conditions to a nucleic acid molecule comprising a nucleotide sequence of the nucleic acid molecule of the present invention or used in the process of the present invention, e.g. comprising the sequence shown in table I, application no. 15, columns 5 and 7. The nucleic acid molecule is preferably at least 20, 30, 50, 100, 250 or more nucleotides in length.

[4118] for the disclosure of this paragraph see paragraph [0175.0.0.0] above.

[4119] Preferably, nucleic acid molecule of the invention that hybridizes under stringent conditions to a sequence shown in table I, application no. 15, columns 5 and 7 corresponds to a naturally-occurring nucleic acid molecule of the invention. As used herein, a “naturally-occurring” nucleic acid molecule refers to an RNA or DNA molecule having a nucleotide sequence that occurs in nature (e.g., encodes a natural protein). Preferably, the nucleic acid molecule encodes a natural protein having abovementioned activity, e.g. conferring the fine chemical increase after increasing the expression or activity thereof or the activity of a protein of the invention or used in the process of the invention by for example expression the nucleic acid sequence of the gene product in the cytsol and/or in an organelle such as a plastid or mitochondria, preferably in plastids.

[4120] for the disclosure of this paragraph see paragraph [0177.0.0.0] above.

[4121] For example, nucleotide substitutions leading to amino acid substitutions at “non-essential” amino acid residues can be made in a sequence of the nucleic acid molecule of the invention or used in the process of the invention, e.g. shown in table I, application no. 15, columns 5 and 7.

[4122] for the disclosure of the paragraphs [0179.0.0.14] and [0180.0.0.14] see paragraphs [0179.0.0.0] and [0180.0.0.0] above.

[4123] Accordingly, the invention relates to nucleic acid molecules encoding a polypeptide having above-mentioned activity, e.g. conferring an increase in the the fine chemical in an organisms or parts thereof by for example expression either in the cytsol or in an organelle such as a plastid or mitochondria or both, preferably in plastids that contain changes in amino acid residues that are not essential for said activity. Such polypeptides differ in amino acid sequence from a sequence contained in the sequences shown in table II, application no. 15, columns 5 and 7, preferably shown in table II A, application no. 15, columns 5 and 7 yet retain said activity described herein. The nucleic acid molecule can comprise a nucleotide sequence encoding a polypeptide, wherein the polypeptide comprises an amino acid sequence at least about 50% identical to an amino acid sequence shown in table II, application no. 15, columns 5 and 7, preferably shown in table II A, application no. 15, columns 5 and 7 and is capable of participation in the increase of production of the fine chemical after increasing its activity, e.g. its expression by for example expression either in the cytsol or in an organelle such as a plastid or mitochondria or both, preferably in plastids. Preferably, the protein encoded by the nucleic acid molecule is at least about 60% identical to the sequence shown in table II, application no. 15, columns 5 and 7, preferably shown in table II A, application no. 15, columns 5 and 7, more preferably at least about 70% identical to one of the sequences shown in table II, application no. 15, columns 5 and 7, preferably shown in table II A, application no. 15, columns 5 and 7, even more preferably at least about 80%, 90%, 95% homologous to the sequence shown in table II, application no. 15, columns 5 and 7, preferably shown in table II A, application no. 15, columns 5 and 7, and most preferably at least about 96%, 97%, 98%, or 99% identical to the sequence shown in table II, application no. 15, columns 5 and 7, preferably shown in table II A, application no. 15, columns 5 and 7.

[4124] for the disclosure of the paragraphs [0182.0.0.14] to [0188.0.0.14] see paragraphs [0182.0.0.0] to [0188.0.0.0] above.

[4125] Functional equivalents derived from one of the polypeptides as shown in table II, application no. 15, columns 5 and 7, preferably shown in table II B, application no. 15, columns 5 and 7 resp., according to the invention by substitution, insertion or deletion have at least 30%, 35%, 40%, 45% or 50%, preferably at least 55%, 60%, 65% or 70% by preference at least 80%, especially preferably at least 85% or 90%, 91%, 92%, 93% or 94%, very especially preferably at least 95%, 97%, 98% or 99% homology with one of the polypeptides as shown in table II, application no. 15, columns 5 and 7, preferably shown in table II B, application no. 15, columns 5 and 7 resp., according to the invention and are distinguished by essentially the same properties as the polypeptide as shown in table II, application no. 15, columns 5 and 7, preferably shown in table II B, application no. 15, columns 5 and 7.

[4126] Functional equivalents derived from the nucleic acid sequence as shown in table I, application no. 15, columns 5 and 7, preferably shown in table I B, application no. 15, columns 5 and 7 resp., according to the invention by substitution, insertion or deletion have at least 30%, 35%, 40%, 45% or 50%, preferably at least 55%, 60%, 65% or 70% by preference at least 80%, especially preferably at least 85% or 90%, 91%, 92%, 93% or 94%, very especially preferably at least 95%, 97%, 98% or 99% homology with one of the polypeptides as shown in table II, application no. 15, columns 5 and 7, preferably shown in table II B, application no. 15, columns 5 and 7 resp., according to the invention and encode polypeptides having essentially the same properties as the polypeptide as shown in table II, application no. 15, columns 5 and 7, preferably shown in table II B, application no. 15, columns 5 and 7.

[4127] for the disclosure of this paragraph see paragraph [0191.0.0.0] above.

[4128] A nucleic acid molecule encoding an homologous to a protein sequence of table II, application no. 15, columns 5 and 7, preferably shown in table II B, application no. 15, columns 5 and 7 resp., can be created by introducing one or more nucleotide substitutions, additions or deletions into a nucleotide sequence of the nucleic acid molecule of the present invention, in particular of table I, application no. 15, columns 5 and 7, preferably shown in table I B, application no. 15, columns 5 and 7 resp., such that one or more amino acid substitutions, additions or deletions are introduced into the encoded protein. Mutations can be introduced into the encoding sequences of table I, application no. 15, columns 5 and 7, preferably shown in table I B, application no. 15, columns 5 and 7 resp., by standard techniques, such as site-directed mutagenesis and PCR-mediated mutagenesis.

[4129] for the disclosure of the paragraphs [0193.0.0.14] to [0196.0.0.14] see paragraphs [0193.0.0.0] to [0196.0.0.0] above.

[4130] Homologues of the nucleic acid sequences used, with the sequence shown in table I, application no. 15, columns 5 and 7, preferably shown in table I B, application no. 15, columns 5 and 7, comprise also allelic variants with at least approximately 30%, 35%, 40% or 45% homology, by preference at least approximately 50%, 60% or 70%, more preferably at least approximately 90%, 91%, 92%, 93%, 94% or 95% and even more preferably at least approximately 96%, 97%, 98%, 99% or more homology with one of the nucleotide sequences shown or the abovementioned derived nucleic acid sequences or their homologues, derivatives or analogues or parts of these. Allelic variants encompass in particular functional variants which can be obtained by deletion, insertion or substitution of nucleotides from the sequences shown, preferably from table I, application no. 15, columns 5 and 7, preferably shown in table I B, application no. 15, columns 5 and 7, or from the derived nucleic acid sequences, the intention being, however, that the enzyme activity or the biological activity of the resulting proteins synthesized is advantageously retained or increased.

[4131] In one embodiment of the present invention, the nucleic acid molecule of the invention or used in the process of the invention comprises the sequences shown in any of the table I, application no. 15, columns 5 and 7, preferably shown in table I B, application no. 15, columns 5 and 7. It is preferred that the nucleic acid molecule comprises as little as possible other nucleotides not shown in any one of table I, application no. 15, columns 5 and 7, preferably shown in table I B, application no. 15, columns 5 and 7. In one embodiment, the nucleic acid molecule comprises less than 500, 400, 300, 200, 100, 90, 80, 70, 60, 50 or 40 further nucleotides. In a further embodiment, the nucleic acid molecule comprises less than 30, 20 or 10 further nucleotides. In one embodiment, the nucleic acid molecule use in the process of the invention is identical to the sequences shown in table I, application no. 15, columns 5 and 7, preferably shown in table I B, application no. 15, columns 5 and 7.

[4132] Also preferred is that the nucleic acid molecule used in the process of the invention encodes a polypeptide comprising the sequence shown in table II, application no. 15, columns 5 and 7, preferably shown in table II B, application no. 15, columns 5 and 7. In one embodiment, the nucleic acid molecule encodes less than 150, 130, 100, 80, 60, 50, 40 or 30 further amino acids. In a further embodiment, the encoded polypeptide comprises less than 20, 15, 10, 9, 8, 7, 6 or 5 further amino acids. In one embodiment used in the inventive process, the encoded polypeptide is identical to the sequences shown in table II, application no. 15, columns 5 and 7, preferably shown in table II B, application no. 15, columns 5 and 7.

[4133] In one embodiment, the nucleic acid molecule of the invention or used in the process encodes a polypeptide comprising the sequence shown in table II, application no. 15, columns 5 and 7, preferably shown, in table II B, application no. 15, columns 5 and 7 comprises less than 100 further nucleotides. In a further embodiment, said nucleic acid molecule comprises less than 30 further nucleotides. In one embodiment, the nucleic acid molecule used in the process is identical to a coding sequence of the sequences shown in table I, application no. 15, columns 5 and 7, preferably shown in table I B, application no. 15, columns 5 and 7.

[4134] Polypeptides (=proteins), which still have the essential biological or enzymatic activity of the polypeptide of the present invention conferring an increase of the fine chemical i.e. whose activity is essentially not reduced, are polypeptides with at least 10% or 20%, by preference 30% or 40%, especially preferably 50% or 60%, very especially preferably 80% or 90 or more of the wild type biological activity or enzyme activity, advantageously, the activity is essentially not reduced in comparison with the activity of a polypeptide shown in table II, application no. 15, columns 5 and 7 expressed under identical conditions.

[4135] Homologues of table I, application no. 15, columns 5 and 7 or of the derived sequences of table II, application no. 15, columns 5 and 7 also mean truncated sequences, cDNA, single-stranded DNA or RNA of the coding and noncoding DNA sequence. Homologues of said sequences are also understood as meaning derivatives, which comprise noncoding regions such as, for example, UTRs, terminators, enhancers or promoter variants. The promoters upstream of the nucleotide sequences stated can be modified by one or more nucleotide substitution(s), insertion(s) and/or deletion(s) without, however, interfering with the functionality or activity either of the promoters, the open reading frame (=ORF) or with the 3′ regulatory region such as terminators or other 3′ regulatory regions, which are far away from the ORF. It is furthermore possible that the activity of the promoters is increased by modification of their sequence, or that they are replaced completely by more active promoters, even promoters from heterologous organisms. Appropriate promoters are known to the person skilled in the art and are mentioned herein below.

[4136] for the disclosure of the paragraphs [0203.0.0.14] to [0215.0.0.14] see paragraphs [0203.0.0.0] to [0215.0.0.0] above.

[4137] Accordingly, in one embodiment, the invention relates to a nucleic acid molecule, which comprises a nucleic acid molecule selected from the group consisting of:
[4138] a) nucleic acid molecule encoding, preferably at least the mature form, of the polypeptide shown in table II, application no. 15, columns 5 and 7, preferably in table II B, application no. 15, columns 5 and 7; or a fragment thereof conferring an increase in the amount of the respective fine chemical in an organism or a part thereof
[4139] b) nucleic acid molecule comprising, preferably at least the mature form, of the nucleic acid molecule shown in table I, application no. 15, columns 5 and 7, preferably in table I B, application no. 15, columns 5 and 7 or a fragment thereof conferring an increase in the amount of the respective fine chemical in an organism or a part thereof;
[4140] c) nucleic acid molecule whose sequence can be deduced from a polypeptide sequence encoded by a nucleic acid molecule of (a) or (b) as result of the degeneracy of the genetic code and conferring an increase in the amount of the rspectivefine chemical in an organism or a part thereof;
[4141] d) nucleic acid molecule encoding a polypeptide whose sequence has at least 50% identity with the amino acid sequence of the polypeptide encoded by the nucleic acid molecule of (a) to (c) and conferring an increase in the amount of the respective fine chemical in an organism or a part thereof;
[4142] e) nucleic acid molecule which hybridizes with a nucleic acid molecule of (a) to (c) under stringent hybridisation conditions and conferring an increase in the amount of the fine chemical in an organism or a part thereof;
[4143] f) nucleic acid molecule encoding a polypeptide, the polypeptide being derived by substituting, deleting and/or adding one or more amino acids of the amino acid sequence of the polypeptide encoded by the nucleic acid molecules (a) to (d), preferably to (a) to (c), and conferring an increase in the amount of the respective fine chemical in an organism or a part thereof;
[4144] g) nucleic acid molecule encoding a fragment or an epitope of a polypeptide which is encoded by one of the nucleic acid molecules of (a) to (e), preferably to (a) to (c) and conferring an increase in the amount of the fine chemical in an organism or a part thereof;
[4145] h) nucleic acid molecule comprising a nucleic acid molecule which is obtained by amplifying a cDNA library or a genomic library using the primers in table Ill, application no. 15, column 7 and conferring an increase in the amount of the respective fine chemical in an organism or a part thereof;
[4146] i) nucleic acid molecule encoding a polypeptide which is isolated, e.g. from a expression library, with the aid of monoclonal antibodies against a polypeptide encoded by one of the nucleic acid molecules of (a) to (g), preferably to (a) to (c) and conferring an increase in the amount of the respective fine chemical in an organism or a part thereof;
[4147] j) nucleic acid molecule which encodes a polypeptide comprising the consensus sequence shown in table IV, application no. 15, column 7 and conferring an increase in the amount of the respective fine chemical in an organism or a part thereof;
[4148] k) nucleic acid molecule encoding the amino acid sequence of a polypeptide encoding a domain of the polypeptide shown in table II, application no. 15, columns 5 and 7 and conferring an increase in the amount of the respective fine chemical in an organism or a part thereof; and
[4149] l) nucleic acid molecule which is obtainable by screening a suitable nucleic acid library under stringent hybridization conditions with a probe comprising one of the sequences of the nucleic acid molecule of (a) to (k) or with a fragment of at least 15 nt, preferably 20 nt, 30 nt, 50 nt, 100 nt, 200 nt or 500 nt of the nucleic acid molecule characterized in (a) to (h) or of the nucleic acid molecule shown in table I, application no. 15, columns 5 and 7 or a nucleic acid molecule encoding, preferably at least the mature form of, the polypeptide shown in table II, application no. 15, columns 5 and 7, and conferring an increase in the amount of the respective fine chemical in an organism or a part thereof; or which encompasses a sequence which is complementary thereto;
   whereby, preferably, the nucleic acid molecule according to (a) to (l) distinguishes over the sequence depicted in table I A and/or I B, application no. 15, columns 5 and 7 by one or more nucleotides. In one embodiment, the nucleic acid molecule of the invention does not consist of the sequence shown in table I A and/or I B, application no. 15, columns 5 and 7. In another embodiment, the nucleic acid molecule of the present invention is at least 30% identical and less than 100%, 99.999%, 99.99%, 99.9% or 99% identical to the sequence shown in table I A and/or I B, application no. 15, columns 5 and 7. In a further embodiment the nucleic acid molecule does not encode the polypeptide sequence shown in table II A and/or II B, application no. 15, columns 5 and 7. Accordingly, in one embodiment, the nucleic acid molecule of the present invention encodes in one embodiment a polypeptide which differs at least in one or more amino acids from the polypeptide shown in table II A and/or II B, application no. 15, columns 5 and 7 does not encode a protein of the sequence shown in table II A and/or II B, application no. 15, columns 5 and 7. Accordingly, in one embodiment, the protein encoded by a sequence of a nucleic acid according to (a) to (l) does not consist of the sequence shown in table I A and/or I B, application no. 15, columns 5 and 7. In a further embodiment, the protein of the present invention is at least 30% identical to protein sequence depicted in table II A and/or II B, application no. 15, columns 5 and 7 and less than 100%, preferably less than 99.999%, 99.99% or 99.9%, more preferably less than 99%, 985, 97%, 96% or 95% identical to the sequence shown in table II A and/or II B, application no. 15, columns 5 and 7.

[4150] for the disclosure of the paragraphs [0217.0.0.14] to [0226.0.0.14] see paragraphs [0217.0.0.0] to [0226.0.0.0] above.

[4151] In general, vector systems preferably also comprise further cis-regulatory regions such as promoters and terminators and/or selection markers by means of which suitably transformed organisms can be identified. While vir genes and T-DNA sequences are located on the same vector in the case of cointegrated vector systems, binary systems are based on at least two vectors, one of which bears vir genes, but no T-DNA, while a second one bears T-DNA, but no vir gene. Owing to this fact, the last-mentioned vectors are relatively small, easy to manipulate and capable of replication in E. coli and in Agrobacterium. These binary vectors include vectors from the series pBIB-HYG, pPZP, pBecks, pGreen. Those which are preferably used in accordance with the invention are Bin19, pBI101, pBinAR, pGPTV and pCAMBIA. An overview of binary vectors and their use is given by Hellens et al, Trends in Plant Science (2000) 5, 446-451. The vectors are preferably modified in such a manner, that they already contain the nucleic acid coding for the transitpeptide and that the nucleic acids of the invention, preferentially the nucleic acid sequences encoding the polypeptides shown in table II, application no. 15, columns 5 and 7 can be cloned 3′ prime to the transitpeptide encoding sequence, leading to a functional preprotein, which is directed to the plastids and which means that the mature protein fulfills its biological activity.

[4152] for the disclosure of the paragraphs [0228.0.0.14] to [0239.0.0.14] see paragraphs [0228.0.0.0] to [0239.0.0.0] above.

[4153] The abovementioned nucleic acid molecules can be cloned into the nucleic acid constructs or vectors according to the invention in combination together with further genes, or else different genes are introduced by transforming several nucleic acid constructs or vectors (including plasmids) into a host cell, advantageously into a plant cell or a microorganisms.

In addition to the sequence mentioned in Table I, application no. 15, columns 5 and 7 or its derivatives, it is advantageous additionally to express and/or mutate further genes in the organisms. Especially advantageously, additionally at least one further gene of the fatty acid biosynthetic pathway such as for palmitate, palmitoleate, stearate and/or
oleate is expressed in the organisms such as plants or microorganisms. It is also possible that the regulation of the natural genes has been modified advantageously so that the gene and/or its gene product is no longer subject to the regulatory mechanisms which exist in the organisms. This leads to an increased synthesis of the respective desired fine chemical since, for example, feedback regulations no longer exist to the same extent or not at all. In addition it might be advantageously to combine the sequences shown in Table I, application no. 15, columns 5 and 7 with genes which generally support or enhances to growth or yield of the target organism, for example genes which lead to faster growth rate of microorganisms or genes which produces stress-, pathogen, or herbicide resistant plants.

[4154] for the disclosure of the paragraphs [0241.0.5.14] and [0242.0.5.14] see paragraphs [0241.0.5.5] and [0242.0.5.5] above.

[4155] In a further advantageous embodiment of the process of the invention, the organisms used in the process are those in which simultaneously a fatty acid degrading protein is attenuated, in particular by reducing the rate of expression of the corresponding gene.

[4156] for the disclosure of this paragraph see paragraph [0242.2.5.5] above.

[4157] for the disclosure of the paragraphs [0243.0.0.14] to [0264.0.0.14] see paragraphs [0243.0.0.0] to [0264.0.0.0] above.

[4158] Other preferred sequences for use in operable linkage in gene expression constructs are targeting sequences, which are required for targeting the gene product into specific cell compartments (for a review, see Kermode, Crit. Rev. Plant Sci. 15, 4 (1996) 285-423 and references cited therein), for example into the vacuole, the nucleus, all types of plastids, such as amyloplasts, chloroplasts, chromoplasts, the extracellular space, the mitochondria, the endoplasmic reticulum, elaioplasts, peroxisomes, glycosomes, and other compartments of cells or extracellular preferred are sequences, which are involved in targeting to plastids as mentioned above. Sequences, which must be mentioned in this context are, in particular, the signal-peptide- or transit-peptide-encoding sequences which are known per se. For example, plastid-transit-peptide-encoding sequences enable the targeting of the expression product into the plastids of a plant cell. Targeting sequences are also known for eukaryotic and to a lower extent for prokaryotic organisms and can advantageously be operable linked with the nucleic acid molecule of the present invention as shown in table I, application no. 15, columns 5 and 7 and described herein to achieve an expression in one of said compartments or extracellular.

[4159] for the disclosure of the paragraphs [0266.0.0.14] to [0287.0.0.14] see paragraphs [0266.0.0.0] to [0287.0.0.0] above.

[4160] Accordingly, one embodiment of the invention relates to a vector where the nucleic acid molecule according to the invention is linked operably to regulatory sequences which permit the expression in a prokaryotic or eukaryotic or in a prokaryotic and eukaryotic host. A further preferred embodiment of the invention relates to a vector in which a nucleic acid sequence encoding one of the polypeptides shown in table II, application no. 15, columns 5 and 7 or their homologs is functionally linked to a plastidial targeting sequence. A further preferred embodiment of the invention relates to a vector in which a nucleic acid sequence encoding one of the polypeptides shown in table II, application no. 15, columns 5 and 7 or their homologs is functionally linked to a regulatory sequences which permit the expression in plastids.

[4161] for the disclosure of the paragraphs [0289.0.0.14] to [0296.0.0.14] see paragraphs [0289.0.0.0] to [0296.0.0.0] above.

[4162] Moreover, native polypeptide conferring the increase of the fine chemical in an organism or part thereof can be isolated from cells (e.g., endothelial cells), for example using the antibody of the present invention as described below, in particular, an anti-b0403, anti-b0488, anti-b1410, anti-b1627, anti-b1758, anti-b1980, anti-b2066, anti-b2223, anti-b1095, ant-YPR035W and/or anti-YLR099C protein antibody or an antibody against polypeptides as shown in table II, application no. 15, columns 5 and 7, which can be produced by standard techniques utilizing the polypeptide of the present invention or fragment thereof, i.e., the polypeptide of this invention. Preferred are monoclonal antibodies.

[4163] for the disclosure of this paragraph see paragraph [0298.0.0.0] above.

[4164] In one embodiment, the present invention relates to a polypeptide having the sequence shown in table II, application no. 15, columns 5 and 7 or as coded by the nucleic acid molecule shown in table I, application no. 15, columns 5 and 7 or functional homologues thereof.

[4165] In one advantageous embodiment, in the method of the present invention the activity of a polypeptide is increased comprising or consisting of the consensus sequence shown in table IV, application no. 15, columns 7 and in one another embodiment, the present invention relates to a polypeptide comprising or consisting of the consensus sequence shown in table IV, application no. 15, column 7 whereby 20 or less, preferably 15 or 10, preferably 9, 8, 7, or 6, more preferred 5 or 4, even more preferred 3, even more preferred 2, even more preferred 1, most preferred 0 of the amino acids positions indicated can be replaced by any amino acid.

[4166] for the disclosure of the paragraphs [0301.0.0.14] to [0304.0.0.14] see paragraphs [0301.0.0.0] to [0304.0.0.0] above.

[4167] In one advantageous embodiment, the method of the present invention comprises the increasing of a polypeptide comprising or consisting of plant or microorganism specific consensus sequences.

In one embodiment, said polypeptide of the invention distinguishes over the sequence shown in table II A and/or II B, application no. 15, columns 5 and 7 by one or more amino acids. In one embodiment, polypeptide distinguishes form the sequence shown in table II A and/or II B, application no. 15, columns 5 and 7 by more than 5, 6, 7, 8 or 9 amino acids, preferably by more than 10, 15, 20, 25 or 30 amino acids, even more preferred are more than 40, 50, or 60 amino acids and, preferably, the sequence of the polypeptide of the invention distinguishes from the sequence shown in table II A and/or II B, application no. 15, columns 5 and 7 by not more than 80% or 70% of the amino acids, preferably not more than 60% or 50%, more preferred not more than 40% or 30%, even more preferred not more than 20% or 10%. In an other embodiment, said polypeptide of the invention does not consist of the sequence shown in table II A and/or II B, application no. 15, columns 5 and 7.

[4168] for the disclosure of this paragraph see paragraph [0306.0.0.0] above.

[4169] In one embodiment, the invention relates to polypeptide conferring an increase in the fine chemical in an organism or part being encoded by the nucleic acid molecule of the invention or used in the process of the invention and having a sequence which distinguishes from the sequence as shown in table II A and/or II B, application no. 15, columns 5 and 7 by one or more amino acids. In another embodiment, said polypeptide of the invention does not consist of the sequence shown in table II A and/or II B, application no. 15, columns 5 and 7. In a further embodiment, said polypeptide of the present invention is less than 100%, 99.999%, 99.99%, 99.9% or 99% identical. In one embodiment, said polypeptide does not consist of the sequence encoded by the nucleic acid molecules shown in table I A and/or I B, application no. 15, columns 5 and 7.

[4170] In one embodiment, the present invention relates to a polypeptide having the activity of the protein as shown in table II A and/or II B, application no. 15, column 3, which distinguishes over the sequence depicted in table II A and/or II B, application no. 15, columns 5 and 7 by one or more amino acids, preferably by more than 5, 6, 7, 8 or 9 amino acids, preferably by more than 10, 15, 20, 25 or 30 amino acids, even more preferred are more than 40, 50, or 60 amino acids but even more preferred by less than 70% of the amino acids, more preferred by less than 50%, even more preferred my less than 30% or 25%, more preferred are 20% or 15%, even more preferred are less than 10%. In a further preferred embodiment the polypeptide of the invention takes the form of a preprotein consisting of a plastidial transitpeptide joint to a polypeptide having the activity of the protein as shown in table II A and/or II B, column 3, from which the transitpeptide is preferably cleaved off upon transport of the preprotein into the organelle for example into the plastid or mitochondria.

[4171] for the disclosure of the paragraphs [0309.0.0.14] to [0311.0.0.14] see paragraphs [0309.0.0.0] to [0311.0.0.0] above.

[4172] A polypeptide of the invention can participate in the process of the present invention. The polypeptide or a portion thereof comprises preferably an amino acid sequence, which is sufficiently homologous to an amino acid sequence shown in table II, application no. 15, columns 5 and 7.

[4173] Further, the polypeptide can have an amino acid sequence which is encoded by a nucleotide sequence which hybridizes, preferably hybridizes under stringent conditions as described above, to a nucleotide sequence of the nucleic acid molecule of the present invention. Accordingly, the polypeptide has an amino acid sequence which is encoded by a nucleotide sequence that is at least about 35%, 40%, 45%, 50%, 55%, 60%, 65% or 70%, preferably at least about 75%, 80%, 85% or 90, and more preferably at least about 91%, 92%, 93%, 94% or 95%, and even more preferably at least about 96%, 97%, 98%, 99% or more homologous to one of the amino acid sequences as shown in table II A and/or II B, application no. 15, columns 5 and 7. The preferred polypeptide of the present invention preferably possesses at least one of the activities according to the invention and described herein. A preferred polypeptide of the present invention includes an amino acid sequence encoded by a nucleotide sequence which hybridizes, preferably hybridizes under stringent conditions, to a nucleotide sequence of table I A and/or I B, application no. 15, columns 5 and 7 or which is homologous thereto, as defined above.

[4174] Accordingly the polypeptide of the present invention can vary from the sequences shown in table II A and/or II B, application no. 15, columns 5 and 7 in amino acid sequence due to natural variation or mutagenesis, as described in detail herein. Accordingly, the polypeptide comprise an amino acid sequence which is at least about 35%, 40%, 45%, 50%, 55%, 60%, 65% or 70%, preferably at least about 75%, 80%, 85% or 90, and more preferably at least about 91%, 92%, 93%, 94% or 95%, and most preferably at least about 96%, 97%, 98%, 99% or more homologous to an entire amino acid sequence shown in table II A and/or II B, application no. 15, columns 5 and 7.

[4175] for the disclosure of this paragraph see paragraph [0315.0.0.0] above.

[4176] Biologically active portions of an polypeptide of the present invention include peptides comprising amino acid sequences derived from the amino acid sequence of the polypeptide of the present invention or used in the process of the present invention, e.g., the amino acid sequence shown in table II, application no. 15, columns 5 and 7 or the amino acid sequence of a protein homologous thereto, which include fewer amino acids than a full length polypeptide of the present invention or used in the process of the present invention or the full length protein which is homologous to an polypeptide of the present invention or used in the process of the present invention depicted herein, and exhibit at least one activity of polypeptide of the present invention or used in the process of the present invention.

[4177] for the disclosure of this paragraph see paragraph [0317.0.0.0] above.

[4178] Manipulation of the nucleic acid molecule of the invention may result in the production of a protein having differences from the wild-type protein as shown in table II, application no. 15, column 3. Differences shall mean at least one amino acid different from the sequences as shown in table II, application no. 15, column 3, preferably at least 2, 3, 4, 5, 6, 7, 8, 9 or 10 amino acids, more preferably at least 15, 20, 25, 30, 35, 40, 45 or 50 amino acids different from the sequences as shown in table II, application no. 15, column 3. These proteins may be improved in efficiency or activity, may be present in greater numbers in the cell than is usual, or may be decreased in efficiency or activity in relation to the wild type protein.

[4179] Any mutagenesis strategies for the polypeptide of the present invention or the polypeptide used in the process of the present invention to result in increasing said activity are not meant to be limiting; variations on these strategies will be readily apparent to one skilled in the art. Using such strategies, and incorporating the mechanisms disclosed herein, the nucleic acid molecule and polypeptide of the invention may be utilized to generate plants or parts thereof, expressing wildtype proteins or mutated proteins of the proteins as shown in table II, application no. 15, column 3. The nucleic acid molecules and polypeptide molecules of the invention are expressed such that the yield, production, and/or efficiency of production of a desired compound is improved.

[4180] for the disclosure of the paragraphs [0320.0.0.14] to [0322.0.0.14] see paragraphs [0320.0.0.0] to [0322.0.0.0] above.

[4181] In one embodiment, a protein (=polypeptide) as shown in table II, application no. 15, column 3 refers to a polypeptide having an amino acid sequence corresponding to the polypeptide of the invention or used in the process of the invention, whereas a “non-inventive protein or polypeptide” or “other polypeptide” refers to a polypeptide having an amino acid sequence corresponding to a protein which is not substantially homologous to a polypeptide of the invention, preferably which is not substantially homologous to a polypeptide or protein as shown in table II, application no. 15, column 3, e.g., a protein which does not confer the activity described herein and which is derived from the same or a different organism.

[4182] for the disclosure of the paragraphs [0324.0.0.14] to [0329.0.0.14] see paragraphs [0324.0.0.0] to [0329.0.0.0] above.

[4183] In an especially preferred embodiment, the polypeptide according to the invention furthermore also does not have the sequences of those proteins, which are encoded by the sequences shown in table II, application no. 15, columns 5 and 7.

[4184] for the disclosure of the paragraphs [0331.0.0.14] to [0346.0.0.14] see paragraphs [0331.0.0.0] to [0346.0.0.0] above.

[4185] Accordingly the present invention relates to any cell transgenic for any nucleic acid characterized as part of the invention, e.g. conferring the increase of the fine chemical in a cell or an organism or a part thereof, e.g. the nucleic acid molecule of the invention, the nucleic acid construct of the invention, the antisense molecule of the invention, the vector of the invention or a nucleic acid molecule encoding the polypeptide of the invention, e.g. encoding a polypeptide having an activity as the protein as shown in table II, application no. 15, column 3. Due to the above mentioned activity the fine chemical content in a cell or an organism is increased. For example, due to modulation or manipulation, the cellular activity is increased preferably in organelles such as plastids or mitochondria, e.g. due to an increased expression or specific activity or specific targeting of the subject matters of the invention in a cell or an organism or a part thereof especially in organelles such as plastids or mitochondria. Transgenic for a polypeptide having a protein or activity means herein that due to modulation or manipulation of the genome, the activity of protein as shown in table II, application no. 15, column 3 or a protein as shown in table II, application no. 15, column 3-like activity is increased in the cell or organism or part thereof especially in organelles such as plastids or mitochondria. Examples are described above in context with the process of the invention.

[4186] for the disclosure of this paragraph see paragraph [0348.0.0.0] above.

[4187] A naturally occurring expression cassette—for example the naturally occurring combination of the promoter of the gene encoding a protein as shown in table II, application no. 15, column 3 with the corresponding encoding gene—becomes a transgenic expression cassette when it is modified by non-natural, synthetic “artificial” methods such as, for example, mutagenization. Such methods have been described (U.S. Pat. No. 5,565,350; WO 00/15815; also see above).

[4188] for the disclosure of the paragraphs [0350.0.0.14] to [0358.0.0.14] see paragraphs [0350.0.0.0] to [0358.0.0.0] above.

[4189] for the disclosure of the paragraph [0359.0.5.14] see paragraph [0359.0.0.14] above.

[4190] for the disclosure of the paragraphs [0360.0.0.14] to [0362.0.0.14] see paragraphs [0360.0.0.0] to [0362.0.0.0] above.

[4191] for the disclosure of the paragraphs [0363.0.5.14] to [0365.0.0.14] see paragraphs [0363.0.5.5] to [0365.0.5.5] above.

[4192] for the disclosure of the paragraphs [0366.0.0.14] to [0369.0.0.14] see paragraphs [0366.0.0.0] to [0369.0.0.0] above.

[4193] The fermentation broths obtained in this way, containing in particular the fine chemical as indicated in column 6 “metabolites” for application no. 15 in any one of Tables I to IV, resp., triglycerides, lipids, oils and/or fats containing the fine chemical as indicated in column 6 “metabolites” for application no. 15 in any one of Tables I to IV, resp, normally have a dry matter content of from 7.5 to 25% by weight. The fermentation broth can be processed further. Depending on requirements, the biomass can be separated, such as, for example, by centrifugation, filtration, decantation or a combination of these methods, from the fermentation broth or left completely in it. Afterwards the biomass can be extracted without any further process steps or disrupted and then extracted. If necessary the fermentation broth can be thickened or concentrated by known methods, such as, for example, with the aid of a rotary evaporator, thin-film evaporator, falling film evaporator, by reverse osmosis or by nanofiltration. This concentrated fermentation broth can then be worked up by extraction.

[4194] for the disclosure of this paragraph see paragraph [0371.0.5.5] above.

[4195] for the disclosure of the paragraphs [0372.0.0.14] to [0376.0.0.14], [0376.1.0.14] and [0377.0.0.14] see paragraphs [0372.0.0.0] to [0376.0.0.0], [0376.1.0.0] and [0377.0.0.0] above.

[4196] for the disclosure of the paragraph [0376.1.0.14] see paragraph [0376.1.0.0] above.

[4197] for the disclosure of the paragraph [0377.0.0.14] see paragraphs [0372.0.0.0] to [0376.0.0.0], [0376.1.0.0] and [0377.0.0.0] above.

[4198] In one embodiment, the present invention relates to a method for the identification of a gene product conferring an increase in the fine chemical production in a cell, comprising the following steps:
[4199] a) contacting, e.g. hybridising, the nucleic acid molecules of a sample, e.g. cells, tissues, plants or microorganisms or a nucleic acid library, which can contain a candidate gene encoding a gene product conferring an increase in the fine chemical after expression, with the nucleic acid molecule of the present invention;
[4200] b) identifying the nucleic acid molecules, which hybridize under relaxed stringent conditions with the nucleic acid molecule of the present invention in particular to the nucleic acid molecule sequence shown in table I, application no. 15, columns 5 and 7, preferably in table I B, application no. 15, columns 5 and 7, and, optionally, isolating the full length cDNA clone or complete genomic clone;
[4201] c) introducing the candidate nucleic acid molecules in host cells, preferably in a plant cell or a microorganism, appropriate for producing the fine chemical;
[4202] d) expressing the identified nucleic acid molecules in the host cells;
[4203] e) assaying the fine chemical level in the host cells; and
[4204] f) identifying the nucleic acid molecule and its gene product which expression confers an increase in the fine chemical level in the host cell after expression compared to the wild type.

[4205] for the disclosure of the paragraphs [0379.0.0.14] to [0383.0.0.14] see paragraphs [0379.0.0.0] to [0383.0.0.0] above.

[4206] The screen for a gene product or an agonist conferring an increase in the fine chemical production can be performed by growth of an organism for example a microorganism in the presence of growth reducing amounts of an inhibitor of the synthesis of the fine chemical. Better growth, eg higher dividing rate or high dry mass in comparison to the control under such conditions would identify a gene or gene product or an agonist conferring an increase in fine chemical production.

One can think to screen for increased fine chemical production by for example resistance to drugs blocking fine chemical synthesis and looking whether this effect is dependent on the proteins as shown in table II, application no. 15, column 3, eg comparing near identical organisms with low and high activity of the proteins as shown in table II, application no. 15, column 3.

[4207] for the disclosure of the paragraphs [0385.0.0.14] to [0404.0.0.14] see paragraphs [0385.0.0.0] to [0404.0.0.0] above.

[4208] for the disclosure of this paragraph see paragraph [0405.0.5.5] above.

[4209] for the disclosure of the paragraphs [0406.0.0.14] to [0435.0.0.14] see paragraphs [0406.0.0.0] to [0435.0.0.0] above.

[4210] Hexadecenoic acid, preferably 9-hexadecenoic acid, more preferably trans-9-hexadecenoic acid and/or

2-hydroxy palmitic acid and/or
heptadecanoic acid and/or
2-hydroxy-tetracosenoic-acid, preferably 2-hydroxy-15-tetracosenoic acid and/or
hexadecadienoic acid, preferably delta 7,10 hexadecadienoic acid and/or
octadecenoic acid, preferably 9-Octadecenoic acid, more preferably (Z)-9-octadecenoic acid and/or
hexadecatrienoic acid, preferably delta 7,10,13 hexadecatrienoic acid or triglycerides, lipids, oils and/or fats containing hexadecenoic acid, preferably 9-hexadecenoic acid, more preferably trans-9-hexadecenoic acid and/or
2-hydroxy palmitic acid and/or
heptadecanoic acid and/or
2-hydroxy-tetracosenoic-acid, preferably 2-hydroxy-15-tetracosenoic acid and/or
hexadecadienoic acid, preferably delta 7,10 hexadecadienoic acid and/or
octadecenoic acid, preferably 9-Octadecenoic acid, more preferably (Z)-9-octadecenoic acid and/or
hexadecatrienoic acid, preferably delta 7,10,13 hexadecatrienoic acid production in Mortierella
The fatty acid production can be analysed as mentioned above. The proteins and nucleic acids can be analysed as mentioned below.

[4211] for the disclosure of the paragraphs [0437.0.0.14] and [0438.0.0.14] see paragraphs [0437.0.0.0] and [0438.0.0.0] above.

[4212] for the disclosure of the paragraphs [0439.0.5.14] and [0440.0.5.14] see paragraphs [0439.0.5.5] and [0440.0.5.5] above.

[4213] for the disclosure of this paragraph see [0441.0.0.0] above.

[4214] for the disclosure of the paragraphs [0442.0.5.14] and [0445.0.5.14] see paragraphs [0442.0.5.5] and [0445.0.5.5] above.

[4215] for the disclosure of the paragraphs [0446.0.0.14] to [0497.0.0.14] see paragraphs [0446.0.0.0] to [0497.0.0.0] above.
[4216] The results of the different plant analyses can be seen from the table, which follows:

TABLE VI

| | | Method/ | Min.- | Max.- |
|---|---|---|---|---|
| ORF | Metabolite | Analytics | Value | Value |
| b0403 | Nervonic acid (C24:1) | GC | 1.23 | 1.43 |
| b0488 | 2-Hydroxypalmitic acid (2-OH-C16:0) | GC | 1.20 | 1.29 |
| b0598 | Nervonic acid (C24:1) | GC | 1.24 | 1.38 |
| b0621 | Nervonic acid (C24:1) | GC | 1.24 | 1.34 |
| b0720 | 2-Hydroxypalmitic acid (2-OH-C16:0) | GC | 1.18 | 1.28 |
| b0720 | Nervonic acid (C24:1) | GC | 1.22 | 1.59 |
| b0931 | 2-Hydroxypalmitic acid (2-OH-C16:0) | GC | 1.20 | 1.33 |
| b1095 | trans-9-Hexadecenoic acid (C16:trans[9]1) | GC | 1.24 | 1.52 |
| b1625 | Nervonic acid (C24:1) | GC | 1.23 | 1.39 |
| b1627 | Nervonic acid (C24:1) | GC | 1.25 | 1.42 |
| b1700 | Oleic acid (C18:cis[9]1) | GC | 1.23 | 1.87 |
| b1700 | 2-Hydroxypalmitic acid (2-OH-C16:0) | GC | 1.17 | 1.20 |
| b1900 | Nervonic acid (C24:1) | GC | 1.25 | 1.35 |
| b1933 | Nervonic acid (C24:1) | GC | 1.22 | 1.26 |
| b1980 | 2-Hydroxypalmitic acid (2-OH-C16:0) | GC | 1.20 | 1.27 |
| b2284 | Nervonic acid (C24:1) | GC | 1.30 | 1.65 |
| b2799 | Nervonic acid (C24:1) | GC | 1.27 | 1.43 |
| b3429 | Hexadecadienoic acid (C16:cis[7,10]2) | GC | 1.31 | 1.83 |
| b3429 | Hexadecatrienoic acid (C16:cis[7,10,13]3) | GC | 1.13 | 1.39 |
| b3568 | Nervonic acid (C24:1) | GC | 1.22 | 1.49 |
| b3568 | trans-9-Hexadecenoic acid (C16:trans[9]1) | GC | 1.22 | 1.38 |
| b3708 | 2-Hydroxypalmitic acid (2-OH-C16:0) | GC | 1.22 | 1.29 |
| b3708 | Hexadecadienoic acid (C16:cis[7,10]2) | GC | 1.23 | 1.84 |
| b3708 | Hexadecatrienoic acid (C16:cis[7,10,13]3) | GC | 1.16 | 1.32 |
| b3728 | Nervonic acid (C24:1) | GC | 1.22 | 1.30 |
| YDR035W | Heptadecanoic acid (C17:0) | GC | 1.21 | 1.40 |
| YJR073C | Hexadecadienoic acid (C16:cis[7,10]2) | GC | 1.22 | 1.41 |
| YNL241C | Hexadecadienoic acid (C16:cis[7,10]2) | GC | 1.22 | 1.36 |
| YNL241C | Hexadecatrienoic acid (C16:cis[7,10,13]3) | GC | 1.17 | 1.24 |

[4217] for the disclosure of the paragraphs [0499.0.0.14] and [0500.0.0.14] see paragraphs [0499.0.0.0] and [0500.0.0.0] above.

### Example 15a

### Engineering Ryegrass Plants by Over-Expressing YDR035W from Saccharomyces cerevisiae or Homologs of YDR035W from Other Organisms

[4218] for the disclosure of the paragraphs [0502.0.0.14] to [0508.0.0.14] see paragraphs [0502.0.0.0] to [0508.0.0.0] above.

### Example 15b

### Engineering Soybean Plants by Over-Expressing YDR035W from Saccharomyces cerevisiae or Homologs of YDR035W from Other Organisms

[4219] for the disclosure of the paragraphs [0510.0.0.14] to [0513.0.0.14] see paragraphs [0510.0.0.0] to [0513.0.0.0] above.

### Example 15c

### Engineering Corn Plants by Over-Expressing YDR035W from Saccharomyces cerevisiae or Homologs of YDR035W from Other Organisms

[4220] for the disclosure of the paragraphs [0515.0.0.14] to [0540.0.0.14] see paragraphs [0515.0.0.0] to [0540.0.0.0] above.

### Example 15d

### Engineering Wheat Plants by Over-Expressing YDR035W from Saccharomyces cerevisiae or Homologs of YDR035W from Other Organisms

[4221] for the disclosure of the paragraphs [0542.0.0.14] to [0544.0.0.14] see paragraphs [0542.0.0.0] to [0544.0.0.0] above.

### Example 15e

### Engineering Rapeseed/Canola Plants by Overexpressing YDR035W from Saccharomyces cerevisiae or Homologs of YDR035W from Other Organisms

[4222] for the disclosure of the paragraphs [0546.0.0.14] to [0549.0.0.14] see paragraphs [0544.0.0.0] to [0549.0.0.0] above.

### Example 15f

### Engineering Alfalfa Plants by Over-Expressing YDR035W from Saccharomyces cerevisiae or Homologs of YDR035W from Other Organisms

[4223] for the disclosure of the paragraphs [0551.0.0.14] to [0554.0.0.14] see paragraphs [0551.0.0.0] to [0554.0.0.0] above.

### Example 16

### Metabolite Profiling Info from Zea mays

[4224] Zea mays plants were engineered as described in Example 15c.
Metabolic results were either obtained from regenerated primary transformants (T0) or from the following progeny generation (T1) in comparison to appropriate control plants. The results are shown in table VII as minimal (MIN) or maximal changes (MAX) in the respective fine chemical (column “metabolite”) in genetically modified corn plants expressing the sequence listed in column 1 (ORF):

TABLE VII

| ORF | Metabolite | MIN | MAX |
|---|---|---|---|
| YDR035W | Heptadecanoic acid (C17:0) | 1.43 | 1.68 |

In one embodiment, in case the activity of the YDR035W from Saccharomyces cerevisiae is increased in corn plants, preferably, an increase of hetadecanoic acid between 43% and 68% or more is conferred.

[4225] for the disclosure of this paragraph see [0554.2.0.0] above.

[4226] for the disclosure of this paragraph see [0555.0.0.0] above.

[4227] for the disclosure of this paragraph see [0001.0.0.0].

[4228] The discovery in Arabidopsis of citramalaic acid (Fiehn et al. 2000 Nature Biotechnology 18, 1157-1161) a potential precursor of pyruvic acid and acetate suggests a novel aspect of carbon metabolism and furthermore suggests the existence of a tricarboxylic acid cycle bypass previously found only in bacteria.

[4229] Malic acid is an alpha-hydroxy organic acid. Its salt is named as malate. It is found in apples and other fruits and therefore named as fruit acid. Malic acid especially in the form of its anion malate, is a key intermediate in the major biochemical energy-producing cycle in cells known as the citric acid or Krebs cycle located in the cells' mitochondria.

It is an important compound together with magnesium for the treatment of fibromyalgia; a rheumatic illness which affects often middle-aged women.
D-Malate is an optically active compound which can be used as a synthon in organic synthesis, as a resolving agent and as a ligand in asymmetric catalysis.
The malic acid oxaloacetate shuttle is characteristic for plant cells. It transports redox equivalents intracellularly. Malic acid is not only a central metabolite in intermediary flow of carbon in organisms. In higher plants, vacuolar malic acid accumulation, and hence, transtonoplast malic acid transport, also plays a paramount role in many physiological functions. These include adjustment of osmotic and turgor potentials in extension growth and movements of stomata and pulvini, pH-regulation, e.g. during nitrate reduction, and others (for review, see Lüttge et al, Plant Physiol, 124(2000),1335-1348).
Osawa and Matsumoto, Plant Physiol, 126(2001), 411-420 discuss the involvement of malic acid in aluminium resistance in plants. Malic acid is a common constituent of all plants, and its formation is controlled by an enzyme (protein catalyst) called malic acid dehydrogenase (MDH). Malic acid occupies a central role in plant metabolism. Its importance in plant mineral nutrition is reflected by the role it plays in symbiotic nitrogen fixation, phosphorus acquisition, and aluminum tolerance. During phosphorus deficiency, malic acid is frequently secreted from roots to release unavailable forms of phosphorus. In nitrogen-fixing root nodules, malic acid is the primary substrate for bacteroid respiration, thus fueling nitrogenase.
Citramalate (=(2S)-2-hydroxy-2-methylbutanedioate or (S)-2-Methylmalic acid) is an derivative of malic acid and produced from itaconic acid.

[4230] Pyruvic acid is a naturally occurring component in plants and vegetables and in the body, where it is inherently involved in metabolism, the process whereby energy is produced. Pyruvic acid represents the final step in the metabolism of glucose or starch. Increased pyruvic acid production in yeast strains is known (WO 04/099425).

Pyruvic acid is used commercially to produce its salts and esters (pyruvates) used as dietary supplements for the effect of enhancing weight loss. Pyruvic acid is used for the synthesis of amino acids (alanine, tyrosine, phenylalanine, and tryptophan) and used in biochemical research. Its derivatives are used in making food additives and flavoring agents.

[4231] Glyceric acid is an important precursor in the anabolism of amino acids, in particular for serin and glycin. Further, the energy level of a cell may be depend on the level of glyceric acid found. Glycerate and glycerate-3-phosphate form a shuttle for the transportation of energy equivalents, e.g. during photorespiration between glycosomes and peroxisomes.

Glyceric acid has an diuretic effect.

[4232] Succinic acid is an intermediate of the citric acid cycle (and the glyoxylate cycle) produced by action of the enzyme succinyl-CoA synthetase on succinyl-CoA. Succinic acid is converted to fumaric acid by action of the enzyme succinic acid dehydrogenase (with formation of FADH₂).

It is used as flavoring agent for food and beverages. Succinic acid is an intermediate for a lot of chemical compounds such as dyes, perfumes, lacquers, photographic chemicals, alkyd resins or plasticizer. Furthermore it is also an intermediate used for the production of medicines used as sedatives, contraceptives or anticancer drugs.

[4233] Fumaric acid is another intermediate of the citric acid cycle (Krebs cycle). It is synthesized from succinic acid.

Fumarate, also called fumaric acid, is a useful compound in treatment of psoriasis, which is a chronic, incurable, disabling skin disease characterised by red, scaly plaques. Approximately 23% of psoriasis patients also have an accompanying arthritis that can become debilitating.
Threonolactone is another compound used for the treatment of dermatological disorders.
Due to these interesting physiological roles and agrobiotechnological potential of citramalic acid (=citramalate, hydroxypyrotartaric acid), glyceric acid (=glycerate), fumaric acid (=fumarate), malic acid (=malate), pyruvic acid (=pyruvate), succinic acid (=succinate) and/or threonolactone there is a need to identify the genes of enzymes and other proteins involved in citramalic acid, glyceric acid, fumaric acid, malic acid, pyruvic acid, succinic acid and/or threonolactone metabolism, and to generate mutants or transgenic plant lines, which are able to modify the citramalic acid, glyceric acid, fumaric acid, malic acid, pyruvic acid, succinic acid and/or threonolactone content in the plant.

[4234] One way to increase the productive capacity of biosynthesis is to apply recombinant DNA technology. Thus, it would be desirable to produce citramalic acid, glyceric acid, fumaric acid, malic acid, pyruvic acid, succinic acid and/or threonolactone in plants. That type of production permits control over quality, quantity and selection of the most suitable and efficient producer organisms. The latter is especially important for commercial production economics and therefore availability to consumers.

Methods of recombinant DNA technology have been used for some years to improve the production of fine chemicals in microorganisms and plants by amplifying individual biosynthesis genes and investigating the effect on production of fine chemicals.

[4235] Thus, it would be advantageous if an algae, plant or other microorganism were available which produce large amounts citramalic acid, glyceric acid, fumaric acid, malic acid, pyruvic acid, succinic acid and/or threonolactone. The invention discussed hereinafter relates in some embodiments to such transformed eukaryotic organisms.

It would also be advantageous if plants were available whose roots, leaves, stem, fruits or flowers produced large amounts of citramalic acid, glyceric acid, fumaric acid, malic acid, pyruvic acid, succinic acid and/or threonolactone. The invention discussed hereinafter relates in some embodiments to such transformed plants.

[4236] Therefore improving the quality of foodstuffs and animal feeds is an important task of the food-and-feed industry. It is further a task to increase the productivity of plants so that the content of citramalic acid, glyceric acid, fumaric acid, malic acid, pyruvic acid, succinic acid and/or threonolactone in the plants are increased. Said products can be isolated from the plants and used for the production of cosmetics and pharmaceuticals.

[4237] To ensure a high quality of foods, animal feeds, cosmetics and pharmaceuticals, it is therefore necessary to make the aforementioned compounds in safe plants.

[4238] Accordingly, there is still a great demand for new and more suitable genes which encode enzymes which participate in the biosynthesis of citramalic acid, glyceric acid, fumaric acid, malic acid, pyruvic acid, succinic acid and/or threonolactone, and make it possible to produce them specifically on an industrial scale without unwanted byproducts forming. In the selection of genes for biosynthesis two characteristics above all are particularly important. On the one hand, there is as ever a need for improved processes for obtaining the highest possible contents of said compounds; on the other hand as less as possible byproducts should be produced in the production process.

[4239] for the disclosure of this paragraph see [0013.0.0.0] above.

[4240] Accordingly, in a first embodiment, the invention relates to a process for the production of a fine chemical, whereby the fine chemical is citramalic acid, glyceric acid, fumaric acid, malic acid, pyruvic acid, succinic acid and/or threonolactone or their salts, amides, thioesters or esters. Accordingly, in the present invention, the term “the fine chemical” as used herein relates to “citramalic acid, glyceric acid, fumaric acid, malic acid, pyruvic acid, succinic acid and/or threonolactone or their salts, amides, thioesters or esters”. Further, the term “the fine chemicals” as used herein also relates to fine chemicals comprising citramalic acid, glyceric acid, fumaric acid, malic acid, pyruvic acid, succinic acid and/or threonolactone or their salts, amides, thioesters or esters.

[4241] In one embodiment, the term “citramalic acid, glyceric acid, fumaric acid, malic acid, pyruvic acid, succinic acid and/or threonolactone or their salts, amides, thioesters or esters”, “the fine chemical” or “the respective fine chemical” means at least one chemical compound selected from the group consisting of citramalic acid, glyceric acid, fumaric acid, malic acid, pyruvic acid, succinic acid and/or threonolactone or their salts, amides, thioesters or esters. Throughout the specification the term “the fine chemical” or “the respective fine chemical” means a compound selected from the group consisting of citramalic acid, glyceric acid, fumaric acid, malic acid, pyruvic acid, succinic acid and/or threonolactone or their salts, amides, thioesters or esters in free form or bound to other compounds such as proteins.

In one embodiment, the term “the fine chemical” and the term “the respective fine chemical” mean at least one chemical compound with an activity of the abovementioned fine chemical.
In one embodiment, the term “the fine chemical” or “the respective fine chemical” means a citramalic acid, its salts, amides, thioesters and/or esters.
In one embodiment, the term “the fine chemical” or “the respective fine chemical” means a glyceric acid, its salts, amides, thioesters and/or esters.
In another embodiment, the term “the fine chemical” or “the respective fine chemical” means fumaric acid, its salts, amides, thioesters and/or esters. In one embodiment, the term “the fine chemical” or “the respective fine chemical” means malic acid, its salts, amides, thioesters and/or esters. In further another embodiment, the term “the fine chemical” or “the respective fine chemical” means pyruvic acid, its salts, amides, thioesters and/or esters. In one embodiment, the term “the fine chemical” or “the respective fine chemical” means succinic acid, its salts, amides, thioesters and/or esters. In one embodiment, the term “the fine chemical” or “the respective fine chemical” means threonolactone. Throughout the specification the term “the fine chemical” or “the respective fine chemical” means citramalic acid, glyceric acid, fumaric acid, malic acid, pyruvic acid, succinic acid and/or threonolactone or their salts, amides, thioesters or esters in free form or bound to other compounds such as proteins, lipids or sugars or sugar polymers, like glucoside, e.g. diglucoside.
In particular it is known to the skilled that anionic compounds as acids are present in an equilibrium of the acid and its salts according to the pH present in the respective compartment of the cell or organism and the pK of the acid. Thus, the term “the fine chemical”, the term “the respective fine chemical”, the term “acid” or the use of a demonination referring to a neutralized anionic compound respectively relates the anionic form as well as the neutralised status of that compound.
Thus, citramalic acid relates also to citramalate, glyceric acid also relates to glycerate, fumaric acid also relates to fumarate, malic acid also relates to malate, pyruvic acid also relates to pyruvate, succinic acid relates to succinate.
In one embodiment, the term “the fine chemical” and the term “the respective fine chemical” mean at least one chemical compound with an activity of the above mentioned fine chemical

[4242] Accordingly, the present invention relates to a process for the production of citramalic acid, glyceric acid, fumaric acid, malic acid, pyruvic acid, succinic acid and/or threonolactone, their salts, amides, thioesters and/or esters, which comprises
[4243] (a) increasing or generating the activity of a protein as shown in table II, application no. 16, column 3 encoded by the nucleic acid sequences as shown in table I, application no. 16, column 5, in an organelle of a microorganism or plant, or
[4244] (b) increasing or generating the activity of a protein as shown in table II, application no. 16, column 3 encoded by the nucleic acid sequences as shown in table I, application no. 16, column 5 in the plastid of a microorganism or plant, or in one or more parts thereof; and
[4245] (c) growing the organism under conditions which permit the production of the fine chemical, thus, citramalic acid, glyceric acid, fumaric acid, malic acid, pyruvic acid, succinic acid and/or threonolactone, their salts, amides, thioesters and/or esters or fine chemicals comprising citramalic acid, glyceric acid, fumaric acid, malic acid, pyruvic acid, succinic acid and/or threonolactone, their salts, amides, thioesters and/or esters, are produced in said organism or in the culture medium surrounding the organism.

[4246] Accordingly, the term “the fine chemical” means “citramalic acid, glyceric acid, fumaric acid, malic acid, pyruvic acid, succinic acid and/or threonolactone, their salts, amides, thioesters and/or esters” in relation to all sequences listed in table I-IV, application no. 16, columns 3, 5 and 7 or homologs thereof. Accordingly, the term “the fine chemical” can mean “citramalic acid, glyceric acid, fumaric acid, malic acid, pyruvic acid, succinic acid and/or threonolactone, their salts, amides, thioesters and/or esters”, owing to circumstances and the context. Preferably the term “the fine chemical” means “citramalic acid, glyceric acid, fumaric acid, malic acid, pyruvic acid, succinic acid and/or threonolactone or their salts”. In order to illustrate that the meaning of the term “the respective fine chemical” means “citramalic acid, glyceric acid, fumaric acid, malic acid, pyruvic acid, succinic acid and/or threonolactone, their salts, amides, thioesters and/or esters” owing to the sequences listed in the context the term “the respective fine chemical” is also used.

[4247] In another embodiment the present invention is related to a process for the production of citramalic acid, glyceric acid, fumaric acid, malic acid, pyruvic acid, succinic acid and/or threonolactone, their salts, amides, thioesters and/or esters, which comprises
[4248] (a) increasing or generating the activity of a protein as shown in table II, application no. 16, column 3 encoded by the nucleic acid sequences as shown in table I, application no. 16, column 5, in an organelle of a non-human organism, or
[4249] (b) increasing or generating the activity of a protein as shown in table II, application no. 16, column 3 encoded by the nucleic acid sequences as shown in table I, application no. 16, column 5, which are joined to a nucleic acid sequence encoding a transit peptide in a non-human organism, or in one or more parts thereof; or
[4250] (c) increasing or generating the activity of a protein as shown in table II, application no. 16, column 3 encoded by the nucleic acid sequences as shown in table I, application no. 16, column 5, which are joined to a nucleic acid sequence encoding chloroplast localization sequence, in a non-human organism, or in one or more parts thereof, and
[4251] (d) growing the organism under conditions which permit the production of citramalic acid, glyceric acid, fumaric acid, malic acid, pyruvic acid, succinic acid and/or threonolactone, their salts, amides, thioesters and/or esters in said organism.

[4252] In another embodiment, the present invention relates to a process for the production of citramalic acid, glyceric acid, fumaric acid, malic acid, pyruvic acid, succinic acid and/or threonolactone, their salts, amides, thioesters and/or esters, which comprises
[4253] (a) increasing or generating the activity of a protein as shown in table II, application no. 16, column 3 encoded by the nucleic acid sequences as shown in table I, application no. 16, column 5, in an organelle of a microorganism or plant through the transformation of the organelle, or
[4254] (b) increasing or generating the activity of a protein as shown in table II, application no. 16, column 3 encoded by the nucleic acid sequences as shown in table I, application no. 16, column 5 in the plastid of a microorganism or plant, or in one or more parts thereof through the transformation of the plastids; and
[4255] (c) growing the organism under conditions which permit the production of the fine chemical, thus, citramalic acid, glyceric acid, fumaric acid, malic acid, pyruvic acid, succinic acid and/or threonolactone, their salts, amides, thioesters and/or esters or fine chemicals comprising citramalic acid, glyceric acid, fumaric acid, malic acid, pyruvic acid, succinic acid and/or threonolactone, their salts, amides, thioesters and/or esters, are produced in said organism or in the culture medium surrounding the organism.

[4256] Advantageously the activity of the protein as shown in table II, application no. 16, column 3 encoded by the nucleic acid sequences as shown in table I, application no. 16, column 5 is increased or generated in the abovementioned process in the plastid of a microorganism or plant.

[4257] for the disclosure of the paragraphs [0019.0.0.15] to [0024.0.0.14] see paragraphs [0019.0.0.0] and [0024.0.0.0] above.

[4258] Even more preferred nucleic acid sequences are encoding transit peptides as disclosed by von Heijne et al. [Plant Molecular Biology Reporter, Vol. 9 (2), 1991: 104-126], which are hereby incorporated by reference. Table V shows some examples of the transit peptide sequences disclosed by von Heijne et al. According to the disclosure of the invention especially in the examples the skilled worker is able to link other nucleic acid sequences disclosed by von Heijne et al. to the nucleic acid sequences shown in table I, application no. 16, columns 5 and 7. Most preferred nucleic acid sequences encoding transit peptides are derived from the genus Spinacia such as chloroplast 30S ribosomal protein PSrp-1, root acyl carrier protein II, acyl carrier protein, ATP synthase: γ subunit, ATP synthase: δ subunit, cytochrom f, ferredoxin I, ferredoxin NADP oxidoreductase (=FNR), nitrite reductase, phosphoribulokinase, plastocyanin or carbonic anhydrase. The skilled worker will recognize that various other nucleic acid sequences encoding transit peptides can easily isolated from plastid-localized proteins, which are expressed from nuclear genes as precursors and are then targeted to plastids. Such transit peptides encoding sequences can be used for the construction of other expression constructs. The transit peptides advantageously used in the inventive process and which are part of the inventive nucleic acid sequences and proteins are typically 20 to 120 amino acids, preferably 25 to 110, 30 to 100 or 35 to 90 amino acids, more preferably 40 to 85 amino acids and most preferably 45 to 80 amino acids in length and functions post-translationally to direct the protein to the plastid preferably to the chloroplast. The nucleic acid sequences encoding such transit peptides are localized upstream of nucleic acid sequence encoding the mature protein. For the correct molecular joining of the transit peptide encoding nucleic acid and the nucleic acid encoding the protein to be targeted it is sometimes necessary to introduce additional base pairs at the joining position, which forms restriction enzyme recognition sequences useful for the molecular joining of the different nucleic acid molecules. This procedure might lead to very few additional amino acids at the N-terminal of the mature imported protein, which usually and preferably do not interfere with the protein function. In any case, the additional base pairs at the joining position which forms restriction enzyme recognition sequences have to be chosen with care, in order to avoid the formation of stop codons or codons which encode amino acids with a strong influence on protein folding, like e.g. proline. It is preferred that such additional codons encode small n.d. structural flexible amino acids such as glycine or alanine.

[4259] As mentioned above the nucleic acid sequences coding for the proteins as shown in table II, application no. 16, column 3 and its homologs as disclosed in table I, application no. 16, columns 5 and 7 are joined to a nucleic acid sequence encoding a transit peptide, This nucleic acid sequence encoding a transit peptide ensures transport of the protein to the plastid. The nucleic acid sequence of the gene to be expressed and the nucleic acid sequence encoding the transit peptide are operably linked. Therefore the transit peptide is fused in frame to the nucleic acid sequence coding for proteins as shown in table II, application no. 16, column 3 and its homologs as disclosed in table I, application no. 16, columns 5 and 7.

[4260] for the disclosure of the paragraphs [0027.0.0.15] to [0029.0.0.14] see paragraphs [0027.0.0.0] and [0029.0.0.0] above.

[4261] Alternatively, nucleic acid sequences coding for the transit peptides may be chemically synthesized either in part or wholly according to structure of transit peptide sequences disclosed in the prior art. Said natural or chemically synthesized sequences can be directly linked to the sequences encoding the mature protein or via a linker nucleic acid sequence, which may be typically less than 500 base pairs, preferably less than 450, 400, 350, 300, 250 or 200 base pairs, more preferably less than 150, 100, 90, 80, 70, 60, 50, 40 or 30 base pairs and most preferably less than 25, 20, 15, 12, 9, 6 or 3 base pairs in length and are in frame to the coding sequence. Furthermore favorable nucleic acid sequences encoding transit peptides may comprise sequences derived from more than one biological and/or chemical source and may include a nucleic acid sequence derived from the amino-terminal region of the mature protein, which in its native state is linked to the transit peptide. In a preferred embodiment of the invention said amino-terminal region of the mature protein is typically less than 150 amino acids, preferably less than 140, 130, 120, 110, 100 or 90 amino acids, more preferably less than 80, 70, 60, 50, 40, 35, 30, 25 or 20 amino acids and most preferably less than 19, 18, 17, 16, 15, 14, 13, 12, 11 or 10 amino acids in length. But even shorter or longer stretches are also possible. In addition target sequences, which facilitate the transport of proteins to other cell compartments such as the vacuole, endoplasmic reticulum, Golgi complex, glyoxysomes, peroxisomes or mitochondria may be also part of the inventive nucleic acid sequence. The proteins translated from said inventive nucleic acid sequences are a kind of fusion proteins that means the nucleic acid sequences encoding the transit peptide for example the ones shown in table V, preferably the last one of the table are joint to the nucleic acid sequences shown in table I, application no. 16, columns 5 and 7. The person skilled in the art is able to join said sequences in a functional manner. Advantageously the transit peptide part is cleaved off from the protein part shown in table II, application no. 16, columns 5 and 7 during the transport preferably into the plastids. All products of the cleavage of the preferred transit peptide shown in the last line of table V have preferably the N-terminal amino acid sequences QIA CSS or QIA EFQLTT in front of the start methionine of the protein mentioned in table II, application no. 16, columns 5 and 7. Other short amino acid sequences of an range of 1 to 20 amino acids preferable 2 to 15 amino acids, more preferable 3 to 10 amino acids most preferably 4 to 8 amino acids are also possible in front of the start methionine of the protein mentioned in table II, application no. 16, columns 5 and 7. In case of the amino acid sequence QIA CSS the three amino acids in front of the start methionine are stemming from the LIC (=ligatation independent cloning) cassette. Said short amino acid sequence is preferred in the case of the expression of E. coli genes. In case of the amino acid sequence QIA EFQLTT the six amino acids in front of the start methionine are stemming from the LIC cassette. Said short amino acid sequence is preferred in the case of the expression of S. cerevisiae genes. The skilled worker knows that other short sequences are also useful in the expression of the genes mentioned in table I, application no. 16, columns 5 and 7. Furthermore the skilled worker is aware of the fact that there is not a need for such short sequences in the expression of the genes.

[4262] Table V: Examples of transit peptides disclosed by von Heijne et al. for the disclosure of Table V see paragraph [0030.2.0.0] above.

[4263] Alternatively to the targeting of the sequences shown in table II, application no. 16, columns 5 and 7 preferably of sequences in general encoded in the nucleus with the aid of the targeting sequences mentioned for example in table V alone or in combination with other targeting sequences preferably into the plastids, the nucleic acids of the invention can directly introduced into the plastidal genome. Therefore in a preferred embodiment the nucleic acid sequences shown in table I, application no. 16, columns 5 and 7 are directly introduced and expressed in plastids.

The term “introduced” in the context of this specification shall mean the insertion of a nucleic acid sequence into the organism by means of a “transfection”, “transduction” or preferably by “transformation”.
A plastid, such as a chloroplast, has been “transformed” by an exogenous (preferably foreign) nucleic acid sequence if nucleic acid sequence has been introduced into the plastid that means that this sequence has crossed the membrane or the membranes of the plastid. The foreign DNA may be integrated (covalently linked) into plastid DNA making up the genome of the plastid, or it may remain unintegrated (e.g., by including a chloroplast origin of replication). “Stably” integrated DNA sequences are those, which are inherited through plastid replication, thereby transferring new plastids, with the features of the integrated DNA sequence to the progeny.

[4264] for the disclosure of the paragraphs [0030.2.0.15] and [0030.3.0.15] see paragraphs [0030.2.0.0] and [0030.3.0.0] above.

[4265] For the inventive process it is of great advantage that by transforming the plastids the intraspecies specific transgene flow is blocked, because a lot of species such as corn, cotton and rice have a strict maternal inheritance of plastids. By placing the genes specified in table I, application no. 16, columns 5 and 7 or active fragments thereof in the plastids of plants, these genes will not be present in the pollen of said plants.

A further preferred embodiment of the invention relates to the use of so called “chloroplast localization sequences”, in which a first RNA sequence or molecule is capable of transporting or “chaperoning” a second RNA sequence, such as a RNA sequence transcribed from the sequences depicted in table I, application no. 16, columns 5 and 7 or a sequence encoding a protein, as depicted in table II, application no. 16, columns 5 and 7, from an external environment inside a cell or outside a plastid into a chloroplast. In one embodiment the chloroplast localization signal is substantially similar or complementary to a complete or intact viroid sequence. The chloroplast localization signal may be encoded by a DNA sequence, which is transcribed into the chloroplast localization RNA. The term “viroid” refers to a naturally occurring single stranded RNA molecule (Flores, C R Acad Sci III. 2001 October; 324(10): 943-52). Viroids usually contain about 200-500 nucleotides and generally exist as circular molecules. Examples of viroids that contain chloroplast localization signals include but are not limited to ASBVd, PLMVd, CChMVd and ELVd. The viroid sequence or a functional part of it can be fused to the sequences depicted in table I, application no. 16, columns 5 and 7 or a sequence encoding a protein, as depicted in table II, application no. 16, columns 5 and 7 in such a manner that the viroid sequence transports a sequence transcribed from a sequence as depicted in table I, application no. 16, columns 5 and 7 or a sequence encoding a protein as depicted in table II, application no. 16, columns 5 and 7 into the chloroplasts. A preferred embodiment uses a modified ASBVd (Navarro et al., Virology. 2000 Mar. 1; 268(1): 218-25).
In a further specific embodiment the protein to be expressed in the plastids such as the proteins depicted in table II, application no. 16, columns 5 and 7 are encoded by different nucleic acids. Such a method is disclosed in WO 2004/040973, which shall be incorporated by reference. WO 2004/040973 teaches a method, which relates to the translocation of an RNA corresponding to a gene or gene fragment into the chloroplast by means of a chloroplast localization sequence. The genes, which should be expressed in the plant or plants cells, are split into nucleic acid fragments, which are introduced into different compartments in the plant e.g. the nucleus, the plastids and/or mitochondria. Additionally plant cells are described in which the chloroplast contains a ribozyme fused at one end to an RNA encoding a fragment of a protein used in the inventive process such that the ribozyme can trans-splice the translocated fusion RNA to the RNA encoding the gene fragment to form and as the case may be reunite the nucleic acid fragments to an intact mRNA encoding a functional protein for example as disclosed in table II, application no. 16, columns 5 and 7.

[4266] In a preferred embodiment of the invention the nucleic acid sequences as shown in table I, application no. 16, columns 5 and 7 used in the inventive process are transformed into plastids, which are metabolical active. Those plastids should preferably maintain at a high copy number in the plant or plant tissue of interest, most preferably the chloroplasts found in green plant tissues, such as leaves or cotyledons or in seeds.

[4267] For a good expression in the plastids the nucleic acid sequences as shown in table I, application no. 16, columns 5 and 7 are introduced into an expression cassette using a preferably a promoter and terminator, which are active in plastids preferably a chloroplast promoter. Examples of such promoters include the psbA promoter from the gene from spinach or pea, the rbcL promoter, and the atpB promoter from corn.

[4268] for the disclosure of the paragraphs [0031.0.0.15] and [0032.0.0.15] see paragraphs [0031.0.0.0] and [0032.0.0.0] above.

[4269] Advantageously the process for the production of the fine chemical leads to an enhanced production of the fine chemical. The terms “enhanced” or “increase” mean at least a 10%, 20%, 30%, 40% or 50%, preferably at least 60%, 70%, 80%, 90% or 100%, more preferably 150%, 200%, 300%, 400% or 500% higher production of the fine chemical in comparison to the reference as defined below, e.g. that means in comparison to an organism without the aforementioned modification of the activity of a protein as shown in table II, application no. 16, column 3. Preferably the modification of the activity of a protein as shown in table II, application no. 16, column 3 or their combination can be achieved by joining the protein to a transit peptide.

[4270] Surprisingly it was found, that the transgenic expression of the Escherichia coli or Saccharomyces cerevisiae protein as shown in table II, application no. 16, column 3 in plastids of a plant such as Arabidopsis thaliana for example through the linkage to at least one targeting sequence for example as mentioned in table V conferred an increase in the fine chemical content of the transformed plants as shown in any one of table I-IV application no. 16, column 6.

[4271] for the disclosure of this paragraph see paragraph [0035.0.0.0] above.

[4272] The sequence of b0931 (Accession number PIR:JQ0756) from Escherichia coli has been published in Blattner et al., Science 277 (5331), 1453-1474 (1997), and its activity is being defined as “nicotinate phosphoribosyltransferase”. Accordingly, in one embodiment, the process of the present invention comprises the use of a “nicotinate phosphoribosyltransferase” or its homolog, e.g. as shown herein, for the production of the fine chemical, meaning of fumaric acid, its salts, amides, thioesters or esters, in particular for increasing the amount of fumaric acid, its salts, amides, thioesters or esters in free or bound form in an organism or a part thereof, as mentioned. In one embodiment, in the process of the present invention the activity of a b0931 protein is increased or generated, e.g. from Escherichia coli or a homolog thereof, preferably linked at least to one transit peptide as mentioned for example in table V.

In another embodiment, in the process of the present invention the activity of a b0931 protein is increased or generated in a subcellular compartment of the organism or organism cell such as in an organelle like a plastid or mitochondria.
The sequence of b1046 (Accession number PIR:C64847) from Escherichia coli has been published in Blattner et al., Science 277 (5331), 1453-1474 (1997), and its activity is being defined as “putative synthase with phospholipase D/nuclease domain”. Accordingly, in one embodiment, the process of the present invention comprises the use of a “putative synthase with phospholipase D/nuclease domain” or its homolog, e.g. as shown herein, for the production of the fine chemical, meaning of glyceric acid, its salts, amides, thioesters or esters, in particular for increasing the amount of glyceric acid, its salts, amides, thioesters or esters in free or bound form in an organism or a part thereof, as mentioned. In one embodiment, in the process of the present invention the activity of a b1046 protein is increased or generated, e.g. from Escherichia coli or a homolog thereof, preferably linked at least to one transit peptide as mentioned for example in table V.
In another embodiment, in the process of the present invention the activity of a b1046 protein is increased or generated in a subcellular compartment of the organism or organism cell such as in an organelle like a plastid or mitochondria.
The sequence of b1556 (Accession number NP_{—}416074) from Escherichia coli has been published in Blattner et al., Science 277 (5331), 1453-1474 (1997), and its activity is being defined as “Qin prophage”. Accordingly, in one embodiment, the process of the present invention comprises the use of a “Qin prophage” or its homolog, e.g. as shown herein, for the production of the fine chemical, meaning of fumaric acid, its salts, amides, thioesters or esters, in particular for increasing the amount of fumaric acid, its salts, amides, thioesters or esters in free or bound form in an organism or a part thereof, as mentioned. In one embodiment, in the process of the present invention the activity of a b1556 protein is increased or generated, e.g. from Escherichia coli or a homolog thereof, preferably linked at least to one transit peptide as mentioned for example in table V.
In another embodiment, in the process of the present invention the activity of a b1556 protein is increased or generated in a subcellular compartment of the organism or organism cell such as in an organelle like a plastid or mitochondria.
The sequence of b1556 (Accession number NP_{—}416074) from Escherichia coli has been published in Blattner et al., Science 277 (5331), 1453-1474 (1997), and its activity is being defined as “Qin prophage”. Accordingly, in one embodiment, the process of the present invention comprises the use of a “Qin prophage” or its homolog, e.g. as shown herein, for the production of the fine chemical, meaning of succinic acid, its salts, amides, thioesters or esters, in particular for increasing the amount of succinic acid, its salts, amides, thioesters or esters in free or bound form in an organism or a part thereof, as mentioned. In one embodiment, in the process of the present invention the activity of a b1556 protein is increased or generated, e.g. from Escherichia coli or a homolog thereof, preferably linked at least to one transit peptide as mentioned for example in table V.
In another embodiment, in the process of the present invention the activity of a b1556 protein is increased or generated in a subcellular compartment of the organism or organism cell such as in an organelle like a plastid or mitochondria.
The sequence of b1556 (Accession number NP_{—}416074) from Escherichia coli has been published in Blattner et al., Science 277 (5331), 1453-1474 (1997), and its activity is being defined as “Qin prophage”. Accordingly, in one embodiment, the process of the present invention comprises the use of a “Qin prophage” or its homolog, e.g. as shown herein, for the production of the fine chemical, meaning of threonolactone, in particular for increasing the amount of threonolactone in free or bound form in an organism or a part thereof, as mentioned. In one embodiment, in the process of the present invention the activity of a b1556 protein is increased or generated, e.g. from Escherichia coli or a homolog thereof, preferably linked at least to one transit peptide as mentioned for example in table V.
In another embodiment, in the process of the present invention the activity of a b1556 protein is increased or generated in a subcellular compartment of the organism or organism cell such as in an organelle like a plastid or mitochondria. Furthermore in one embodiment, the process of the present invention comprises the use of a “Qin prohage” or its homolog, e.g. as shown herein for the production of the fine chemicals, in particular for increasing the amount of one or of any combination of 2, 3 of the fine chemicals, e.g. compounds, selected from the group of “fumaric acid, succinic acid and threolactone.
The sequence of b1732 (Accession number PIR:A39129) from Escherichia coli has been published in Blattner et al., Science 277 (5331), 1453-1474 (1997), and its activity is being defined as “catalase (hydroperoxidase), RpoS-dependent”. Accordingly, in one embodiment, the process of the present invention comprises the use of a “catalase (hydroperoxidase), RpoS-dependent” or its homolog, e.g. as shown herein, for the production of the fine chemical, meaning of succinic acid, its salts, amides, thioesters or esters, in particular for increasing the amount of succinic acid, its salts, amides, thioesters or esters in free or bound form in an organism or a part thereof, as mentioned. In one embodiment, in the process of the present invention the activity of a b1732 protein is increased or generated, e.g. from Escherichia coli or a homolog thereof, preferably linked at least to one transit peptide as mentioned for example in table V.
In another embodiment, in the process of the present invention the activity of a b1732 protein is increased or generated in a subcellular compartment of the organism or organism cell such as in an organelle like a plastid or mitochondria.
The sequence of b2066 (Accession number NP_{—}416570) from Escherichia coli has been published in Blattner et al., Science 277 (5331), 1453-1474 (1997), and its activity is being defined as “uridine/cytidine kinase”. Accordingly, in one embodiment, the process of the present invention comprises the use of a “uridine/cytidine kinase” or its homolog, e.g. as shown herein, for the production of the fine chemical, meaning of malic acid, its salts, amides, thioesters or esters, in particular for increasing the amount of malic acid, its salts, amides, thioesters or esters in free or bound form in an organism or a part thereof, as mentioned. In one embodiment, in the process of the present invention the activity of a b2066 protein is increased or generated, e.g. from Escherichia coli or a homolog thereof, preferably linked at least to one transit peptide as mentioned for example in table V.
In another embodiment, in the process of the present invention the activity of a b2066 protein is increased or generated in a subcellular compartment of the organism or organism cell such as in an organelle like a plastid or mitochondria.
The sequence of b2312 (Accession number PIR:XQEC) from Escherichia coli has been published in Blattner et al., Science 277 (5331), 1453-1474 (1997), and its activity is being defined as “amidophosphoribosyltransferase (PRPP amidotransferase)”. Accordingly, in one embodiment, the process of the present invention comprises the use of a “amidophosphoribosyltransferase (PRPP amidotransferase)” or its homolog, e.g. as shown herein, for the production of the fine chemical, meaning of succinic acid, its salts, amides, thioesters or esters, in particular for increasing the amount of succinic acid, its salts, amides, thioesters or esters in free or bound form in an organism or a part thereof, as mentioned. In one embodiment, in the process of the present invention the activity of a b2312 protein is increased or generated, e.g. from Escherichia coli or a homolog thereof, preferably linked at least to one transit peptide as mentioned for example in table V.
In another embodiment, in the process of the present invention the activity of a b2312 protein is increased or generated in a subcellular compartment of the organism or organism cell such as in an organelle like a plastid or mitochondria.
The sequence of b3770 (Accession number YP_{—}026247) from Escherichia coli has been published in Blattner et al., Science 277 (5331), 1453-1474 (1997), and its activity is being defined as “branched-chain amino-acid aminotransferase”. Accordingly, in one embodiment, the process of the present invention comprises the use of a “branched-chain amino-acid aminotransferase” or its homolog, e.g. as shown herein, for the production of the fine chemical, meaning of citramalic acid, its salts, amides, thioesters or esters, in particular for increasing the amount of citramalic acid, its salts, amides, thioesters or esters in free or bound form in an organism or a part thereof, as mentioned. In one embodiment, in the process of the present invention the activity of a b3770 protein is increased or generated, e.g. from Escherichia coli or a homolog thereof, preferably linked at least to one transit peptide as mentioned for example in table V.
In another embodiment, in the process of the present invention the activity of a b3770 protein is increased or generated in a subcellular compartment of the organism or organism cell such as in an organelle like a plastid or mitochondria.
The sequence of b4122 (Accession number PIR:B44511) from Escherichia coli has been published in Blattner et al., Science 277 (5331), 1453-1474 (1997), and its activity is being defined as “fumarase B, fumarate hydratase Class I”. Accordingly, in one embodiment, the process of the present invention comprises the use of a “fumarase B, fumarate hydratase Class I” or its homolog, e.g. as shown herein, for the production of the fine chemical, meaning of fumaric acid, its salts, amides, thioesters or esters, in particular for increasing the amount of fumaric acid, its salts, amides, thioesters or esters in free or bound form in an organism or a part thereof, as mentioned. In one embodiment, in the process of the present invention the activity of a b4122 protein is increased or generated, e.g. from Escherichia coli or a homolog thereof, preferably linked at least to one transit peptide as mentioned for example in table V.
In another embodiment, in the process of the present invention the activity of a b4122 protein is increased or generated in a subcellular compartment of the organism or organism cell such as in an organelle like a plastid or mitochondria.
The sequence of b4139 (Accession number NP_{—}418562) from Escherichia coli has been published in Blattner et al., Science 277 (5331), 1453-1474 (1997), and its activity is being defined as “aspartate ammonia-lyase (aspartase)”. Accordingly, in one embodiment, the process of the present invention comprises the use of a “aspartate ammonia-lyase (aspartase)” or its homolog, e.g. as shown herein, for the production of the fine chemical, meaning of fumaric acid, its salts, amides, thioesters or esters, in particular for increasing the amount of fumaric acid, its salts, amides, thioesters or esters in free or bound form in an organism or a part thereof, as mentioned. In one embodiment, in the process of the present invention the activity of a b4139 protein is increased or generated, e.g. from Escherichia coli or a homolog thereof, preferably linked at least to one transit peptide as mentioned for example in table V.
In another embodiment, in the process of the present invention the activity of a b4139 protein is increased or generated in a subcellular compartment of the organism or organism cell such as in an organelle like a plastid or mitochondria.
The sequence of YAL038W (Accession number NP_{—}009362) from Saccharomyces cerevisiae has been published in Goffeau et al., Science 274 (5287), 546-547, 1996, and its activity is being defined as “pyruvate kinase”. Accordingly, in one embodiment, the process of the present invention comprises the use of a “pyruvate kinase” or its homolog, e.g. as shown herein, for the production of the fine chemical, meaning of succinic acid, its salts, amides, thioesters or esters, in particular for increasing the amount of succinic acid, its salts, amides, thioesters or esters in free or bound form in an organism or a part thereof, as mentioned. In one embodiment, in the process of the present invention the activity of a YAL038W protein is increased or generated, e.g. from Escherichia coli or a homolog thereof, preferably linked at least to one transit peptide as mentioned for example in table V.
In another embodiment, in the process of the present invention the activity of a YAL038W protein is increased or generated in a subcellular compartment of the organism or organism cell such as in an organelle like a plastid or mitochondria.
The sequence of YAL038W (Accession number NP_{—}009362) from Saccharomyces cerevisiae has been published in Goffeau et al., Science 274 (5287), 546-547, 1996, and its activity is being defined as “pyruvate kinase”. Accordingly, in one embodiment, the process of the present invention comprises the use of a “pyruvate kinase” or its homolog, e.g. as shown herein, for the production of the fine chemical, meaning of pyruvic acid, its salts, amides, thioesters or esters, in particular for increasing the amount of pyruvic acid, its salts, amides, thioesters or esters in free or bound form in an organism or a part thereof, as mentioned. In one embodiment, in the process of the present invention the activity of a YAL038W protein is increased or generated, e.g. from Escherichia coli or a homolog thereof, preferably linked at least to one transit peptide as mentioned for example in table V.
In another embodiment, in the process of the present invention the activity of a YAL038W protein is increased or generated in a subcellular compartment of the organism or organism cell such as in an organelle like a plastid or mitochondria.
The sequence of YAL038W (Accession number NP_{—}009362) from Saccharomyces cerevisiae has been published in Goffeau et al., Science 274 (5287), 546-547, 1996, and its activity is being defined as “pyruvate kinase”. Accordingly, in one embodiment, the process of the present invention comprises the use of a “pyruvate kinase” or its homolog, e.g: as shown herein, for the production of the fine chemical, meaning of citramalic acid, its salts, amides, thioesters or esters, in particular for increasing the amount of citramalic acid, its salts, amides, thioesters or esters in free or bound form in an organism or a part thereof, as mentioned. In one embodiment, in the process of the present invention the activity of a YAL038W protein is increased or generated, e.g. from Escherichia coli or a homolog thereof, preferably linked at least to one transit peptide as mentioned for example in table V.
In another embodiment, in the process of the present invention the activity of a YAL038W protein is increased or generated in a subcellular compartment of the organism or organism cell such as in an organelle like a plastid or mitochondria. Furthermore in one embodiment, the process of the present invention comprises the use of a “pyruvate kinase” or its homolog, e.g. as shown herein for the production of the fine chemicals, in particular for increasing the amount of one or of any combination of 2, 3 of the fine chemicals, e.g. compounds, selected from the group of “citramalic acid, succinic acid and pyruvic acid.
The sequence of YDL078C (Accession number PIR:DEBYMP) from Saccharomyces cerevisiae has been published in Jacq et al., Nature 387 (6632 Suppl), 75-78, 1997, and its activity is being defined as “malate dehydrogenase”. Accordingly, in one embodiment, the process of the present invention comprises the use of a “malate dehydrogenase” or its homolog, e.g. as shown herein, for the production of the fine chemical, meaning of malic acid, its salts, amides, thioesters or esters, in particular for increasing the amount of malic acid, its salts, amides, thioesters or esters in free or bound form in an organism or a part thereof, as mentioned. In one embodiment, in the process of the present invention the activity of a YDL078C protein is increased or generated, e.g. from Escherichia coli or a homolog thereof, preferably linked at least to one transit peptide as mentioned for example in table V.
In another embodiment, in the process of the present invention the activity of a YDL078C protein is increased or generated in a subcellular compartment of the organism or organism cell such as in an organelle like a plastid or mitochondria.
The sequence of YGL065C (Accession number PIR:S64069) from Saccharomyces cerevisiae has been published in Jackson et al., Glycobiology, 3:357-364(1993), and its activity is being defined as “ALG2 protein precursor”. Accordingly, in one embodiment, the process of the present invention comprises the use of a “ALG2 protein precursor” or its homolog, e.g. as shown herein, for the production of the fine chemical, meaning of succinic acid, its salts, amides, thioesters or esters, in particular for increasing the amount of succinic acid, its salts, amides, thioesters or esters in free or bound form in an organism or a part thereof, as mentioned. In one embodiment, in the process of the present invention the activity of a YGL065C protein is increased or generated, e.g. from Escherichia coli or a homolog thereof, preferably linked at least to one transit peptide as mentioned for example in table V.
In another embodiment, in the process of the present invention the activity of a YGL065C protein is increased or generated in a subcellular compartment of the organism or organism cell such as in an organelle like a plastid or mitochondria.
The sequence of YGL126W (Accession number NP_{—}011389) from Saccharomyces cerevisiae has been published in Goffeau et al., Science 274 (5287), 546-547, 1996, and its activity is being defined as “protein, which is required for inositol prototrophy”. Accordingly, in one embodiment, the process of the present invention comprises the use of a “protein, which is required for inositol prototrophy” or its homolog, e.g. as shown herein, for the production of the fine chemical, meaning of succinic acid, its salts, amides, thioesters or esters, in particular for increasing the amount of succinic acid, its salts, amides, thioesters or esters in free or bound form in an organism or a part thereof, as mentioned. In one embodiment, in the process of the present invention the activity of a YGL126W protein is increased or generated, e.g. from Escherichia coli or a homolog thereof, preferably linked at least to one transit peptide as mentioned for example in table V.
In another embodiment, in the process of the present invention the activity of a YGL126W protein is increased or generated in a subcellular compartment of the organism or organism cell such as in an organelle like a plastid or mitochondria.
The sequence of YJL139C (Accession number PIR:S36856) from Saccharomyces cerevisiae has been published in Foreman et al., Nucleic Acids Res. 19:2781-2781(1991), and its activity is being defined as “mannosyltransferase of the KTR1 family, involved in protein N-glycosylation”. Accordingly, in one embodiment, the process of the present invention comprises the use of a “mannosyltransferase of the KTR1 family, involved in protein N-glycosylation” or its homolog, e.g. as shown herein, for the production of the fine chemical, meaning of fumaric acid, its salts, amides, thioesters or esters, in particular for increasing the amount of fumaric acid, its salts, amides, thioesters or esters in free or bound form in an organism or a part thereof, as mentioned. In one embodiment, in the process of the present invention the activity of a YJL139C protein is increased or generated, e.g. from Escherichia coli or a homolog thereof, preferably linked at least to one transit peptide as mentioned for example in table V.
In another embodiment, in the process of the present invention the activity of a YJL139C protein is increased or generated in a subcellular compartment of the organism or organism cell such as in an organelle like a plastid or mitochondria.
The sequence of YKR043C (Accession number NP_{—}012969) from Saccharomyces cerevisiae has been published in Goffeau et al., Science 274 (5287), 546-547, 1996, and its activity is being defined as “phosphoglycerate mutase like protein”. Accordingly, in one embodiment, the process of the present invention comprises the use of a “phosphoglycerate mutase like protein” or its homolog, e.g. as shown herein, for the production of the fine chemical, meaning of malic acid, its salts, amides, thioesters or esters, in particular for increasing the amount of malic acid, its salts, amides, thioesters or esters in free or bound form in an organism or a part thereof, as mentioned. In one embodiment, in the process of the present invention the activity of a YKR043C protein is increased or generated, e.g. from Escherichia coli or a homolog thereof, preferably linked at least to one transit peptide as mentioned for example in table V.
In another embodiment, in the process of the present invention the activity of a YKR043C protein is increased or generated in a subcellular compartment of the organism or organism cell such as in an organelle like a plastid or mitochondria.
The sequence of YKR043C (Accession number NP_{—}012969) from Saccharomyces cerevisiae has been published in Goffeau et al., Science 274 (5287), 546-547, 1996, and its activity is being defined as “phosphoglycerate mutase like protein”. Accordingly, in one embodiment, the process of the present invention comprises the use of a “phosphoglycerate mutase like protein” or its homolog, e.g. as shown herein, for the production of the fine chemical, meaning of fumaric acid, its salts, amides, thioesters or esters, in particular for increasing the amount of fumaric acid, its salts, amides, thioesters or esters in free or bound form in an organism or a part thereof, as mentioned. In one embodiment, in the process of the present invention the activity of a YKR043C protein is increased or generated, e.g. from Escherichia coli or a homolog thereof, preferably linked at least to one transit peptide as mentioned for example in table V.
In another embodiment, in the process of the present invention the activity of a YKR043C protein is increased or generated in a subcellular compartment of the organism or organism cell such as in an organelle like a plastid or mitochondria. Furthermore in one embodiment, the process of the present invention comprises the use of a “phosphoglycerate mutase like protein” or its homolog, e.g. as shown herein for the production of the fine chemicals, in particular for increasing the amount of fumaric acid, its salts, amides, thioesters or esters and malic acid, its salts, amides, thioesters or esters.
The sequence of YOL126C (Accession number PIR:DEBYMC) from Saccharomyces cerevisiae has been published in Minard K.I., McAlister-Henn L., Mol. Cell. Biol. 11:370-380(1991), and its activity is being defined as “malate dehydrogenase”. Accordingly, in one embodiment, the process of the present invention comprises the use of a “malate dehydrogenase” or its homolog, e.g. as shown herein, for the production of the fine chemical, meaning of fumaric acid, its salts, amides, thioesters or esters, in particular for increasing the amount of fumaric acid, its salts, amides, thioesters or esters in free or bound form in an organism or a part thereof, as mentioned. In one embodiment, in the process of the present invention the activity of a YOL126C protein is increased or generated, e.g. from Escherichia coli or a homolog thereof, preferably linked at least to one transit peptide as mentioned for example in table V.
In another embodiment, in the process of the present invention the activity of a YOL126C protein is increased or generated in a subcellular compartment of the organism or organism cell such as in an organelle like a plastid or mitochondria.
The sequence of YOL126C (Accession number PIR:DEBYMC) from Saccharomyces cerevisiae has been published in Minard K.I., McAlister-Henn L., Mol. Cell. Biol. 11:370-380(1991), and its activity is being defined as “malate dehydrogenase”. Accordingly, in one embodiment, the process of the present invention comprises the use of a “malate dehydrogenase” or its homolog, e.g. as shown herein, for the production of the fine chemical, meaning of malic acid, its salts, amides, thioesters or esters, in particular for increasing the amount of malic acid, its salts, amides, thioesters or esters in free or bound form in an organism or a part thereof, as mentioned. In one embodiment, in the process of the present invention the activity of a YOL126C protein is increased or generated, e.g. from Escherichia coli or a homolog thereof, preferably linked at least to one transit peptide as mentioned for example in table V.
In another embodiment, in the process of the present invention the activity of a YOL126C protein is increased or generated in a subcellular compartment of the organism or organism cell such as in an organelle like a plastid or mitochondria. Furthermore in one embodiment, the process of the present invention comprises the use of a “malate dehydrogenase” or its homolog, e.g. as shown herein for the production of the fine chemicals, in particular for increasing the amount of fumaric acid, its salts, amides, thioesters or esters and malic acid, its salts, amides, thioesters or esters.
The sequence of YOR350C (Accession number PIR|S67259) from Saccharomyces cerevisiae has been published in Dujon et al., Nature 387:98-102(1997), and its activity is being defined as “a protein, which is similar to Lucilia illustris mitochondria cytochrome oxidase”. Accordingly, in one embodiment, the process of the present invention comprises the use of a “protein, which is similar to Lucilia illustris mitochondria cytochrome oxidase” or its homolog, e.g. as shown herein, for the production of the fine chemical, meaning of glyceric acid, its salts, amides, thioesters or esters, in particular for increasing the amount of glyceric acid, its salts, amides, thioesters or esters in free or bound form in an organism or a part thereof, as mentioned. In one embodiment, in the process of the present invention the activity of a YOR350C protein is increased or generated, e.g. from Escherichia coli or a homolog thereof, preferably linked at least to one transit peptide as mentioned for example in table V.
In another embodiment, in the process of the present invention the activity of a YOR350C protein is increased or generated in a subcellular compartment of the organism or organism cell such as in an organelle like a plastid or mitochondria.

[4273] In one embodiment, the homolog of the YAL038W, YAL038W, YAL038W, YDL078C, YGL065C, YGL126W, YJL139C, YKR043C, YKR043C, YOL126C, YOL126C or YOR350C, is a homolog having said activity and being derived from Eukaryot. In one embodiment, the homolog of the b0931, b1046, b1556, b1556, b1556, b1732, b2066, b2312, b3770, b4122 or b4139 is a homolog having said activity and being derived from bacteria. In one embodiment, the homolog of the YAL038W, YAL038W, YAL038W, YDL078C, YGL065C, YGL126W, YJL139C, YKR043C, YKR043C, YOL126C, YOL126C or YOR350C is a homolog having said activity and being derived from Fungi. In one embodiment, the homolog of the b0931, b1046, b1556, b1556, b1556, b1732, b2066, b2312, b3770, b4122 or b4139 is a homolog having said activity and being derived from Proteobacteria. In one embodiment, the homolog of the YAL038W, YAL038W, YAL038W, YDL078C, YGL065C, YGL126W, YJL139C, YKR043C, YKR043C, YOL126C, YOL126C or YOR350C is a homolog having said activity and being derived from Ascomycota. In one embodiment, the homolog of the b0931, b1046, b1556, b1556, b1556, b1732, b2066, b2312, b3770, b4122 or b4139 is a homolog having said activity and being derived from Gammaproteobacteria. In one embodiment, the homolog of the YAL038W, YAL038W, YAL038W, YDL078C, YGL065C, YGL126W, YJL139C, YKR043C, YKR043C, YOL126C, YOL126C or YOR350C is a homolog having said activity and being derived from Saccharomycotina. In one embodiment, the homolog of the b0931, b1046, b1556, b1556, b1556, b1732, b2066, b2312, b3770, b4122 or b4139 is a homolog having said activity and being derived from Enterobacteriales. In one embodiment, the homolog of the YAL038W, YAL038W, YAL038W, YDL078C, YGL065C, YGL126W, YJL139C, YKR043C, YKR043C, YOL126C, YOL126C or YOR350C is a homolog having said activity and being derived from Saccharomycetes. In one embodiment, the homolog of the b0931, b1046, b1556, b1556, b1556, b1732, b2066, b2312, b3770, b4122 or b4139 is a homolog having said activity and being derived from Enterobacteriaceae. In one embodiment, the homolog of the YAL038W, YAL038W, YAL038W, YDL078C, YGL065C, YGL126W, YJL139C, YKR043C, YKR043C, YOL126C, YOL126C or YOR350C is a homolog having said activity and being derived from Saccharomycetales. In one embodiment, the homolog of the b0931, b1046, b1556, b1556, b1556, b1732, b2066, b2312, b3770, b4122 or b4139 is a homolog having said activity and being derived from Escherichia, preferably from Escherichia coli. In one embodiment, the homolog of the YAL038W, YAL038W, YAL038W, YDL078C, YGL065C, YGL126W, YJL139C, YKR043C, YKR043C, YOL126C, YOL126C or YOR350C is a homolog having said activity and being derived from Saccharomycetaceae. In one embodiment, the homolog of the YAL038W, YAL038W, YAL038W, YDL078C, YGL065C, YGL126W, YJL139C, YKR043C, YKR043C, YOL126C, YOL126C or YOR350C is a homolog having said activity and being derived from Saccharomycetes, preferably from Saccharomyces cerevisiae.

[4274] for the disclosure of this paragraph see paragraph [0038.0.0.0] above.

[4275] In accordance with the invention, a protein or polypeptide has the “activity of an protein as shown in table II, application no. 16, column 3” if its de novo activity, or its increased expression directly or indirectly leads to an increased in the fine chemical level in the organism or a part thereof, preferably in a cell of said organism, more preferably in an organelle such as a plastid or mitochondria of said organism and the protein has the above mentioned activities of a protein as shown in table II, application no. 16, column 3, preferably in the event the nucleic acid sequences encoding said proteins is functionally joined to the nucleic acid sequence of a transit peptide. Throughout the specification the activity or preferably the biological activity of such a protein or polypeptide or an nucleic acid molecule or sequence encoding such protein or polypeptide is identical or similar if it still has the biological or enzymatic activity of a protein as shown in table II, application no. 16, column 3, or which has at least 10% of the original enzymatic activity, preferably 20%, particularly preferably 30%, most particularly preferably 40% in comparison to a protein as shown in table II, application no. 16, column 3 of Saccharomyces cerevisiae.

[4276] for the disclosure of the paragraphs [0040.0.0.15] to [0047.0.0.15] see paragraphs [0040.0.0.0] to [0047.0.0.0] above.

[4277] Preferably, the reference, control or wild type differs form the subject of the present invention only in the cellular activity, preferably of the plastidial activity of the polypeptide of the invention, e.g. as result of an increase in the level of the nucleic acid molecule of the present invention or an increase of the specific activity of the polypeptide of the invention, e.g. by or in the expression level or activity of an protein having the activity of a protein as shown in table II, application no. 16, column 3 its biochemical or genetical causes and the increased amount of the fine chemical.

[4278] for the disclosure of the paragraphs [0049.0.0:15] to [0051.0.0.15] see paragraphs [0049.0.0.0] to [0051.0.0.0] above.

[4279] For example, the molecule number or the specific activity of the polypeptide or the nucleic acid molecule may be increased. Larger amounts of the fine chemical can be produced if the polypeptide or the nucleic acid of the invention is expressed de novo in an organism lacking the activity of said protein, preferably the nucleic acid molecules as mentioned in table I, application no. 16, columns 5 and 7 alone or preferably in combination with a transit peptide for example as mentioned in table V or in another embodiment by introducing said nucleic acid molecules into an organelle such as an plastid or mitochondria in the transgenic organism. However, it is also possible to modify the expression of the gene which is naturally present in the organisms, for example by integrating a nucleic acid sequence, encoding a plastidic targeting sequence in front (5 prime) of the coding sequence, leading to a functional preprotein, which is directed for example to the plastids.

[4280] for the disclosure of the paragraphs [0053.0.0.15] to [0058.0.0.15] see paragraphs [0053.0.0.0] to [0058.0.0.0] above.

[4281] In case the activity of the Escherichia coli protein b0931 or its homologs, e.g. a “nicotinate phosphoribosyltransferase” is increased advantageously in an organelle such as a plastid or mitochondria, preferably, in one embodiment an increase of the fine chemical, preferably of fumaric acid, its salts, amides, thioesters and/or esters between 47% and 365% or more is conferred.

In case the activity of the Escherichia coli protein b1046 or its homologs, e.g. a “putative synthase with phospholipase D/nuclease domain” is increased advantageously in an organelle such as a plastid or mitochondria, preferably, in one embodiment an increase of the fine chemical, preferably of glyceric acid, its salts, amides, thioesters and/or esters between 31% and 65% or more is conferred.
In case the activity of the Escherichia coli protein b1556 or its homologs, e.g. a “Qin prophage” is increased advantageously in an organelle such as a plastid or mitochondria, preferably, in one embodiment an increase of the fine chemical, preferably of fumaric acid, its salts, amides, thioesters and/or esters between 136% and 372% or more is conferred.
In case the activity of the Escherichia coli protein b1556 or its homologs, e.g. a “Qin prophage” is increased advantageously in an organelle such as a plastid or mitochondria, preferably, in one embodiment an increase of the fine chemical, preferably of succinic acid, its salts, amides, thioesters and/or esters between 47% and 204% or more is conferred.
In case the activity of the Escherichia coli protein b1556 or its homologs, e.g. a “Qin prophage” is increased advantageously in an organelle such as a plastid or mitochondria, preferably, in one embodiment an increase of the fine chemical, preferably of threonolactone between 38% and 103% or more is conferred.
In case the activity of the Escherichia coli protein b1556 or its homologs, e.g. a “Qin prophage” is increased advantageously in an organelle such as a plastid or mitochondria, preferably, in one embodiment an increase of the fine chemical, preferably of fumaric acid, its salts, amides, thioesters and/or esters between 136% and 372% or more and/or succinic acid, its salts, amides, thioesters and/or esters between 47% and 204% or more and/or of threonolactone between 38% and 103% or more is conferred.
In case the activity of the Escherichia coli protein b1732 or its homologs, e.g. a “catalase (hydroperoxidase), RpoS-dependent” is increased advantageously in an organelle such as a plastid or mitochondria, preferably, in one embodiment an increase of the fine chemical, preferably of succinic acid, its salts, amides, thioesters and/or esters between 28% and 37% or more is conferred.
In case the activity of the Escherichia coli protein b2066 or its homologs, e.g. a “uridine/cytidine kinase” is increased advantageously in an organelle such as a plastid or mitochondria, preferably, in one embodiment an increase of the fine chemical, preferably of malic acid, their salts, amides, thioesters and/or esters between 70% and 292% or more is conferred.
In case the activity of the Escherichia coli protein b2312 or its homologs, e.g. a “amidophosphoribosyltransferase (PRPP amidotransferase)” is increased advantageously in an organelle such as a plastid or mitochondria, preferably, in one embodiment an increase of the fine chemical, preferably of succinic acid, their salts, amides, thioesters and/or esters between 24% and 33% or more is conferred.
In case the activity of the Escherichia coli protein 3770 or its homologs, e.g. a “branched-chain amino-acid aminotransferase” is increased advantageously in an organelle such as a plastid or mitochondria, preferably, in one embodiment an increase of the fine chemical, preferably of citramalic acid, their salts, amides, thioesters and/or
esters between 49% and 223% or more is conferred.
In case the activity of the Escherichia coli protein b4122 or its homologs, e.g. a “fumarase B, fumarate hydratase Class I” is increased advantageously in an organelle such as a plastid or mitochondria, preferably, in one embodiment an increase of the fine chemical, preferably of fumaric acid, their salts, amides, thioesters and/or esters between 153% and 444% or more is conferred.
In case the activity of the Escherichia coli protein b4139 or its homologs, e.g. a “aspartate ammonia-lyase (aspartase)” is increased advantageously in an organelle such as a plastid or mitochondria, preferably, in one embodiment an increase of the fine chemical, preferably of fumaric acid, their salts, amides, thioesters and/or esters between 1394% and 2437% or more is conferred.
In case the activity of the Saccharomyces cerevisiae protein YAL038W or its homologs, e.g. a “pyruvate kinase” is increased advantageously in an organelle such as a plastid or mitochondria, preferably, in one embodiment an increase of the fine chemical, preferably of succinic acid, their salts, amides, thioesters and/or esters between 40% and 367% or more is conferred.
In case the activity of the Saccharomyces cerevisiae protein YAL038W or its homologs, e.g. a “pyruvate kinase” is increased advantageously in an organelle such as a plastid or mitochondria, preferably, in one embodiment an increase of the fine chemical, preferably of pyruvic acid, their salts, amides, thioesters and/or esters between 37% and 164% or more is conferred.
In case the activity of the Saccharomyces cerevisiae protein YAL038W or its homologs, e.g. a “pyruvate kinase” is increased advantageously in an organelle such as a plastid or mitochondria, preferably, in one embodiment an increase of the fine chemical, preferably of citramalic acid, their salts, amides, thioesters and/or esters between 72% and 337% or more is conferred.
In case the activity of the Saccharomyces cerevisiae protein YAL038W or its homologs, e.g. a “pyruvate kinase” is increased advantageously in an organelle such as a plastid or mitochondria, preferably, in one embodiment an increase of the fine chemical, preferably of succinic acid, their salts, amides, thioesters and/or esters between 40% and 367% or more and/or pyruvic acid, their salts, amides, thioesters and/or esters between 37% and 164% or more and/or citramalic acid, their salts, amides, thioesters and/or
esters between 72% and 337% or more is conferred.
In case the activity of the Saccharomyces cerevisiae protein YDL078C or its homologs, e.g. a “malate dehydrogenase” is increased advantageously in an organelle such as a plastid or mitochondria, preferably, in one embodiment an increase of the fine chemical, preferably of malic acid, their salts, amides, thioesters and/or esters between 83% and 371% or more is conferred.
In case the activity of the Saccharomyces cerevisiae protein YGL065C or its homologs, e.g. a “ALG2 protein precursor” is increased advantageously in an organelle such as a plastid or mitochondria, preferably, in one embodiment an increase of the fine chemical, preferably of succinic acid, their salts, amides, thioesters and/or esters between 8% and 21% or more is conferred.
In case the activity of the Saccharomyces cerevisiae protein YGL126W or its homologs, e.g. a “protein required for inositol prototrophy” is increased advantageously in an organelle such as a plastid or mitochondria, preferably, in one embodiment an increase of the fine chemical, preferably of succinic acid, their salts, amides, thioesters and/or esters between 30% and 45% or more is conferred.
In case the activity of the Saccharomyces cerevisiae protein YJL139C or its homologs, e.g. a “Mannosyltransferase of the KTR1 family, involved in protein N-glycosylation” is increased advantageously in an organelle such as a plastid or mitochondria, preferably, in one embodiment an increase of the fine chemical, preferably of fumaric acid, their salts, amides, thioesters and/or esters between 55% and 310% or more is conferred.
In case the activity of the Saccharomyces cerevisiae protein YKR043C or its homologs, e.g. a “phosphoglycerate mutase like protein” is increased advantageously in an organelle such as a plastid or mitochondria, preferably, in one embodiment an increase of the fine chemical, preferably of malic acid, their salts, amides, thioesters and/or esters between 54% and 216% or more is conferred.
In case the activity of the Saccharomyces cerevisiae protein YKR043C or its homologs, e.g. a “phosphoglycerate mutase like protein” is increased advantageously in an organelle such as a plastid or mitochondria, preferably, in one embodiment an increase of the fine chemical, preferably of fumaric acid, their salts, amides, thioesters and/or
esters between 990% and 1435% or more is conferred.
In case the activity of the Saccharomyces cerevisiae protein YKR043C or its homologs, e.g. a “phosphoglycerate mutase like protein” is increased advantageously in an organelle such as a plastid or mitochondria, preferably, in one embodiment an increase of the fine chemical, preferably of malic acid, their salts, amides, thioesters and/or esters between 54% and 216% or more and/or fumaric acid, their salts, amides, thioesters and/or esters between 990% and 1435% or more is conferred.
In case the activity of the Saccharomyces cerevisiae protein YOL126C or its homologs, e.g. a “malate dehydrogenase” is increased advantageously in an organelle such as a plastid or mitochondria, preferably, in one embodiment an increase of the fine chemical, preferably of fumaric acid, their salts, amides, thioesters and/or esters between 100% and 118% or more is conferred.
In case the activity of the Saccharomyces cerevisiae protein YOL126C or its homologs, e.g. a “malate dehydrogenase” is increased advantageously in an organelle such as a plastid or mitochondria, preferably, in one embodiment an increase of the fine chemical, preferably of malic acid, their salts, amides, thioesters and/or esters between 83% and 204% or more is conferred.
In case the activity of the Saccharomyces cerevisiae protein YOL126C or its homologs, e.g. a “malate dehydrogenase” is increased advantageously in an organelle such as a plastid or mitochondria, preferably, in one embodiment an increase of the fine chemical, preferably of fumaric acid, their salts, amides, thioesters and/or esters between 100% and 118% or more and/or malic acid, their salts, amides, thioesters and/or esters between 83% and 204% or more is conferred.
In case the activity of the Saccharomyces cerevisiae protein YOR350C or its homologs, e.g. a “protein similar to Lucilia illustris mitochondria cytochrome oxidase” is increased advantageously in an organelle such as a plastid or mitochondria, preferably, in one embodiment an increase of the fine chemical, preferably of glyceric acid, their salts, amides, thioesters and/or esters between 41% and 51% or more is conferred.
In case the activity of the Escherichia coli proteins b0931, b1046, b1556, b1556, b1556, b1732, b2066, b2312, b3770, b4122 and/or b4139 or their homologs, are increased advantageously in an organelle such as a plastid or mitochondria, preferably an increase of the fine chemical such as citramalic acid, glyceric acid, fumaric acid, malic acid, pyruvic acid, succinic acid and/or threonolactone, their salts, amides, thioesters and/or esters is conferred.
In case the activity of the Saccharomyces cerevisiae proteins YAL038W, YAL038W, YAL038W, YDL078C, YGL065C, YGL126W, YJL139C, YKR043C, YKR043C, YOL126C, YOL126C and/or YOR350C or its homologsare increased advantageously in an organelle such as a plastid or mitochondria, preferably an increase of the fine chemical such as citramalic acid, glyceric acid, fumaric acid, malic acid, pyruvic acid, succinic acid and/or threonolactone, their salts, amides, thioesters and/or esters is conferred.

[4282] for the disclosure of the paragraphs [0061.0.0.15] and [0062.0.0.15] see paragraphs [0061.0.0.0] and [0062.0.0.0] above.

[4283] A protein having an activity conferring an increase in the amount or level of the fine chemical, preferably upon targeting to the plastids preferably has the structure of the polypeptide described herein, in particular of the polypeptides comprising the consensus sequence shown in table IV, application no. 16, column 7 or of the polypeptide as shown in the amino acid sequences as disclosed in table II, application no. 16, columns 5 and 7 or the functional homologues thereof as described herein, or is encoded by the nucleic acid molecule characterized herein or the nucleic acid molecule according to the invention, for example by the nucleic acid molecule as shown in table I, application no. 16, columns 5 and 7 or its herein described functional homologues and has the herein mentioned activity.

[4284] /

[4285] for the disclosure of the paragraphs [0065.0.0.15] and [0066.0.0.15] see paragraphs [0065.0.0.0] and [0066.0.0.0] above.

[4286] In one embodiment, the process of the present invention comprises one or more of the following steps
[4287] a) stabilizing a protein conferring the increased expression of a protein encoded by the nucleic acid molecule of the invention or of the polypeptide of the invention, e.g. of a polypeptide having the activity of a protein as indicated in table II, application no. 16, columns 5 and 7 or its homologs activity having herein-mentioned citramalic acid, glyceric acid, fumaric acid, malic acid, pyruvic acid, succinic acid and/or threonolactone, their salts, amides, thioesters and/or esters increasing activity; and/or
[4288] b) stabilizing a mRNA conferring the increased expression of a protein encoded by the nucleic acid molecule of the invention, which is in the sense of the invention a fusion of a nucleic acid sequence encoding a transit peptide and of a nucleic acid sequence as shown in table I, application no. 16, columns 5 and 7, e.g. a nucleic acid sequence encoding a polypeptide having the activity of a protein as indicated in table II, application no. 16, columns 5 and 7 or its homologs activity or of a mRNA encoding the polypeptide of the present invention having herein-mentioned citramalic acid, glyceric acid, fumaric acid, malic acid, pyruvic acid, succinic acid and/or threonolactone, their salts, amides, thioesters and/or esters increasing activity; and/or
[4289] c) increasing the specific activity of a protein conferring the increased expression of a protein encoded by the nucleic acid molecule of the invention or of the polypeptide of the present invention having herein-mentioned citramalic acid, glyceric acid, fumaric acid, malic acid, pyruvic acid, succinic acid and/or threonolactone, their salts, amides, thioesters and/or esters increasing activity, e.g. of a polypeptide having the activity of a protein as indicated in table II, application no. 16, columns 5 and 7 or its homologs activity, or decreasing the inhibitory regulation of the polypeptide of the invention; and/or
[4290] d) generating or increasing the expression of an endogenous or artificial transcription factor mediating the expression of a protein conferring the increased expression of a protein encoded by the nucleic acid molecule of the invention or of the polypeptide of the invention having herein-mentioned citramalic acid, glyceric acid, fumaric acid, malic acid, pyruvic acid, succinic acid and/or threonolactone, their salts, amides, thioesters and/or esters increasing activity, e.g. of a polypeptide having the activity of a protein as indicated in table II, application no. 16, columns 5 and 7 or its homologs activity; and/or
[4291] e) stimulating activity of a protein conferring the increased expression of a protein encoded by the nucleic acid molecule of the present invention or a polypeptide of the present invention having herein-mentioned citramalic acid, glyceric acid, fumaric acid, malic acid, pyruvic acid, succinic acid and/or threonolactone, their salts, amides, thioesters and/or esters increasing activity, e.g. of a polypeptide having the activity of a protein as indicated in table II, application no. 16, columns 5 and 7 or its homologs activity, by adding one or more exogenous inducing factors to the organisms or parts thereof; and/or
[4292] f) expressing a transgenic gene encoding a protein conferring the increased expression of a polypeptide encoded by the nucleic acid molecule of the present invention or a polypeptide of the present invention, having herein-mentioned citramalic acid, glyceric acid, fumaric acid, malic acid, pyruvic acid, succinic acid and/or threonolactone, their salts, amides, thioesters and/or esters increasing activity, e.g. of a polypeptide having the activity of a protein as indicated in table II, application no. 16, columns 5 and 7 or its homologs activity, and/or
[4293] g) increasing the copy number of a gene conferring the increased expression of a nucleic acid molecule encoding a polypeptide encoded by the nucleic acid molecule of the invention or the polypeptide of the invention having herein-mentioned citramalic acid, glyceric acid, fumaric acid, malic acid, pyruvic acid, succinic acid and/or threonolactone, their salts, amides, thioesters and/or esters increasing activity, e.g. of a polypeptide having the activity of a protein as indicated in table II, application no. 16, columns 5 and 7 or its homologs activity; and/or
[4294] h) increasing the expression of the endogenous gene encoding the polypeptide of the invention, e.g. a polypeptide having the activity of a protein as indicated in table II, application no. 16, columns 5 and 7 or its homologs activity, by adding positive expression or removing negative expression elements, e.g. homologous recombination can be used to either introduce positive regulatory elements like for plants the 35S enhancer into the promoter or to remove repressor elements form regulatory regions. Further gene conversion methods can be used to disrupt repressor elements or to enhance to activity of positive elements. Positive elements can be randomly introduced in plants by T-DNA or transposon mutagenesis and lines can be identified in which the positive elements have be integrated near to a gene of the invention, the expression of which is thereby enhanced; and/or
[4295] i) modulating growth conditions of an organism in such a manner, that the expression or activity of the gene encoding the protein of the invention or the protein itself is enhanced for example microorganisms or plants can be grown for example under a higher temperature regime leading to an enhanced expression of heat shock proteins, which can lead an enhanced fine chemical production; and/or
[4296] j) selecting of organisms with especially high activity of the proteins of the invention from natural or from mutagenized resources and breeding them into the target organisms, eg the elite crops; and/or
[4297] k) directing a protein encoded by the nucleic acid molecule of the invention or of the polypeptide of the present invention having herein-mentioned citramalic acid, glyceric acid, fumaric acid, malic acid, pyruvic acid, succinic acid and/or threonolactone, their salts, amides, thioesters and/or esters increasing activity, e.g. of polypeptide having the activity of a protein as indicated in table II, application no. 16, columns 5 and 7 or its homologs activity, to the plastids by the addition of a plastidial targeting sequence; and/or
[4298] l) generating the expression of a protein encoded by the nucleic acid molecule of the invention or of the polypeptide of the present invention having herein-mentioned citramalic acid, glyceric acid, fumaric acid, malic acid, pyruvic acid, succinic acid and/or threonolactone, their salts, amides, thioesters and/or esters increasing activity, e.g. of a polypeptide having the activity of a protein as indicated in table II, application no. 16, columns 5 and 7 or its homologs activity in plastids by the stable or transient transformation advantageously stable transformation of organelles preferably plastids with an inventive nucleic acid sequence preferably in form of an expression cassette containing said sequence leading to the plastidial expression of the nucleic acids or polypeptides of the invention; and/or
[4299] m) generating the expression of a protein encoded by the nucleic acid molecule of the invention or of the polypeptide of the present invention having herein-mentioned citramalic acid, glyceric acid, fumaric acid, malic acid, pyruvic acid, succinic acid and/or threonolactone, their salts, amides, thioesters and/or esters increasing activity, e.g. of a polypeptide having the activity of a protein as indicated in table II, application no. 16, columns 5 and 7 or its homologs activity in plastids by integration of a nucleic acid of the invention into the plastidal genome under control of preferable a plastidial promoter.

[4300] Preferably, said mRNA is the nucleic acid molecule of the present invention and/or the protein conferring the increased expression of a protein encoded by the nucleic acid molecule of the present invention alone or link to a transit nucleic acid sequence or transit peptide encoding nucleic acid sequence or the polypeptide having the herein mentioned activity, e.g. conferring the increase of the fine chemical after increasing the expression or activity of the encoded polypeptide preferably in organelles such as plastids or having the activity of a polypeptide having an activity as the protein as shown in table II, application no. 16, column 3 or its homologs. Preferably the increase of the fine chemical takes place in plastids.

[4301] for the disclosure of the paragraphs [0069.0.0.15] to [0079.0.0.15] see paragraphs [0069.0.0.0] to [0079.0.0.0] above.

[4302] The activation of an endogenous polypeptide having above-mentioned activity, e.g. having the activity of a protein as shown in table II, application no. 16, column 3 or of the polypeptide of the invention, e.g. conferring the increase of the fine chemical after increase of expression or activity in the cytsol and/or in an organelle like a plastid, preferentially in the plastid, can also be increased by introducing a synthetic transcription factor, which binds close to the coding region of the gene encoding the protein as shown in table II, application no. 16, column 3 and activates its transcription. A chimeric zinc finger protein can be constructed, which comprises a specific DNA-binding domain and an activation domain as e.g. the VP16 domain of Herpes Simplex virus. The specific binding domain can bind to the regulatory region of the gene encoding the protein as shown in table II, application no. 16, column 3. The expression of the chimeric transcription factor in a organism, in particular in a plant, leads to a specific expression of the protein as shown in table II, application no. 16, column 3, see e.g. in WO01/52620, Oriz, Proc. Natl. Acad. Sci. USA, 2002, Vol. 99, 13290 or Guan, Proc. Natl. Acad. Sci. USA, 2002, Vol. 99, 13296.

[4303] for the disclosure of the paragraphs [0081.0.0.15] to [0084.0.0.15] see paragraphs [0081.0.0.0] to [0084.0.0.0] above.

[4304] Owing to the introduction of a gene or a plurality of genes conferring the expression of the nucleic acid molecule of the invention or the nucleic acid molecule used in the method of the invention or the polypeptide of the invention or the polypeptide used in the method of the invention as described below, for example the nucleic acid construct mentioned below into an organism alone or in combination with other genes, it is possible not only to increase the biosynthetic flux towards the end product, but also to increase, modify or create de novo an advantageous, preferably novel metabolites composition in the organism, e.g. citramalic acid, glyceric acid, fumaric acid, malic acid, pyruvic acid, succinic acid and/or threonolactone, their salts, amides, thioesters and/or esters and mixtures thereof.

[4305] for the disclosure of this paragraph see paragraph [0086.0.0.0] above.

[4306] By influencing the metabolism thus, it is possible to produce, in the process according to the invention, further advantageous compounds. Examples of such compounds are, in addition to citramalic acid, glyceric acid, fumaric acid, malic acid, pyruvic acid, succinic acid and/or threonolactone, their salts, amides, thioesters and/or esters compounds such as other organic acids, vitamins or fatty acids.

[4307] Accordingly, in one embodiment, the process according to the invention relates to a process, which comprises:
[4308] a) providing a non-human organism, preferably a microorganism, a non-human animal, a plant or animal cell, a plant or animal tissue or a plant, more preferably a microorganism, a plant or a plant tissue;
[4309] b) increasing the activity of a protein as shown in table II, application no. 16, column 3 or of a polypeptide being encoded by the nucleic acid molecule of the present invention and described below, e.g. conferring an increase of the fine chemical in the organism, preferably in the microorganism, the non-human animal, the plant or animal cell, the plant or animal tissue or the plant, more preferably a microorganism, a plant or a plant tissue, in the cytsol or in the plastids, preferentially in the plastids,
[4310] c) growing the organism, preferably the microorganism, the non-human animal, the plant or animal cell, the plant or animal tissue or the plant under conditions which permit the production of the fine chemical in the organism, preferably the microorganism, the plant cell, the plant tissue or the plant; and
[4311] d) if desired, recovering, optionally isolating, the free and/or bound the fine chemical and, optionally further free and/or bound amino acids synthesized by the organism, the microorganism, the non-human animal, the plant or animal cell, the plant or animal tissue or the plant.

[4312] The organism, in particular the microorganism, non-human animal, the plant or animal cell, the plant or animal tissue or the plant is advantageously grown in such a way that it is not only possible to recover, if desired isolate the free or bound the fine chemical or the free and bound the fine chemical but as option it is also possible to produce, recover and, if desired isolate, other free or/and bound organic acids such as citramalic acid, glyceric acid, fumaric acid, malic acid, pyruvic acid, succinic acid and/or threonolactone, their salts, amides, thioesters and/or esters.

[4313] for the disclosure of the paragraphs [0090.0.0.15] to [0097.0.0.15] see paragraphs [0090.0.0.0] to [0097.0.0.0] above.

[4314] With regard to the nucleic acid sequence as depicted a nucleic acid construct which contains a nucleic acid sequence mentioned herein or an organism (=transgenic organism) which is transformed with said nucleic acid sequence or said nucleic acid construct, “transgene” means all those constructs which have been brought about by genetic manipulation methods, preferably in which either
[4315] a) the nucleic acid sequence as shown in table I, application no. 16, columns 5 and 7 or a derivative thereof, or
[4316] b) a genetic regulatory element, for example a promoter, which is functionally linked to the nucleic acid sequence as shown table I, application no. 16, columns 5 and 7 or a derivative thereof, or
[4317] c) (a) and (b)
   is/are not present in its/their natural genetic environment or has/have been modified by means of genetic manipulation methods, it being possible for the modification to be, by way of example, a substitution, addition, deletion, inversion or insertion of one or more nucleotide. “Natural genetic environment” means the natural chromosomal locus in the organism of origin or the presence in a genomic library. In the case of a genomic library, the natural, genetic environment of the nucleic acid sequence is preferably at least partially still preserved. The environment flanks the nucleic acid sequence at least on one side and has a sequence length of at least 50 bp, preferably at least 500 bp, particularly preferably at least 1000 bp, very particularly preferably at least 5000 bp.

[4318] The use of the nucleic acid sequence according to the invention or of the nucleic acid construct according to the invention for the generation of transgenic plants is therefore also subject matter of the invention. As mentioned above the inventive nucleic acid sequence consists advantageously of the nucleic acid sequences as depicted in the sequence protocol and disclosed in table I, application no. 16, columns 5 and 7 joined to a nucleic acid sequence encoding a transit peptide, or a targeting nucleic acid sequence which directs the nucleic acid sequences disclosed in table I, application no. 16, columns 5 and 7 to the organelle preferentially the plastids. Alternatively the inventive nucleic acids sequences consist advantageously of the nucleic acid sequences as depicted in the sequence protocol and disclosed in table I, application no. 16, columns 5 and 7 joined preferably to a nucleic acids sequence mediating the stable integration of nucleic acids into the plastidial genome and optionally sequences mediating the transcription of the sequence in the plastidial compartment. A transient expression is in principal also desirable and possible.

[4319] for the disclosure of this paragraph see paragraph [0100.0.0.0] above.

[4320] In an advantageous embodiment of the invention, the organism takes the form of a plant whose citramalic acid, glyceric acid, fumaric acid, malic acid, pyruvic acid, succinic acid and/or threonolactone, their salts, amides, thioesters and/or esters content is modified advantageously owing to the nucleic acid molecule of the present invention expressed. This is important for plant breeders since, for example, the nutritional value of plants for poultry is dependent on the abovementioned citramalic acid, glyceric acid, fumaric acid, malic acid, pyruvic acid, succinic acid and/or threonolactone, their salts, amides, thioesters and/or esters and the general amount of citramalic acid, glyceric acid, fumaric acid, malic acid, pyruvic acid, succinic acid and/or threonolactone, their salts, amides, thioesters and/or esters as energy source and/or protecting compounds citramalic acid, glyceric acid, fumaric acid, malic acid, pyruvic acid, succinic acid and/or threonolactone, their salts, amides, thioesters and/or esters in feed. After the activity of the protein as shown in table II, application no. 16, column 3 has been increased or generated, or after the expression of nucleic acid molecule or polypeptide according to the invention has been generated or increased, the transgenic plant generated thus is grown on or in a nutrient medium or else in the soil and subsequently harvested.

[4321] for the disclosure of the paragraphs [0102.0.0.15] to [0110.0.0.15] see paragraphs [0102.0.0.0] to [0110.0.0.0] above.

[4322] In a preferred embodiment, the fine chemical (citramalic acid, glyceric acid, fumaric acid, malic acid, pyruvic acid, succinic acid and/or threonolactone, their salts, amides, thioesters and/or esters) is produced in accordance with the invention and, if desired, is isolated. The production of further organic acid such as citric acid, α-ketoglutaric acid, itaconic acid and mixtures thereof or mixtures of other organic acids by the process according to the invention is advantageous. It may be advantageous to increase the pool of free organic acids such as citramalic acid, glyceric acid, fumaric acid, malic acid, pyruvic acid, succinic acid and/or threonolactone, their salts, amides, thioesters and/or esters in the transgenic organisms by the process according to the invention in order to isolate high amounts of the pure fine chemical.

[4323] In another preferred embodiment of the invention a combination of the increased expression of the nucleic acid sequence or the protein of the invention together with the transformation of a nucleic acid encoding a protein or polypeptide for example another gene of the citramalic acid, glyceric acid, fumaric acid, malic acid, pyruvic acid, succinic acid and/or threonolactone, their salts, amides, thioesters and/or esters biosynthesis, or a compound, which functions as a sink for the desired organic acids such as citramalic acid, glyceric acid, fumaric acid, malic acid, pyruvic acid, succinic acid and/or threonolactone, their salts, amides, thioesters and/or esters in the organism is useful to increase the production of the respective fine chemical.

[4324] In a preferred embodiment, the respective fine chemical is produced in accordance with the invention and, if desired, is isolated. The production of further organic acids other then citramalic acid, glyceric acid, fumaric acid, malic acid, pyruvic acid, succinic acid and/or threonolactone, their salts, amides, thioesters and/or esters or compounds for which the respective fine chemical is a biosynthesis precursor compounds, e.g. amino acids, or mixtures thereof or mixtures of other organic acids, in particular of citramalic acid, glyceric acid, fumaric acid, malic acid, pyruvic acid, succinic acid and/or threonolactone, their salts, amides, thioesters and/or esters, by the process according to the invention is advantageous.

[4325] In the case of the fermentation of microorganisms, the abovementioned desired fine chemical may accumulate in the medium and/or the cells. If microorganisms are used in the process according to the invention, the fermentation broth can be processed after the cultivation. Depending on the requirement, all or some of the biomass can be removed from the fermentation broth by separation methods such as, for example, centrifugation, filtration, decanting or a combination of these methods, or else the biomass can be left in the fermentation broth. The fermentation broth can subsequently be reduced, or concentrated, with the aid of known methods such as, for example, rotary evaporator, thin-layer evaporator, falling film evaporator, by reverse osmosis or by nanofiltration. Afterwards advantageously further compounds for formulation can be added such as corn starch or silicates. This concentrated fermentation broth advantageously together with compounds for the formulation can subsequently be processed by lyophilization, spray drying, and spray granulation or by other methods. Preferably the respective fine chemical comprising compositions are isolated from the organisms, such as the microorganisms or plants or the culture medium in or on which the organisms have been grown, or from the organism and the culture medium, in the known manner, for example via extraction, distillation, crystallization, chromatography or a combination of these methods. These purification methods can be used alone or in combination with the aforementioned methods such as the separation and/or concentration methods.

[4326] Transgenic plants which comprise the fine chemical such as citramalic acid, glyceric acid, fumaric acid, malic acid, pyruvic acid, succinic acid and/or threonolactone, their salts, amides, thioesters and/or esters synthesized in the process according to the invention can advantageously be marketed directly without there being any need for the fine chemical synthesized to be isolated. Plants for the process according to the invention are listed as meaning intact plants and all plant parts, plant organs or plant parts such as leaf, stem, seeds, root, tubers, anthers, fibers, root hairs, stalks, embryos, calli, cotelydons, petioles, flowers, harvested material, plant tissue, reproductive tissue and cell cultures which are derived from the actual transgenic plant and/or can be used for bringing about the transgenic plant. In this context, the seed comprises all parts of the seed such as the seed coats, epidermal cells, seed cells, endosperm or embryonic tissue.

However, the respective fine chemical produced in the process according to the invention can also be isolated from the organisms, advantageously plants, (in the form of their organic extracts, e.g. amide, ester, alcohol, or other organic solvents or water containing extract and/or free organic acids citramalic acid, glyceric acid, fumaric acid, malic acid, pyruvic acid, succinic acid and/or threonolactone, their salts, amides, thioesters and/or esters or other extracts. The respective fine chemical produced by this process can be obtained by harvesting the organisms, either from the medium in which they grow, or from the field. This can be done via pressing or extraction of the plant parts. To increase the efficiency of extraction it is beneficial to clean, to temper and if necessary to hull and to flake the plant material. To allow for greater ease of disruption of the plant parts, specifically the seeds, they can previously be comminuted, steamed or roasted. Seeds, which have been pretreated in this manner can subsequently be pressed or extracted with solvents such as organic solvents like warm hexane or water or mixtures of organic solvents and water. The solvent is subsequently removed. In the case of microorganisms, the latter are, after harvesting, for example extracted directly without further processing steps or else, after disruption, extracted via various methods with which the skilled worker is familiar. Thereafter, the resulting products can be processed further, i.e. degummed and/or refined. In this process, substances such as the plant mucilages and suspended matter can be first removed. What is known as desliming can be affected enzymatically or, for example, chemico-physically by addition of acid such as phosphoric acid.
Well-established approaches for the harvesting of cells include filtration, centrifugation and coagulation/flocculation as described herein. Of the residual hydrocarbon, adsorbed on the cells, has to be removed. Solvent extraction or treatment with surfactants have been suggested for this purpose. However, it can be advantageous to avoid this treatment as it can result in cells devoid of most carotenoids.

[4327] The identity and purity of the compound(s) isolated can be determined by prior-art techniques. They encompass high-performance liquid chromatography (HPLC), gas chromatography (GC), spectroscopic methods, mass spectrometry (MS), staining methods, thin-layer chromatography, NIRS, enzyme assays or microbiological assays. These analytical methods are compiled in: Patek et al. (1994) Appl. Environ. Microbiol. 60:133-140; Malakhova et al. (1996) Biotekhnologiya 11 27-32; and Schmidt et al. (1998) Bioprocess Engineer. 19:67-70. Ulmann's Encyclopedia of Industrial Chemistry (1996) Bd. A27, VCH Weinheim, pp. 89-90, pp. 521-540, pp. 540-547, pp. 559-566, 575-581 and pp. 581-587; Michal, G (1999) Biochemical Pathways: An Atlas of Biochemistry and Molecular Biology, John Wiley and Sons; Fallon, A. et al. (1987) Applications of HPLC in Biochemistry in: Laboratory Techniques in Biochemistry and Molecular Biology, vol. 17.

[4328] Citramalic acid, glyceric acid, fumaric acid, malic acid, pyruvic acid, succinic acid and/or threonolactone, their salts, amides, thioesters and/or esters can for example be detected advantageously via HPLC, LC or GC separation methods. The unambiguous detection for the presence of organic acids, in particular citramalic acid, glyceric acid, fumaric acid, malic acid, pyruvic acid, succinic acid and/or threonolactone, their salts, amides, thioesters and/or esters containing products can be obtained by analyzing recombinant organisms using analytical standard methods: LC, LC-MS, MS or TLC). The material to be analyzed can be disrupted by sonication, grinding in a glass mill, liquid nitrogen and grinding, cooking, or via other applicable methods

[4329] In a preferred embodiment, the present invention relates to a process for the production of the fine chemical comprising or generating in an organism or a part thereof, preferably in a cell compartment such as a plastid or mitochondria, the expression of at least one nucleic acid molecule comprising a nucleic acid molecule selected from the group consisting of:
[4330] a) nucleic acid molecule encoding, preferably at least the mature form, of the polypeptide shown in table II, application no. 16, columns 5 and 7 or a fragment thereof, which confers an increase in the amount of the fine chemical in an organism or a part thereof;
[4331] b) nucleic acid molecule comprising, preferably at least the mature form, of the nucleic acid molecule shown in table I, application no. 16, columns 5 and 7;
[4332] c) nucleic acid molecule whose sequence can be deduced from a polypeptide sequence encoded by a nucleic acid molecule of (a) or (b) as result of the degeneracy of the genetic code and conferring an increase in the amount of the fine chemical in an organism or a part thereof;
[4333] d) nucleic acid molecule encoding a polypeptide which has at least 50% identity with the amino acid sequence of the polypeptide encoded by the nucleic acid molecule of (a) to (c) and conferring an increase in the amount of the fine chemical in an organism or a part thereof;
[4334] e) nucleic acid molecule which hybridizes with a nucleic acid molecule of (a) to (c) under stringent hybridisation conditions and conferring an increase in the amount of the fine chemical in an organism or a part thereof;
[4335] f) nucleic acid molecule encoding a polypeptide, the polypeptide being derived by substituting, deleting and/or adding one or more amino acids of the amino acid sequence of the polypeptide encoded by the nucleic acid molecules (a) to (d), preferably to (a) to (c) and conferring an increase in the amount of the fine chemical in an organism or a part thereof;
[4336] g) nucleic acid molecule encoding a fragment or an epitope of a polypeptide which is encoded by one of the nucleic acid molecules of (a) to (e), preferably to (a) to (c) and conferring an increase in the amount of the fine chemical in an organism or a part thereof;
[4337] h) nucleic acid molecule comprising a nucleic acid molecule which is obtained by amplifying nucleic acid molecules from a cDNA library or a genomic library using the primers shown in table III, application no. 16, column 7 and conferring an increase in the amount of the fine chemical in an organism or a part thereof;
[4338] i) nucleic acid molecule encoding a polypeptide which is isolated, e.g. from an expression library, with the aid of monoclonal antibodies against a polypeptide encoded by one of the nucleic acid molecules of (a) to (h), preferably to (a) to (c), and conferring an increase in the amount of the fine chemical in an organism or a part thereof;
[4339] j) nucleic acid molecule which encodes a polypeptide comprising the consensus sequence shown in table IV, application no. 16, column 7 and conferring an increase in the amount of the fine chemical in an organism or a part thereof;
[4340] k) nucleic acid molecule comprising one or more of the nucleic acid molecule encoding the amino acid sequence of a polypeptide encoding a domain of the polypeptide shown in table II, application no. 16, columns 5 and 7 and conferring an increase in the amount of the fine chemical in an organism or a part thereof; and
[4341] l) nucleic acid molecule which is obtainable by screening a suitable library under stringent conditions with a probe comprising one of the sequences of the nucleic acid molecule of (a) to (k), preferably to (a) to (c), or with a fragment of at least 15 nt, preferably 20 nt, 30 nt, 50 nt, 100 nt, 200 nt or 500 nt of the nucleic acid molecule characterized in (a) to (k), preferably to (a) to (c), and conferring an increase in the amount of the fine chemical in an organism or a part thereof;
   or which comprises a sequence which is complementary thereto.

[4342] In one embodiment, the nucleic acid molecule used in the process of the invention distinguishes over the sequence indicated in table I A, application no. 16, columns 5 and 7 by one or more nucleotides. In one embodiment, the nucleic acid molecule used in the process of the invention does not consist of the sequence indicated in table I A, application no. 16, columns 5 and 7. In one embodiment, the nucleic acid molecule used in the process of the invention is less than 100%, 99.999%, 99.99%, 99.9% or 99% identical to a sequence indicated in table I A, application no. 16, columns 5 and 7. In another embodiment, the nucleic acid molecule does not encode a polypeptide of a sequence indicated in table II A, application no. 16, columns 5 and 7.

[4343] In one embodiment, the nucleic acid molecule used in the process of the invention distinguishes over the sequence indicated in table I B, application no. 16, columns 5 and 7, by one or more nucleotides. In one embodiment, the nucleic acid molecule used in the process of the invention does not consist of the sequence indicated in table I B, application no. 16, columns 5 and 7. In one embodiment, the nucleic acid molecule used in the process of the invention is less than 100%, 99.999%, 99.99%, 99.9% or 99% identical to a sequence indicated in table I B, application no. 16, columns 5 and 7. In another embodiment, the nucleic acid molecule does not encode a polypeptide of a sequence indicated in table II B, application no. 16, columns 5 and 7.

[4344] In one embodiment, the nucleic acid molecule used in the process distinguishes over the sequence shown in table I, application no. 16, columns 5 and 7 by one or more nucleotides or does not consist of the sequence shown in table I, application no. 16, columns 5 and 7. In one embodiment, the nucleic acid molecule of the present invention is less than 100%, 99.999%, 99.99%, 99.9% or 99% identical to the sequence shown in table I, application no. 16, columns 5 and 7. In another embodiment, the nucleic acid molecule does not encode a polypeptide of the sequence shown in table II, application no. 16, columns 5 and 7.

[4345] for the disclosure of the paragraphs [0118.0.0.15] to [0120.0.0.15] see paragraphs [0118.0.0.0] to [0120.0.0.0] above.

[4346] Nucleic acid molecules with the sequence shown in table I, application no. 16, columns 5 and 7, nucleic acid molecules which are derived from the amino acid sequences shown in table II, application no. 16, columns 5 and 7 or from polypeptides comprising the consensus sequence shown in table IV, application no. 16, column 7, or their derivatives or homologues encoding polypeptides with the enzymatic or biological activity of a protein as shown in table II, application no. 16, column 3 or conferring the fine chemical increase after increasing its expression or activity are advantageously increased in the process according to the invention by expression either in the cytsol or in an organelle such as a plastid or mitochondria or both, preferably in plastids.

[4347] for the disclosure of this paragraph see paragraph [0122.0.0.0] above.

[4348] Nucleic acid molecules, which are advantageous for the process according to the invention and which encode polypeptides with the activity of a protein as shown in table II, application no. 16, column 3 can be determined from generally accessible databases.

[4349] for the disclosure of this paragraph see paragraph [0124.0.0.0] above.

[4350] The nucleic acid molecules used in the process according to the invention take the form of isolated nucleic acid sequences, which encode polypeptides with the activity of the proteins as shown in table II, application no. 16, column 3 and conferring the fine chemical increase by expression either in the cytsol or in an organelle such as a plastid or mitochondria or both, preferably in plastids.

[4351] for the disclosure of the paragraphs [0126.0.0.15] to [0133.0.0.15] see paragraphs [0126.0.0.0] to [0133.0.0.0] above.

[4352] However, it is also possible to use artificial sequences, which differ in one or more bases from the nucleic acid sequences found in organisms, or in one or more amino acid molecules from polypeptide sequences found in organisms, in particular from the polypeptide sequences shown in table II, application no. 16, columns 5 and 7 or the functional homologues thereof as described herein, preferably conferring above-mentioned activity, i.e. conferring the fine chemical increase after increasing its activity, e.g. after increasing the activity of a protein as shown in table II, application no. 16, column 3 by for example expression either in the cytsol or in an organelle such as a plastid or mitochondria or both, preferably in plastids.

[4353] for the disclosure of the paragraphs [0135.0.0.15] to [0140.0.0.15] see paragraphs [0135.0.0.0] to [0140.0.0.0] above.

[4354] Synthetic oligonucleotide primers for the amplification, e.g. as shown in table Ill, application no. 16, column 7, by means of polymerase chain reaction can be generated on the basis of a sequence shown herein, for example the sequence shown in table I, application no. 16, columns 5 and 7 or the sequences derived from table II, application no. 16, columns 5 and 7.

[4355] Moreover, it is possible to identify conserved regions from various organisms by carrying out protein sequence alignments with the polypeptide used in the process of the invention, in particular with sequences of the polypeptide of the invention, from which conserved regions, and in turn, degenerate primers can be derived. Conserved regions are those, which show a very little variation in the amino acid in one particular position of several homologs from different origin. The consensus sequence shown in table IV, application no. 16, column 7 is derived from said alignments.

[4356] Degenerated primers can then be utilized by PCR for the amplification of fragments of novel proteins having above-mentioned activity, e.g. conferring the increase of the fine chemical after increasing the expression or activity or having the activity of a protein as shown in table II, application no. 16, column 3 or further functional homologs of the polypeptide of the invention from other organisms.

[4357] for the disclosure of the paragraphs [0144.0.0.15] to [0151.0.0.15] see paragraphs [0144.0.0.0] to [0151.0.0.0] above.

[4358] Polypeptides having above-mentioned activity, i.e. conferring the fine chemical increase, derived from other organisms, can be encoded by other DNA sequences which hybridize to the sequences shown in table I, application no. 16, columns 5 and 7, preferably of table I B, application no. 16, columns 5 and 7 under relaxed hybridization conditions and which code on expression for peptides having the citramalic acid, glyceric acid, fumaric acid, malic acid, pyruvic acid, succinic acid and/or threonolactone, their salts, amides, thioesters and/or esters increasing activity.

[4359] for the disclosure of the paragraphs [0153.0.0.15] to [0159.0.0.15] see paragraphs [0153.0.0.0] to [0159.0.0.0] above.

[4360] Further, the nucleic acid molecule of the invention comprises a nucleic acid molecule, which is a complement of one of the nucleotide sequences of above mentioned nucleic acid molecules or a portion thereof. A nucleic acid molecule which is complementary to one of the nucleotide sequences shown in table I, application no. 16, columns 5 and 7, preferably shown in table I B, application no. 16, columns 5 and 7 is one which is sufficiently complementary to one of the nucleotide sequences shown in table I, application no. 16, columns 5 and 7, preferably shown in table I B, application no. 16, columns 5 and 7 such that it can hybridize to one of the nucleotide sequences shown in table I, application no. 16, columns 5 and 7, preferably shown in table I B, application no. 16, columns 5 and 7, thereby forming a stable duplex. Preferably, the hybridisation is performed under stringent hybridization conditions. However, a complement of one of the herein disclosed sequences is preferably a sequence complement thereto according to the base pairing of nucleic acid molecules well known to the skilled person. For example, the bases A and G undergo base pairing with the bases T and U or C, resp. and visa versa. Modifications of the bases can influence the base-pairing partner.

[4361] The nucleic acid molecule of the invention comprises a nucleotide sequence which is at least about 30%, 35%, 40% or 45%, preferably at least about 50%, 55%, 60% or 65%, more preferably at least about 70%, 80%, or 90%, and even more preferably at least about 95%, 97%, 98%, 99% or more homologous to a nucleotide sequence shown in table I, application no. 16, columns 5 and 7, preferably shown in table I B, application no. 16, columns 5 and 7, or a portion thereof and preferably has above mentioned activity, in particular having a fine chemical increasing activity after increasing the activity or an activity of a gene product as shown in table II, application no. 16, column 3 by for example expression either in the cytsol or in an organelle such as a plastid or mitochondria or both, preferably in plastids.

[4362] The nucleic acid molecule of the invention comprises a nucleotide sequence which hybridizes, preferably hybridizes under stringent conditions as defined herein, to one of the nucleotide sequences shown in table I, application no. 16, columns 5 and 7, preferably shown in table I B, application no. 16, columns 5 and 7, or a portion thereof and encodes a protein having above-mentioned activity, e.g. conferring of a citramalic acid, glyceric acid, fumaric acid, malic acid, pyruvic acid, succinic acid and/or threonolactone, their salts, amides, thioesters and/or esters increase by for example expression either in the cytsol or in an organelle such as a plastid or mitochondria or both, preferably in plastids, and optionally, the activity of a protein as shown in table II, application no. 16, column 3.

[4363] Moreover, the nucleic acid molecule of the invention can comprise only a portion of the coding region of one of the sequences shown in table I, application no. 16, columns 5 and 7, preferably shown in table I B, application no. 16, columns 5 and 7, for example a fragment which can be used as a probe or primer or a fragment encoding a biologically active portion of the polypeptide of the present invention or of a polypeptide used in the process of the present invention, i.e. having above-mentioned activity, e.g. conferring an increase of the fine chemical if its activity is increased by for example expression either in the cytsol or in an organelle such as a plastid or mitochondria or both, preferably in plastids. The nucleotide sequences determined from the cloning of the present protein-according-to-the-invention-encoding gene allows for the generation of probes and primers designed for use in identifying and/or cloning its homologues in other cell types and organisms. The probe/primer typically comprises substantially purified oligonucleotide. The oligonucleotide typically comprises a region of nucleotide sequence that hybridizes under stringent conditions to at least about 12, 15 preferably about 20 or 25, more preferably about 40, 50 or 75 consecutive nucleotides of a sense strand of one of the sequences set forth, e.g., in table I, application no. 16, columns 5 and 7, an anti-sense sequence of one of the sequences, e.g., set forth in table I, application no. 16, columns 5 and 7, preferably shown in table I B, application no. 16, columns 5 and 7, or naturally occurring mutants thereof. Primers based on a nucleotide of invention can be used in PCR reactions to clone homologues of the polypeptide of the invention or of the polypeptide used in the process of the invention, e.g. as the primers described in the examples of the present invention, e.g. as shown in the examples. A PCR with the primers shown in table III, application no. 16, column 7 will result in a fragment of the gene product as shown in table II, column 3.

[4364] for the disclosure of this paragraph see paragraph [0164.0.0.0] above.

[4365] The nucleic acid molecule of the invention encodes a polypeptide or portion thereof which includes an amino acid sequence which is sufficiently homologous to the amino acid sequence shown in table II, application no. 16, columns 5 and 7 such that the protein or portion thereof maintains the ability to participate in the fine chemical production, in particular a citramalic acid, glyceric acid, fumaric acid, malic acid, pyruvic acid, succinic acid and/or threonolactone, their salts, amides, thioesters and/or esters increasing activity as mentioned above or as described in the examples in plants or microorganisms is comprised.

[4366] As used herein, the language “sufficiently homologous” refers to proteins or portions thereof which have amino acid sequences which include a minimum number of identical or equivalent amino acid residues (e.g., an amino acid residue which has a similar side chain as an amino acid residue in one of the sequences of the polypeptide of the present invention) to an amino acid sequence shown in table II, application no. 16, columns 5 and 7 such that the protein or portion thereof is able to participate in the increase of the fine chemical production. For examples having the activity of a protein as shown in table II, column 3 and as described herein.

[4367] In one embodiment, the nucleic acid molecule of the present invention comprises a nucleic acid that encodes a portion of the protein of the present invention. The protein is at least about 30%, 35%, 40%, 45% or 50%, preferably at least about 55%, 60%, 65% or 70%, and more preferably at least about 75%, 80%, 85%, 90%, 91%, 92%, 93% or 94% and most preferably at least about 95%, 97%, 98%, 99% or more homologous to an entire amino acid sequence of table II, application no. 16, columns 5 and 7 and having above-mentioned activity, e.g. conferring preferably the increase of the fine chemical by for example expression either in the cytsol or in an organelle such as a plastid or mitochondria or both, preferably in plastids.

[4368] for the disclosure of the paragraphs [0168.0.0.15] and [0169.0.0.15] see paragraphs [0168.0.0.0] and [0169.0.0.0] above.

[4369] The invention further relates to nucleic acid molecules that differ from one of the nucleotide sequences shown in table I, application no. 16, columns 5 and 7 (and portions thereof) due to degeneracy of the genetic code and thus encode a polypeptide of the present invention, in particular a polypeptide having above mentioned activity, e.g. conferring an increase in the fine chemical in a organism, e.g. as that polypeptides depicted by the sequence shown in table II, application no. 16, columns 5 and 7 or the functional homologues. Advantageously, the nucleic acid molecule of the invention comprises, or in an other embodiment has, a nucleotide sequence encoding a protein comprising, or in an other embodiment having, an amino acid sequence shown in table II, application no. 16, columns 5 and 7 or the functional homologues. In a still further embodiment, the nucleic acid molecule of the invention encodes a full length protein which is substantially homologous to an amino acid sequence shown in table II, application no. 16, columns 5 and 7 or the functional homologues. However, in a preferred embodiment, the nucleic acid molecule of the present invention does not consist of the sequence shown in table I, application no. 16, columns 5 and 7, preferably as indicated in table I A, application no. 16, columns 5 and 7. Preferably the nucleic acid molecule of the invention is a functional homologue or identical to a nucleic acid molecule indicated in table I B, application no. 16, columns 5 and 7.

[4370] for the disclosure of the paragraphs [0171.0.0.15] to [00173.0.0.15] see paragraphs [0171.0.0.0] to [0173.0.0.0] above.

[4371] Accordingly, in another embodiment, a nucleic acid molecule of the invention is at least 15, 20, 25 or 30 nucleotides in length. Preferably, it hybridizes under stringent conditions to a nucleic acid molecule comprising a nucleotide sequence of the nucleic acid molecule of the present invention or used in the process of the present invention, e.g. comprising the sequence shown in table I, application no. 16, columns 5 and 7. The nucleic acid molecule is preferably at least 20, 30, 50, 100, 250 or more nucleotides in length.

[4372] for the disclosure of this paragraph see paragraph [0175.0.0.0] above.

[4373] Preferably, nucleic acid molecule of the invention that hybridizes under stringent conditions to a sequence shown in table I, application no. 16, columns 5 and 7 corresponds to a naturally-occurring nucleic acid molecule of the invention. As used herein, a “naturally-occurring” nucleic acid molecule refers to an RNA or DNA molecule having a nucleotide sequence that occurs in nature (e.g., encodes a natural protein). Preferably, the nucleic acid molecule encodes a natural protein having abovementioned activity, e.g. conferring the fine chemical increase after increasing the expression or activity thereof or the activity of a protein of the invention or used in the process of the invention by for example expression the nucleic acid sequence of the gene product in the cytsol and/or in an organelle such as a plastid or mitochondria, preferably in plastids.

[4374] for the disclosure of this paragraph see paragraph [0177.0.0.0] above.

[4375] For example, nucleotide substitutions leading to amino acid substitutions at “non-essential” amino acid residues can be made in a sequence of the nucleic acid molecule of the invention or used in the process of the invention, e.g. shown in table I, application no. 16, columns 5 and 7.

[4376] for the disclosure of the paragraphs [0179.0.0.15] and [0180.0.0.15] see paragraphs [0179.0.0.0] and [0180.0.0.0] above.

[4377] Accordingly, the invention relates to nucleic acid molecules encoding a polypeptide having above-mentioned activity, e.g. conferring an increase in the fine chemical in an organisms or parts thereof by for example expression either in the cytsol or in an organelle such as a plastid or mitochondria or both, preferably in plastids that contain changes in amino acid residues that are not essential for said activity. Such polypeptides differ in amino acid sequence from a sequence contained in the sequences shown in table II, application no. 16, columns 5 and 7, preferably shown in table II A, application no. 16, columns 5 and 7 yet retain said activity described herein. The nucleic acid molecule can comprise a nucleotide sequence encoding a polypeptide, wherein the polypeptide comprises an amino acid sequence at least about 50% identical to an amino acid sequence shown in table II, application no. 16, columns 5 and 7, preferably shown in table II A, application no. 16, columns 5 and 7 and is capable of participation in the increase of production of the fine chemical after increasing its activity, e.g. its expression by for example expression either in the cytsol or in an organelle such as a plastid or mitochondria or both, preferably in plastids. Preferably, the protein encoded by the nucleic acid molecule is at least about 60% identical to the sequence shown in table II, application no. 16, columns 5 and 7, preferably shown in table II A, application no. 16, columns 5 and 7, more preferably at least about 70% identical to one of the sequences shown in table II, application no. 16, columns 5 and 7, preferably shown in table II A, application no. 16, columns 5 and 7, even more preferably at least about 80%, 90%, 95% homologous to the sequence shown in table II, application no. 16, columns 5 and 7, preferably shown in table II A, application no. 16, columns 5 and 7, and most preferably at least about 96%, 97%, 98%, or 99% identical to the sequence shown in table II, application no. 16, columns 5 and 7, preferably shown in table II A, application no. 16, columns 5 and 7.

[4378] for the disclosure of the paragraphs [0182.0.0.15] to [0188.0.0.15] see paragraphs [0182.0.0.0] to [0188.0.0.0] above.

[4379] Functional equivalents derived from one of the polypeptides as shown in table II, application no. 16, columns 5 and 7, preferably shown in table II B, application no. 16, columns 5 and 7 resp., according to the invention by substitution, insertion or deletion have at least 30%, 35%, 40%, 45% or 50%, preferably at least 55%, 60%, 65% or 70% by preference at least 80%, especially preferably at least 85% or 90%, 91%, 92%, 93% or 94%, very especially preferably at least 95%, 97%, 98% or 99% homology with one of the polypeptides as shown in table II, application no. 16, columns 5 and 7, preferably shown in table II B, application no. 16, columns 5 and 7 resp., according to the invention and are distinguished by essentially the same properties as the polypeptide as shown in table II, application no. 16, columns 5 and 7, preferably shown in table II B, application no. 16, columns 5 and 7.

[4380] Functional equivalents derived from the nucleic acid sequence as shown in table I, application no. 16, columns 5 and 7, preferably shown in table I B, application no. 16, columns 5 and 7 resp., according to the invention by substitution, insertion or deletion have at least 30%, 35%, 40%, 45% or 50%, preferably at least 55%, 60%, 65% or 70% by preference at least 80%, especially preferably at least 85% or 90%, 91%, 92%, 93% or 94%, very especially preferably at least 95%, 97%, 98% or 99% homology with one of the polypeptides as shown in table II, application no. 16, columns 5 and 7, preferably shown in table II B, application no. 16, columns 5 and 7 resp., according to the invention and encode polypeptides having essentially the same properties as the polypeptide as shown in table II, application no. 16, columns 5 and 7, preferably shown in table II B, application no. 16, columns 5 and 7.

[4381] for the disclosure of this paragraph see paragraph [0191.0.0.0] above.

[4382] A nucleic acid molecule encoding an homologous to a protein sequence of table II, application no. 16, columns 5 and 7, preferably shown in table II B, application no. 16, columns 5 and 7 resp., can be created by introducing one or more nucleotide substitutions, additions or deletions into a nucleotide sequence of the nucleic acid molecule of the present invention, in particular of table I, application no. 16, columns 5 and 7, preferably shown in table I B, application no. 16, columns 5 and 7 resp., such that one or more amino acid substitutions, additions or deletions are introduced into the encoded protein. Mutations can be introduced into the encoding sequences of table I, application no. 16, columns 5 and 7, preferably shown in table I B, application no. 16, columns 5 and 7 resp., by standard techniques, such as site-directed mutagenesis and PCR-mediated mutagenesis.

[4383] for the disclosure of the paragraphs [0193.0.0.15] to [0196.0.0.15] see paragraphs [0193.0.0.0] to [0196.0.0.0] above.

[4384] Homologues of the nucleic acid sequences used, with the sequence shown in table I, application no. 16, columns 5 and 7, preferably shown in table I B, application no. 16, columns 5 and 7, comprise also allelic variants with at least approximately 30%, 35%, 40% or 45% homology, by preference at least approximately 50%, 60% or 70%, more preferably at least approximately 90%, 91%, 92%, 93%, 94% or 95% and even more preferably at least approximately 96%, 97%, 98%, 99% or more homology with one of the nucleotide sequences shown or the abovementioned derived nucleic acid sequences or their homologues, derivatives or analogues or parts of these. Allelic variants encompass in particular functional variants which can be obtained by deletion, insertion or substitution of nucleotides from the sequences shown, preferably from table I, application no. 16, columns 5 and 7, preferably shown in table I B, application no. 16, columns 5 and 7, or from the derived nucleic acid sequences, the intention being, however, that the enzyme activity or the biological activity of the resulting proteins synthesized is advantageously retained or increased.

[4385] In one embodiment of the present invention, the nucleic acid molecule of the invention or used in the process of the invention comprises the sequences shown in any of the table I, application no. 16, columns 5 and 7, preferably shown in table I B, application no. 16, columns 5 and 7. It is preferred that the nucleic acid molecule comprises as little as possible other nucleotides not shown in any one of table I, application no. 16, columns 5 and 7, preferably shown in table I B, application no. 16, columns 5 and 7. In one embodiment, the nucleic acid molecule comprises less than 500, 400, 300, 200, 100, 90, 80, 70, 60, 50 or 40 further nucleotides. In a further embodiment, the nucleic acid molecule comprises less than 30, 20 or 10 further nucleotides. In one embodiment, the nucleic acid molecule use in the process of the invention is identical to the sequences shown in table I, application no. 16, columns 5 and 7, preferably shown in table I B, application no. 16, columns 5 and 7.

[4386] Also preferred is that the nucleic acid molecule used in the process of the invention encodes a polypeptide comprising the sequence shown in table II, application no. 16, columns 5 and 7, preferably shown in table II B, application no. 16, columns 5 and 7. In one embodiment, the nucleic acid molecule encodes less than 150, 130, 100, 80, 60, 50, 40 or 30 further amino acids. In a further embodiment, the encoded polypeptide comprises less than 20, 15, 10, 9, 8, 7, 6 or 5 further amino acids. In one embodiment used in the inventive process, the encoded polypeptide is identical to the sequences shown in table II, application no. 16, columns 5 and 7, preferably shown in table II B, application no. 16, columns 5 and 7.

[4387] In one embodiment, the nucleic acid molecule of the invention or used in the process encodes a polypeptide comprising the sequence shown in table II, application no. 16, columns 5 and 7, preferably shown in table II B, application no. 16, columns 5 and 7 comprises less than 100 further nucleotides. In a further embodiment, said nucleic acid molecule comprises less than 30 further nucleotides. In one embodiment, the nucleic acid molecule used in the process is identical to a coding sequence of the sequences shown in table I, application no. 16, columns 5 and 7, preferably shown in table I B, application no. 16, columns 5 and 7.

[4388] Polypeptides (=proteins), which still have the essential biological or enzymatic activity of the polypeptide of the present invention conferring an increase of the fine chemical i.e. whose activity is essentially not reduced, are polypeptides with at least 10% or 20%, by preference 30% or 40%, especially preferably 50% or 60%, very especially preferably 80% or 90 or more of the wild type biological activity or enzyme activity, advantageously, the activity is essentially not reduced in comparison with the activity of a polypeptide shown in table II, application no. 16, columns 5 and 7 expressed under identical conditions.

[4389] Homologues of table I, application no. 16, columns 5 and 7 or of the derived sequences of table II, application no. 16, columns 5 and 7 also mean truncated sequences, cDNA, single-stranded DNA or RNA of the coding and noncoding DNA sequence. Homologues of said sequences are also understood as meaning derivatives, which comprise noncoding regions such as, for example, UTRs, terminators, enhancers or promoter variants. The promoters upstream of the nucleotide sequences stated can be modified by one or more nucleotide substitution(s), insertion(s) and/or deletion(s) without, however, interfering with the functionality or activity either of the promoters, the open reading frame (=ORF) or with the 3′-regulatory region such as terminators or other 3′ regulatory regions, which are far away from the ORF. It is furthermore possible that the activity of the promoters is increased by modification of their sequence, or that they are replaced completely by more active promoters, even promoters from heterologous organisms. Appropriate promoters are known to the person skilled in the art and are mentioned herein below.

[4390] for the disclosure of the paragraphs [0203.0.0.15] to [0215.0.0.15] see paragraphs [0203.0.0.0] to [0215.0.0.0] above.

[4391] Accordingly, in one embodiment, the invention relates to a nucleic acid molecule, which comprises a nucleic acid molecule selected from the group consisting of:
[4392] a) nucleic acid molecule encoding, preferably at least the mature form, of the polypeptide shown in table II, application no. 16, columns 5 and 7, preferably in table II B, application no. 16, columns 5 and 7; or a fragment thereof conferring an increase in the amount of the fine chemical in an organism or a part thereof
[4393] b) nucleic acid molecule comprising, preferably at least the mature form, of the nucleic acid molecule shown in table I, application no. 16, columns 5 and 7, preferably in table I B, application no. 16, columns 5 and 7 or a fragment thereof conferring an increase in the amount of the fine chemical in an organism or a part thereof;
[4394] c) nucleic acid molecule whose sequence can be deduced from a polypeptide sequence encoded by a nucleic acid molecule of (a) or (b) as result of the degeneracy of the genetic code and conferring an increase in the amount of the fine chemical in an organism or a part thereof;
[4395] d) nucleic acid molecule encoding a polypeptide whose sequence has at least 50% identity with the amino acid sequence of the polypeptide encoded by the nucleic acid molecule of (a) to (c) and conferring an increase in the amount of the fine chemical in an organism or a part thereof;
[4396] e) nucleic acid molecule which hybridizes with a nucleic acid molecule of (a) to (c) under stringent hybridisation conditions and conferring an increase in the amount of the fine chemical in an organism or a part thereof;
[4397] f) nucleic acid molecule encoding a polypeptide, the polypeptide being derived by substituting, deleting and/or adding one or more amino acids of the amino acid sequence of the polypeptide encoded by the nucleic acid molecules (a) to (d), preferably to (a) to (c), and conferring an increase in the amount of the fine chemical in an organism or a part thereof;
[4398] g) nucleic acid molecule encoding a fragment or an epitope of a polypeptide which is encoded by one of the nucleic acid molecules of (a) to (e), preferably to (a) to (c) and conferring an increase in the amount of the fine chemical in an organism or a part thereof;
[4399] h) nucleic acid molecule comprising a nucleic acid molecule which is obtained by amplifying a cDNA library or a genomic library using the primers in table III, application no. 16, column 7 and conferring an increase in the amount of the fine chemical in an organism or a part thereof;
[4400] i) nucleic acid molecule encoding a polypeptide which is isolated, e.g. from a expression library, with the aid of monoclonal antibodies against a polypeptide encoded by one of the nucleic acid molecules of (a) to (g), preferably to (a) to (c) and conferring an increase in the amount of the fine chemical in an organism or a part thereof;
[4401] j) nucleic acid molecule which encodes a polypeptide comprising the consensus sequence shown in table IV, application no. 16, column 7 and conferring an increase in the amount of the fine chemical in an organism or a part thereof;
[4402] k) nucleic acid molecule encoding the amino acid sequence of a polypeptide encoding a domain of the polypeptide shown in table II, application no. 16, columns 5 and 7 and conferring an increase in the amount of the fine chemical in an organism or a part thereof; and
[4403] l) nucleic acid molecule which is obtainable by screening a suitable nucleic acid library under stringent hybridization conditions with a probe comprising one of the sequences of the nucleic acid molecule of (a) to (k) or with a fragment of at least 15 nt, preferably 20 nt, 30 nt, 50 nt, 100 nt, 200 nt or 500 nt of the nucleic acid molecule characterized in (a) to (h) or of the nucleic acid molecule shown in table I, application no. 16, columns 5 and 7 or a nucleic acid molecule encoding, preferably at least the mature form of, the polypeptide shown in table II, application no. 16, columns 5 and 7, and conferring an increase in the amount of the fine chemical in an organism or a part thereof; or which encompasses a sequence which is complementary thereto;
   whereby, preferably, the nucleic acid molecule according to (a) to (l) distinguishes over the sequence depicted in table I A and/or I B, application no. 16, columns 5 and 7 by one or more nucleotides. In one embodiment, the nucleic acid molecule of the invention does not consist of the sequence shown in table I A and/or I B, application no. 16, columns 5 and 7. In another embodiment, the nucleic acid molecule of the present invention is at least 30% identical and less than 100%, 99.999%, 99.99%, 99.9% or 99% identical to the sequence shown in table I A and/or I B, application no. 16, columns 5 and 7. In a further embodiment the nucleic acid molecule does not encode the polypeptide sequence shown in table II A and/or II B, application no. 16, columns 5 and 7. Accordingly, in one embodiment, the nucleic acid molecule of the present invention encodes in one embodiment a polypeptide which differs at least in one or more amino acids from the polypeptide shown in table II A and/or II B, application no. 16, columns 5 and 7 does not encode a protein of the sequence shown in table II A and/or II B, application no. 16, columns 5 and 7. Accordingly, in one embodiment, the protein encoded by a sequence of a nucleic acid according to (a) to (l) does not consist of the sequence shown in table I A and/or I B, application no. 16, columns 5 and 7. In a further embodiment, the protein of the present invention is at least 30% identical to protein sequence depicted in table II A and/or II B, application no. 16, columns 5 and 7 and less than 100%, preferably less than 99.999%, 99.99% or 99.9%, more preferably less than 99%, 985, 97%, 96% or 95% identical to the sequence shown in table II A and/or II B, application no. 16, columns 5 and 7.

[4404] for the disclosure of the paragraphs [0217.0.0.15] to [0226.0.0.15] see paragraphs [0217.0.0.0] to [0226.0.0.0] above.

[4405] In general, vector systems preferably also comprise further cis-regulatory regions such as promoters and terminators and/or selection markers by means of which suitably transformed organisms can be identified. While vir genes and T-DNA sequences are located on the same vector in the case of cointegrated vector systems, binary systems are based on at least two vectors, one of which bears vir genes, but no T-DNA, while a second one bears T-DNA, but no vir gene. Owing to this fact, the last-mentioned vectors are relatively small, easy to manipulate and capable of replication in E. coli and in Agrobacterium. These binary vectors include vectors from the series pBIB-HYG, pPZP, pBecks, pGreen. Those which are preferably used in accordance with the invention are Bin19, pBI101, pBinAR, pGPTV and pCAMBIA. An overview of binary vectors and their use is given by Hellens et al, Trends in Plant Science (2000) 5, 446-451. The vectors are preferably modified in such a manner, that they already contain the nucleic acid coding for the transitpeptide and that the nucleic acids of the invention, preferentially the nucleic acid sequences encoding the polypeptides shown in table II, application no. 16, columns 5 and 7 can be cloned 3″ prime to the transitpeptide encoding sequence, leading to a functional preprotein, which is directed to the plastids and which means that the mature protein fulfills its biological activity.

[4406] for the disclosure of the paragraphs [0228.0.0.15] to [0239.0.0.15] see paragraphs [0228.0.0.0] to [0239.0.0.0] above.

[4407] The abovementioned nucleic acid molecules can be cloned into the nucleic acid constructs or vectors according to the invention in combination together with further genes, or else different genes are introduced by transforming several nucleic acid constructs or vectors (including plasmids) into a host cell, advantageously into a plant cell or a microorganisms.

In addition to the sequence mentioned in Table I, application no. 16, columns 5 and 7 or its derivatives, it is advantageous additionally to express and/or mutate further genes in the organisms. Especially advantageously, additionally at least one further gene of the citramalic acid, glyceric acid, fumaric acid, malic acid, pyruvic acid, succinic acid and/or threonolactone, their salts, amides, thioesters and/or esters biosynthetic pathway is expressed in the organisms such as plants or microorganisms. It is also possible that the regulation of the natural genes has been modified advantageously so that the gene and/or its gene product is no longer subject to the regulatory mechanisms which exist in the organisms. This leads to an increased synthesis of the respective desired fine chemical since, for example, feedback regulations no longer exist to the same extent or not at all. In addition it might be advantageously to combine the sequences shown in Table I, application no. 16, columns 5 and 7 with genes which generally support or enhances to growth or yield of the target organism, for example genes which lead to faster growth rate of microorganisms or genes which produces stress-, pathogen, or herbicide resistant plants.

[4408] In a further embodiment of the process of the invention, therefore, organisms are grown, in which there is simultaneous direct or indirect overexpression of at least one nucleic acid or one of the genes which code for proteins involved in the organic acid metabolism, in particular in synthesis of citramalic acid, glyceric acid, fumaric acid, malic acid, pyruvic acid, succinic acid and/or threonolactone, their salts, amides, thioesters and/or esters. Indirect overexpression might be brought about by the manipulation of the regulation of the endogenous gene, for example through promoter mutations or the expression of natural or artificial transcriptional regulators.

[4409] Further advantageous nucleic acid sequences which can be expressed in combination with the sequences used in the process and/or the abovementioned biosynthesis genes are the sequences encoding further genes of the sugar metabolism, the citric cycle etc.

[4410] In a further advantageous embodiment of the process of the invention, the organisms used in the process are those in which simultaneously a citramalic acid, glyceric acid, fumaric acid, malic acid, pyruvic acid, succinic acid and/or threonolactone, their salts, amides, thioesters and/or esters degrading protein is attenuated, in particular by reducing the rate of expression of the corresponding gene, or by inactivating the gene for example the mutagenesis and/or selection. In another advantageous embodiment the synthesis of competitive pathways which rely on the same precoursers are down regulated or interrupted.

[4411] The respective fine chemical produced can be isolated from the organism by methods with which the skilled worker are familiar, for example via extraction, salt precipitation, and/or different chromatography methods. The process according to the invention can be conducted batchwise, semibatchwise or continuously. The fine chemical and other organic acids produced by this process can be obtained by harvesting the organisms, either from the crop in which they grow, or from the field. This can be done via for example pressing or extraction of the plant parts.

[4412] Preferrably, the compound is a composition comprising the essentially pure citramalic acid, glyceric acid, fumaric acid, malic acid, pyruvic acid, succinic acid and/or threonolactone, their salts, amides, thioesters, esters or mixtures thereof or a recovered or isolated citramalic acid, glyceric acid, fumaric acid, malic acid, pyruvic acid, succinic acid and/or threonolactone, their salts, amides, thioesters and/or esters.

[4413] for the disclosure of the paragraphs [0243.0.0.15] to [0264.0.0.15] see paragraphs [0243.0.0.0] to [0264.0.0.0] above.

[4414] Other preferred sequences for use in operable linkage in gene expression constructs are targeting sequences, which are required for targeting the gene product into specific cell compartments (for a review, see Kermode, Crit. Rev. Plant Sci. 15, 4 (1996) 285-423 and references cited therein), for example into the vacuole, the nucleus, all types of plastids, such as amyloplasts, chloroplasts, chromoplasts, the extracellular space, the mitochondria, the endoplasmic reticulum, elaioplasts, peroxisomes, glycosomes, and other compartments of cells or extracellular preferred are sequences, which are involved in targeting to plastids as mentioned above. Sequences, which must be mentioned in this context are, in particular, the signal-peptide- or transit-peptide-encoding sequences which are known per se. For example, plastid-transit-peptide-encoding sequences enable the targeting of the expression product into the plastids of a plant cell. Targeting sequences are also known for eukaryotic and to a lower extent for prokaryotic organisms and can advantageously be operable linked with the nucleic acid molecule of the present invention as shown in table I, application no. 16, columns 5 and 7 and described herein to achieve an expression in one of said compartments or extracellular.

[4415] for the disclosure of the paragraphs [0266.0.0.15] to [0287.0.0.15] see paragraphs [0266.0.0.0] to [0287.0.0.0] above.

[4416] Accordingly, one embodiment of the invention relates to a vector where the nucleic acid molecule according to the invention is linked operably to regulatory sequences which permit the expression in a prokaryotic or eukaryotic or in a prokaryotic and eukaryotic host. A further preferred embodiment of the invention relates to a vector in which a nucleic acid sequence encoding one of the polypeptides shown in table II, application no. 16, columns 5 and 7 or their homologs is functionally linked to a plastidial targeting sequence. A further preferred embodiment of the invention relates to a vector in which a nucleic acid sequence encoding one of the polypeptides shown in table II, application no. 16, columns 5 and 7 or their homologs is functionally linked to a regulatory sequences which permit the expression in plastids.

[4417] for the disclosure of the paragraphs [0289.0.0.15] to [0296.0.0.15] see paragraphs [0289.0.0.0] to [0296.0.0.0] above.

[4418] Moreover, native polypeptide conferring the increase of the fine chemical in an organism or part thereof can be isolated from cells (e.g., endothelial cells), for example using the antibody of the present invention as described below, in particular, an anti-b0931, anti-b1046, anti-b1556, anti-b1732, anti-b2066, anti-b2312, anti-b3770, anti-b4122, anti-b4139, anti-YAL038W, anti-YDL078C, anti-YGL065C, anti-YGL126W, anti-YJL139C, anti-YKR043C, anti-YOL126C and/or anti-YOR350C protein antibody or an antibody against polypeptides as shown in table II, application no. 16, columns 5 and 7, which can be produced by standard techniques utilizing the polypeptid of the present invention or fragment thereof, i.e., the polypeptide of this invention. Preferred are monoclonal antibodies.

[4419] for the disclosure of this paragraph see paragraph [0298.0.0.0] above.

[4420] In one embodiment, the present invention relates to a polypeptide having the sequence shown in table II, application no. 16, columns 5 and 7 or as coded by the nucleic acid molecule shown in table I, application no. 16, columns 5 and 7 or functional homologues thereof.

[4421] In one advantageous embodiment, in the method of the present invention the activity of a polypeptide is increased comprising or consisting of the consensus sequence shown in table IV, application no. 16, columns 7 and in one another embodiment, the present invention relates to a polypeptide comprising or consisting of the consensus sequence shown in table IV, application no. 16, column 7 whereby 20 or less, preferably 15 or 10, preferably 9, 8, 7, or 6, more preferred 5 or 4, even more preferred 3, even more preferred 2, even more preferred 1, most preferred 0 of the amino acids positions indicated can be replaced by any amino acid.

[4422] for the disclosure of the paragraphs [0301.0.0.15] to [0304.0.0.15] see paragraphs [0301.0.0.0] to [0304.0.0.0] above.

[4423] In one advantageous embodiment, the method of the present invention comprises the increasing of a polypeptide comprising or consisting of plant or microorganism specific consensus sequences.

In one embodiment, said polypeptide of the invention distinguishes over the sequence shown in table II A and/or II B, application no. 16, columns 5 and 7 by one or more amino acids. In one embodiment, polypeptide distinguishes form the sequence shown in table II A and/or II B, application no. 16, columns 5 and 7 by more than 5, 6, 7, 8 or 9 amino acids, preferably by more than 10, 15, 20, 25 or 30 amino acids, even more preferred are more than 40, 50, or 60 amino acids and, preferably, the sequence of the polypeptide of the invention distinguishes from the sequence shown in table II A and/or II B, application no. 16, columns 5 and 7 by not more than 80% or 70% of the amino acids, preferably not more than 60% or 50%, more preferred not more than 40% or 30%, even more preferred not more than 20% or 10%. In an other embodiment, said polypeptide of the invention does not consist of the sequence shown in table II A and/or II B, application no. 16, columns 5 and 7.

[4424] for the disclosure of this paragraph see paragraph [0306.0.0.0] above.

[4425] In one embodiment, the invention relates to polypeptide conferring an increase in the fine chemical in an organism or part being encoded by the nucleic acid molecule of the invention or used in the process of the invention and having a sequence which distinguishes from the sequence as shown in table II A and/or II B, application no. 16, columns 5 and 7 by one or more amino acids. In another embodiment, said polypeptide of the invention does not consist of the sequence shown in table II A and/or II B, application no. 16, columns 5 and 7. In a further embodiment, said polypeptide of the present invention is less than 100%, 99.999%, 99.99%, 99.9% or 99% identical. In one embodiment, said polypeptide does not consist of the sequence encoded by the nucleic acid molecules shown in table I A and/or I B, application no. 16, columns 5 and 7.

[4426] In one embodiment, the present invention relates to a polypeptide having the activity of the protein as shown in table II A and/or II B, application no. 16, column 3, which distinguishes over the sequence depicted in table II A and/or II B, application no. 16, columns 5 and 7 by one or more amino acids, preferably by more than 5, 6, 7, 8 or 9 amino acids, preferably by more than 10, 15, 20, 25 or 30 amino acids, even more preferred are more than 40, 50, or 60 amino acids but even more preferred by less than 70% of the amino acids, more preferred by less than 50%, even more preferred my less than 30% or 25%, more preferred are 20% or 15%, even more preferred are less than 10%. In a further preferred embodiment the polypeptide of the invention takes the form of a preprotein consisting of a plastidial transitpeptide joint to a polypeptide having the activity of the protein as shown in table II A and/or II B, column 3, from which the transitpeptide is preferably cleaved off upon transport of the preprotein into the organelle for example into the plastid or mitochondria.

[4427] for the disclosure of the paragraphs [0309.0.0.15] to [0311.0.0.15] see paragraphs [0309.0.0.0] to [0311.0.0.0] above.

[4428] A polypeptide of the invention can participate in the process of the present invention. The polypeptide or a portion thereof comprises preferably an amino acid sequence, which is sufficiently homologous to an amino acid sequence shown in table II, application no. 16, columns 5 and 7.

[4429] Further, the polypeptide can have an amino acid sequence which is encoded by a nucleotide sequence which hybridizes, preferably hybridizes under stringent conditions as described above, to a nucleotide sequence of the nucleic acid molecule of the present invention. Accordingly, the polypeptide has an amino acid sequence which is encoded by a nucleotide sequence that is at least about 35%, 40%, 45%, 50%, 55%, 60%, 65% or 70%, preferably at least about 75%, 80%, 85% or 90, and more preferably at least about 91%, 92%, 93%, 94% or 95%, and even more preferably at least about 96%, 97%, 98%, 99% or more homologous to one of the amino acid sequences as shown in table II A and/or II B, application no. 16, columns 5 and 7. The preferred polypeptide of the present invention preferably possesses at least one of the activities according to the invention and described herein. A preferred polypeptide of the present invention includes an amino acid sequence encoded by a nucleotide sequence which hybridizes, preferably hybridizes under stringent conditions, to a nucleotide sequence of table IA and/or I B, application no. 16, columns 5 and 7 or which is homologous thereto, as defined above.

[4430] Accordingly the polypeptide of the present invention can vary from the sequences shown in table II A and/or II B, application no. 16, columns 5 and 7 in amino acid sequence due to natural variation or mutagenesis, as described in detail herein. Accordingly, the polypeptide comprise an amino acid sequence which is at least about 35%, 40%, 45%, 50%, 55%, 60%, 65% or 70%, preferably at least about 75%, 80%, 85% or 90, and more preferably at least about 91%, 92%, 93%, 94% or 95%, and most preferably at least about 96%, 97%, 98%, 99% or more homologous to an entire amino acid sequence shown in table II A and/or II B, application no. 16, columns 5 and 7.

[4431] for the disclosure of this paragraph see paragraph [0315.0.0.0] above.

[4432] Biologically active portions of an polypeptide of the present invention include peptides comprising amino acid sequences derived from the amino acid sequence of the polypeptide of the present invention or used in the process of the present invention, e.g., the amino acid sequence shown in table II, application no. 16, columns 5 and 7 or the amino acid sequence of a protein homologous thereto, which include fewer amino acids than a full length polypeptide of the present invention or used in the process of the present invention or the full length protein which is homologous to an polypeptide of the present invention or used in the process of the present invention depicted herein, and exhibit at least one activity of polypeptide of the present invention or used in the process of the present invention.

[4433] for the disclosure of this paragraph see paragraph [0317.0.0.0] above.

[4434] Manipulation of the nucleic acid molecule of the invention may result in the production of a protein having differences from the wild-type protein as shown in table II, application no. 16, column 3. Differences shall mean at least one amino acid different from the sequences as shown in table II, application no. 16, column 3, preferably at least 2, 3, 4, 5, 6, 7, 8, 9 or 10 amino acids, more preferably at least 15, 20, 25, 30, 35, 40, 45 or 50 amino acids different from the sequences as shown in table II, application no. 16, column 3. These proteins may be improved in efficiency or activity, may be present in greater numbers in the cell than is usual, or may be decreased in efficiency or activity in relation to the wild type protein.

[4435] Any mutagenesis strategies for the polypeptide of the present invention or the polypeptide used in the process of the present invention to result in increasing said activity are not meant to be limiting; variations on these strategies will be readily apparent to one skilled in the art. Using such strategies, and incorporating the mechanisms disclosed herein, the nucleic acid molecule and polypeptide of the invention may be utilized to generate plants or parts thereof, expressing wildtype proteins or mutated proteins of the proteins as shown in table II, application no. 16, column 3. The nucleic acid molecules and polypeptide molecules of the invention are expressed such that the yield, production, and/or efficiency of production of a desired compound is improved.

[4436] for the disclosure of the paragraphs [0320.0.0.15] to [0322.0.0.15] see paragraphs [0320.0.0.0] to [0322.0.0.0] above.

[4437] In one embodiment, a protein (=polypeptide) as shown in table II, application no. 16, column 3 refers to a polypeptide having an amino acid sequence corresponding to the polypeptide of the invention or used in the process of the invention, whereas a “non-inventive protein or polypeptide” or “other polypeptide” refers to a polypeptide having an amino acid sequence corresponding to a protein which is not substantially homologous to a polypeptide of the invention, preferably which is not substantially homologous to a polypeptide or protein as shown in table II, application no. 16, column 3, e.g., a protein which does not confer the activity described herein and which is derived from the same or a different organism.

[4438] for the disclosure of the paragraphs [0324.0.0.15] to [0329.0.0.15] see paragraphs [0324.0.0.0] to [0329.0.0.0] above.

[4439] In an especially preferred embodiment, the polypeptide according to the invention furthermore also does not have the sequences of those proteins, which are encoded by the sequences shown in table II, application no. 16, columns 5 and 7.

[4440] for the disclosure of the paragraphs [0331.0.0.15] to [0346.0.0.15] see paragraphs [0331.0.0.0] to [0346.0.0.0] above.

[4441] Accordingly the present invention relates to any cell transgenic for any nucleic acid characterized as part of the invention, e.g. conferring the increase of the fine chemical in a cell or an organism or a part thereof, e.g. the nucleic acid molecule of the invention, the nucleic acid construct of the invention, the antisense molecule of the invention, the vector of the invention or a nucleic acid molecule encoding the polypeptide of the invention, e.g. encoding a polypeptide having an activity as the protein as shown in table II, application no. 16, column 3. Due to the above mentioned activity the fine chemical content in a cell or an organism is increased. For example, due to modulation or manipulation, the cellular activity is increased preferably in organelles such as plastids or mitochondria, e.g. due to an increased expression or specific activity or specific targeting of the subject matters of the invention in a cell or an organism or a part thereof especially in organelles such as plastids or mitochondria. Transgenic for a polypeptide having a protein or activity means herein that due to modulation or manipulation of the genome, the activity of protein as shown in table II, application no. 16, column 3 or a protein as shown in table II, application no. 16, column 3-like activity is increased in the cell or organism or part thereof especially in organelles such as plastids or mitochondria. Examples are described above in context with the process of the invention.

[4442] for the disclosure of this paragraph see paragraph [0348.0.0.0] above.

[4443] A naturally occurring expression cassette—for example the naturally occurring combination of the promoter of the gene encoding a protein as shown in table II, application no. 16, column 3 with the corresponding encoding gene—becomes a transgenic expression cassette when it is modified by non-natural, synthetic “artificial” methods such as, for example, mutagenization. Such methods have been described (U.S. Pat. No. 5,565,350; WO 00/15815; also see above).

[4444] for the disclosure of the paragraphs [0350.0.0.15] to [0358.0.0.15] see paragraphs [0350.0.0.0] to [0358.0.0.0] above.

[4445] Transgenic plants comprising citramalic acid, glyceric acid, fumaric acid, malic acid, pyruvic acid, succinic acid and/or threonolactone, their salts, amides, thioesters, esters or mixtures thereof synthesized in the process according to the invention can be marketed directly without isolation of the compounds synthesized. In the process according to the invention, plants are understood as meaning all plant parts, plant organs such as leaf, stalk, root, tubers or seeds or propagation material or harvested material or the intact plant. In this context, the seed encompasses all parts of the seed such as the seed coats, epidermal cells, seed cells, endosperm or embryonic tissue. The citramalic acid, glyceric acid, fumaric acid, malic acid, pyruvic acid, succinic acid and/or threonolactone, their salts, amides, thioesters, esters or mixtures thereof produced in the process according to the invention may, however, also be isolated from the plant in the form of their free acids such as citramalic acid, glyceric acid, fumaric acid, malic acid, pyruvic acid or succinic acid, in form of the threonolactone, their salts, their amides, their thioesters, their esters or mixtures thereof produced by this process can be isolated by harvesting the plants either from the culture in which they grow or from the field. This can be done for example via expressing, grinding and/or extraction of the plant parts, preferably the plant leaves, plant fruits, flowers and the like.

The invention furthermore relates to the use of the transgenic plants according to the invention and of the cells, cell cultures, parts—such as, for example, roots, leaves, flowers and the like as mentioned above in the case of transgenic plant organisms—derived from them, and to transgenic propagation material such as seeds or fruits and the like as mentioned above, for the production of foodstuffs or feeding stuffs, cosmetics, pharmaceuticals or fine chemicals.

[4446] for the disclosure of the paragraphs [0360.0.0.15] to [0362.0.0.15] see paragraphs [0360.0.0.0] to [0362.0.0.0] above.

[4447] In this manner, more than 50% by weight, advantageously more than 60% by weight, preferably more than 70% by weight, especially preferably more than 80% by weight, very especially preferably more than 90% by weight, of the organic acids such as citramalic acid, glyceric acid, fumaric acid, malic acid, pyruvic acid or succinic acid of the threonolactone, their salts, amides, thioesters, esters or mixtures thereof produced in the process can be isolated. The resulting fine chemical can, if appropriate, subsequently be further purified, if desired mixed with other active ingredients such as other xanthophylls, fatty acids, vitamins, amino acids, carbohydrates, antibiotics and the like, and, if appropriate, formulated.

[4448] In one embodiment, citramalic acid, glyceric acid, fumaric acid, malic acid, pyruvic acid, succinic acid and/or threonolactone, their salts, amides, thioesters, esters or mixtures thereof is the fine chemical.

[4449] The citramalic acid, glyceric acid, fumaric acid, malic acid, pyruvic acid, succinic acid and/or threonolactone, their salts, amides, thioesters, esters or mixtures thereof, in particular the respective fine chemicals obtained in the process are suitable as starting material for the synthesis of further products of value. For example, they can be used in combination with each other or alone for the production of pharmaceuticals, health products, foodstuffs, animal feeds, nutrients or cosmetics. Accordingly, the present invention relates a method for the production of pharmaceuticals, health products, food stuff, animal feeds, nutrients or cosmetics comprising the steps of the process according to the invention, including the isolation of the citramalic acid, glyceric acid, fumaric acid, malic acid, pyruvic acid, succinic acid and/or threonolactone, their salts, amides, thioesters, esters or mixtures thereof containing, in particular citramalic acid, glyceric acid, fumaric acid, malic acid, pyruvic acid, succinic acid and/or threonolactone or mixtures thereof containing composition produced or the respective fine chemical produced if desired and formulating the product with a pharmaceutical acceptable carrier or formulating the product in a form acceptable for an application in agriculture. A further embodiment according to the invention is the use of the citramalic acid, glyceric acid, fumaric acid, malic acid, pyruvic acid, succinic acid and/or threonolactone, their salts, amides, thioesters, esters or mixtures thereof produced in the process or of the transgenic organisms in animal feeds, foodstuffs, medicines, food supplements, cosmetics or pharmaceuticals.

[4450] for the disclosure of the paragraphs [0366.0.0.15] to [0369.0.0.15] see paragraphs [0366.0.0.0] to [0369.0.0.0] above.

[4451] The fermentation broths obtained in this way, containing in particular citramalic acid, glyceric acid, fumaric acid, malic acid, pyruvic acid, succinic acid and/or threonolactone, their salts, amides, thioesters, esters or mixtures thereof or in mixtures with other organic acids, amino acids, polypeptides or polysaccarides, normally have a dry matter content of from 1 to 70% by weight, preferably 7.5 to 25% by weight. Sugar-limited fermentation is additionally advantageous, e.g. at the end, for example over at least 30% of the fermentation time. This means that the concentration of utilizable sugar in the fermentation medium is kept at, or reduced to, 0 to 10 g/l, preferably to 0 to 3 g/l during this time. The fermentation broth is then processed further. Depending on requirements, the biomass can be removed or isolated entirely or partly by separation methods, such as, for example, centrifugation, filtration, decantation, coagulation/flocculation or a combination of these methods, from the fermentation broth or left completely in it.

The fermentation broth can then be thickened or concentrated by known methods, such as, for example, with the aid of a rotary evaporator, thin-film evaporator, falling film evaporator, by reverse osmosis or by nanofiltration. This concentrated fermentation broth can then be worked up by freeze-drying, spray drying, spray granulation or by other processes.

[4452] Accordingly, it is possible to purify the citramalic acid, glyceric acid, fumaric acid, malic acid, pyruvic acid, succinic acid and/or threonolactone, their salts, amides, thioesters, esters or mixtures thereof, in particular the citramalic acid, glyceric acid, fumaric acid, malic acid, pyruvic acid, succinic acid and/or threonolactone produced according to the invention further. For this purpose, the product-containing composition, e.g. a total or partial extraction fraction using organic solvents or water, is subjected for example to separation via e.g. an open column chromatography or HPLC in which case the desired product or the impurities are retained wholly or partly on the chromatography resin. These chromatography steps can be repeated if necessary, using the same or different chromatography resins. The skilled worker is familiar with the choice of suitable chromatography resins and their most effective use.

[4453] for the disclosure of the paragraphs [0372.0.0.15] to [0376.0.0.15], [0376.1.0.15] and [0377.0.0.15] see paragraphs [0372.0.0.0] to [0376.0.0.0], [0376.1.0.0] and [0377.0.0.0] above.

[4454] In one embodiment, the present invention relates to a method for the identification of a gene product conferring an increase in the fine chemical production in a cell, comprising the following steps:
[4455] (a) contacting e.g. hybridising, the nucleic acid molecules of a sample, e.g. cells, tissues, plants or microorganisms or a nucleic acid library, which can contain a candidate gene encoding a gene product conferring an increase in the fine chemical after expression, with the nucleic acid molecule of the present invention;
[4456] (b) identifying the nucleic acid molecules, which hybridize under relaxed stringent conditions with the nucleic acid molecule of the present invention in particular to the nucleic acid molecule sequence shown in table I, application no. 16, columns 5 and 7, preferably in table I B, application no. 16, columns 5 and 7, and, optionally, isolating the full length cDNA clone or complete genomic clone;
[4457] (c) introducing the candidate nucleic acid molecules in host cells, preferably in a plant cell or a microorganism, appropriate for producing the fine chemical;
[4458] (d) expressing the identified nucleic acid molecules in the host cells;
[4459] (e) assaying the fine chemical level in the host cells; and
[4460] (f) identifying the nucleic acid molecule and its gene product which expression confers an increase in the fine chemical level in the host cell after expression compared to the wild type.

[4461] for the disclosure of the paragraphs [0379.0.0.15] to [0383.0.0.15] see paragraphs [0379.0.0.0] to [0383.0.0.0] above.

[4462] The screen for a gene product or an agonist conferring an increase in the fine chemical production can be performed by growth of an organism for example a microorganism in the presence of growth reducing amounts of an inhibitor of the synthesis of the fine chemical. Better growth, eg higher dividing rate or high dry mass in comparison to the control under such conditions would identify a gene or gene product or an agonist conferring an increase in fine chemical production.

One can think to screen for increased fine chemical production by for example resistance to drugs blocking fine chemical synthesis and looking whether this effect is dependent on the proteins as shown in table II, application no. 16, column 3, eg comparing near identical organisms with low and high activity of the proteins as shown in table II, application no. 16, column 3.

[4463] for the disclosure of the paragraphs [0385.0.0.15] to [0404.0.0.15] see paragraphs [0385.0.0.0] to [0404.0.0.0] above.

[4464] Accordingly, the nucleic acid of the invention, or the nucleic acid molecule identified with the method of the present invention or the complement sequences thereof, the polypeptide of the invention, the nucleic acid construct of the invention, the organisms, the host cell, the microorganisms, the plant, plant tissue, plant cell, or the part thereof the invention, the vector of the invention, the agonist identified with the method of the invention, the nucleic acid molecule identified with the method of the present invention, can be used for the production of the fine chemical or of the fine chemical and one or more other organic acids, in particular the organic acids such as citric acid, oxaloacetic acid, cis-aconitic acid, isocitric acid, oxalosuccinic acid or ketoglutaric acid.

Accordingly, the nucleic acid of the invention, or the nucleic acid molecule identified with the method of the present invention or the complement sequences thereof, the polypeptide of the invention, the nucleic acid construct of the invention, the organisms, the host cell, the microorganisms, the plant, plant tissue, plant cell, or the part thereof of the invention, the vector of the invention, the agonist identified with the method of the invention, the antibody of the present invention, can be used for the reduction of the fine chemical in an organism or part thereof, e.g. in a cell.

[4465] for the disclosure of the paragraphs [0406.0.0.15] to [0435.0.0.15] see paragraphs [0406.0.0.0] to [0435.0.0.0] above.

[4466] Production of citramalic acid, glyceric acid, fumaric acid, malic acid, pyruvic acid, succinic acid and/or threonolactone, their salts, amides, thioesters, esters or mixtures thereof in Chlamydomonas reinhardtii

The citramalic acid, glyceric acid, fumaric acid, malic acid, pyruvic acid, succinic acid and/or threonolactone, their salts, amides, thioesters, esters or mixtures thereof production can be analysed as mentioned herein.
The proteins and nucleic acids can be analysed as mentioned below.
In addition a production in other organisms such as plants or microorganisms such as yeast, Mortierella or Escherichia coli is possible.

[4467] for the disclosure of the paragraphs [0437.0.0.15] and [0438.0.0.15] see paragraphs [0437.0.0.0] and [0438.0.0.0] above.

### Example 9

### Analysis of the Effect of the Nucleic Acid Molecule on the Production of Citramalic Acid, Glyceric Acid, Fumaric Acid, Malic Acid, Pyruvic Acid, Succinic Acid and/or Threonolactone, their Salts, Amides, Thioesters, Esters or Mixtures Thereof

[4468] The effect of the genetic modification of plants or algae on the production of a desired compound (such as citramalic acid, glyceric acid, fumaric acid, malic acid, pyruvic acid, succinic acid and/or threonolactone, their salts, amides, thioesters, esters or mixtures thereof) can be determined by growing the modified plant under suitable conditions (such as those described above) and analyzing the medium and/or the cellular components for the elevated production of desired product (i.e. of citramalic acid, glyceric acid, fumaric acid, malic acid, pyruvic acid, succinic acid and/or threonolactone). These analytical techniques are known to the skilled worker and comprise spectroscopy, thin-layer chromatography, various types of staining methods, enzymatic and microbiological methods and analytical chromatography such as high-performance liquid chromatography (see, for example, Ullman, Encyclopedia of Industrial Chemistry, Vol. A2, p. 89-90 and p. 443-613, VCH: Weinheim (1985); Fallon, A., et al., (1987) “Applications of HPLC in Biochemistry” in: Laboratory Techniques in Biochemistry and Molecular Biology, Vol. 17; Rehm et al. (1993) Biotechnology, Vol. 3, Chapter III: “Product recovery and purification”, p. 469-714, VCH: Weinheim; Belter, P.A., et al. (1988) Bioseparations: downstream processing for Biotechnology, John Wiley and Sons; Kennedy, J. F., and Cabral, J. M. S. (1992) Recovery processes for biological Materials, John Wiley and Sons; Shaeiwitz, J. A., and Henry, J. D. (1988) Biochemical Separations, in: Ullmann's Encyclopedia of Industrial Chemistry, Vol. B3; Chapter 11, p. 1-27, VCH: Weinheim; and Dechow, F. J. (1989) Separation and purification techniques in biotechnology, Noyes Publications) or the methods mentioned above.

[4469] for the disclosure of this paragraph see [0441.0.0.0] above.

[4470] Purification of and Determination of the Citramalic Acid, Glyceric Acid, Fumaric Acid, Malic Acid, Pyruvic Acid, Succinic Acid and/or Threonolactone, their Salts, Amides, Thioesters, Esters or Mixtures Thereof Content:

[4471] Abbreviations: GC-MS, gas liquid chromatography/mass spectrometry; TLC, thin-layer chromatography.

The unambiguous detection for the presence of organic acids can be obtained by analyzing recombinant organisms using analytical standard methods: LC, LC-MSMS or TLC, as described The total citramalic acid, glyceric acid, fumaric acid, malic acid, pyruvic acid, succinic acid and/or threonolactone, their salts, amides, thioesters, esters or mixtures thereof produced in the organism for example in algae used in the inventive process can be analysed for example according to the following procedure:
The material such as algae or plants to be analyzed can be disrupted by sonication, grinding in a glass mill, liquid nitrogen and grinding or via other applicable methods.
Plant material is initially homogenized mechanically by comminuting in a pestle and mortar to make it more amenable to extraction.

[4472] A typical sample pretreatment consists of a total lipid extraction using such polar organic solvents as acetone or alcohols as methanol, or ethers, saponification, partition between phases, separation of non-polar epiphase from more polar hypophasic derivatives and chromatography. E.g.:

For analysis, solvent delivery and aliquot removal can be accomplished with a robotic system comprising a single injector valve Gilson 232XL and a 402 2S1V diluter [Gilson, Inc. USA, 3000 W. Beltline Highway, Middleton, Wis.]. For saponification, 3 ml of 50% potassium hydroxide hydro-ethanolic solution (4 water:1 ethanol) can be added to each vial, followed by the addition of 3 ml of octanol. The saponification treatment can be conducted at room temperature with vials maintained on an IKA HS 501 horizontal shaker [Labworld-online, Inc., Wilmington, N.C.] for fifteen hours at 250 movements/minute, followed by a stationary phase of approximately one hour.
Following saponification, the supernatant can be diluted with 0.10 ml of methanol. The addition of methanol can be conducted under pressure to ensure sample homogeneity. Using a 0.25 ml syringe, a 0.1 ml aliquot can be removed and transferred to HPLC vials for analysis.
For HPLC analysis, a Hewlett Packard 1100 HPLC, complete with a quaternary pump, vacuum degassing system, six-way injection valve, temperature regulated autosampler, column oven and Photodiode Array detector can be used [Agilent Technologies available through Ultra Scientific Inc., 250 Smith Street, North Kingstown, R.I.]. The column can be a Waters YMC30, 5-micron, 4.6×250 mm with a guard column of the same material [Waters, 34 Maple Street, Milford, Mass.]. The solvents for the mobile phase can be 81 methanol: 4 water: 15 tetrahydrofuran (THF) stabilized with 0.2% BHT (2,6-di-tert-butyl-4-methylphenol). Injections were 20 μl. Separation can be isocratic at 30° C. with a flow rate of 1.7 ml/minute. The peak responses can be measured by absorbance at 447 nm.

[4473] If required and desired, further chromatography steps with a suitable resin may follow. Advantageously, the citramalic acid, glyceric acid, fumaric acid, malic acid, pyruvic acid, succinic acid and/or threonolactone, their salts, amides, thioesters, esters or mixtures thereof can be further purified with a so-called RTHPLC. As eluent acetonitrile/water or chloroform/acetonitrile mixtures can be used. If necessary, these chromatography steps may be repeated, using identical or other chromatography resins. The skilled worker is familiar with the selection of suitable chromatography resin and the most effective use for a particular molecule to be purified.

[4474] for the disclosure of the paragraphs [0446.0.0.15] to [0496.0.0.15] see paragraphs [0446.0.0.0] to [0496.0.0.0] above.

[4475] As an alternative, the organic acids such as citramalic acid, glyceric acid, fumaric acid, malic acid, pyruvic acid, succinic acid and/or threonolactone can be detected as described in Farré, E. et al., Plant Physiol, 2001, Vol. 127, pp. 685-700.
[4476] The results of the different plant analyses can be seen from the table, which follows:

TABLE VI

| ORF | Metabolite | Method | Min | Max |
|---|---|---|---|---|
| b0931 | Fumarate | LC | 1.47 | 4.65 |
| b1046 | Glyceric acid | GC | 1.31 | 1.65 |
| b1556 | Fumarate | GC | 2.36 | 4.72 |
| b1556 | Succinate | LC | 1.47 | 3.04 |
| b1556 | Threonolacton | GC | 1.38 | 2.03 |
| b1732 | Succinate | LC | 1.28 | 1.37 |
| b2066 | Malate | GC | 1.70 | 3.92 |
| b2312 | Succinate | GC | 1.24 | 1.33 |
| b3770 | Citramalate | GC | 1.49 | 3.23 |
| b4122 | Fumarate | GC | 2.53 | 5.44 |
| b4139 | Fumarate | GC | 14.94 | 25.37 |
| YAL038W | Succinate | LC | 1.40 | 4.67 |
| YAL038W | Pyruvate | GC | 1.37 | 2.64 |
| YAL038W | Citramalate | GC | 1.72 | 4.37 |
| YDL078C | Malate | GC | 1.83 | 4.71 |
| YGL065C | Succinate | LC | 1.08 | 1.21 |
| YGL126W | Succinate | LC | 1.30 | 1.45 |
| YJL139C | Fumarate | GC | 1.55 | 4.10 |
| YKR043C | Malate | GC | 1.54 | 3.16 |
| YKR043C | Fumarate | GC | 10.90 | 15.35 |
| YOL126C | Fumarate | GC | 2.00 | 2.18 |
| YOL126C | Malate | GC | 1.83 | 3.04 |
| YOR350C | Glyceric acid | GC | 1.41 | 1.51 |

[4477] for the disclosure of the paragraphs [0499.0.0.15] and [0500.0.0.15] see paragraphs [0499.0.0.0] and [0500.0.0.0] above.

### Example 15a

### Engineering Ryegrass Plants by Over-Expressing b0931 from Escherichia coli or Homologs of b0931 from Other Organisms

[4478] for the disclosure of the paragraphs [0502.0.0.15] to [0508.0.0.15] see paragraphs [0502.0.0.0] to [0508.0.0.0] above.

### Example 15b

### Engineering Soybean Plants by Over-Expressing b0931 from Escherichia coli or Homologs of b0931 from Other Organisms

[4479] for the disclosure of the paragraphs [0510.0.0.15] to [0513.0.0.15] see paragraphs [0510.0.0.0] to [0513.0.0.0] above.

### Example 15c

### Engineering Corn Plants by Over-Expressing b0931 from Escherichia coli or Homologs of b0931 from Other Organisms

[4480] for the disclosure of the paragraphs [0515.0.0.15] to [0540.0.0.15] see paragraphs [0515.0.0.0] to [0540.0.0.0] above.

### Example 15d

### Engineering Wheat Plants by Over-Expressing b0931 from Escherichia coli or Homologs of b0931 from Other Organisms

[4481] for the disclosure of the paragraphs [0542.0.0.15] to [0544.0.0.15] see paragraphs [0542.0.0.0] to [0544.0.0.0] above.

### Example 15e

### Engineering Rapeseed/Canola Plants by Over-Expressing b0931 from Escherichia coli or Homologs of b0931 from Other Organisms

[4482] for the disclosure of the paragraphs [0546.0.0.15] to [0549.0.0.15] see paragraphs [0544.0.0.0] to [0549.0.0.0] above.

### Example 15f

### Engineering Alfalfa Plants by Over-Expressing b0931 from Escherichia coli or Homologs of b0931 from Other Organisms

[4483] for the disclosure of the paragraphs [0551.0.0.15] to [0554.0.0.15] see paragraphs [0551.0.0.0] to [0554.0.0.0] above.

### Example 16

### Metabolite Profiling Info from Zea mays

[4484] Zea mays plants were engineered as described in Example 15c.
Metabolic results were either obtained from regenerated primary transformants (T0) or from the following progeny generation (T1) in comparison to appropriate control plants. The results are shown in table VII

TABLE VII

| ORF_NAME | Metabolite | MIN | MAX |
|---|---|---|---|
| b2066 | Malate | 1.99 | 3.02 |
| b4139 | Fumarate | 1.59 | 5.08 |
| YAL038W | Succinate | 1.33 | 3.78 |
| YAL038W | Pyruvate | 1.73 | 2.31 |
| YKR043C | Fumarate | 1.77 | 2.32 |

Table VII shows the increase in fumaric acid in genetically modified corn plants expressing the Saccharomyces cerevisiae nucleic acid sequence YKR043C and the E. coli nucleic acid sequence b4139, the increase in malic acid in genetically modified corn plants expressing the E. coli nucleic acid sequence b2066, and the increase in pyruvic and succinic acid in genetically modified corn plants expressing the Saccharomyces cerevisiae nucleic acid sequence YAL038W.
In one embodiment, in case the activity of the Saccharomyces cerevisiae protein YKR043C or its homologs, e.g. a “phosphoglycerate mutase like protein”, is increased in corn plants, preferably, an increase of the fine chemical fumaric acid (=fumarate) between 77% and 132% or more is conferred.
In one embodiment, in case the activity of the Escherichia coli protein b4139 or its homologs, e.g. a “aspartate ammonia-lyase (aspartase)”, is increased in corn plants, preferably, an increase of the fine chemical fumaric acid (=fumarate) acid between 59% and 408% or more is conferred.
In another embodiment, in case the activity of the Saccharomyces cerevisiae protein YAL038W or its homologs, e.g. a “pyruvate kinase”, is increased in corn plants, preferably, an increase of the fine chemical succinic acid (=succinate) between 33% and 278% or more is conferred.
In another embodiment, in case the activity of the Saccharomyces cerevisiae protein YAL038W or its homologs, e.g. a “pyruvate kinase”, is increased in corn plants, preferably, an increase of the fine chemical pyruvic acid (=pyruvate) between 73% and 131% or more is conferred.
In another embodiment, in case the activity of the Saccharomyces cerevisiae protein

[4485] YAL038W or its homologs, e.g. a “pyruvate kinase”, is increased in corn plants, preferably, an increase of the fine chemical pyruvic acid (=pyruvate) between 73% and 131% or more and/or succinic acid (=succinate) between 33% and 278% or more is conferred.

In one embodiment, in case the activity of the Escherichia coli protein b2066 or its homologs, e.g. a “uridine/cytidine kinase”, is increased in corn plants, preferably, an increase of the fine chemical malic acid (=malate) acid between 99% and 202% or more is conferred.

[4486] for the disclosure of this paragraph see [0554.2.0.0] above.

[4487] for the disclosure of this paragraph see [0555.0.0.0] above.

[4488] for the disclosure of this paragraph see [0001.0.0.0].

[4489] Gamma-aminobutyric acid is used to enhance growth of specified plants, prevent development of powdery mildew on grapes, and suppress certain other plant diseases. Humans and animals normally ingest and metabolize gamma-aminobutyric acid in variable amounts. Gamma-aminobutyric acid was registered (licensed for sale) as growth enhancing pesticidal active ingredient in 1998. Gamma-aminobutyric acid is an important signal which helps to regulate mineral availability in plants. Minerals support the biochemical pathways governing growth and reproduction as well as the pathways that direct plant's response to a variety of biotic and abiotic stresses. Mineral needs are especially high during times of stress and at certain stages of plant growth. Gamma-aminobutyric acid levels in plants naturally increase at these times.

Gamma-Aminobutyric acid (GABA), a nonprotein amino acid, is often accumulated in plants following environmental stimuli that can also cause ethylene production. Exogenous GABA causes up to a 14-fold increase in the ethylene production rate after about 12 h. GABA causes increases in ACC synthase mRNA accumulation, ACC levels, ACC oxidase mRNA levels and in vitro ACC oxidase activity. Possible roles of GABA as a signal transducer are suggested, see Plant Physiol. 115(1):129-35(1997)
Gamma-aminobutyric acid (GABA), a four-carbon non-protein amino acid, is a significant component of the free amino acid pool in most prokaryotic and eukaryotic organisms. In plants, stress initiates a signal-transduction pathway, in which increased cytosolic Ca²⁺ activates Ca²⁺/calmodulin-dependent glutamate decarboxylase activity and GABA synthesis. Elevated H⁺ and substrate levels can also stimulate glutamate decarboxylase activity. GABA accumulation probably is mediated primarily by glutamate decarboxylase. Experimental evidence supports the involvement of GABA synthesis in pH regulation, nitrogen storage, plant development and defence, as well as a compatible osmolyte and an alternative pathway for glutamate utilization, see Trends Plant Sci. 4(11):446-452(1999).
Gamma-aminobutyric acid enhances nutrient uptake by roots and leaves so that plant nutrient levels are higher than those achieved by using nutrients alone. When plants are stressed and nutrient uptake is limited, it is believed that gamma-aminobutyric acid facilitates nutrient utilization, thereby enhancing growth during stress.
Rapid GABA accumulation in response to wounding may play a role in plant defense against insects (Ramputh and Brown, Plant Physiol. 111(1996): 1349-1352). The development of gamma aminobutyrate (GABA) as a potential control agent in plant-invertebrate pest systems has been reviewed in Shelp et al., Canadian Journal of Botany (2003) 81, 11, 1045-1048. The authors describe that available evidence indicates that GABA accumulation in plants in response to biotic and abiotic stresses is mediated via the activation of glutamate decarboxylase. More applied research, based on the fact that GABA acts as an inhibitory neurotransmitter in invertebrate pests, indicates that ingested GABA disrupts nerve functioning and causes damage to oblique-banded leafroller larvae, and that walking or herbivory by tobacco budworm and oblique-banded leafroller larvae stimulate GABA accumulation in soybean and tobacco, respectively. In addition, elevated levels of endogenous GABA in genetically engineered tobacco deter feeding by tobacco budworm larvae and infestation by the northern root-knot nematode. Therefore the author concluded that genetically engineered crop species having high GABA-producing potential may be an alternative strategy to chemical pesticides for the management of invertebrate pests.
During angiosperm reproduction, pollen grains form a tube that navigates through female tissues to the micropyle, delivering sperm to the egg. In vitro, GABA stimulates pollen tube growth. The Arabidopsis POP2 gene encodes a transaminase that degrades GABA and contributes to the formation of a gradient leading up to the micropyle, see Cell. 114(1):47-59(2003).
Due to these interesting physiological roles and agrobiotechnological potential of GABA there is a need to identify the genes of enzymes and other proteins involved in GABA metabolism, and to generate mutants or transgenic plant lines with which to modify the GABA content in plants.
Shikimic acid is found in various plants. It has two functional groups in the same molecule, hydroxyl groups and a carboxylic acid group which are optically active. They can yield various kinds of esters and salts. It belongs to the class of cyclitols, which means it is a hydroxylated cycloalkane containing at least three hydroxy groups, each attached to a different ring carbon atom.
A key intermediate in synthesis of virtually all aromatic compounds in the cells is shikimic acid. These include phenylalanine, tyrosine, tryptophan, p-aminobenzoic acid, and p-hydroxybenzoic acid.
Glyphosate (N-phosphonomethylglycine) is a non-selective, broad spectrum herbicide that is symplastically translocated to the meristems of growing plants. It causes shikimate accumulation through inhibition of the chloroplast localized EPSP synthase (5eno/pyruvylshikimate-3-phosphate synthase; EPSPs) [EC 2.5.1.19] (Amrhein et al, 1980, Plant Physiol. 66: 830-834).
The starting product of the biosynthesis of most phenolic compounds is shikimate. Phenols are acidic due to the dissociability of their —OH group. They are rather reactive compounds and as long as no steric inhibition due to additional side chains occurs, they form hydrogen bonds. Consequently, many flavonoids have intramolecular bonds. Another important feature is their ability to form chelate complexes with metals. Also, they are easily oxidized and, if so, form polymers (dark aggregates). The darkening of cut or dying plant parts is caused by this reaction. They have usually an inhibiting effect on plant growth. Among the phenylpropanol derivatives of lower molecular weight are a number of scents like the coumarins, cinnamic acid, sinapinic acid, the coniferyl alcohols and others. These substances and their derivatives are at the same time intermediates of the biosynthesis of lignin.
The shikimate pathway links metabolism of carbohydrates to biosynthesis of aromatic compounds. In a sequence of seven metabolic steps, phosphoenolpyruvate and erythrose 4-phosphate are converted to chorismate, the precursor of the aromatic amino acids and many aromatic secondary metabolites. All pathway intermediates can also be considered branch point compounds that may serve as substrates for other metabolic pathways. The shikimate pathway is found only in microorganisms and plants, never in animals. All enzymes of this pathway have been obtained in pure form from prokaryotic and eukaryotic sources and their respective DNAs have been characterized from several organisms. The cDNAs of higher plants encode proteins with amino terminal signal sequences for plastid import, suggesting that plastids are the exclusive locale for chorismate biosynthesis. In microorganisms, the shikimate pathway is regulated by feedback inhibition and by repression of the first enzyme. In higher plants, no physiological feedback inhibitor has been identified, suggesting that pathway regulation may occur exclusively at the genetic level. This difference between microorganisms and plants is reflected in the unusually large variation in the primary structures of the respective first enzymes. Several of the pathway enzymes occur in isoenzymic forms whose expression varies with changing environmental conditions and, within the plant, from organ to organ. The penultimate enzyme of the pathway is the sole target for the herbicide glyphosate. Glyphosate-tolerant transgenic plants are at the core of novel weed control systems for several crop plants (Annual Review of Plant Physiology and Plant Molecular Biology 50(1999): 473-503).
Natural products derived from shikimic acid range in complexity from the very simple, such as vanillin (used primarily as a flavoring agent), salicylic acid (the precursor of aspirin), lawsone (a naphthoquinone used in some sunscreens), and scopletin (a coumarin once used as a uterine sedative), to the more complex, such as the lignan lactone podophyllotoxin. Podophyllotoxin is basically a dimer incorporating two phenylpropanoid (a nine-carbon unit derived from shikimic acid) units. Podophyllotoxin was first isolated from Podophyllum peltatum, also known as mayapple or American mandrake, a plant which has a long history of use as a cathartic and purgative. Podophyllotoxin has been used to treat warts, and is a mitotic inhibitor which shows antineoplastic activity. Etoposide, in particular, is used to treat forms of lung cancer, testicular cancer, and acute lymphocytic leukemia.
Furthermore shikimic acid is an important starting substance for the production of pharmacological active substances. For example the synthesis of ®Roche's antiviral drug Tamiflu® (oseltamivir phosphate) starts from shikimic acid. Tamiflu® treats seasonal influenza and is also being expected as a first line of defence against a possible pandemic outbreak of bird flu. The 10-step commercial route uses the natural product (−)-shikimic acid as a starting material. This precursor is converted into a diethyl ketal intermediate, which is reductively opened to give a 1,2-epoxide. This epoxide is then converted into Tamiflu via a five-step reaction sequence involving three potentially toxic and explosive azide intermediates.
Putrescine is synthesized by healthy living cells by the action of ornithine decarboxylase, is one of the simplest polyamines and appears to be a growth factor necessary for cell division.
Experimental evidence indicate that polyamines may be involved in growth, differentiation or morphogenesis, stress and senescence in plants (Evans and Malmberg, 1989).

[4490] %

[4491] %

[4492] %

[4493] %

[4494] One way to increase the productive capacity of biosynthesis is to apply recombinant DNA technology. Thus, it would be desirable to produce gamma-aminobutyric acid and/or shikimate and/or putrescine in plants. That type of production permits control over quality, quantity and selection of the most suitable and efficient producer organisms. The latter is especially important for commercial production economics and therefore availability to consumers. In addition it is desirable to produce gamma-aminobutyric acid and/or shikimate and/or putrescine in plants in order to increase plant productivity and resistance against biotic and abiotic stress as discussed before.

Methods of recombinant DNA technology have been used for some years to improve the production of fine chemicals in microorganisms and plants by amplifying individual biosynthesis genes and investigating the effect on production of fine chemicals. It is for example reported, that the xanthophyll astaxanthin could be produced in the nectaries of transgenic tobacco plants. Those transgenic plants were prepared by Argobacterium tumifaciens-mediated transformation of tobacco plants using a vector that contained a ketolase-encoding gene from H. pluvialis denominated crtO along with the Pds gene from tomato as the promoter and to encode a leader sequence. Those results indicated that about 75 percent of the carotenoids found in the flower of the transformed plant contained a keto group.

[4495] Thus, it would be advantageous if an algae, plant or other microorganism were available which produce large amounts of gamma-aminobutyric acid and/or putrescine and/or shikimate. The invention discussed hereinafter relates in some embodiments to such transformed prokaryotic or eukaryotic microorganisms.

[4496] It would also be advantageous if plants were available whose roots, leaves, stem, fruits or flowers produced large amounts of aminobutyric acid and/or putrescine and/or shikimate. The invention discussed hereinafter relates in some embodiments to such transformed plants.

[4497] Therefore improving the quality of foodstuffs and animal feeds is an important task of the food-and-feed industry. This is necessary since, for example gamma-aminobutyric acid or shikimate, as mentioned above, which occur in plants and some microorganisms are limited with regard to the supply of mammals. Especially advantageous for the quality of foodstuffs and animal feeds is as balanced as possible a specific gamma-aminobutyric acid and/or shikimate and/or putrescine profile in the diet since an excess of gamma-aminobutyric acid and/or shikimate and/or putrescine above a specific concentration in the food has a positive effect. A further increase in quality is only possible via addition of further gamma-aminobutyric acid and/or shikimate and/or putrescine, which are limiting.

[4498] To ensure a high quality of foods and animal feeds, it is therefore necessary to add gamma-aminobutyric acid and/or shikimate and/or putrescine in a balanced manner to suit the organism.

[4499] Accordingly, there is still a great demand for new and more suitable genes which encode enzymes or other proteins which participate in the biosynthesis of gamma-aminobutyric acid and/or putrescine and/or shikimate and make it possible to produce them specifically on an industrial scale without unwanted byproducts forming. In the selection of genes for biosynthesis two characteristics above all are particularly important. On the one hand, there is as ever a need for improved processes for obtaining the highest possible contents of gamma-aminobutyric acid, putrescine and shikimate; on the other hand as less as possible byproducts should be produced in the production process.

[4500] for the disclosure of this paragraph see [0013.0.0.0] above.

[4501] Accordingly, in a first embodiment, the invention relates to a process for the production of a fine chemical, whereby the fine chemical is a gamma-aminobutyric acid and/or putrescine and/or shikimate. Accordingly, in the present invention, the term “the fine chemical” as used herein relates to a “gamma-aminobutyric acid and/or putrescine and/or shikimate “. Further, the term “the fine chemicals” as used herein also relates to fine chemicals comprising gamma-aminobutyric acid and/or putrescine and/or shikimate.

[4502] In one embodiment, the term “the fine chemical” or “the respective fine chemical” means at least one chemical compound with gamma-aminobutyric acid and/or putrescine and/or shikimate. Throughout the specification the term “the fine chemical” or “the respective fine chemical” means a gamma-aminobutyric acid and/or putrescine and/or shikimate in free form or bound to other compounds such as its salts, ester, thioester or in free form or bound to other compounds such sugars or sugarpolymers, like glucoside, e.g. diglucoside.

In particular it is known to the skilled that anionic compounds as acids are present in an equilibrium of the acid and its salts according to the pH present in the respective compartment of the cell or organism and the pK of the acid. Thus, the term “the fine chemical”, the term “the respective fine chemical”, the term “acid” or the use of a demonination referring to a neutralized anionic compound respectively relates the anionic form as well as the neutralised status of that compound.
Thus, specifically shikimic acid relates also to shikimate and vice versa and the terms are used interchangeable throughout the following description of the invention. In one embodiment, the term “the fine chemical” and the term “the respective fine chemical” mean at least one chemical compound with an activity of the abovementioned fine chemical.

[4503] Accordingly, the present invention relates to a process for the production of gamma-aminobutyric acid, which comprises
[4504] (a) increasing or generating the activity of a protein as shown in table II, application no. 17a, column 3 encoded by the nucleic acid sequences as shown in table I, application no. 17a, column 5, in an organelle of a microorganism or plant, or
[4505] (b) increasing or generating the activity of a protein as shown in table II, application no. 17a, column 3 encoded by the nucleic acid sequences as shown in table I, application no. 17a, column 5 in the plastid of a microorganism or plant, or in one or more parts thereof; and
[4506] (a) growing the organism under conditions which permit the production of the fine chemical, thus, gamma-aminobutyric acid or fine chemicals comprising gamma-aminobutyric acid, in said organism or in the culture medium surrounding the organism.
   Accordingly, the present invention relates to a process for the production of shikimate, which comprises
[4507] (a) increasing or generating the activity of a protein as shown in table II, application no. 17b, column 3 encoded by the nucleic acid sequences as shown in table I, application no. 17b, column 5, in an organelle of a microorganism or plant, or
[4508] (b) increasing or generating the activity of a protein as shown in table II, application no. 17b, column 3 encoded by the nucleic acid sequences as shown in table I, application no. 17b, column 5 in the plastid of a microorganism or plant, or in one or more parts thereof; and
[4509] (c) growing the organism under conditions which permit the production of the fine chemical, thus, shikimate or fine chemicals comprising aminobutyric acid and/or putrescine and/or shikimate, in said organism or in the culture medium surrounding the organism.
   Accordingly, the present invention relates to a process for the production of putrescine, which comprises
[4510] (a) increasing or generating the activity of a protein as shown in table II, application no. 17c, column 3 encoded by the nucleic acid sequences as shown in table I, application no. 17c, column 5, in an organelle of a microorganism or plant, or
[4511] (b) increasing or generating the activity of a protein as shown in table II, application no. 17c, column 3 encoded by the nucleic acid sequences as shown in table I, application no. 17c, column 5 in the plastid of a microorganism or plant, or in one or more parts thereof; and
[4512] (c) growing the organism under conditions which permit the production of the fine chemical, thus, putrescine or fine chemicals comprising aminobutyric acid and/or putrescine and/or shikimate, in said organism or in the culture medium surrounding the organism.

[4513] Accordingly, the term “the fine chemical” means “gamma-aminobutyric acid” in relation to all sequences listed in table I, application no. 17a, columns 5 and 7 or homologs thereof. Accordingly, the term “the fine chemical” means “putrescine” in relation to all sequences listed in table I, application no. 17c, columns 5 and 7 or homologs thereof. Accordingly, the term “the fine chemical” means “shikimate” in relation to all sequences listed in table I, application no. 17b, columns 5 and 7 or homologs thereof.

Accordingly, the term “the fine chemical” can mean aminobutyric acid and/or putrescine and/or shikimate owing to circumstances and the context. Preferably the term “the fine chemical” means “shikimate”. In order to illustrate that the meaning of the term “the respective fine chemical” means “aminobutyric acid and/or putrescine and/or shikimate” owing to the sequences listed in the context the term “the respective fine chemical” is also used.
Throughout the specification the term “the fine chemical” means aminobutyric acid and/or putrescine and/or shikimate, its salts, ester, thioester or in free form or bound to other compounds such sugars or sugarpolymers, like glucoside, e.g. diglucoside.

[4514] In another embodiment the present invention is related to a process for the production of aminobutyric acid and/or putrescine and/or shikimate, which comprises
[4515] (a) increasing or generating the activity of a protein as shown in table II, application no. 17, column 3 encoded by the nucleic acid sequences as shown in table I, application no. 17, column 5, in an organelle of a non-human organism, or
[4516] (b) increasing or generating the activity of a protein as shown in table II, application no. 17, column 3 encoded by the nucleic acid sequences as shown in table I, application no. 17, column 5, which are joined to a nucleic acid sequence encoding a transit peptide in a non-human organism, or in one or more parts thereof; or
[4517] (c) increasing or generating the activity of a protein as shown in table II, application no. 17, column 3 encoded by the nucleic acid sequences as shown in table I, application no. 17, column 5, which are joined to a nucleic acid sequence encoding chloroplast localization sequence, in a non-human organism, or in one or more parts thereof, and
[4518] (d) growing the organism under conditions which permit the production of gamma-aminobutyric acid and/or putrescine and/or shikimate in said organism. (Warum oben nach Metaboliten zerlegt and hier nicht??)

[4519] In another embodiment, the present invention relates to a process for the production of gamma-aminobutyric acid and/or putrescine and/or shikimate, which comprises
[4520] (a) increasing or generating the activity of a protein as shown in table II, application no. 17, column 3 encoded by the nucleic acid sequences as shown in table I, application no. 17, column 5, in an organelle of a microorganism or plant through the transformation of the organelle, or
[4521] (b) increasing or generating the activity of a protein as shown in table II, application no. 17, column 3 encoded by the nucleic acid sequences as shown in table I, application no. 17, column 5 in the plastid of a microorganism or plant, or in one or more parts thereof through the transformation of the plastids; and
[4522] (c) growing the organism under conditions which permit the production of the fine chemical, thus, gamma-aminobutyric acid and/or putrescine and/or shikimate or fine chemicals comprising aminobutyric acid and/or putrescine and/or shikimate, in said organism or in the culture medium surrounding the organism.

[4523] Advantageously the activity of the protein as shown in table II, application no. 17, column 3 encoded by the nucleic acid sequences as shown in table I, application no. 17, column 5 is increased or generated in the abovementioned process in the plastid of a microorganism or plant.

[4524] for the disclosure of the paragraphs [0019.0.0.16] to [0024.0.0.16] see paragraphs [0019.0.0.0] and [0024.0.0.0] above.

[4525] Even more preferred nucleic acid sequences are encoding transit peptides as disclosed by von Heijne et al. [Plant Molecular Biology Reporter, Vol. 9 (2), 1991: 104-126], which are hereby incorporated by reference. Table V shows some examples of the transit peptide sequences disclosed by von Heijne et al. According to the disclosure of the invention especially in the examples the skilled worker is able to link other nucleic acid sequences disclosed by von Heijne et al. to the nucleic acid sequences shown in table I, application no. 17, columns 5 and 7. Most preferred nucleic acid sequences encoding transit peptides are derived from the genus Spinacia such as chloroplast 30S ribosomal protein PSrp-1, root acyl carrier protein II, acyl carrier protein, ATP synthase: γ subunit, ATP synthase: δ subunit, cytochrom f, ferredoxin I, ferredoxin NADP oxidoreductase (=FNR), nitrite reductase, phosphoribulokinase, plastocyanin or carbonic anhydrase. The skilled worker will recognize that various other nucleic acid sequences encoding transit peptides can easily isolated from plastid-localized proteins, which are expressed from nuclear genes as precursors and are then targeted to plastids. Such transit peptides encoding sequences can be used for the construction of other expression constructs. The transit peptides advantageously used in the inventive process and which are part of the inventive nucleic acid sequences and proteins are typically 20 to 120 amino acids, preferably 25 to 110, 30 to 100 or 35 to 90 amino acids, more preferably 40 to 85 amino acids and most preferably 45 to 80 amino acids in length and functions post-translationally to direct the protein to the plastid preferably to the chloroplast. The nucleic acid sequences encoding such transit peptides are localized upstream of nucleic acid sequence encoding the mature protein. For the correct molecular joining of the transit peptide encoding nucleic acid and the nucleic acid encoding the protein to be targeted it is sometimes necessary to introduce additional base pairs at the joining position, which forms restriction enzyme recognition sequences useful for the molecular joining of the different nucleic acid molecules. This procedure might lead to very few additional amino acids at the N-terminal of the mature imported protein, which usually and preferably do not interfere with the protein function. In any case, the additional base pairs at the joining position which forms restriction enzyme recognition sequences have to be chosen with care, in order to avoid the formation of stop codons or codons which encode amino acids with a strong influence on protein folding, like e.g. proline. It is preferred that such additional codons encode small n.d. structural flexible amino acids such as glycine or alanine.

[4526] As mentioned above the nucleic acid sequences coding for the proteins as shown in table II, application no. 17, column 3 and its homologs as disclosed in table I, application no. 17, columns 5 and 7 are joined to a nucleic acid sequence encoding a transit peptide, This nucleic acid sequence encoding a transit peptide ensures transport of the protein to the plastid. The nucleic acid sequence of the gene to be expressed and the nucleic acid sequence encoding the transit peptide are operably linked. Therefore the transit peptide is fused in frame to the nucleic acid sequence coding for proteins as shown in table II, application no. 17, column 3 and its homologs as disclosed in table I, application no. 17, columns 5 and 7.

[4527] for the disclosure of the paragraphs [0027.0.0.16] to [0029.0.0.16] see paragraphs [0027.0.0.0] and [0029.0.0.0] above.

[4528] Alternatively, nucleic acid sequences coding for the transit peptides may be chemically synthesized either in part or wholly according to structure of transit peptide sequences disclosed in the prior art. Said natural or chemically synthesized sequences can be directly linked to the sequences encoding the mature protein or via a linker nucleic acid sequence, which may be typically less than 500 base pairs, preferably less than 450, 400, 350, 300, 250 or 200 base pairs, more preferably less than 150, 100, 90, 80, 70, 60, 50, 40 or 30 base pairs and most preferably less than 25, 20, 15, 12, 9, 6 or 3 base pairs in length and are in frame to the coding sequence. Furthermore favorable nucleic acid sequences encoding transit peptides may comprise sequences derived from more than one biological and/or chemical source and may include a nucleic acid sequence derived from the amino-terminal region of the mature protein, which in its native state is linked to the transit peptide. In a preferred embodiment of the invention said amino-terminal region of the mature protein is typically less than 150 amino acids, preferably less than 140, 130, 120, 110, 100 or 90 amino acids, more preferably less than 80, 70, 60, 50, 40, 35, 30, 25 or 20 amino acids and most preferably less than 19, 18, 17, 16, 15, 14, 13, 12, 11 or 10 amino acids in length. But even shorter or longer stretches are also possible. In addition target sequences, which facilitate the transport of proteins to other cell compartments such as the vacuole, endoplasmic reticulum, Golgi complex, glyoxysomes, peroxisomes or mitochondria may be also part of the inventive nucleic acid sequence. The proteins translated from said inventive nucleic acid sequences are a kind of fusion proteins that means the nucleic acid sequences encoding the transit peptide for example the ones shown in table V, preferably the last one of the table are joint to the nucleic acid sequences shown in table I, application no. 17, columns 5 and 7. The person skilled in the art is able to join said sequences in a functional manner. Advantageously the transit peptide part is cleaved off from the protein part shown in table II, application no. 17, columns 5 and 7 during the transport preferably into the plastids. All products of the cleavage of the preferred transit peptide shown in the last line of table V have preferably the N-terminal amino acid sequences QIA CSS or QIA EFQLTT in front of the start methionine of the protein mentioned in table II, application no. 17, columns 5 and 7. Other short amino acid sequences of an range of 1 to 20 amino acids preferable 2 to 15 amino acids, more preferable 3 to 10 amino acids most preferably 4 to 8 amino acids are also possible in front of the start methionine of the protein mentioned in table II, application no. 17, columns 5 and 7. In case of the amino acid sequence QIA CSS the three amino acids in front of the start methionine are stemming from the LIC (=ligatation independent cloning) cassette. Said short amino acid sequence is preferred in the case of the expression of E. coli genes. In case of the amino acid sequence QIA EFQLTT the six amino acids in front of the start methionine are stemming from the LIC cassette. Said short amino acid sequence is preferred in the case of the expression of S. cerevisiae genes. The skilled worker knows that other short sequences are also useful in the expression of the genes mentioned in table I, application no. 17, columns 5 and 7. Furthermore the skilled worker is aware of the fact that there is not a need for such short sequences in the expression of the genes.

[4529] Table V: Examples of transit peptides disclosed by von Heijne et al. for the disclosure of Table V see paragraph [0030.2.0.0] above. WO 2005/123929 (Plastid Transit Peptides) shows further transit peptides especially on pages 33 to 35, Tables 1 and two and in claim 1.

[4530] Alternatively to the targeting of the sequences shown in table II, application no. 17, columns 5 and 7 preferably of sequences in general encoded in the nucleus with the aid of the targeting sequences mentioned for example in table V alone or in combination with other targeting sequences preferably into the plastids, the nucleic acids of the invention can directly introduced into the plastidal genome. Therefore in a preferred embodiment the nucleic acid sequences shown in table I, application no. 17, columns 5 and 7 are directly introduced and expressed in plastids.

The term “introduced” in the context of this specification shall mean the insertion of a nucleic acid sequence into the organism by means of a “transfection”, “transduction” or preferably by “transformation”.
A plastid, such as a chloroplast, has been “transformed” by an exogenous (preferably foreign) nucleic acid sequence if nucleic acid sequence has been introduced into the plastid that means that this sequence has crossed the membrane or the membranes of the plastid. The foreign DNA may be integrated (covalently linked) into plastid DNA making up the genome of the plastid, or it may remain unintegrated (e.g., by including a chloroplast origin of replication). “Stably” integrated DNA sequences are those, which are inherited through plastid replication, thereby transferring new plastids, with the features of the integrated DNA sequence to the progeny.

[4531] for the disclosure of the paragraphs [0030.2.0.16] and [0030.3.0.16] see paragraphs [0030.2.0.0] and [0030.3.0.0] above.

[4532] For the inventive process it is of great advantage that by transforming the plastids the intraspecies specific transgene flow is blocked, because a lot of species such as corn, cotton and rice have a strict maternal inheritance of plastids. By placing the genes specified in table I, application no. 17, columns 5 and 7 or active fragments thereof in the plastids of plants, these genes will not be present in the pollen of said plants.

A further preferred embodiment of the invention relates to the use of so called “chloroplast localization sequences”, in which a first RNA sequence or molecule is capable of transporting or “chaperoning” a second RNA sequence, such as a RNA sequence transcribed from the sequences depicted in table I, application no. 17, columns 5 and 7 or a sequence encoding a protein, as depicted in table II, application no. 17, columns 5 and 7, from an external environment inside a cell or outside a plastid into a chloroplast. In one embodiment the chloroplast localization signal is substantially similar or complementary to a complete or intact viroid sequence. The chloroplast localization signal may be encoded by a DNA sequence, which is transcribed into the chloroplast localization RNA. The term “viroid” refers to a naturally occurring single stranded RNA molecule (Flores, C R Acad Sci III. 2001 October; 324(10): 943-52). Viroids usually contain about 200-500 nucleotides and generally exist as circular molecules. Examples of viroids that contain chloroplast localization signals include but are not limited to ASBVd, PLMVd, CChMVd and ELVd. The viroid sequence or a functional part of it can be fused to the sequences depicted in table I, application no. 17, columns 5 and 7 or a sequence encoding a protein, as depicted in table II, application no. 17, columns 5 and 7 in such a manner that the viroid sequence transports a sequence transcribed from a sequence as depicted in table I, application no. 17, columns 5 and 7 or a sequence encoding a protein as depicted in table II, application no. 17, columns 5 and 7 into the chloroplasts. A preferred embodiment uses a modified ASBVd (Navarro et al., Virology. 2000 Mar. 1; 268(1): 218-25).
In a further specific embodiment the protein to be expressed in the plastids such as the proteins depicted in table II, application no. 17, columns 5 and 7 are encoded by different nucleic acids. Such a method is disclosed in WO 2004/040973, which shall be incorporated by reference. WO 2004/040973 teaches a method, which relates to the translocation of an RNA corresponding to a gene or gene fragment into the chloroplast by means of a chloroplast localization sequence. The genes, which should be expressed in the plant or plants cells, are split into nucleic acid fragments, which are introduced into different compartments in the plant e.g. the nucleus, the plastids and/or mitochondria. Additionally plant cells are described in which the chloroplast contains a ribozyme fused at one end to an RNA encoding a fragment of a protein used in the inventive process such that the ribozyme can trans-splice the translocated fusion RNA to the RNA encoding the gene fragment to form and as the case may be reunite the nucleic acid fragments to an intact mRNA encoding a functional protein for example as disclosed in table II, application no. 17, columns 5 and 7.

[4533] In a preferred embodiment of the invention the nucleic acid sequences as shown in table I, application no. 17, columns 5 and 7 used in the inventive process are transformed into plastids, which are metabolical active. Those plastids should preferably maintain at a high copy number in the plant or plant tissue of interest, most preferably the chloroplasts found in green plant tissues, such as leaves or cotyledons or in seeds.

[4534] For a good expression in the plastids the nucleic acid sequences as shown in table I, application no. 17, columns 5 and 7 are introduced into an expression cassette using a preferably a promoter and terminator, which are active in plastids preferably a chloroplast promoter. Examples of such promoters include the psbA promoter from the gene from spinach or pea, the rbcL promoter, and the atpB promoter from corn.

[4535] for the disclosure of the paragraphs [0031.0.0.16] and [0032.0.0.16] see paragraphs [0031.0.0.0] and [0032.0.0.0] above.

[4536] Advantageously the process for the production of the fine chemical leads to an enhanced production of the fine chemical. The terms “enhanced” or “increase” mean at least a 10%, 20%, 30%, 40% or 50%, preferably at least 60%, 70%, 80%, 90% or 100%, more preferably 150%, 200%, 300%, 400% or 500% higher production of the fine chemical in comparison to the reference as defined below, e.g. that means in comparison to an organism without the aforementioned modification of the activity of a protein as shown in table II, application no. 17, column 3. Preferably the modification of the activity of a protein as shown in table II, application no. 17, column 3 or their combination can be achieved by joining the protein to a transit peptide.

[4537] Surprisingly it was found, that the transgenic expression of the Saccharomyces cerevisiae protein as shown in table II, application no. 17, column 3 in plastids of a plant such as Arabidopsis thaliana for example through the linkage to at least one targeting sequence for example as mentioned in table V conferred an increase in the fine chemical content of the transformed plants.

[4538] for the disclosure of this paragraph see paragraph [0035.0.0.0] above.

[4539] The sequence of b1704 (Accession number NP_{—}416219) from Escherichia coli has been published in Blattner et al., Science 277 (5331), 1453-1474 (1997), and its activity is being defined as “3-deoxy-D-arabinoheptulosonate-7-phosphate synthase (DAHP synthetase), tryptophan-repressible”. Accordingly, in one embodiment, the process of the present invention comprises the use of a “3-deoxy-D-arabinoheptulosonate-7-phosphate synthase (DAHP synthetase), tryptophan-repressible” or its homolog, e.g. as shown herein, for the production of the fine chemical, meaning of shikimic acid and/or salts, esters, thioestesr containing shikimic acid, in particular for increasing the amount of shikimic acid in free or bound form in an organism or a part thereof, as mentioned. In one embodiment, in the process of the present invention the activity of a b1704 protein is increased or generated, e.g. from Escherichia coli or a homolog thereof, preferably linked at least to one transit peptide as mentioned for example in table V. In a further embodiment, in the process of the present invention the activity of a b1704 protein is increased or generated, e.g. from Escherichia coli or a homolog thereof, preferably linked at least to one transit peptide as mentioned for example in WO 2005/123929 (Plastid Transit Peptides), which shows further transit peptides especially on pages 33 to 35, Tables 1 and two and in claim 1.

In another embodiment, in the process of the present invention the activity of a b1704 protein is increased or generated in a subcellular compartment of the organism or organism cell such as in an organelle like a plastid or mitochondria.
The sequence of b1868 (Accession number PIR:D64949) from Escherichia coli has been published in Blattner et al., Science 277 (5331), 1453-1474 (1997), and its activity is being defined as “yecE protein”. Accordingly, in one embodiment, the process of the present invention comprises the use of a “yecE protein” or its homolog, e.g. as shown herein, for the production of the fine chemical, meaning of shikimic acid and/or salts, esters, thioesters containing shikimic acid, in particular for increasing the amount of shikimic acid in free or bound form in an organism or a part thereof, as mentioned. In one embodiment, in the process of the present invention the activity of a b1868 protein is increased or generated, e.g. from Escherichia coli or a homolog thereof, preferably linked at least to one transit peptide as mentioned for example in table V. In a further embodiment, in the process of the present invention the activity of a b1868 protein is increased or generated, e.g. from Escherichia coli or a homolog thereof, preferably linked at least to one transit peptide as mentioned for example in WO 2005/123929 (Plastid Transit Peptides), which shows further transit peptides especially on pages 33 to 35, Tables 1 and two and in claim 1.
In another embodiment, in the process of the present invention the activity of a b1868 protein is increased or generated in a subcellular compartment of the organism or organism cell such as in an organelle like a plastid or mitochondria.
The sequence of b2600 (Accession number NP_{—}417091) from Escherichia coli has been published in Blattner et al., Science 277 (5331), 1453-1474 (1997), and its activity is being defined as “bifunctional chorismate mutase/prephenate dehydrogenase”. Accordingly, in one embodiment, the process of the present invention comprises the use of a “bifunctional chorismate mutase/prephenate dehydrogenase” or its homolog, e.g. as shown herein, for the production of the fine chemical, meaning of shikimic acid and/or salts, esters, thioesters containing shikimic acid, in particular for increasing the amount of shikimic acid in free or bound form in an organism or a part thereof, as mentioned. In one embodiment, in the process of the present invention the activity of a b2600protein is increased or generated, e.g. from Escherichia coli or a homolog thereof, preferably linked at least to one transit peptide as mentioned for example in table V. In a further embodiment, in the process of the present invention the activity of a b2600 protein is increased or generated, e.g. from Escherichia coli or a homolog thereof, preferably linked at least to one transit peptide as mentioned for example in WO 2005/123929 (Plastid Transit Peptides), which shows further transit peptides especially on pages 33 to 35, Tables 1 and two and in claim 1.
In another embodiment, in the process of the present invention the activity of a b2600protein is increased or generated in a subcellular compartment of the organism or organism cell such as in an organelle like a plastid or mitochondria.
The sequence of b2601 (Accession number NP_{—}417092) from Escherichia coli has been published in Blattner et al., Science 277 (5331), 1453-1474 (1997), and its activity is being defined as “3-deoxy-D-arabinoheptulosonate-7-phosphate (DAHP) synthase”. Accordingly, in one embodiment, the process of the present invention comprises the use of a “3-deoxy-D-arabinoheptulosonate-7-phosphate (DAHP) synthase” or its homolog, e.g. as shown herein, for the production of the fine chemical, meaning of shikimic acid and/or salts, esters, thioesters containing shikimic acid, in particular for increasing the amount of shikimic acid in free or bound form in an organism or a part thereof, as mentioned. In one embodiment, in the process of the present invention the activity of a b2601 protein is increased or generated, e.g. from Escherichia coli or a homolog thereof, preferably linked at least to one transit peptide as mentioned for example in table V. In a further embodiment, in the process of the present invention the activity of a b2601 protein is increased or generated, e.g. from Escherichia coli or a homolog thereof, preferably linked at least to one transit peptide as mentioned for example in WO 2005/123929 (Plastid Transit Peptides), which shows further transit peptides especially on pages 33 to 35, Tables 1 and two and in claim 1.
In another embodiment, in the process of the present invention the activity of a b2601 protein is increased or generated in a subcellular compartment of the organism or organism cell such as in an organelle like a plastid or mitochondria.
The sequence of b2965 (Accession number NP_{—}417440) from Escherichia coli has been published in Blattner et al., Science 277 (5331), 1453-1474 (1997), and its activity is being defined as “ornithine decarboxylase”. Accordingly, in one embodiment, the process of the present invention comprises the use of a “ornithine decarboxylase” or its homolog, e.g. as shown herein, for the production of the fine chemical, meaning of putrescine and/or gamma-aminobutyric acid and/or salts, esters, thioesters containing putrescine and/or gamma-aminobutyric acid, in particular for increasing the amount of putrescine and/or gamma-aminobutyric acid in free or bound form in an organism or a part thereof, as mentioned. In one embodiment, in the process of the present invention the activity of a b2965 protein is increased or generated, e.g. from Escherichia coli or a homolog thereof, preferably linked at least to one transit peptide as mentioned for example in table V. In a further embodiment, in the process of the present invention the activity of a b2965 protein is increased or generated, e.g. from Escherichia coli or a homolog thereof, preferably linked at least to one transit peptide as mentioned for example in WO 2005/123929 (Plastid Transit Peptides), which shows further transit peptides especially on pages 33 to 35, Tables 1 and two and in claim 1.
In another embodiment, in the process of the present invention the activity of a b2965 protein is increased or generated in a subcellular compartment of the organism or organism cell such as in an organelle like a plastid or mitochondria.
The sequence of YDR035W (Accession number NP_{—}010320) from Saccharomyces cerevisiae has been published in Goffeau et al., Science 274 (5287), 546-547, 1996 and Jacq et al., Nature 387 (6632 Suppl), 75-78 (1997), and its activity is being defined as a “3-deoxy-D-arabino-heptulosonate-7-phosphate (DAHP) synthase” which catalyzes the first step in aromatic amino acid biosynthesis and is feedback-inhibited by phenylalanine (Aro3p). Accordingly, in one embodiment, the process of the present invention comprises the use of a “3-deoxy-D-arabino-heptulosonate-7-phosphate (DAHP) synthase” or its homolog, e.g. as shown herein, for the production of the fine chemical, meaning of shikimic acid and/or salts, esters, thioesters containing shikimic acid, in particular for increasing the amount of shikimic acid in free or bound form in an organism or a part thereof, as mentioned. In one embodiment, in the process of the present invention the activity of a YDR035W protein is increased or generated, e.g. from Saccharomyces cerevisiae or a homolog thereof, preferably linked at least to one transit peptide as mentioned for example in table V. In a further embodiment, in the process of the present invention the activity of a YDR035W protein is increased or generated, e.g. from Saccharomyces cerevisiae or a homolog thereof, preferably linked at least to one transit peptide as mentioned for example in WO 2005/123929 (Plastid Transit Peptides), which shows further transit peptides especially on pages 33 to 35, Tables 1 and two and in claim 1.
In another embodiment, in the process of the present invention the activity of a YDR035W protein is increased or generated in a subcellular compartment of the organism or organism cell such as in an organelle like a plastid or mitochondria.
The sequence of YOR350C (Accession number PIR|S67259) from Saccharomyces cerevisiae has been published in Goffeau et al., Science 274 (5287), 546-547, 1996 and Jacq et al., Nature 387 (6632 Suppl), 75-78 (1997), and its activity is being defined as similar to a “Lucilia illustris mitochondria cytochrome oxidase”. Accordingly, in one embodiment, the process of the present invention comprises the use of a protein similar to a “Lucilia illustris mitochondria cytochrome oxidase” or its homolog, e.g. as shown herein, for the production of the fine chemical, meaning of shikimic acid and/or tryglycerides, lipids, oils and/or fats containing shikimic acid, in particular for increasing the amount of shikimic acid in free or bound form in an organism or a part thereof, as mentioned. In one embodiment, in the process of the present invention the activity of a YOR350C protein is increased or generated, e.g. from Saccharomyces cerevisiae or a homolog thereof, preferably linked at least to one transit peptide as mentioned for example in table V. In a further embodiment, in the process of the present invention the activity of a YOR350C protein is increased or generated, e.g. from Saccharomyces cerevisiae or a homolog thereof, preferably linked at least to one transit peptide as mentioned for example in WO 2005/123929 (Plastid Transit Peptides), which shows further transit peptides especially on pages 33 to 35, Tables 1 and two and in claim 1.
In another embodiment, in the process of the present invention the activity of a YOR350C protein is increased or generated in a subcellular compartment of the organism or organism cell such as in an organelle like a plastid or mitochondria. STOPP

[4540] In one embodiment, the homolog of the b1704, b1868, b2600, b2601 and/or b2965 is a homolog having said activity and being derived from bacteria. In one embodiment, the homolog of the b1704, b1868, b2600, b2601 and/or b2965 is a homolog having said activity and being derived from Proteobacteria. In one embodiment, the homolog of the b1704, b1868, b2600, b2601 and/or b2965 is a homolog having said activity and being derived from Gammaproteobacteria. In one embodiment, the homolog of the b1704, b1868, b2600, b2601 and/or b2965 is a homolog having said activity and being derived from Enterobacteriales. In one embodiment, the homolog of the b1704, b1868, b2600, b2601 and/or b2965 is a homolog having said activity and being derived from Enterobacteriaceae. In one embodiment, the homolog of the b1704, b1868, b2600, b2601 and/or b2965 is a homolog having said activity and being derived from Escherichia, preferably from Escherichia coli.

In one embodiment, the homolog of YDR035W or YOR350C protein is a homolog having the same or a similar activity, in particular an increase of activity confers an increase in the content of the fine chemical in the organisms and being derived from an Eukaryot. In one embodiment, the homolog of YDR035W or YOR350C protein is a homolog having the same or a similar activity, in particular an increase of activity confers an increase in the content of the fine chemical in an organisms or part thereof, and being derived from Fungi. In one embodiment, the homolog of the YDR035W or YOR350C is a homolog having the same or a similar activity, in particular an increase of activity confers an increase in the content of the fine chemical in the organisms or a part thereof and being derived from Ascomycota. In one embodiment, the homolog of the YDR035W or YOR350C is a homolog having the same or a similar activity, in particular an increase of activity confers an increase in the content of the fine chemical in the organisms or part thereof, and being derived from Saccharomycotina, preferably Saccharomycetes, even more preferred from Saccharomycetales, Saccharomycetaceae and especially from Saccharomycetes.

[4541] for the disclosure of this paragraph see paragraph [0038.0.0.0] above.

[4542] In accordance with the invention, a protein or polypeptide has the “activity of an protein as shown in table II, application no. 17, column 3” if its de novo activity, or its increased expression directly or indirectly leads to an increased in the fine chemical level in the organism or a part thereof, preferably in a cell of said organism, more preferably in an organelle such as a plastid or mitochondria of said organism and the protein has the above mentioned activities of a protein as shown in table II, application no. 17, column 3, preferably in the event the nucleic acid sequences encoding said proteins is functionally joined to the nucleic acid sequence of a transit peptide. Throughout the specification the activity or preferably the biological activity of such a protein or polypeptide or an nucleic acid molecule or sequence encoding such protein or polypeptide is identical or similar if it still has the biological or enzymatic activity of a protein as shown in table II, application no. 17, column 3, or which has at least 10% of the original enzymatic activity, preferably 20%, particularly preferably 30%, most particularly preferably 40% in comparison to a protein as shown in table II, application no. 17, column 3 of Saccharomyces cerevisiae.

[4543] for the disclosure of the paragraphs [0040.0.0.16] to [0047.0.0.15] see paragraphs [0040.0.0.0] to [0047.0.0.0] above.

[4544] Preferably, the reference, control or wild type differs form the subject of the present invention only in the cellular activity, preferably of the plastidial activity of the polypeptide of the invention, e.g. as result of an increase in the level of the nucleic acid molecule of the present invention or an increase of the specific activity of the polypeptide of the invention, e.g. by or in the expression level or activity of an protein having the activity of a protein as shown in table II, application no. 17, column 3 its biochemical or genetical causes and the increased amount of the fine chemical.

[4545] for the disclosure of the paragraphs [0049.0.0.16] to [0051.0.0.16] see paragraphs [0049.0.0.0] to [0051.0.0.0] above.

[4546] For example, the molecule number or the specific activity of the polypeptide or the nucleic acid molecule may be increased. Larger amounts of the fine chemical can be produced if the polypeptide or the nucleic acid of the invention is expressed de novo in an organism lacking the activity of said protein, preferably the nucleic acid molecules as mentioned in table I, application no. 17, columns 5 and 7 alone or preferably in combination with a transit peptide for example as mentioned in table V or in another embodiment by introducing said nucleic acid molecules into an organelle such as an plastid or mitochondria in the transgenic organism. However, it is also possible to modify the expression of the gene which is naturally present in the organisms, for example by integrating a nucleic acid sequence, encoding a plastidic targeting sequence in front (5 prime) of the coding sequence, leading to a functional preprotein, which is directed for example to the plastids.

[4547] for the disclosure of the paragraphs [0053.0.0.16] to [0058.0.0.16] see paragraphs [0053.0.0.0] to [0058.0.0.0] above.

[4548] In case the activity of the Escherichia coli protein b1704 or its homologs, e.g. a “3-deoxy-D-arabinoheptulosonate-7-phosphate synthase (DAHP synthetase), tryptophan-repressible” is increased advantageously in an organelle such as a plastid or mitochondria, preferably, in one embodiment an increase of the fine chemical, preferably of shikimic acid between 154% and 6593% or more is conferred.

In case the activity of the Escherichia coli protein b2601 or its homologs, e.g. a “3-deoxy-D-arabinoheptulosonate-7-phosphate (DAHP) synthase” is increased advantageously in an organelle such as a plastid or mitochondria, preferably, in one embodiment an increase of the fine chemical, preferably of shikimic acid between 42% and 278% or more is conferred.
In case the activity of the Escherichia coli protein b1868 or its homologs, e.g. a “yecE protein” is increased advantageously in an organelle such as a plastid or mitochondria, preferably, in one embodiment an increase of the fine chemical, preferably of shikimic acid between 20% and 108% or more is conferred.
In case the activity of the Escherichia coli protein b2600 or its homologs, e.g. a “bifunctional chorismate mutase/prephenate dehydrogenase” is increased advantageously in an organelle such as a plastid or mitochondria, preferably, in one embodiment an increase of the fine chemical, preferably of shikimic acid between 14% and 32% or more is conferred.
In case the activity of the Escherichia coli protein b2965 or its homologs, e.g. a “ornithine decarboxylase” is increased advantageously in an organelle such as a plastid or mitochondria, preferably, in one embodiment an increase of the fine chemical, preferably of gamma-Aminobutyric acid (GABA) between 253% and 830% or more is conferred.
In case the activity of the Escherichia coli protein b2965 or its homologs, e.g. a “ornithine decarboxylase” is increased advantageously in an organelle such as a plastid or mitochondria, preferably, in one embodiment an increase of the fine chemical, preferably of putrescine between 7224% and 132645% or more is conferred.
In case the activity of the Escherichia coli protein b2965 or its homologs, e.g. a “ornithine decarboxylase” is increased advantageously in an organelle such as a plastid or mitochondria, preferably, in one embodiment an increase of the fine chemical, preferably of gamma-Aminobutyric acid (GABA) between 253% and 830% or more and of putrescine between 7224% and 132645% or more is conferred.
In case the activity of the Saccharomyces cerevisiae protein YDR035W or its homologs, e.g. a “3-deoxy-D-arabino-heptulosonate 7-phosphate (DAHP) synthase” is increased advantageously in an organelle such as a plastid or mitochondria, preferably, in one embodiment an increase of the fine chemical, preferably of shikimic acid between 26% and 174% or more is conferred.
In case the activity of the Saccharomyces cerevisiae protein YOR350C or its homologs, e.g. a “protein similar to Lucilia illustris mitochondria cytochrome oxidase” is increased advantageously in an organelle such as a plastid or mitochondria, preferably, in one embodiment an increase of the fine chemical, preferably of shikimic acid between 14% and 15% or more is conferred.

[4549] %

[4550] for the disclosure of the paragraphs [0061.0.0.116] and [0062.0.0.116] see paragraphs [0061.0.0.0] and [0062.0.0.0] above.

[4551] A protein having an activity conferring an increase in the amount or level of the fine chemical, preferably upon targeting to the plastids preferably has the structure of the polypeptide described herein, in particular of the polypeptides comprising the consensus sequence shown in table IV, application no. 17, column 7 or of the polypeptide as shown in the amino acid sequences as disclosed in table II, application no. 17, columns 5 and 7 or the functional homologues thereof as described herein, or is encoded by the nucleic acid molecule characterized herein or the nucleic acid molecule according to the invention, for example by the nucleic acid molecule as shown in table I, application no. 17, columns 5 and 7 or its herein described functional homologues and has the herein mentioned activity.

[4552] /

[4553] for the disclosure of the paragraphs [0065.0.0.116] and [0066.0.0.116] see paragraphs [0065.0.0.0] and [0066.0.0.0] above.

[4554] In one embodiment, the process of the present invention comprises one or more of the following steps
[4555] a) stabilizing a protein conferring the increased expression of a protein encoded by the nucleic acid molecule of the invention or of the polypeptide of the invention, e.g. of a polypeptide having the activity of a protein as indicated in table II, application no. 17, columns 5 and 7 or its homologs activity having herein-mentioned gamma-aminobutyric acid and/or putrescine and/or shikimate increasing activity; and/or
[4556] b) stabilizing a mRNA conferring the increased expression of a protein encoded by the nucleic acid molecule of the invention, which is in the sense of the invention a fusion of a nucleic acid sequence encoding a transit peptide and of a nucleic acid sequence as shown in table I, application no. 17, columns 5 and 7, e.g. a nucleic acid sequence encoding a polypeptide having the activity of a protein as indicated in table II, application no. 17, columns 5 and 7 or its homologs activity or of a mRNA encoding the polypeptide of the present invention having herein-mentioned gamma-aminobutyric acid and/or putrescine and/or shikimate increasing activity; and/or
[4557] c) increasing the specific activity of a protein conferring the increased expression of a protein encoded by the nucleic acid molecule of the invention or of the polypeptide of the present invention having herein-mentioned gamma-aminobutyric acid and/or putrescine and/or shikimate increasing activity, e.g. of a polypeptide having the activity of a protein as indicated in table II, application no. 17, columns 5 and 7 or its homologs activity, or decreasing the inhibitory regulation of the polypeptide of the invention; and/or
[4558] d) generating or increasing the expression of an endogenous or artificial transcription factor mediating the expression of a protein conferring the increased expression of a protein encoded by the nucleic acid molecule of the invention or of the polypeptide of the invention having herein-mentioned gamma-aminobutyric acid and/or putrescine and/or shikimate increasing activity, e.g. of a polypeptide having the activity of a protein as indicated in table II, application no. 17, columns 5 and 7 or its homologs activity; and/or
[4559] e) stimulating activity of a protein conferring the increased expression of a protein encoded by the nucleic acid molecule of the present invention or a polypeptide of the present invention having herein-mentioned gamma-aminobutyric acid and/or putrescine and/or shikimate increasing activity, e.g. of a polypeptide having the activity of a protein as indicated in table II, application no. 17, columns 5 and 7 or its homologs activity, by adding one or more exogenous inducing factors to the organisms or parts thereof; and/or
[4560] f) expressing a transgenic gene encoding a protein conferring the increased expression of a polypeptide encoded by the nucleic acid molecule of the present invention or a polypeptide of the present invention, having herein-mentioned gamma-aminobutyric acid and/or putrescine and/or shikimate increasing activity, e.g. of a polypeptide having the activity of a protein as indicated in table II, application no. 17, columns 5 and 7 or its homologs activity, and/or
[4561] g) increasing the copy number of a gene conferring the increased expression of a nucleic acid molecule encoding a polypeptide encoded by the nucleic acid molecule of the invention or the polypeptide of the invention having herein-mentioned gamma-aminobutyric acid and/or putrescine and/or shikimate increasing activity, e.g. of a polypeptide having the activity of a protein as indicated in table II, application no. 17, columns 5 and 7 or its homologs activity; and/or
[4562] h) increasing the expression of the endogenous gene encoding the polypeptide of the invention, e.g. a polypeptide having the activity of a protein as indicated in table II, application no. 17, columns 5 and 7 or its homologs activity, by adding positive expression or removing negative expression elements, e.g. homologous recombination can be used to either introduce positive regulatory elements like for plants the 35S enhancer into the promoter or to remove repressor elements form regulatory regions. Further gene conversion methods can be used to disrupt repressor elements or to enhance to activity of positive elements. Positive elements can be randomly introduced in plants by T-DNA or transposon mutagenesis and lines can be identified in which the positive elements have be integrated near to a gene of the invention, the expression of which is thereby enhanced; and/or
[4563] i) modulating growth conditions of an organism in such a manner, that the expression or activity of the gene encoding the protein of the invention or the protein itself is enhanced for example microorganisms or plants can be grown for example under a higher temperature regime leading to an enhanced expression of heat shock proteins, which can lead an enhanced fine chemical production; and/or
[4564] j) selecting of organisms with especially high activity of the proteins of the invention from natural or from mutagenized resources and breeding them into the target organisms, eg the elite crops; and/or
[4565] k) directing a protein encoded by the nucleic acid molecule of the invention or of the polypeptide of the present invention having herein-mentioned gamma-aminobutyric acid and/or putrescine and/or shikimate increasing activity, e.g. of polypeptide having the activity of a protein as indicated in table II, application no. 17, columns 5 and 7 or its homologs activity, to the plastids by the addition of a plastidial targeting sequence; and/or
[4566] l) generating the expression of a protein encoded by the nucleic acid molecule of the invention or of the polypeptide of the present invention having herein-mentioned gamma-aminobutyric acid and/or putrescine and/or shikimate increasing activity, e.g. of a polypeptide having the activity of a protein as indicated in table II, application no. 17, columns 5 and 7 or its homologs activity in plastids by the stable or transient transformation advantageously stable transformation of organelles preferably plastids with an inventive nucleic acid sequence preferably in form of an expression cassette containing said sequence leading to the plastidial expression of the nucleic acids or polypeptides of the invention; and/or
[4567] m) generating the expression of a protein encoded by the nucleic acid molecule of the invention or of the polypeptide of the present invention having herein-mentioned gamma-aminobutyric acid and/or putrescine and/or shikimate increasing activity, e.g. of a polypeptide having the activity of a protein as indicated in table II, application no. 17, columns 5 and 7 or its homologs activity in plastids by integration of a nucleic acid of the invention into the plastidal genome under control of preferable a plastidial promoter.

[4568] Preferably, said mRNA is the nucleic acid molecule of the present invention and/or the protein conferring the increased expression of a protein encoded by the nucleic acid molecule of the present invention alone or link to a transit nucleic acid sequence or transit peptide encoding nucleic acid sequence or the polypeptide having the herein mentioned activity, e.g. conferring the increase of the fine chemical after increasing the expression or activity of the encoded polypeptide preferably in organelles such as plastids or having the activity of a polypeptide having an activity as the protein as shown in table II, application no. 17, column 3 or its homologs. Preferably the increase of the fine chemical takes place in plastids.

[4569] for the disclosure of the paragraphs [0069.0.0.116] to [0079.0.0.116] see paragraphs [0069.0.0.0] to [0079.0.0.0] above.

[4570] The activation of an endogenous polypeptide having above-mentioned activity, e.g. having the activity of a protein as shown in table II, application no. 17, column 3 or of the polypeptide of the invention, e.g. conferring the increase of the fine chemical after increase of expression or activity in the cytsol and/or in an organelle like a plastid, preferentially in the plastid, can also be increased by introducing a synthetic transcription factor, which binds close to the coding region of the gene encoding the protein as shown in table II, application no. 17, column 3 and activates its transcription. A chimeric zinc finger protein can be constructed, which comprises a specific DNA-binding domain and an activation domain as e.g. the VP16 domain of Herpes Simplex virus. The specific binding domain can bind to the regulatory region of the gene encoding the protein as shown in table II, application no. 17, column 3. The expression of the chimeric transcription factor in a organism, in particular in a plant, leads to a specific expression of the protein as shown in table II, application no. 17, column 3, see e.g. in WO01/52620, Oriz, Proc. Natl. Acad. Sci. USA, 2002, Vol. 99, 13290 or Guan, Proc. Natl. Acad. Sci. USA, 2002, Vol. 99, 13296.

[4571] for the disclosure of the paragraphs [0081.0.0.16] to [0084.0.0.16] see paragraphs [0081.0.0.0] to [0084.0.0.0] above.

[4572] Owing to the introduction of a gene or a plurality of genes conferring the expression of the nucleic acid molecule of the invention or the nucleic acid molecule used in the method of the invention or the polypeptide of the invention or the polypeptide used in the method of the invention as described below, for example the nucleic acid construct mentioned below into an organism alone or in combination with other genes, it is possible not only to increase the biosynthetic flux towards the end product, but also to increase, modify or create de novo an advantageous, preferably novel metabolites composition in the organism, e.g. an advantageous gamma-aminobutyric acid and/or putrescine and/or shikimate composition comprising a higher content of (from a viewpoint of nutritional physiology limited) gamma-aminobutyric acid and/or putrescine and/or shikimate.

[4573] for the disclosure of this paragraph see paragraph [0086.0.0.0] above.

[4574] By influencing the metabolism thus, it is possible to produce, in the process according to the invention, further advantageous compounds. Examples of such compounds are, in addition to gamma-aminobutyric acid and/or putrescine and/or shikimate, salts, esters, thioesters containing aminobutyric acid and/or putrescine and/or shikimate.

[4575] Accordingly, in one embodiment, the process according to the invention relates to a process, which comprises:
[4576] a) providing a non-human organism, preferably a microorganism, a non-human animal, a plant or animal cell, a plant or animal tissue or a plant, more preferably a microorganism, a plant or a plant tissue;
[4577] b) increasing the activity of a protein as shown in table II, application no. 17, column 3 or of a polypeptide being encoded by the nucleic acid molecule of the present invention and described below, e.g. conferring an increase of the fine chemical in the organism, preferably in the microorganism, the non-human animal, the plant or animal cell, the plant or animal tissue or the plant, more preferably a microorganism, a plant or a plant tissue, in the cytsol or in the plastids, preferentially in the plastids,
[4578] c) growing the organism, preferably the microorganism, the non-human animal, the plant or animal cell, the plant or animal tissue or the plant under conditions which permit the production of the fine chemical in the organism, preferably the microorganism, the plant cell, the plant tissue or the plant; and
[4579] d) if desired, recovering, optionally isolating, the free and/or bound the fine chemical and, optionally further free and/or bound amino acids synthesized by the organism, the microorganism, the non-human animal, the plant or animal cell, the plant or animal tissue or the plant.

[4580] The organism, in particular the microorganism, non-human animal, the plant or animal cell, the plant or animal tissue or the plant is advantageously grown in such a way that it is not only possible to recover, if desired isolate the free or bound the fine chemical or the free and bound the fine chemical but as option it is also possible to produce, recover and, if desired isolate, other free or/and bound gamma-aminobutyric acid and/or putrescine and/or shikimate.

[4581] for the disclosure of the paragraphs [0090.0.0.16] to [0097.0.0.16] see paragraphs [0090.0.0.0] to [0097.0.0.0] above.

[4582] With regard to the nucleic acid sequence as depicted a nucleic acid construct which contains a nucleic acid sequence mentioned herein or an organism (=transgenic organism) which is transformed with said nucleic acid sequence or said nucleic acid construct, “transgene” means all those constructs which have been brought about by genetic manipulation methods, preferably in which either
[4583] a) the nucleic acid sequence as shown in table I, application no. 17, columns 5 and 7 or a derivative thereof, or
[4584] b) a genetic regulatory element, for example a promoter, which is functionally linked to the nucleic acid sequence as shown table I, application no. 17, columns 5 and 7 or a derivative thereof, or
[4585] c) (a) and (b)
   is/are not present in its/their natural genetic environment or has/have been modified by means of genetic manipulation methods, it being possible for the modification to be, by way of example, a substitution, addition, deletion, inversion or insertion of one or more nucleotide. “Natural genetic environment” means the natural chromosomal locus in the organism of origin or the presence in a genomic library. In the case of a genomic library, the natural, genetic environment of the nucleic acid sequence is preferably at least partially still preserved. The environment flanks the nucleic acid sequence at least on one side and has a sequence length of at least 50 bp, preferably at least 500 bp, particularly preferably at least 1000 bp, very particularly preferably at least 5000 bp.

[4586] The use of the nucleic acid sequence according to the invention or of the nucleic acid construct according to the invention for the generation of transgenic plants is therefore also subject matter of the invention. As mentioned above the inventive nucleic acid sequence consists advantageously of the nucleic acid sequences as depicted in the sequence protocol and disclosed in table I, application no. 17, columns 5 and 7 joined to a nucleic acid sequence encoding a transit peptide, or a targeting nucleic acid sequence which directs the nucleic acid sequences disclosed in table I, application no. 17, columns 5 and 7 to the organelle preferentially the plastids. Alternatively the inventive nucleic acids sequences consist advantageously of the nucleic acid sequences as depicted in the sequence protocol and disclosed in table I, application no. 17, columns 5 and 7 joined preferably to a nucleic acids sequence mediating the stable integration of nucleic acids into the plastidial genome and optionally sequences mediating the transcription of the sequence in the plastidial compartment. A transient expression is in principal also desirable and possible.

[4587] for the disclosure of this paragraph see paragraph [0100.0.0.0] above.

[4588] In an advantageous embodiment of the invention, the organism takes the form of a plant whose gamma-aminobutyric acid and/or putrescine and/or shikimate content is modified advantageously owing to the nucleic acid molecule of the present invention expressed. This is important for plant breeders since, for example, the nutritional value of plants for poultry is dependent on the abovementioned gamma-aminobutyric acid and/or putrescine and/or shikimate and the general amount of gamma-aminobutyric acid and/or putrescine and/or shikimate as energy source and/or

protecting compounds in feed. After the activity of the protein as shown in table II, application no. 17, column 3 has been increased or generated, or after the expression of nucleic acid molecule or polypeptide according to the invention has been generated or increased, the transgenic plant generated thus is grown on or in a nutrient medium or else in the soil and subsequently harvested.

[4589] for the disclosure of the paragraphs [0102.0.0.16] to [0110.0.0.16] see paragraphs [0102.0.0.0] to [0110.0.0.0] above.

[4590] In a preferred embodiment, the fine chemical (gamma-aminobutyric acid and/or putrescine and/or shikimate) is produced in accordance with the invention and, if desired, is isolated. The production of further gamma-aminobutyric acid and/or putrescine and/or shikimate and mixtures thereof or mixtures of other fine chemicals by the process according to the invention is advantageous. It may be advantageous to increase the pool of free gamma-aminobutyric acid and/or putrescine and/or shikimate in the transgenic organisms by the process according to the invention in order to isolate high amounts of the pure fine chemical.

[4591] In another preferred embodiment of the invention a combination of the increased expression of the nucleic acid sequence or the protein of the invention together with the transformation of a nucleic acid encoding a protein or polypeptide for example another gene of the gamma-aminobutyric acid and/or putrescine and/or shikimate biosynthesis, or a compound, which functions as a sink for the desired gamma-aminobutyric acid and/or putrescine and/or shikimate in the organism is useful to increase the production of the respective fine chemical.

[4592] In a preferred embodiment, the respective fine chemical is produced in accordance with the invention and, if desired, is isolated. The production of further fine chemicals, or compounds for which the respective fine chemical is a biosynthesis precursor compounds, or mixtures thereof or mixtures of other fine chemicals, by the process according to the invention is advantageous.

[4593] In the case of the fermentation of microorganisms, the abovementioned desired fine chemical may accumulate in the medium and/or the cells. If microorganisms are used in the process according to the invention, the fermentation broth can be processed after the cultivation. Depending on the requirement, all or some of the biomass can be removed from the fermentation broth by separation methods such as, for example, centrifugation, filtration, decanting or a combination of these methods, or else the biomass can be left in the fermentation broth. The fermentation broth can subsequently be reduced, or concentrated, with the aid of known methods such as, for example, rotary evaporator, thin-layer evaporator, falling film evaporator, by reverse osmosis or by nanofiltration. Afterwards advantageously further compounds for formulation can be added such as corn starch or silicates. This concentrated fermentation broth advantageously together with compounds for the formulation can subsequently be processed by lyophilization, spray drying, and spray granulation or by other methods. Preferably the respective fine chemical comprising compositions are isolated from the organisms, such as the microorganisms or plants or the culture medium in or on which the organisms have been grown, or from the organism and the culture medium, in the known manner, for example via extraction, distillation, crystallization, chromatography or a combination of these methods. These purification methods can be used alone or in combination with the aforementioned methods such as the separation and/or concentration methods.

[4594] Transgenic plants which comprise gamma-aminobutyric acid and/or putrescine and/or shikimate synthesized in the process according to the invention can advantageously be marketed directly without there being any need for the gamma-aminobutyric acid and/or putrescine and/or shikimate synthesized to be isolated. Plants for the process according to the invention are listed as meaning intact plants and all plant parts, plant organs or plant parts such as leaf, stem, seeds, root, tubers, anthers, fibers, root hairs, stalks, embryos, calli, cotelydons, petioles, flowers, harvested material, plant tissue, reproductive tissue and cell cultures which are derived from the actual transgenic plant and/or can be used for bringing about the transgenic plant. In this context, the seed comprises all parts of the seed such as the seed coats, epidermal cells, seed cells, endosperm or embryonic tissue.

However, the respective fine chemical produced in the process according to the invention can also be isolated from the organisms, advantageously plants, in the form of their salts, esters, thioesters, as extracts, e.g. ether, alcohol, or other organic solvents or water containing extract and/or free gamma-aminobutyric acid and/or putrescine and/or shikimate. The respective fine chemical produced by this process can be obtained by harvesting the organisms, either from the medium in which they grow, or from the field. This can be done via pressing or extraction of the plant parts. To increase the efficiency of extraction it is beneficial to clean, to temper and if necessary to hull and to flake the plant material. E.g., salts, esters, thioesters comprising gamma-aminobutyric acid and/or putrescine and/or shikimate can be obtained by what is known as cold beating or cold pressing without applying heat. To allow for greater ease of disruption of the plant parts, specifically the seeds, they can previously be comminuted, steamed or roasted. Seeds, which have been pretreated in this manner can subsequently be pressed or extracted with solvents such as warm hexane. The solvent is subsequently removed. In the case of microorganisms, the latter are, after harvesting, for example extracted directly without further processing steps or else, after disruption, extracted via various methods with which the skilled worker is familiar. Thereafter, the resulting products can be processed further, i.e. degummed and/or refined. In this process, substances such as the plant mucilages and suspended matter can be first removed. What is known as desliming can be affected enzymatically or, for example, chemico-physically by addition of acid such as phosphoric acid.
Because gamma-aminobutyric acid and/or putrescine and/or shikimate in microorganisms are localized intracellular, their recovery essentials comes down to the isolation of the biomass. Well-established approaches for the harvesting of cells include filtration, centrifugation and coagulation/flocculation as described herein. Of the residual hydrocarbon, adsorbed on the cells, has to be removed. Solvent extraction or treatment with surfactants have been suggested for this purpose. However, it can be advantageous to avoid this treatment as it can result in cells devoid of most carotenoids.

[4595] The identity and purity of the compound(s) isolated can be determined by prior-art techniques. They encompass high-performance liquid chromatography (HPLC), gas chromatography (GC), spectroscopic methods, mass spectrometry (MS), staining methods, thin-layer chromatography, NIRS, enzyme assays or microbiological assays. These analytical methods are compiled in: Patek et al. (1994) Appl. Environ. Microbiol. 60:133-140; Malakhova et al. (1996) Biotekhnologiya 11 27-32; and Schmidt et al. (1998) Bioprocess Engineer. 19:67-70. Ulmann's Encyclopedia of Industrial Chemistry (1996) Bd. A27, VCH Weinheim, pp. 89-90, pp. 521-540, pp. 540-547, pp. 559-566, 575-581 and pp. 581-587; Michal, G (1999) Biochemical Pathways: An Atlas of Biochemistry and Molecular Biology, John Wiley and Sons; Fallon, A. et al. (1987) Applications of HPLC in Biochemistry in: Laboratory Techniques in Biochemistry and Molecular Biology, vol. 17.

[4596] Gamma-Aminobutyric acid and/or putrescine and/or shikimate can for example be detected advantageously via HPLC, LC or GC separation methods. The unambiguous detection for the presence of xanthophylls, in particular beta-cryptoxanthin or zeaxanthin containing products can be obtained by analyzing recombinant organisms using analytical standard methods: LC, LC-MS, MS or TLC). The material to be analyzed can be disrupted by sonication, grinding in a glass mill, liquid nitrogen and grinding, cooking, or via other applicable methods

[4597] In a preferred embodiment, the present invention relates to a process for the production of the fine chemical comprising or generating in an organism or a part thereof, preferably in a cell compartment such as a plastid or mitochondria, the expression of at least one nucleic acid molecule comprising a nucleic acid molecule selected from the group consisting of:
[4598] a) nucleic acid molecule encoding, preferably at least the mature form, of the polypeptide shown in table II, application no. 17, columns 5 and 7 or a fragment thereof, which confers an increase in the amount of the fine chemical in an organism or a part thereof;
[4599] b) nucleic acid molecule comprising, preferably at least the mature form, of the nucleic acid molecule shown in table I, application no. 17, columns 5 and 7;
[4600] c) nucleic acid molecule whose sequence can be deduced from a polypeptide sequence encoded by a nucleic acid molecule of (a) or (b) as result of the degeneracy of the genetic code and conferring an increase in the amount of the fine chemical in an organism or a part thereof;
[4601] d) nucleic acid molecule encoding a polypeptide which has at least 50% identity with the amino acid sequence of the polypeptide encoded by the nucleic acid molecule of (a) to (c) and conferring an increase in the amount of the fine chemical in an organism or a part thereof;
[4602] e) nucleic acid molecule which hybridizes with a nucleic acid molecule of (a) to (c) under stringent hybridisation conditions and conferring an increase in the amount of the fine chemical in an organism or a part thereof;
[4603] f) nucleic acid molecule encoding a polypeptide, the polypeptide being derived by substituting, deleting and/or adding one or more amino acids of the amino acid sequence of the polypeptide encoded by the nucleic acid molecules (a) to (d), preferably to (a) to (c) and conferring an increase in the amount of the fine chemical in an organism or a part thereof;
[4604] g) nucleic acid molecule encoding a fragment or an epitope of a polypeptide which is encoded by one of the nucleic acid molecules of (a) to (e), preferably to (a) to (c) and conferring an increase in the amount of the fine chemical in an organism or a part thereof;
[4605] h) nucleic acid molecule comprising a nucleic acid molecule which is obtained by amplifying nucleic acid molecules from a cDNA library or a genomic library using the primers shown in table Ill, application no. 17, column 7 and conferring an increase in the amount of the fine chemical in an organism or a part thereof;
[4606] i) nucleic acid molecule encoding a polypeptide which is isolated, e.g. from an expression library, with the aid of monoclonal antibodies against a polypeptide encoded by one of the nucleic acid molecules of (a) to (h), preferably to (a) to (c), and conferring an increase in the amount of the fine chemical in an organism or a part thereof;
[4607] j) nucleic acid molecule which encodes a polypeptide comprising the consensus sequence shown in table IV, application no. 17, column 7 and conferring an increase in the amount of the fine chemical in an organism or a part thereof;
[4608] k) nucleic acid molecule comprising one or more of the nucleic acid molecule encoding the amino acid sequence of a polypeptide encoding a domain of the polypeptide shown in table II, application no. 17, columns 5 and 7 and conferring an increase in the amount of the fine chemical in an organism or a part thereof; and
[4609] l) nucleic acid molecule which is obtainable by screening a suitable library under stringent conditions with a probe comprising one of the sequences of the nucleic acid molecule of (a) to (k), preferably to (a) to (c), or with a fragment of at least 15 nt, preferably 20 nt, 30 nt, 50 nt, 100 nt, 200 nt or 500 nt of the nucleic acid molecule characterized in (a) to (k), preferably to (a) to (c), and conferring an increase in the amount of the fine chemical in an organism or a part thereof;
   or which comprises a sequence which is complementary thereto.

[4610] In one embodiment, the nucleic acid molecule used in the process of the invention distinguishes over the sequence indicated in table I A, application no. 17, columns 5 and 7 by one or more nucleotides. In one embodiment, the nucleic acid molecule used in the process of the invention does not consist of the sequence indicated in table I A, application no. 17, columns 5 and 7. In one embodiment, the nucleic acid molecule used in the process of the invention is less than 100%, 99.999%, 99.99%, 99.9% or 99% identical to a sequence indicated in table I A, application no. 17, columns 5 and 7. In another embodiment, the nucleic acid molecule does not encode a polypeptide of a sequence indicated in table II A, application no. 17, columns 5 and 7.

[4611] In one embodiment, the nucleic acid molecule used in the process of the invention distinguishes over the sequence indicated in table I B, application no. 17, columns 5 and 7, by one or more nucleotides. In one embodiment, the nucleic acid molecule used in the process of the invention does not consist of the sequence indicated in table I B, application no. 17, columns 5 and 7. In one embodiment, the nucleic acid molecule used in the process of the invention is less than 100%, 99.999%, 99.99%, 99.9% or 99% identical to a sequence indicated in table I B, application no. 17, columns 5 and 7. In another embodiment, the nucleic acid molecule does not encode a polypeptide of a sequence indicated in table II B, application no. 17, columns 5 and 7.

[4612] In one embodiment, the nucleic acid molecule used in the process distinguishes over the sequence shown in table I, application no. 17, columns 5 and 7 by one or more nucleotides or does not consist of the sequence shown in table I, application no. 17, columns 5 and 7. In one embodiment, the nucleic acid molecule of the present invention is less than 100%, 99.999%, 99.99%, 99.9% or 99% identical to the sequence shown in table I, application no. 17, columns 5 and 7. In another embodiment, the nucleic acid molecule does not encode a polypeptide of the sequence shown in table II, application no. 17, columns 5 and 7.

[4613] for the disclosure of the paragraphs [0118.0.0.16] to [0120.0.0.16] see paragraphs [0118.0.0.0] to [0120.0.0.0] above.

[4614] Nucleic acid molecules with the sequence shown in table I, application no. 17, columns 5 and 7, nucleic acid molecules which are derived from the amino acid sequences shown in table II, application no. 17, columns 5 and 7 or from polypeptides comprising the consensus sequence shown in table IV, application no. 17, column 7, or their derivatives or homologues encoding polypeptides with the enzymatic or biological activity of a protein as shown in table II, application no. 17, column 3 or conferring the fine chemical increase after increasing its expression or activity are advantageously increased in the process according to the invention by expression either in the cytsol or in an organelle such as a plastid or mitochondria or both, preferably in plastids.

[4615] for the disclosure of this paragraph see paragraph [0122.0.0.0] above.

[4616] Nucleic acid molecules, which are advantageous for the process according to the invention and which encode polypeptides with the activity of a protein as shown in table II, application no. 17, column 3 can be determined from generally accessible databases.

[4617] for the disclosure of this paragraph see paragraph [0124.0.0.0] above.

[4618] The nucleic acid molecules used in the process according to the invention take the form of isolated nucleic acid sequences, which encode polypeptides with the activity of the proteins as shown in table II, application no. 17, column 3 and conferring the fine chemical increase by expression either in the cytsol or in an organelle such as a plastid or mitochondria or both, preferably in plastids.

[4619] for the disclosure of the paragraphs [0126.0.0.16] to [0133.0.0.16] see paragraphs [0126.0.0.0] to [0133.0.0.0] above.

[4620] However, it is also possible to use artificial sequences, which differ in one or more bases from the nucleic acid sequences found in organisms, or in one or more amino acid molecules from polypeptide sequences found in organisms, in particular from the polypeptide sequences shown in table II, application no. 17, columns 5 and 7 or the functional homologues thereof as described herein, preferably conferring above-mentioned activity, i.e. conferring the fine chemical increase after increasing its activity, e.g. after increasing the activity of a protein as shown in table II, application no. 17, column 3 by for example expression either in the cytsol or in an organelle such as a plastid or mitochondria or both, preferably in plastids.

[4621] for the disclosure of the paragraphs [0135.0.0.16] to [0140.0.0.16] see paragraphs [0135.0.0.0] to [0140.0.0.0] above.

[4622] Synthetic oligonucleotide primers for the amplification, e.g. as shown in table III, application no. 17, column 7, by means of polymerase chain reaction can be generated on the basis of a sequence shown herein, for example the sequence shown in table I, application no. 17, columns 5 and 7 or the sequences derived from table II, application no. 17, columns 5 and 7.

[4623] Moreover, it is possible to identify conserved regions from various organisms by carrying out protein sequence alignments with the polypeptide used in the process of the invention, in particular with sequences of the polypeptide of the invention, from which conserved regions, and in turn, degenerate primers can be derived. Conserved regions are those, which show a very little variation in the amino acid in one particular position of several homologs from different origin. The consensus sequence shown in table IV, application no. 17, column 7 is derived from said alignments.

[4624] Degenerated primers can then be utilized by PCR for the amplification of fragments of novel proteins having above-mentioned activity, e.g. conferring the increase of the fine chemical after increasing the expression or activity or having the activity of a protein as shown in table II, application no. 17, column 3 or further functional homologs of the polypeptide of the invention from other organisms.

[4625] for the disclosure of the paragraphs [0144.0.0.16] to [0151.0.0.16] see paragraphs [0144.0.0.0] to [0151.0.0.0] above.

[4626] Polypeptides having above-mentioned activity, i.e. conferring the fine chemical increase, derived from other organisms, can be encoded by other DNA sequences which hybridize to the sequences shown in table I, application no. 17, columns 5 and 7, preferably of table I B, application no. 17, columns 5 and 7 under relaxed hybridization conditions and which code on expression for peptides having the Gamma-aminobutyric acid and/or shikimate and/or putrescine or lipids, oils and/or fats containing Gamma-aminobutyric acid and/or shikimate and/or putrescine increasing activity.

[4627] for the disclosure of the paragraphs [0153.0.0.16] to [0159.0.0.16] see paragraphs [0153.0.0.0] to [0159.0.0.0] above.

[4628] Further, the nucleic acid molecule of the invention comprises a nucleic acid molecule, which is a complement of one of the nucleotide sequences of above mentioned nucleic acid molecules or a portion thereof. A nucleic acid molecule which is complementary to one of the nucleotide sequences shown in table I, application no. 17, columns 5 and 7, preferably shown in table I B, application no. 17, columns 5 and 7 is one which is sufficiently complementary to one of the nucleotide sequences shown in table I, application no. 17, columns 5 and 7, preferably shown in table I B, application no. 17, columns 5 and 7 such that it can hybridize to one of the nucleotide sequences shown in table I, application no. 17, columns 5 and 7, preferably shown in table I B, application no. 17, columns 5 and 7, thereby forming a stable duplex. Preferably, the hybridisation is performed under stringent hybridization conditions. However, a complement of one of the herein disclosed sequences is preferably a sequence complement thereto according to the base pairing of nucleic acid molecules well known to the skilled person. For example, the bases A and G undergo base pairing with the bases T and U or C, resp. and visa versa. Modifications of the bases can influence the base-pairing partner.

[4629] The nucleic acid molecule of the invention comprises a nucleotide sequence which is at least about 30%, 35%, 40% or 45%, preferably at least about 50%, 55%, 60% or 65%, more preferably at least about 70%, 80%, or 90%, and even more preferably at least about 95%, 97%, 98%, 99% or more homologous to a nucleotide sequence shown in table I, application no. 17, columns 5 and 7, preferably shown in table I B, application no. 17, columns 5 and 7, or a portion thereof and preferably has above mentioned activity, in particular having a fine chemical increasing activity after increasing the activity or an activity of a gene product as shown in table II, application no. 17, column 3 by for example expression either in the cytsol or in an organelle such as a plastid or mitochondria or both, preferably in plastids.

[4630] The nucleic acid molecule of the invention comprises a nucleotide sequence which hybridizes, preferably hybridizes under stringent conditions as defined herein, to one of the nucleotide sequences shown in table I, application no. 17, columns 5 and 7, preferably shown in table I B, application no. 17, columns 5 and 7, or a portion thereof and encodes a protein having above-mentioned activity, e.g. conferring of a Gamma-aminobutyric acid and/or shikimate and/or putrescine, triglycerides, lipids, oils and/or fats containing Gamma-aminobutyric acid and/or shikimate and/or putrescine increase by for example expression either in the cytsol or in an organelle such as a plastid or mitochondria or both, preferably in plastids, and optionally, the activity of a protein as shown in table II, application no. 17, column 3.

[4631] Moreover, the nucleic acid molecule of the invention can comprise only a portion of the coding region of one of the sequences shown in table I, application no. 17, columns 5 and 7, preferably shown in table I B, application no. 17, columns 5 and 7, for example a fragment which can be used as a probe or primer or a fragment encoding a biologically active portion of the polypeptide of the present invention or of a polypeptide used in the process of the present invention, i.e. having above-mentioned activity, e.g. conferring an increase of the fine chemical if its activity is increased by for example expression either in the cytsol or in an organelle such as a plastid or mitochondria or both, preferably in plastids. The nucleotide sequences determined from the cloning of the present protein-according-to-the-invention-encoding gene allows for the generation of probes and primers designed for use in identifying and/or cloning its homologues in other cell types and organisms. The probe/primer typically comprises substantially purified oligonucleotide. The oligonucleotide typically comprises a region of nucleotide sequence that hybridizes under stringent conditions to at least about 12, 15 preferably about 20 or 25, more preferably about 40, 50 or 75 consecutive nucleotides of a sense strand of one of the sequences set forth, e.g., in table I, application no. 17, columns 5 and 7, an anti-sense sequence of one of the sequences, e.g., set forth in table I, application no. 17, columns 5 and 7, preferably shown in table I B, application no. 17, columns 5 and 7, or naturally occurring mutants thereof. Primers based on a nucleotide of invention can be used in PCR reactions to clone homologues of the polypeptide of the invention or of the polypeptide used in the process of the invention, e.g. as the primers described in the examples of the present invention, e.g. as shown in the examples. A PCR with the primers shown in table III, application no. 17, column 7 will result in a fragment of the gene product as shown in table II, column 3.

[4632] for the disclosure of this paragraph see paragraph [0164.0.0.0] above.

[4633] The nucleic acid molecule of the invention encodes a polypeptide or portion thereof which includes an amino acid sequence which is sufficiently homologous to the amino acid sequence shown in table II, application no. 17, columns 5 and 7 such that the protein or portion thereof maintains the ability to participate in the fine chemical production, in particular a Gamma-aminobutyric acid and/or shikimate and/or putrescine, triglycerides, lipids, oils and/or fats containing gamma-aminobutyric acid and/or putrescine and/or shikimate increasing the activity as mentioned above or as described in the examples in plants or microorganisms is comprised.

[4634] As used herein, the language “sufficiently homologous” refers to proteins or portions thereof which have amino acid sequences which include a minimum number of identical or equivalent amino acid residues (e.g., an amino acid residue which has a similar side chain as an amino acid residue in one of the sequences of the polypeptide of the present invention) to an amino acid sequence shown in table II, application no. 17, columns 5 and 7 such that the protein or portion thereof is able to participate in the increase of the fine chemical production. For examples having the activity of a protein as shown in table II, column 3 and as described herein.

[4635] In one embodiment, the nucleic acid molecule of the present invention comprises a nucleic acid that encodes a portion of the protein of the present invention. The protein is at least about 30%, 35%, 40%, 45% or 50%, preferably at least about 55%, 60%, 65% or 70%, and more preferably at least about 75%, 80%, 85%, 90%, 91%, 92%, 93% or 94% and most preferably at least about 95%, 97%, 98%, 99% or more homologous to an entire amino acid sequence of table II, application no. 17, columns 5 and 7 and having above-mentioned activity, e.g. conferring preferably the increase of the fine chemical by for example expression either in the cytsol or in an organelle such as a plastid or mitochondria or both, preferably in plastids.

[4636] for the disclosure of the paragraphs [0168.0.0.16] and [0169.0.0.16] see paragraphs [0168.0.0.0] and [0169.0.0.0] above.

[4637] The invention further relates to nucleic acid molecules that differ from one of the nucleotide sequences shown in table I, application no. 17, columns 5 and 7 (and portions thereof) due to degeneracy of the genetic code and thus encode a polypeptide of the present invention, in particular a polypeptide having above mentioned activity, e.g. conferring an increase in the fine chemical in a organism, e.g. as that polypeptides depicted by the sequence shown in table II, application no. 17, columns 5 and 7 or the functional homologues. Advantageously, the nucleic acid molecule of the invention comprises, or in an other embodiment has, a nucleotide sequence encoding a protein comprising, or in an other embodiment having, an amino acid sequence shown in table II, application no. 17, columns 5 and 7 or the functional homologues. In a still further embodiment, the nucleic acid molecule of the invention encodes a full length protein which is substantially homologous to an amino acid sequence shown in table II, application no. 17, columns 5 and 7 or the functional homologues. However, in a preferred embodiment, the nucleic acid molecule of the present invention does not consist of the sequence shown in table I, application no. 17, columns 5 and 7, preferably as indicated in table I A, application no. 17, columns 5 and 7. Preferably the nucleic acid molecule of the invention is a functional homologue or identical to a nucleic acid molecule indicated in table I B, application no. 17, columns 5 and 7.

[4638] for the disclosure of the paragraphs [0171.0.0.16] to [0173.0.0.16] see paragraphs [0171.0.0.0] to [0173.0.0.0] above.

[4639] Accordingly, in another embodiment, a nucleic acid molecule of the invention is at least 15, 20, 25 or 30 nucleotides in length. Preferably, it hybridizes under stringent conditions to a nucleic acid molecule comprising a nucleotide sequence of the nucleic acid molecule of the present invention or used in the process of the present invention, e.g. comprising the sequence shown in table I, application no. 17, columns 5 and 7. The nucleic acid molecule is preferably at least 20, 30, 50, 100, 250 or more nucleotides in length.

[4640] for the disclosure of this paragraph see paragraph [0175.0.0.0] above.

[4641] Preferably, nucleic acid molecule of the invention that hybridizes under stringent conditions to a sequence shown in table I, application no. 17, columns 5 and 7 corresponds to a naturally-occurring nucleic acid molecule of the invention. As used herein, a “naturally-occurring” nucleic acid molecule refers to an RNA or DNA molecule having a nucleotide sequence that occurs in nature (e.g., encodes a natural protein). Preferably, the nucleic acid molecule encodes a natural protein having abovementioned activity, e.g. conferring the fine chemical increase after increasing the expression or activity thereof or the activity of a protein of the invention or used in the process of the invention by for example expression the nucleic acid sequence of the gene product in the cytsol and/or in an organelle such as a plastid or mitochondria, preferably in plastids.

[4642] for the disclosure of this paragraph see paragraph [0177.0.0.0] above.

[4643] For example, nucleotide substitutions leading to amino acid substitutions at “non-essential” amino acid residues can be made in a sequence of the nucleic acid molecule of the invention or used in the process of the invention, e.g. shown in table I, application no. 17, columns 5 and 7.

[4644] for the disclosure of the paragraphs [0179.0.0.16] and [0180.0.0.16] see paragraphs [0179.0.0.0] and [0180.0.0.0] above.

[4645] Accordingly, the invention relates to nucleic acid molecules encoding a polypeptide having above-mentioned activity, e.g. conferring an increase in the fine chemical in an organisms or parts thereof by for example expression either in the cytsol or in an organelle such as a plastid or mitochondria or both, preferably in plastids that contain changes in amino acid residues that are not essential for said activity. Such polypeptides differ in amino acid sequence from a sequence contained in the sequences shown in table II, application no. 17, columns 5 and 7, preferably shown in table II A, application no. 17, columns 5 and 7 yet retain said activity described herein. The nucleic acid molecule can comprise a nucleotide sequence encoding a polypeptide, wherein the polypeptide comprises an amino acid sequence at least about 50% identical to an amino acid sequence shown in table II, application no. 17, columns 5 and 7, preferably shown in table II A, application no. 17, columns 5 and 7 and is capable of participation in the increase of production of the fine chemical after increasing its activity, e.g. its expression by for example expression either in the cytsol or in an organelle such as a plastid or mitochondria or both, preferably in plastids. Preferably, the protein encoded by the nucleic acid molecule is at least about 60% identical to the sequence shown in table II, application no. 17, columns 5 and 7, preferably shown in table II A, application no. 17, columns 5 and 7, more preferably at least about 70% identical to one of the sequences shown in table II, application no. 17, columns 5 and 7, preferably shown in table II A, application no. 17, columns 5 and 7, even more preferably at least about 80%, 90%, 95% homologous to the sequence shown in table II, application no. 17, columns 5 and 7, preferably shown in table II A, application no. 17, columns 5 and 7, and most preferably at least about 96%, 97%, 98%, or 99% identical to the sequence shown in table II, application no. 17, columns 5 and 7, preferably shown in table II A, application no. 17, columns 5 and 7.

[4646] for the disclosure of the paragraphs [0182.0.0.16] to [0188.0.0.16] see paragraphs [0182.0.0.0] to [0188.0.0.0] above.

[4647] Functional equivalents derived from one of the polypeptides as shown in table II, application no. 17, columns 5 and 7, preferably shown in table II B, application no. 17, columns 5 and 7 resp., according to the invention by substitution, insertion or deletion have at least 30%, 35%, 40%, 45% or 50%, preferably at least 55%, 60%, 65% or 70% by preference at least 80%, especially preferably at least 85% or 90%, 91%, 92%, 93% or 94%, very especially preferably at least 95%, 97%, 98% or 99% homology with one of the polypeptides as shown in table II, application no. 17, columns 5 and 7, preferably shown in table II B, application no. 17, columns 5 and 7 resp., according to the invention and are distinguished by essentially the same properties as the polypeptide as shown in table II, application no. 17, columns 5 and 7, preferably shown in table II B, application no. 17, columns 5 and 7.

[4648] Functional equivalents derived from the nucleic acid sequence as shown in table I, application no. 17, columns 5 and 7, preferably shown in table I B, application no. 17, columns 5 and 7 resp., according to the invention by substitution, insertion or deletion have at least 30%, 35%, 40%, 45% or 50%, preferably at least 55%, 60%, 65% or 70% by preference at least 80%, especially preferably at least 85% or 90%, 91%, 92%, 93% or 94%, very especially preferably at least 95%, 97%, 98% or 99% homology with one of the polypeptides as shown in table II, application no. 17, columns 5 and 7, preferably shown in table II B, application no. 17, columns 5 and 7 resp., according to the invention and encode polypeptides having essentially the same properties as the polypeptide as shown in table II, application no. 17, columns 5 and 7, preferably shown in table II B, application no. 17, columns 5 and 7.

[4649] for the disclosure of this paragraph see paragraph [0191.0.0.0] above.

[4650] A nucleic acid molecule encoding an homologous to a protein sequence of table II, application no. 17, columns 5 and 7, preferably shown in table II B, application no. 17, columns 5 and 7 resp., can be created by introducing one or more nucleotide substitutions, additions or deletions into a nucleotide sequence of the nucleic acid molecule of the present invention, in particular of table I, application no. 17, columns 5 and 7, preferably shown in table I B, application no. 17, columns 5 and 7 resp., such that one or more amino acid substitutions, additions or deletions are introduced into the encoded protein. Mutations can be introduced into the encoding sequences of table I, application no. 17, columns 5 and 7, preferably shown in table I B, application no. 17, columns 5 and 7 resp., by standard techniques, such as site-directed mutagenesis and PCR-mediated mutagenesis.

[4651] for the disclosure of the paragraphs [0193.0.0.16] to [0196.0.0.16] see paragraphs [0193.0.0.0] to [0196.0.0.0] above.

[4652] Homologues of the nucleic acid sequences used, with the sequence shown in table I, application no. 17, columns 5 and 7, preferably shown in table I B, application no. 17, columns 5 and 7, comprise also allelic variants with at least approximately 30%, 35%, 40% or 45% homology, by preference at least approximately 50%, 60% or 70%, more preferably at least approximately 90%, 91%, 92%, 93%, 94% or 95% and even more preferably at least approximately 96%, 97%, 98%, 99% or more homology with one of the nucleotide sequences shown or the abovementioned derived nucleic acid sequences or their homologues, derivatives or analogues or parts of these. Allelic variants encompass in particular functional variants which can be obtained by deletion, insertion or substitution of nucleotides from the sequences shown, preferably from table I, application no. 17, columns 5 and 7, preferably shown in table I B, application no. 17, columns 5 and 7, or from the derived nucleic acid sequences, the intention being, however, that the enzyme activity or the biological activity of the resulting proteins synthesized is advantageously retained or increased.

[4653] In one embodiment of the present invention, the nucleic acid molecule of the invention or used in the process of the invention comprises the sequences shown in any of the table I, application no. 17, columns 5 and 7, preferably shown in table I B, application no. 17, columns 5 and 7. It is preferred that the nucleic acid molecule comprises as little as possible other nucleotides not shown in any one of table I, application no. 17, columns 5 and 7, preferably shown in table I B, application no. 17, columns 5 and 7. In one embodiment, the nucleic acid molecule comprises less than 500, 400, 300, 200, 100, 90, 80, 70, 60, 50 or 40 further nucleotides. In a further embodiment, the nucleic acid molecule comprises less than 30, 20 or 10 further nucleotides. In one embodiment, the nucleic acid molecule use in the process of the invention is identical to the sequences shown in table I, application no. 17, columns 5 and 7, preferably shown in table I B, application no. 17, columns 5 and 7.

[4654] Also preferred is that the nucleic acid molecule used in the process of the invention encodes a polypeptide comprising the sequence shown in table II, application no. 17, columns 5 and 7, preferably shown in table II B, application no. 17, columns 5 and 7. In one embodiment, the nucleic acid molecule encodes less than 150, 130, 100, 80, 60, 50, 40 or 30 further amino acids. In a further embodiment, the encoded polypeptide comprises less than 20, 15, 10, 9, 8, 7, 6 or 5 further amino acids. In one embodiment used in the inventive process, the encoded polypeptide is identical to the sequences shown in table II, application no. 17, columns 5 and 7, preferably shown in table II B, application no. 17, columns 5 and 7.

[4655] In one embodiment, the nucleic acid molecule of the invention or used in the process encodes a polypeptide comprising the sequence shown in table II, application no. 17, columns 5 and 7, preferably shown in table II B, application no. 17, columns 5 and 7 comprises less than 100 further nucleotides. In a further embodiment, said nucleic acid molecule comprises less than 30 further nucleotides. In one embodiment, the nucleic acid molecule used in the process is identical to a coding sequence of the sequences shown in table I, application no. 17, columns 5 and 7, preferably shown in table I B, application no. 17, columns 5 and 7.

[4656] Polypeptides (=proteins), which still have the essential biological or enzymatic activity of the polypeptide of the present invention conferring an increase of the fine chemical i.e. whose activity is essentially not reduced, are polypeptides with at least 10% or 20%, by preference 30% or 40%, especially preferably 50% or 60%, very especially preferably 80% or 90 or more of the wild type biological activity or enzyme activity, advantageously, the activity is essentially not reduced in comparison with the activity of a polypeptide shown in table II, application no. 17, columns 5 and 7 expressed under identical conditions.

[4657] Homologues of table I, application no. 17, columns 5 and 7 or of the derived sequences of table II, application no. 17, columns 5 and 7 also mean truncated sequences, cDNA, single-stranded DNA or RNA of the coding and noncoding DNA sequence. Homologues of said sequences are also understood as meaning derivatives, which comprise noncoding regions such as, for example, UTRs, terminators, enhancers or promoter variants. The promoters upstream of the nucleotide sequences stated can be modified by one or more nucleotide substitution(s), insertion(s) and/or deletion(s) without, however, interfering with the functionality or activity either of the promoters, the open reading frame (=ORF) or with the 3′-regulatory region such as terminators or other 3′ regulatory regions, which are far away from the ORF. It is furthermore possible that the activity of the promoters is increased by modification of their sequence, or that they are replaced completely by more active promoters, even promoters from heterologous organisms. Appropriate promoters are known to the person skilled in the art and are mentioned herein below.

[4658] for the disclosure of the paragraphs [0203.0.0.16] to [0215.0.0.16] see paragraphs [0203.0.0.0] to [0215.0.0.0] above.

[4659] Accordingly, in one embodiment, the invention relates to a nucleic acid molecule, which comprises a nucleic acid molecule selected from the group consisting of:
[4660] a) nucleic acid molecule encoding, preferably at least the mature form, of the polypeptide shown in table II, application no. 17, columns 5 and 7, preferably in table II B, application no. 17, columns 5 and 7; or a fragment thereof conferring an increase in the amount of the fine chemical in an organism or a part thereof
[4661] b) nucleic acid molecule comprising, preferably at least the mature form, of the nucleic acid molecule shown in table I, application no. 17, columns 5 and 7, preferably in table I B, application no. 17, columns 5 and 7 or a fragment thereof conferring an increase in the amount of the fine chemical in an organism or a part thereof;
[4662] c) nucleic acid molecule whose sequence can be deduced from a polypeptide sequence encoded by a nucleic acid molecule of (a) or (b) as result of the degeneracy of the genetic code and conferring an increase in the amount of the fine chemical in an organism or a part thereof;
[4663] d) nucleic acid molecule encoding a polypeptide whose sequence has at least 50% identity with the amino acid sequence of the polypeptide encoded by the nucleic acid molecule of (a) to (c) and conferring an increase in the amount of the fine chemical in an organism or a part thereof;
[4664] e) nucleic acid molecule which hybridizes with a nucleic acid molecule of (a) to (c) under stringent hybridisation conditions and conferring an increase in the amount of the fine chemical in an organism or a part thereof;
[4665] f) nucleic acid molecule encoding a polypeptide, the polypeptide being derived by substituting, deleting and/or adding one or more amino acids of the amino acid sequence of the polypeptide encoded by the nucleic acid molecules (a) to (d), preferably to (a) to (c), and conferring an increase in the amount of the fine chemical in an organism or a part thereof;
[4666] g) nucleic acid molecule encoding a fragment or an epitope of a polypeptide which is encoded by one of the nucleic acid molecules of (a) to (e), preferably to (a) to (c) and conferring an increase in the amount of the fine chemical in an organism or a part thereof;
[4667] h) nucleic acid molecule comprising a nucleic acid molecule which is obtained by amplifying a cDNA library or a genomic library using the primers in table III, application no. 17, column 7 and conferring an increase in the amount of the fine chemical in an organism or a part thereof;
[4668] i) nucleic acid molecule encoding a polypeptide which is isolated, e.g. from a expression library, with the aid of monoclonal antibodies against a polypeptide encoded by one of the nucleic acid molecules of (a) to (g), preferably to (a) to (c) and conferring an increase in the amount of the fine chemical in an organism or a part thereof;
[4669] j) nucleic acid molecule which encodes a polypeptide comprising the consensus sequence shown in table IV, application no. 17, column 7 and conferring an increase in the amount of the fine chemical in an organism or a part thereof;
[4670] k) nucleic acid molecule encoding the amino acid sequence of a polypeptide encoding a domain of the polypeptide shown in table II, application no. 17, columns 5 and 7 and conferring an increase in the amount of the fine chemical in an organism or a part thereof; and
[4671] l) nucleic acid molecule which is obtainable by screening a suitable nucleic acid library under stringent hybridization conditions with a probe comprising one of the sequences of the nucleic acid molecule of (a) to (k) or with a fragment of at least 15 nt, preferably 20 nt, 30 nt, 50 nt, 100 nt, 200 nt or 500 nt of the nucleic acid molecule characterized in (a) to (h) or of the nucleic acid molecule shown in table I, application no. 17, columns 5 and 7 or a nucleic acid molecule encoding, preferably at least the mature form of, the polypeptide shown in table II, application no. 17, columns 5 and 7, and conferring an increase in the amount of the fine chemical in an organism or a part thereof; or which encompasses a sequence which is complementary thereto;
   whereby, preferably, the nucleic acid molecule according to (a) to (l) distinguishes over the sequence depicted in table I A and/or I B, application no. 17, columns 5 and 7 by one or more nucleotides. In one embodiment, the nucleic acid molecule of the invention does not consist of the sequence shown in table IA and/or I B, application no. 17, columns 5 and 7. In another embodiment, the nucleic acid molecule of the present invention is at least 30% identical and less than 100%, 99.999%, 99.99%, 99.9% or 99% identical to the sequence shown in table IA and/or I B, application no. 17, columns 5 and 7. In a further embodiment the nucleic acid molecule does not encode the polypeptide sequence shown in table II A and/or II B, application no. 17, columns 5 and 7. Accordingly, in one embodiment, the nucleic acid molecule of the present invention encodes in one embodiment a polypeptide which differs at least in one or more amino acids from the polypeptide shown in table II A and/or II B, application no. 17, columns 5 and 7 does not encode a protein of the sequence shown in table II A and/or II B, application no. 17, columns 5 and 7. Accordingly, in one embodiment, the protein encoded by a sequence of a nucleic acid according to (a) to (l) does not consist of the sequence shown in table IA and/or I B, application no. 17, columns 5 and 7. In a further embodiment, the protein of the present invention is at least 30% identical to protein sequence depicted in table II A and/or II B, application no. 17, columns 5 and 7 and less than 100%, preferably less than 99.999%, 99.99% or 99.9%, more preferably less than 99%, 985, 97%, 96% or 95% identical to the sequence shown in table II A and/or II B, application no. 17, columns 5 and 7.

[4672] for the disclosure of the paragraphs [0217.0.0.16] to [0226.0.0.16] see paragraphs [0217.0.0.0] to [0226.0.0.0] above.

[4673] In general, vector systems preferably also comprise further cis-regulatory regions such as promoters and terminators and/or selection markers by means of which suitably transformed organisms can be identified. While vir genes and T-DNA sequences are located on the same vector in the case of cointegrated vector systems, binary systems are based on at least two vectors, one of which bears vir genes, but no T-DNA, while a second one bears T-DNA, but no vir gene. Owing to this fact, the last-mentioned vectors are relatively small, easy to manipulate and capable of replication in E. coli and in Agrobacterium. These binary vectors include vectors from the series pBIB-HYG, pPZP, pBecks, pGreen. Those which are preferably used in accordance with the invention are Bin19, pBI101, pBinAR, pGPTV and pCAMBIA. An overview of binary vectors and their use is given by Hellens et al, Trends in Plant Science (2000) 5, 446-451. The vectors are preferably modified in such a manner, that they already contain the nucleic acid coding for the transitpeptide and that the nucleic acids of the invention, preferentially the nucleic acid sequences encoding the polypeptides shown in table II, application no. 17, columns 5 and 7 can be cloned 3″ prime to the transitpeptide encoding sequence, leading to a functional preprotein, which is directed to the plastids and which means that the mature protein fulfills its biological activity.

[4674] for the disclosure of the paragraphs [0228.0.0.16] to [0239.0.0.16] see paragraphs [0228.0.0.0] to [0239.0.0.0] above.

[4675] The abovementioned nucleic acid molecules can be cloned into the nucleic acid constructs or vectors according to the invention in combination together with further genes, or else different genes are introduced by transforming several nucleic acid constructs or vectors (including plasmids) into a host cell, advantageously into a plant cell or a microorganisms.

In addition to the sequence mentioned in Table I, application no. 17, columns 5 and 7 or its derivatives, it is advantageous additionally to express and/or mutate further genes in the organisms. It is also possible that the regulation of the natural genes has been modified advantageously so that the gene and/or its gene product is no longer subject to the regulatory mechanisms which exist in the organisms. This leads to an increased synthesis of the respective desired fine chemical since, for example, feedback regulations no longer exist to the same extent or not at all. In addition it might be advantageously to combine the sequences shown in Table I, application no. 17, columns 5 and 7 with genes which generally support or enhances to growth or yield of the target organism, for example genes which lead to faster growth rate of microorganisms or genes which produces stress-, pathogen, or herbicide resistant plants.

[4676] In a further embodiment of the process of the invention, therefore, organisms are grown, in which there is simultaneous overexpression of at least one nucleic acid or one of the genes which code for proteins directly or indirectly involved in the glutamic acid or phosphoenolpyruvate metabolism. Indirect overexpression might be brought about by the manipulation of the regulation of the endogenous gene, for example through promoter mutations or the expression of natural or artificial transcriptional regulators.

[4677] Further advantageous nucleic acid sequences which can be expressed in combination with the sequences used in the process and/or the abovementioned biosynthesis genes are the sequences encoding further genes of the aromatic amino acid pathway, such as tryptophan, phenylalanine or tyrosine.These genes can lead to an increased synthesis of the essential amino acids tryptophan, phenylalanine or tyrosine.

[4678] In a further advantageous embodiment of the process of the invention, the organisms used in the process are those in which simultaneously a gamma-aminobutyric acid and/or shikimate and/or putrescine degrading protein is attenuated, in particular by reducing the rate of expression of the corresponding gene.

[4679] The respective fine chemical produced can be isolated from the organism by methods with which the skilled worker are familiar, for example via extraction, salt precipitation, and/or different chromatography methods. The process according to the invention can be conducted batchwise, semibatchwise or continuously. The fine chemical and other xanthophylls produced by this process can be obtained by harvesting the organisms, either from the crop in which they grow, or from the field. This can be done via pressing or extraction of the plant parts.

[4680] Preferrably, the compound is a composition comprising the essentially pure gamma-aminobutyric acid and/or shikimate and/or putrescine or a recovered or isolated gamma-aminobutyric acid and/or shikimate and/or putrescine, in particular, the respective fine chemical, free or in protein- and/or lipid-bound form.

[4681] for the disclosure of the paragraphs [0243.0.0.16] to [0264.0.0.16] see paragraphs [0243.0.0.0] to [0264.0.0.0] above.

[4682] Other preferred sequences for use in operable linkage in gene expression constructs are targeting sequences, which are required for targeting the gene product into specific cell compartments (for a review, see Kermode, Crit. Rev. Plant Sci. 15, 4 (1996) 285-423 and references cited therein), for example into the vacuole, the nucleus, all types of plastids, such as amyloplasts, chloroplasts, chromoplasts, the extracellular space, the mitochondria, the endoplasmic reticulum, elaioplasts, peroxisomes, glycosomes, and other compartments of cells or extracellular preferred are sequences, which are involved in targeting to plastids as mentioned above. Sequences, which must be mentioned in this context are, in particular, the signal-peptide- or transit-peptide-encoding sequences which are known per se. For example, plastid-transit-peptide-encoding sequences enable the targeting of the expression product into the plastids of a plant cell. Targeting sequences are also known for eukaryotic and to a lower extent for prokaryotic organisms and can advantageously be operable linked with the nucleic acid molecule of the present invention as shown in table I, application no. 17, columns 5 and 7 and described herein to achieve an expression in one of said compartments or extracellular.

[4683] for the disclosure of the paragraphs [0266.0.0.16] to [0287.0.0.16] see paragraphs [0266.0.0.0] to [0287.0.0.0] above.

[4684] Accordingly, one embodiment of the invention relates to a vector where the nucleic acid molecule according to the invention is linked operably to regulatory sequences which permit the expression in a prokaryotic or eukaryotic or in a prokaryotic and eukaryotic host. A further preferred embodiment of the invention relates to a vector in which a nucleic acid sequence encoding one of the polypeptides shown in table II, application no. 17, columns 5 and 7 or their homologs is functionally linked to a plastidial targeting sequence. A further preferred embodiment of the invention relates to a vector in which a nucleic acid sequence encoding one of the polypeptides shown in table II, application no. 17, columns 5 and 7 or their homologs is functionally linked to a regulatory sequences which permit the expression in plastids.

[4685] for the disclosure of the paragraphs [0289.0.0.16] to [0296.0.0.16] see paragraphs [0289.0.0.0] to [0296.0.0.0] above.

[4686] Moreover, native polypeptide conferring the increase of the fine chemical in an organism or part thereof can be isolated from cells (e.g., endothelial cells), for example using the antibody of the present invention as described below, in particular, an anti-b1704, anti-b1868, anti-b2600, anti-b2601, anti-b2965, anti-YDR035W and/or anti-YOR350C protein antibody or an antibody against polypeptides as shown in table II, application no. 17, columns 5 and 7, which can be produced by standard techniques utilizing the polypeptide of the present invention or fragment thereof, i.e., the polypeptide of this invention. Preferred are monoclonal antibodies.

[4687] for the disclosure of this paragraph see paragraph [0298.0.0.0] above.

[4688] In one embodiment, the present invention relates to a polypeptide having the sequence shown in table II, application no. 17, columns 5 and 7 or as coded by the nucleic acid molecule shown in table I, application no. 17, columns 5 and 7 or functional homologues thereof.

[4689] In one advantageous embodiment, in the method of the present invention the activity of a polypeptide is increased comprising or consisting of the consensus sequence shown in table IV, application no. 17, columns 7 and in one another embodiment, the present invention relates to a polypeptide comprising or consisting of the consensus sequence shown in table IV, application no. 17, column 7 whereby 20 or less, preferably 15 or 10, preferably 9, 8, 7, or 6, more preferred 5 or 4, even more preferred 3, even more preferred 2, even more preferred 1, most preferred 0 of the amino acids positions indicated can be replaced by any amino acid.

[4690] for the disclosure of the paragraphs [0301.0.0.16] to [0304.0.0.16] see paragraphs [0301.0.0.0] to [0304.0.0.0] above.

[4691] In one advantageous embodiment, the method of the present invention comprises the increasing of a polypeptide comprising or consisting of plant or microorganism specific consensus sequences.

In one embodiment, said polypeptide of the invention distinguishes over the sequence shown in table II A and/or II B, application no. 17, columns 5 and 7 by one or more amino acids. In one embodiment, polypeptide distinguishes form the sequence shown in table II A and/or II B, application no. 17, columns 5 and 7 by more than 5, 6, 7, 8 or 9 amino acids, preferably by more than 10, 15, 20, 25 or 30 amino acids, even more preferred are more than 40, 50, or 60 amino acids and, preferably, the sequence of the polypeptide of the invention distinguishes from the sequence shown in table II A and/or II B, application no. 17, columns 5 and 7 by not more than 80% or 70% of the amino acids, preferably not more than 60% or 50%, more preferred not more than 40% or 30%, even more preferred not more than 20% or 10%. In an other embodiment, said polypeptide of the invention does not consist of the sequence shown in table II A and/or II B, application no. 17, columns 5 and 7.

[4692] for the disclosure of this paragraph see paragraph [0306.0.0.0] above.

[4693] In one embodiment, the invention relates to polypeptide conferring an increase in the fine chemical in an organism or part being encoded by the nucleic acid molecule of the invention or used in the process of the invention and having a sequence which distinguishes from the sequence as shown in table II A and/or II B, application no. 17, columns 5 and 7 by one or more amino acids. In another embodiment, said polypeptide of the invention does not consist of the sequence shown in table II A and/or II B, application no. 17, columns 5 and 7. In a further embodiment, said polypeptide of the present invention is less than 100%, 99.999%, 99.99%, 99.9% or 99% identical. In one embodiment, said polypeptide does not consist of the sequence encoded by the nucleic acid molecules shown in table I A and/or I B, application no. 17, columns 5 and 7.

[4694] In one embodiment, the present invention relates to a polypeptide having the activity of the protein as shown in table II A and/or II B, application no. 17, column 3, which distinguishes over the sequence depicted in table II A and/or II B, application no. 17, columns 5 and 7 by one or more amino acids, preferably by more than 5, 6, 7, 8 or 9 amino acids, preferably by more than 10, 15, 20, 25 or 30 amino acids, even more preferred are more than 40, 50, or 60 amino acids but even more preferred by less than 70% of the amino acids, more preferred by less than 50%, even more preferred my less than 30% or 25%, more preferred are 20% or 15%, even more preferred are less than 10%. In a further preferred embodiment the polypeptide of the invention takes the form of a preprotein consisting of a plastidial transitpeptide joint to a polypeptide having the activity of the protein as shown in table II A and/or II B, column 3, from which the transitpeptide is preferably cleaved off upon transport of the preprotein into the organelle for example into the plastid or mitochondria.

[4695] for the disclosure of the paragraphs [0309.0.0.16] to [0311.0.0.16] see paragraphs [0309.0.0.0] to [0311.0.0.0] above.

[4696] A polypeptide of the invention can participate in the process of the present invention. The polypeptide or a portion thereof comprises preferably an amino acid sequence, which is sufficiently homologous to an amino acid sequence shown in table II, application no. 17, columns 5 and 7.

[4697] Further, the polypeptide can have an amino acid sequence which is encoded by a nucleotide sequence which hybridizes, preferably hybridizes under stringent conditions as described above, to a nucleotide sequence of the nucleic acid molecule of the present invention. Accordingly, the polypeptide has an amino acid sequence which is encoded by a nucleotide sequence that is at least about 35%, 40%, 45%, 50%, 55%, 60%, 65% or 70%, preferably at least about 75%, 80%, 85% or 90, and more preferably at least about 91%, 92%, 93%, 94% or 95%, and even more preferably at least about 96%, 97%, 98%, 99% or more homologous to one of the amino acid sequences as shown in table II A and/or II B, application no. 17, columns 5 and 7. The preferred polypeptide of the present invention preferably possesses at least one of the activities according to the invention and described herein. A preferred polypeptide of the present invention includes an amino acid sequence encoded by a nucleotide sequence which hybridizes, preferably hybridizes under stringent conditions, to a nucleotide sequence of table I A and/or I B, application no. 17, columns 5 and 7 or which is homologous thereto, as defined above.

[4698] Accordingly the polypeptide of the present invention can vary from the sequences shown in table II A and/or II B, application no. 17, columns 5 and 7 in amino acid sequence due to natural variation or mutagenesis, as described in detail herein. Accordingly, the polypeptide comprise an amino acid sequence which is at least about 35%_{,} 40%, 45%, 50%, 55%, 60%, 65% or 70%, preferably at least about 75%, 80%, 85% or 90, and more preferably at least about 91%, 92%, 93%, 94% or 95%, and most preferably at least about 96%, 97%, 98%, 99% or more homologous to an entire amino acid sequence shown in table II A and/or II B, application no. 17, columns 5 and 7.

[4699] for the disclosure of this paragraph see paragraph [0315.0.0.0] above.

[4700] Biologically active portions of an polypeptide of the present invention include peptides comprising amino acid sequences derived from the amino acid sequence of the polypeptide of the present invention or used in the process of the present invention, e.g., the amino acid sequence shown in table II, application no. 17, columns 5 and 7 or the amino acid sequence of a protein homologous thereto, which include fewer amino acids than a full length polypeptide of the present invention or used in the process of the present invention or the full length protein which is homologous to an polypeptide of the present invention or used in the process of the present invention depicted herein, and exhibit at least one activity of polypeptide of the present invention or used in the process of the present invention.

[4701] for the disclosure of this paragraph see paragraph [0317.0.0.0] above.

[4702] Manipulation of the nucleic acid molecule of the invention may result in the production of a protein having differences from the wild-type protein as shown in table II, application no. 17, column 3. Differences shall mean at least one amino acid different from the sequences as shown in table II, application no. 17, column 3, preferably at least 2, 3, 4, 5, 6, 7, 8, 9 or 10 amino acids, more preferably at least 15, 20, 25, 30, 35, 40, 45 or 50 amino acids different from the sequences as shown in table II, application no. 17, column 3. These proteins may be improved in efficiency or activity, may be present in greater numbers in the cell than is usual, or may be decreased in efficiency or activity in relation to the wild type protein.

[4703] Any mutagenesis strategies for the polypeptide of the present invention or the polypeptide used in the process of the present invention to result in increasing said activity are not meant to be limiting; variations on these strategies will be readily apparent to one skilled in the art. Using such strategies, and incorporating the mechanisms disclosed herein, the nucleic acid molecule and polypeptide of the invention may be utilized to generate plants or parts thereof, expressing wildtype proteins or mutated proteins of the proteins as shown in table II, application no. 17, column 3. The nucleic acid molecules and polypeptide molecules of the invention are expressed such that the yield, production, and/or efficiency of production of a desired compound is improved.

[4704] for the disclosure of the paragraphs [0320.0.0.16] to [0322.0.0.16] see paragraphs [0320.0.0.0] to [0322.0.0.0] above.

[4705] In one embodiment, a protein (=polypeptide) as shown in table II, application no. 17, column 3 refers to a polypeptide having an amino acid sequence corresponding to the polypeptide of the invention or used in the process of the invention, whereas a “non-inventive protein or polypeptide” or “other polypeptide” refers to a polypeptide having an amino acid sequence corresponding to a protein which is not substantially homologous to a polypeptide of the invention, preferably which is not substantially homologous to a polypeptide or protein as shown in table II, application no. 17, column 3, e.g., a protein which does not confer the activity described herein and which is derived from the same or a different organism.

[4706] for the disclosure of the paragraphs [0324.0.0.16] to [0329.0.0.16] see paragraphs [0324.0.0.0] to [0329.0.0.0] above.

[4707] In an especially preferred embodiment, the polypeptide according to the invention furthermore also does not have the sequences of those proteins, which are encoded by the sequences shown in table II, application no. 17, columns 5 and 7.

[4708] for the disclosure of the paragraphs [0331.0.0.16] to [0346.0.0.16] see paragraphs [0331.0.0.0] to [0346.0.0.0] above.

[4709] Accordingly the present invention relates to any cell transgenic for any nucleic acid characterized as part of the invention, e.g. conferring the increase of the fine chemical in a cell or an organism or a part thereof, e.g. the nucleic acid molecule of the invention, the nucleic acid construct of the invention, the antisense molecule of the invention, the vector of the invention or a nucleic acid molecule encoding the polypeptide of the invention, e.g. encoding a polypeptide having an activity as the protein as shown in table II, application no. 17, column 3. Due to the above mentioned activity the fine chemical content in a cell or an organism is increased. For example, due to modulation or manipulation, the cellular activity is increased preferably in organelles such as plastids or mitochondria, e.g. due to an increased expression or specific activity or specific targeting of the subject matters of the invention in a cell or an organism or a part thereof especially in organelles such as plastids or mitochondria. Transgenic for a polypeptide having a protein or activity means herein that due to modulation or manipulation of the genome, the activity of protein as shown in table II, application no. 17, column 3 or a protein as shown in table II, application no. 17, column 3-like activity is increased in the cell or organism or part thereof especially in organelles such as plastids or mitochondria. Examples are described above in context with the process of the invention.

[4710] for the disclosure of this paragraph see paragraph [0348.0.0.0] above.

[4711] A naturally occurring expression cassette—for example the naturally occurring combination of the promoter of the gene encoding a protein as shown in table II, application no. 17, column 3 with the corresponding encoding gene—becomes a transgenic expression cassette when it is modified by non-natural, synthetic “artificial” methods such as, for example, mutagenization. Such methods have been described (U.S. Pat. No. 5,565,350; WO 00/15815; also see above).

[4712] for the disclosure of the paragraphs [0350.0.0.16] to [0358.0.0.16] see paragraphs [0350.0.0.0] to [0358.0.0.0] above.

[4713] Transgenic plants comprising the gamma-aminobutyric acid and/or putrescine and/or shikimate synthesized in the process according to the invention can be marketed directly without isolation of the compounds synthesized. In the process according to the invention, plants are understood as meaning all plant parts, plant organs such as leaf, stalk, root, tubers or seeds or propagation material or harvested material or the intact plant. In this context, the seed encompasses all parts of the seed such as the seed coats, epidermal cells, seed cells, endosperm or embryonic tissue. The gamma-aminobutyric acid and/or putrescine and/or shikimate produced in the process according to the invention may, however, also be isolated from the plant in the form of their free gamma-aminobutyric acid and/or putrescine and/or shikimate, salts esters, thioesters containing said produced gamma-aminobutyric acid and/or putrescine and/or shikimate or gamma-aminobutyric acid and/or putrescine and/or shikimate bound to proteins. Gamma-aminobutyric acid and/or putrescine and/or shikimate produced by this process can be isolated by harvesting the plants either from the culture in which they grow or from the field. This can be done for example via expressing, grinding and/or extraction of the plant parts, preferably the plant leaves, plant fruits, flowers and the like.

The invention furthermore relates to the use of the transgenic plants according to the invention and of the cells, cell cultures, parts—such as, for example, roots, leaves, flowers and the like as mentioned above in the case of transgenic plant organisms—derived from them, and to transgenic propagation material such as seeds or fruits and the like as mentioned above, for the production of foodstuffs or feeding stuffs, pharmaceuticals or fine chemicals.

[4714] for the disclosure of the paragraphs [0360.0.0.16] to [0362.0.0.16] see paragraphs [0360.0.0.0] to [0362.0.0.0] above.

[4715] In this manner, more than 50% by weight, advantageously more than 60% by weight, preferably more than 70% by weight, especially preferably more than 80% by weight, very especially preferably more than 90% by weight, of the gamma-aminobutyric acid and/or shikimate and/or putrescine produced in the process can be isolated. The resulting gamma-aminobutyric acid and/or shikimate and/or putrescine can, if appropriate, subsequently be further purified, if desired mixed with other active ingredients such as vitamins, amino acids, carbohydrates, antibiotics and the like, and, if appropriate, formulated.

[4716] In one embodiment, gamma-aminobutyric acid, putrescine and shikimate, preferably gamma-aminobutyric acid and putrescine are a mixture of the respective fine chemicals.

[4717] The gamma-aminobutyric acid and/or shikimate and/or putrescine obtained in the process are suitable as starting material for the synthesis of further products of value. For example, they can be used in combination with each other or alone for the production of pharmaceuticals, foodstuffs, animal feeds or cosmetics. Accordingly, the present invention relates a method for the production of pharmaceuticals, food stuff, animal feeds, nutrients or cosmetics comprising the steps of the process according to the invention, including the isolation of the gamma-aminobutyric acid and/or shikimate and/or putrescine composition produced or the respective fine chemical produced if desired and formulating the product with a pharmaceutical acceptable carrier or formulating the product in a form acceptable for an application in agriculture. A further embodiment according to the invention is the use of the gamma-aminobutyric acid and/or shikimate and/or putrescine produced in the process or of the transgenic organisms in animal feeds, foodstuffs, medicines, food supplements, cosmetics or pharmaceuticals or for the production of gamma-aminobutyric acid and/or shikimate and/or putrescine e.g. after isolation of the respective fine chemical or without, e.g. in situ, e.g in the organism used for the process for the production of the respective fine chemical.

Accordingly, the present invention relates a method for the production of pharmaceuticals, food stuff, animal feeds, nutrients or cosmetics comprising the steps of the process according to the invention, including the isolation of the shikimate composition produced or the respective fine chemical produced if desired and formulating the product with a pharmaceutical acceptable carrier or formulating the product in a form acceptable for an application in pharmacy. The production of shikimic acid by microbials has been already described in WO 02/29078, which is in incorporated herewith in its entirety, especially examples 1 and 2. In a preferred embodiment the shikimic acid is produced according to a process of the present invention in plants.
A further embodiment of the present invention is the use of the coding sequences according to table Nr. 17 b for the production of pharmaceuticals, especially of antivirals, even more preferred of antivirals against the avain influenza, especially preferred of Tamiflu®.
A further embodiment of the present invention is the use of shikimic acid produced by a method of the present invention for the production of pharmaceuticals, especially of antivirals, even more preferred of antivirals against the avain influenza, especially preferred of Tamiflu®.
A further embodiment of the present invention is the use of shikimic acid produced by a method of the present invention in plants for the production of pharmaceuticals, especially of antivirals, even more preferred of antivirals against the avain influenza, especially preferred of Tamiflu®.

[4718] for the disclosure of the paragraphs [0366.0.0.16] to [0369.0.0.16] see paragraphs [0366.0.0.0] to [0369.0.0.0] above.

[4719] The fermentation broths obtained in this way, containing in particular gamma-aminobutyric acid and/or shikimate and/or putrescine in mixtures with other organic acids, aminoacids, polypeptides or polysaccarides, normally have a dry matter content of from 1 to 70% by weight, preferably 7.5 to 25% by weight. Sugar-limited fermentation is additionally advantageous, e.g. at the end, for example over at least 30% of the fermentation time. This means that the concentration of utilizable sugar in the fermentation medium is kept at, or reduced to, 0 to 10 g/l, preferably to 0 to 3 g/l during this time. The fermentation broth is then processed further. Depending on requirements, the biomass can be removed or isolated entirely or partly by separation methods, such as, for example, centrifugation, filtration, decantation, coagulation/flocculation or a combination of these methods, from the fermentation broth or left completely in it.

The fermentation broth can then be thickened or concentrated by known methods, such as, for example, with the aid of a rotary evaporator, thin-film evaporator, falling film evaporator, by reverse osmosis or by nanofiltration. This concentrated fermentation broth can then be worked up by freeze-drying, spray drying, spray granulation or by other processes.

[4720] Accordingly, it is possible to purify the gamma-aminobutyric acid and/or shikimate and/or putrescine produced according to the invention further. For this purpose, the product-containing compositions subjected for example to separation via e.g. an open column chromatography or HPLC in which case the desired product or the impurities are retained wholly or partly on the chromatography resin. These chromatography steps can be repeated if necessary, using the same or different chromatography resins. The skilled worker is familiar with the choice of suitable chromatography resins and their most effective use.

[4721] for the disclosure of the paragraphs [0372.0.0.16] to [0376.0.0.16], [0376.1.0.16] and [0377.0.0.16] see paragraphs [0372.0.0.0] to [0376.0.0.0], [0376.1.0.0] and [0377.0.0.0] above.

[4722] In one embodiment, the present invention relates to a method for the identification of a gene product conferring an increase in the fine chemical production in a cell, comprising the following steps:
[4723] (a) contacting e.g. hybridising, the nucleic acid molecules of a sample, e.g. cells, tissues, plants or microorganisms or a nucleic acid library, which can contain a candidate gene encoding a gene product conferring an increase in the fine chemical after expression, with the nucleic acid molecule of the present invention;
[4724] (b) identifying the nucleic acid molecules, which hybridize under relaxed stringent conditions with the nucleic acid molecule of the present invention in particular to the nucleic acid molecule sequence shown in table I, application no. 17, columns 5 and 7, preferably in table I B, application no. 17, columns 5 and 7, and, optionally, isolating the full length cDNA clone or complete genomic clone;
[4725] (c) introducing the candidate nucleic acid molecules in host cells, preferably in a plant cell or a microorganism, appropriate for producing the fine chemical;
[4726] (d) expressing the identified nucleic acid molecules in the host cells;
[4727] (e) assaying the fine chemical level in the host cells; and (f) identifying the nucleic acid molecule and its gene product which expression confers an increase in the the fine chemical level in the host cell after expression compared to the wild type.

[4728] for the disclosure of the paragraphs [0379.0.0.16] to [0383.0.0.16] see paragraphs [0379.0.0.0] to [0383.0.0.0] above.

[4729] The screen for a gene product or an agonist conferring an increase in the fine chemical production can be performed by growth of an organism for example a microorganism in the presence of growth reducing amounts of an inhibitor of the synthesis of the fine chemical. Better growth, eg higher dividing rate or high dry mass in comparison to the control under such conditions would identify a gene or gene product or an agonist conferring an increase in fine chemical production.

One can think to screen for increased fine chemical production by for example resistance to drugs blocking fine chemical synthesis and looking whether this effect is dependent on the proteins as shown in table II, application no. 17, column 3, eg comparing near identical organisms with low and high activity of the proteins as shown in table II, application no. 17, column 3.

[4730] for the disclosure of the paragraphs [0385.0.0.16] to [0404.0.0.16] see paragraphs [0385.0.0.0] to [0404.0.0.0] above.

[4731] Accordingly, the nucleic acid of the invention, the polypeptide of the invention, the nucleic acid construct of the invention, the organisms, the host cell, the microorganisms, the plant, plant tissue, plant cell, or the part thereof the invention, the vector of the invention, the agonist identified with the method of the invention, the nucleic acid molecule identified with the method of the present invention, can be used for the production of the respective fine chemical or of the respective fine chemical and one or more other non-protein amino acids or organic acids. Accordingly, the nucleic acid of the invention, or the nucleic acid molecule identified with the method of the present invention or the complement sequences thereof, the polypeptide of the invention, the nucleic acid construct of the invention, the organisms, the host cell, the microorganisms, the plant, plant tissue, plant cell, or the part thereof the invention, the vector of the invention, the antagonist identified with the method of the invention, the antibody of the present invention, the antisense molecule of the present invention, can be used for the reduction of the respective fine chemical in a organism or part thereof, e.g. in a cell.

[4732] for the disclosure of the paragraphs [0406.0.0.16] to [0435.0.0.16] see paragraphs [0406.0.0.0] to [0435.0.0.0] above.

[4733] Production of gamma-aminobutyric acid and/or shikimate and/or putrescine, salts, esters, thioesters containing gamma-aminobutyric acid and/or shikimate and/or putrescine in Chlamydomonas reinhardtii

The gamma-aminobutyric acid and/or shikimate and/or putrescine production can be analysed as mentioned herein.
The proteins and nucleic acids can be analysed as mentioned below.

[4734] for the disclosure of the paragraphs [0437.0.0.16] and [0438.0.0.16] see paragraphs [0437.0.0.0] and [0438.0.0.0] above.

### Example 9

### Analysis of the Effect of the Nucleic Acid Molecule on the Production of Gamma-Aminobutyric Acid and/or Shikimate and/or Putrescine

[4735] The effect of the genetic modification of plants or algae on the production of a desired compound (such as gamma-aminobutyric acid and/or shikimate and/or putrescine) can be determined by growing the modified plant under suitable conditions (such as those described above) and analyzing the medium and/or the cellular components for the elevated production of desired product (i.e. of the gamma-aminobutyric acid and/or shikimate and/or putrescine). These analytical techniques are known to the skilled worker and comprise spectroscopy, thin-layer chromatography, various types of staining methods, enzymatic and microbiological methods and analytical chromatography such as high-performance liquid chromatography (see, for example, Ullman, Encyclopedia of Industrial Chemistry, Vol. A2, p. 89-90 and p. 443-613, VCH: Weinheim (1985); Fallon, A., et al., (1987) “Applications of HPLC in Biochemistry” in: Laboratory Techniques in Biochemistry and Molecular Biology, Vol. 17; Rehm et al. (1993) Biotechnology, Vol. 3, Chapter III: “Product recovery and purification”, p. 469-714, VCH: Weinheim; Belter, P. A., et al. (1988) Bioseparations: downstream processing for Biotechnology, John Wiley and Sons; Kennedy, J. F., and Cabral, J. M. S. (1992) Recovery processes for biological Materials, John Wiley and Sons; Shaeiwitz, J. A., and Henry, J. D. (1988) Biochemical Separations, in: Ullmann's Encyclopedia of Industrial Chemistry, Vol. B3; Chapter 11, p. 1-27, VCH: Weinheim; and Dechow, F. J. (1989) Separation and purification techniques in biotechnology, Noyes Publications) or the methods mentioned above.

[4736] for the disclosure of this paragraph see [0441.0.0.0] above.

[4737] Purification of aminobutyric acid and/or putrescine and/or shikimate:

[4738] Abbreviations; GC-MS, gas liquid chromatography/mass spectrometry; TLC, thin-layer chromatography.

The unambiguous detection for the presence of aminobutyric acid and/or putrescine and/or shikimate can be obtained by analyzing recombinant organisms using analytical standard methods: GC, GC-MS, LC, LC-MSMS or TLC, as described. The total amount produced in the organism for example in yeasts used in the inventive process can be analysed for example according to the following procedure:
The material such as yeasts, E. coli or plants to be analyzed can be disrupted by sonication, grinding in a glass mill, liquid nitrogen and grinding or via other applicable methods.
Plant material is initially homogenized mechanically by comminuting in a pestle and mortar to make it more amenable to extraction.
A typical sample pretreatment consists of a total extraction using such polar organic solvents as acetone or alcohols as methanol, or ethers, saponification, partition between phases, separation of non-polar epiphase from more polar hypophasic derivatives and chromatography.
For analysis, solvent delivery and aliquot removal can be accomplished with a robotic system comprising a single injector valve Gilson 232XL and a 402 2S1V diluter [Gilson, Inc. USA, 3000 W. Beltline Highway, Middleton, Wis.]. For saponification, 3 ml of 50% potassium hydroxide hydro-ethanolic solution (4 water-1 ethanol) can be added to each vial, followed by the addition of 3 ml of octanol. The saponification treatment can be conducted at room temperature with vials maintained on an IKA HS 501 horizontal shaker [Labworld-online, Inc., Wilmington, N.C.] for fifteen hours at 250 movements/minute, followed by a stationary phase of approximately one hour.
Following saponification, the supernatant can be diluted with 0.17 ml of methanol. The addition of methanol can be conducted under pressure to ensure sample homogeneity. Using a 0.25 ml syringe, a 0.1 ml aliquot can be removed and transferred to HPLC vials for analysis.
For HPLC analysis, a Hewlett Packard 1100 HPLC, complete with a quaternary pump, vacuum degassing system, six-way injection valve, temperature regulated autosampler, column oven and Photodiode Array detector can be used [Agilent Technologies available through Ultra Scientific Inc., 250 Smith Street, North Kingstown, R.I.]. The column can be a Waters YMC30, 5-micron, 4.6×250 mm with a guard column of the same material [Waters, 34 Maple Street, Milford, Mass.]. The solvents for the mobile phase can be 81 methanol: 4 water: 15 tetrahydrofuran (THF) stabilized with 0.2% BHT (2,6-di-tert-butyl-4-methylphenol). Injections were 20 μl. Separation can be isocratic at 30° C. with a flow rate of 1.7 ml/minute. The peak responses can be measured by absorbance at 447 nm.

[4739] If required and desired, further chromatography steps with a suitable resin may follow. Advantageously, the aminobutyric acid and/or putrescine and/or shikimate can be further purified with a so-called RTHPLC. As eluent acetonitrile/water or chloroform/acetonitrile mixtures can be used. If necessary, these chromatography steps may be repeated, using identical or other chromatography resins. The skilled worker is familiar with the selection of suitable chromatography resin and the most effective use for a particular molecule to be purified.

[4740] %

[4741] for the disclosure of the paragraphs [0446.0.0.16] to [0496.0.0.16] see paragraphs [0446.0.0.0] to [0496.0.0.0] above.

[4742] As an alternative, the gamma-aminobutyric acid and/or shikimate and/or putrescine can be detected advantageously via HPLC separation in combination with NMR techniques for the structure clarification or in combination with mass spectrometry in case of small sample volumes as described for example by Karsten Putzbach (Theses, 2005 at the Eberhard-Karls-University of Tuebingen, Department of Chemistry and Pharmacy) or Mueller, H. Z. Lebensm. Unters. Forsch. A 204, 1997: 88-94.

[4743] As an alternative, gamma-aminobutyric acid can be detected as described in Haak and Reineke, Antimicrob. Agents Chemother. 19(3): 493(1981)

As an alternative, shikimate can be detected as described in Gould and Erickson, J Antibiot 41(5), 688-9 (1988).
As an alternative, putrescine can be detected as described in Endo Y., Anal Biochem. 89(1):235-46(1978).
The results of the different plant analyses can be seen from the table, which follows:

TABLE VI

| ORF | Metabolite | Method | Min | Max |
|---|---|---|---|---|
| b1704 | Shikimic acid | GC | 2.54 | 66.93 |
| b1868 | Shikimic acid | GC | 1.20 | 2.08 |
| b2600 | Shikimic acid | GC | 1.14 | 1.32 |
| b2601 | Shikimic acid | GC | 1.42 | 3.78 |
| b2965 | Putrescine | GC | 73.24 | 1327.45 |
| b2965 | gamma-Aminobutyric | GC | 3.53 | 9.30 |
| | acid (GABA) | | | |
| YDR035W | Shikimic acid | GC | 1.26 | 2.74 |
| YOR350C | Shikimic acid | GC | 1.14 | 1.15 |

[4744] for the disclosure of the paragraphs [0499.0.0.16] and [0500.0.0.16] see paragraphs [0499.0.0.0] and [0500.0.0.0] above.

### Example 15a

### Engineering Ryegrass Plants by Over-Expressing b1704, b1868, b2600, b2601, b2965, YDR035W or YOR350C from Escherichia coli or Homologs of b1704, b1868, b2600, b2601, b2965, YDR035W or YOR350C from Other Organisms

[4745] for the disclosure of the paragraphs [0502.0.0.16] to [0508.0.0.16] see paragraphs [0502.0.0.0] to [0508.0.0.0] above.

### Example 15b

### Engineering Soybean Plants by Over-Expressing b1704, b1868, b2600, b2601, b2965, YDR035W or YOR350C from Escherichia coli or Homologs of b1704, b1868, b2600, b2601, b2965, YDR035W or YOR350C from Other Organisms

[4746] for the disclosure of the paragraphs [0510.0.0.16] to [0513.0.0.16] see paragraphs [0510.0.0.0] to [0513.0.0.0] above.

### Example 15c

### Engineering Corn Plants by Over-Expressing b1704, b1868, b2600, b2601, b2965, YDR035W or YOR350C from Escherichia coli or Homologs of b1704, b1868, b2600, b2601, b2965, YDR035W or YOR350C from Other Organisms

[4747] for the disclosure of the paragraphs [0515.0.0.16] to [0540.0.0.16] see paragraphs [0515.0.0.0] to [0540.0.0.0] above.

### Example 15d

### Engineering Wheat Plants by Over-Expressing b1704, b1868, b2600, b2601, b2965, YDR035W or YOR350C from Escherichia coli or Homologs of b1704, b1868, b2600, b2601, b2965, YDR035W or YOR350C from Other Organisms

[4748] for the disclosure of the paragraphs [0542.0.0.16] to [0544.0.0.16] see paragraphs [0542.0.0.0] to [0544.0.0.0] above.

### Example 15e

### Engineering Rapeseed/Canola Plants by Over-Expressing b1704, b1868, b2600, b2601, b2965, YDR035W or YOR350C from Escherichia coli or Homologs of b1704, b1868, b2600, b2601, b2965, YDR035W or YOR350C from Other Organisms

[4749] for the disclosure of the paragraphs [0546.0.0.16] to [0549.0.0.16] see paragraphs [0544.0.0.0] to [0549.0.0.0] above.

### Example 15f

### Engineering Alfalfa Plants by Over-Expressing b1704, b1868, b2600, b2601, b2965, YDR035W or YOR350C from Escherichia coli or Homologs of b1704, b1868, b2600, b2601, b2965, YDR035W or YOR350C from Other Organisms

[4750] for the disclosure of the paragraphs [0551.0.0.16] to [0554.0.0.16] see paragraphs [0551.0.0.0] to [0554.0.0.0] above.

[4751] Zea mays plants were engineered as described in Example 15c.

Metabolic results were either obtained from regenerated primary transformants (T0) or from the following progeny generation (T1) in comparison to appropriate control plants. The results are shown in table VII as minimal (MIN) or maximal changes (MAX) in the respective fine chemical (column “metabolite”) in genetically modified corn plants expressing the sequence listed in column 1 (ORF):

TABLE VII

| ORF | Metabolite | Min | Max |
|---|---|---|---|
| b1704 | Shikimate | 2.58 | 4.32 |
| b2601 | Shikimate | 3.02 | 13.69 |
| YDR035W | Shikimate | 2.94 | 3.15 |

Table VII describes the increase in shikimate in genetically modified corn plants expressing the Escherichia coli nucleic acid sequences b2601, b1704 or Saccharomyces cerevisiae nucleic acid sequence YDR035W.
In case the activity of the Saccharomyces cerevisiae protein YDR035W or a protein with an 3-deoxy-D-arabino-heptulosonate 7-phosphate (DAHP) synthase activity or its homolog, is increased in corn plants, preferably, an increase of the fine chemical shikimate between 194% and 215% or more is conferred.
In case the activity of the Escherichia coli protein b2601 or a protein with an 3-deoxy-D-arabinoheptulosonate-7-phosphate (DAHP) synthase activity or its homolog, is increased in corn plants, preferably, an increase of the fine chemical shikimate between 202% and 1269% or more is conferred.
In case the activity of the Escherichia coli protein b1704 or a protein with an 3-deoxy-D-arabinoheptulosonate-7-phosphate synthase (DAHP synthetase), tryptophan-repressible activity or its homolog, is increased in corn plants, preferably, an increase of the fine chemical shikimate between 158% and 332% or more is conferred.

[4752] for the disclosure of this paragraph see [0554.2.0.0] above.

[4753] for the disclosure of this paragraph see [0555.0.0.0] above.

[4754] for the disclosure of this paragraph see [0001.0.0.0].

[4755] Coenzymes are molecules that cooperate in the catalytic action of an enzyme. Like enzymes, coenzymes are not irreversibly changed during catalysis; they are either unmodified or regenerated. Each kind of coenzyme has a particular chemical function. Coenzymes may either be attached by covalent bonds to a particular enzyme or exist freely in solution, but in either case they participate intimately in the chemical reactions catalyzed by the enzyme.

[4756] Coenzyme Q10 (CoQ 10) or ubiquinone is essentially a vitamin or vitamin-like substance. Disagreements on nomenclature notwithstanding, vitamins are defined as organic compounds essential in minute amounts for normal body function acting as coenzymes or precursors to coenzymes. Coenzyme Q10 or CoQ10 belongs to a family of substances called ubiquinones. Ubiquinones, also known as coenzymes Q and mitoquinones, are lipophilic, water-insoluble substances involved in electron transport and energy production in mitochondria. The basic structure of ubiquinones consists of a benzoquinone “head” and a terpinoid “tail.” The “head” structure participates in the redox activity of the electron transport chain. The major difference among the various coenzymes Q is in the number of isoprenoid units (5-carbon structures) in the “tail.” Coenzymes Q contain one to 12 isoprenoid units in the “tail”; 10 isoprenoid units are common in animals. Coenzymes Q occur in the majority of aerobic organisms, from bacteria to plants and animals. Two numbering systems exist for designation of the number of isoprenoid units in the terpinoid “tail”: coenzyme Qn and coenzyme Q(x). N refers to the number of isoprenoid side chains, and x refers to the number of carbons in the terpinoid “tail” and can be any multiple of five. Thus, coenzyme Q10 refers to a coenzyme Q having 10 isoprenoid units in the “tail.” Since each isoprenoid unit has five carbons, coenzyme Q10 can also be designated coenzyme Q(50). The structures of coenzymes Q are analogous to those of vitamin K2. Coenzyme Q10 is also known as Coenzyme Q(50), CoQ10, CoQ(50), ubiquinone (50), ubiquinol-10 and ubidecarerone.

They are present naturally in foods and sometimes are also synthesized in the body. CoQ10 likewise is found in small amounts in a wide variety of foods and is synthesized in all tissues. The biosynthesis of CoQ10 from the amino acid tyrosine is a multistage process requiring at least eight vitamins and several trace elements. Coenzymes are cofactors upon which the comparatively large and complex enzymes absolutely depend for their function. Coenzyme Q10 is the coenzyme for at least three mitochondrial enzymes (complexes I, II and III) as well as enzymes in other parts of the cell. Mitochondrial enzymes of the oxidative phosphorylation pathway are essential for the production of the high-energy phosphate, adenosine triphosphate (ATP), upon which all cellular functions depend. The electron and proton transfer functions of the quinone ring are of fundamental importance to all life forms; ubiquinone in the mitochondria of animals, plastoquinone in the chloroplast of plants, and menaquinone in bacteria. The term “bioenergetics” has been used to describe the field of biochemistry looking specifically at cellular energy production. In the related field of free radical chemistry, CoQ10 has been studied in its reduced form as a potent antioxidant. The bioenergetics and free radical chemistry of CoQ10 are reviewed in Gian Paolo Littarru's book, Energy and Defense, published in 1994. The precise chemical structure of CoQ10 is 2,3 dimethoxy-5 methyl-6 decaprenyl benzoquinone

[4757] Discovered in 1957, CoQ-10 is also called ubiquinone because it belongs to a class of compounds called quinones, and because it's ubiquitous in living organisms, especially in the heart, liver, and kidneys. It plays a crucial role in producing energy in cells. And it acts as a powerful antioxidant, meaning that it helps neutralize cell-damaging molecules called free radicals. Manufactured by all cells in the body, CoQ-10 is also found in small amounts in foods, notably meat and fish. By the mid1970's, the industrial technology to produce pure CoQ10 in quantities sufficient for larger clinical trials was established. Principally CoQ10 can be isolated from microorganisms or plants or algae; in particular mitochondria are a common source for CoQ10. Alternatively, they are obtained advantageously from animals or fish.

[4758] Since the actions of supplemental CoQ10 have yet to be clarified, the mechanism of these actions is a matter of speculation. However, much is known about the biochemistry of CoQ10. CoQ10 is an essential cofactor in the mitochondrial electron transport chain, where it accepts electrons from complex I and II, an activity that is vital for the production of ATP. CoQ10 has antioxidant activity in mitochondria and cellular membranes, protecting against peroxidation of lipid membranes. It also inhibits the oxidation of LDL-cholesterol. LDL-cholesterol oxidation is believed to play a significant role in the pathogenesis of atherosclerosis. CoQ10 is biosynthesized in the body and shares a common synthetic pathway with cholesterol.

CoQ10 levels decrease with aging in humans. Why this occurs is not known but may be due to decreased synthesis and/or increased lipid peroxidation which occurs with aging. Significantly decreased levels of CoQ10 have been noted in a wide variety of diseases in both animal and human studies. CoQ10 deficiency may be caused by insufficient dietary CoQ10, impairment in CoQ10 biosynthesis, excessive utilization of CoQ10 by the body, or any combination of the three. Decreased dietary intake is presumed in chronic malnutrition and cachexia.

[4759] The relative contribution of CoQ10 biosynthesis versus dietary CoQ10 is under investigation. Karl Folkers takes the position that the dominant source of CoQ10 in man is biosynthesis. This complex, 17 step process, requiring at least seven vitamins (vitamin B2-riboflavin, vitamin B3-niacinamide, vitamin B6, folic acid, vitamin B12, vitamin C, and pantothenic acid) and several trace elements, is, by its nature, highly vulnerable. Karl Folkers argues that suboptimal nutrient intake in man is almost universal and that there is subsequent secondary impairment in CoQ10 biosynthesis. This would mean that average or “normal” levels of CoQ10 are really suboptimal and the very low levels observed in advanced disease states represent only the tip of a deficiency “ice berg”.

Supplemental CoQ10 may have cardioprotective, cytoprotective and neuroprotective activities. There are claims that it has positive effects in cancer, muscular dystrophy and immune dysfunction. Similarly, it may inhibit obesity or enhance athletic performance.

[4760] HMG-CoA reductase inhibitors used to treat elevated blood cholesterol levels by blocking cholesterol biosynthesis also block CoQ10 biosynthesis. The resulting lowering of blood CoQ10 level is due to the partially shared biosynthetic pathway of CoQ10 and cholesterol. In patients with heart failure this is more than a laboratory observation. It has a significant harmful effect which can be negated by oral CoQ10 supplementation.

Increased body consumption of CoQ10 is the presumed cause of low blood CoQ10 levels seen in excessive exertion, hypermetabolism, and acute shock states. It is likely that all three mechanisms (insufficient dietary CoQ10, impaired CoQ10 biosynthesis, and excessive utilization of CoQ10) are operable to varying degrees in most cases of observed CoQ10 deficiency.

[4761] In nature, Coenzymes Q0 to Q9 are found as well. E.g. Coenzyme Q9 is a derivative of CoQ10 found e.g. in the chloroplast of plants. Coenzyme Q9 has a shorter aliphatic group bound to the ring structure. Due to the high structural homology of Coenzymes Q0 to Q9 are expected to provide the same or very similar activities as CoQ10 in cells or organisms. However, Matsura et al., Biochim Biophys Acta, 1992, 1123 (3) pp. 309-15 concluded from their study that CoQ9 constantly acts as a potential antioxidant in hepatocytes whereas CoQ10 manly exhibit its antioxidant activity in cells containing CoQ10 as the predominate CoQ homolog. Coenzyme Q10 is actual a very common ingredient in different types of cosmetics, due to its protective role against radicals and its predicted function in skin tautening.

[4762] Thus, Coenzymes, in particular CoQ10 or CoQ9 can be used in a lot of different applications, for example in cosmetics, pharmaceuticals and in feed and food.

[4763] Therefore improving the productivity of said Coenzymes and improving the quality of cosmetics, pharmaceuticals, foodstuffs and animal feeds, in particular of nutrition supplements, is an important task of the different industries.

[4764] To ensure a high productivity of said Coenzymes in plants or microorganism, it is necessary to manipulate the natural biosynthesis of said Coenzymes in said organisms.

[4765] Accordingly, there is still a great demand for new and more suitable genes which encode enzymes or other regulators which participate in the biosynthesis of said Coenzymes and make it possible to produce said Coenzymes specifically on an industrial scale without that unwanted byproducts are formed. In the selection of genes for biosynthesis two characteristics above all are particularly important. On the one hand, there is as ever a need for improved processes for obtaining the highest possible contents of said Coenzymes on the other hand as less as possible byproducts should be produced in the production process.

[4766] for the disclosure of this paragraph see [0013.0.0.0] above.

[4767] Accordingly, in a first embodiment, the invention relates to a process for the production of a fine chemical, whereby the fine chemical is Coenzyme Q9 and/or Coenzyme Q10 in free or bound form for example bound to lipids, oils or fatty acids. Accordingly, in the present invention, the term “the fine chemical” as used herein relates to “Coenzyme Q9 and/or Coenzyme Q10 in free or bound form”. Further, the term “the fine chemicals” as used herein also relates to fine chemicals comprising Coenzyme Q9 and/or Coenzyme Q10 in free or bound form.

[4768] In one embodiment, the term “Coenzyme Q9 and/or Coenzyme Q10 in free or bound form”, “the fine chemical” or “the respective fine chemical” means at least one chemical compound selected from the group consisting of Coenzyme Q9, Coenzyme Q10 or mixtures thereof in free or bound form. Throughout the specification the term “the fine chemical” or “the respective fine chemical” means a compound selected from the group Coenzyme Q9, Coenzyme Q10 or mixtures thereof in free form or bound to other compounds such as protein(s) such as enzyme(s), peptide(s), polypeptide(s), membranes or part thereof, or lipids, oils, waxes or fatty acids or mixtures thereof or in compositions with lipids.

In one embodiment, the term “the fine chemical” and the term “the respective fine chemical” mean at least one chemical compound with an activity of the abovementioned fine chemical.
In one embodiment, the term “the fine chemical” and the term “the respective fine chemical” mean at least one chemical compound with an activity of the above mentioned fine chemical

[4769] Accordingly, the present invention relates to a process for the production of Coenzyme Q9 and/or Coenzyme Q10, which comprises
[4770] (a) increasing or generating the activity of a protein as shown in table II, application no. 18, column 3 encoded by the nucleic acid sequences as shown in table I, application no. 18, column 5, in an organelle of a microorganism or plant, or
[4771] (b) increasing or generating the activity of a protein as shown in table II, application no. 18, column 3 encoded by the nucleic acid sequences as shown in table I, application no. 18, column 5 in the plastid of a microorganism or plant, or in one or more parts thereof; and
[4772] (c) growing the organism under conditions which permit the production of the fine chemical, thus, Coenzyme Q9 and/or Coenzyme Q10 or fine chemicals comprising Coenzyme Q9 and/or Coenzyme Q10, are produced in said organism or in the culture medium surrounding the organism.

[4773] Accordingly, the term “the fine chemical” means “Coenzyme Q9 and/or Coenzyme Q10” in relation to all sequences listed in table I, application no. 18, columns 3 and 7 or homologs thereof. Accordingly, the term “the fine chemical” can mean “Coenzyme Q9 and/or Coenzyme Q10”, owing to circumstances and the context. Preferably the term “the fine chemical” means “Coenzyme Q9 and/or Coenzyme Q10”. In order to illustrate that the meaning of the term “the respective fine chemical” means “Coenzyme Q9 and/or Coenzyme Q10 in free or bound form” owing to the sequences listed in the context the term “the respective fine chemical” is also used.

[4774] In another embodiment the present invention is related to a process for the production of Coenzyme Q9 and/or Coenzyme Q10, which comprises
[4775] (a) increasing or generating the activity of a protein as shown in table II, application no. 18, column 3 encoded by the nucleic acid sequences as shown in table I, application no. 18, column 5, in an organelle of a non-human organism, or
[4776] (b) increasing or generating the activity of a protein as shown in table II, application no. 18, column 3 encoded by the nucleic acid sequences as shown in table I, application no. 18, column 5, which are joined to a nucleic acid sequence encoding a transit peptide in a non-human organism, or in one or more parts thereof; or
[4777] (c) increasing or generating the activity of a protein as shown in table II, application no. 18, column 3 encoded by the nucleic acid sequences as shown in table I, application no. 18, column 5, which are joined to a nucleic acid sequence encoding chloroplast localization sequence, in a non-human organism, or in one or more parts thereof, and
[4778] (d) growing the organism under conditions which permit the production of Coenzyme Q9 and/or Coenzyme Q10 in said organism.

[4779] In another embodiment, the present invention relates to a process for the production of Coenzyme Q9 and/or Coenzyme Q10, which comprises
[4780] (a) increasing or generating the activity of a protein as shown in table II, application no. 18, column 3 encoded by the nucleic acid sequences as shown in table I, application no. 18, column 5, in an organelle of a microorganism or plant through the transformation of the organelle, or
[4781] (b) increasing or generating the activity of a protein as shown in table II, application no. 18, column 3 encoded by the nucleic acid sequences as shown in table I, application no. 18, column 5 in the plastid of a microorganism or plant, or in one or more parts thereof through the transformation of the plastids; and
[4782] (c) growing the organism under conditions which permit the production of the fine chemical, thus, Coenzyme Q9 and/or Coenzyme Q10 or fine chemicals comprising Coenzyme Q9 and/or Coenzyme Q10 in said organism or in the culture medium surrounding the organism.

[4783] Advantageously the activity of the protein as shown in table II, application no. 18, column 3 encoded by the nucleic acid sequences as shown in table I, application no. 18, column 5 is increased or generated in the abovementioned process in the plastid of a microorganism or plant.

[4784] for the disclosure of the paragraphs [0019.0.0.17] to [0024.0.0.16] see paragraphs [0019.0.0.0] and [0024.0.0.0] above.

[4785] Even more preferred nucleic acid sequences are encoding transit peptides as disclosed by von Heijne et al. [Plant Molecular Biology Reporter, Vol. 9 (2), 1991: 104-126], which are hereby incorporated by reference. Table V shows some examples of the transit peptide sequences disclosed by von Heijne et al. According to the disclosure of the invention especially in the examples the skilled worker is able to link other nucleic acid sequences disclosed by von Heijne et al. to the nucleic acid sequences shown in table I, application no. 18, columns 5 and 7. Most preferred nucleic acid sequences encoding transit peptides are derived from the genus Spinacia such as chloroplast 30S ribosomal protein PSrp-1, root acyl carrier protein II, acyl carrier protein, ATP synthase: γ subunit, ATP synthase: δ subunit, cytochrom f, ferredoxin I, ferredoxin NADP oxidoreductase (=FNR), nitrite reductase, phosphoribulokinase, plastocyanin or carbonic anhydrase. The skilled worker will recognize that various other nucleic acid sequences encoding transit peptides can easily isolated from plastid-localized proteins, which are expressed from nuclear genes as precursors and are then targeted to plastids. Such transit peptides encoding sequences can be used for the construction of other expression constructs. The transit peptides advantageously used in the inventive process and which are part of the inventive nucleic acid sequences and proteins are typically 20 to 120 amino acids, preferably 25 to 110, 30 to 100 or 35 to 90 amino acids, more preferably 40 to 85 amino acids and most preferably 45 to 80 amino acids in length and functions post-translationally to direct the protein to the plastid preferably to the chloroplast. The nucleic acid sequences encoding such transit peptides are localized upstream of nucleic acid sequence encoding the mature protein. For the correct molecular joining of the transit peptide encoding nucleic acid and the nucleic acid encoding the protein to be targeted it is sometimes necessary to introduce additional base pairs at the joining position, which forms restriction enzyme recognition sequences useful for the molecular joining of the different nucleic acid molecules. This procedure might lead to very few additional amino acids at the N-terminal of the mature imported protein, which usually and preferably do not interfere with the protein function. In any case, the additional base pairs at the joining position which forms restriction enzyme recognition sequences have to be chosen with care, in order to avoid the formation of stop codons or codons which encode amino acids with a strong influence on protein folding, like e.g. proline. It is preferred that such additional codons encode small n.d. structural flexible amino acids such as glycine or alanine.

[4786] As mentioned above the nucleic acid sequences coding for the proteins as shown in table II, application no. 18, column 3 and its homologs as disclosed in table I, application no. 18, columns 5 and 7 are joined to a nucleic acid sequence encoding a transit peptide, This nucleic acid sequence encoding a transit peptide ensures transport of the protein to the plastid. The nucleic acid sequence of the gene to be expressed and the nucleic acid sequence encoding the transit peptide are operably linked. Therefore the transit peptide is fused in frame to the nucleic acid sequence coding for proteins as shown in table II, application no. 18, column 3 and its homologs as disclosed in table I, application no. 18, columns 5 and 7.

[4787] for the disclosure of the paragraphs [0027.0.0.17] to [0029.0.0.16] see paragraphs [0027.0.0.0] and [0029.0.0.0] above.

[4788] Alternatively, nucleic acid sequences coding for the transit peptides may be chemically synthesized either in part or wholly according to structure of transit peptide sequences disclosed in the prior art. Said natural or chemically synthesized sequences can be directly linked to the sequences encoding the mature protein or via a linker nucleic acid sequence, which may be typically less than 500 base pairs, preferably less than 450, 400, 350, 300, 250 or 200 base pairs, more preferably less than 150, 100, 90, 80, 70, 60, 50, 40 or 30 base pairs and most preferably less than 25, 20, 15, 12, 9, 6 or 3 base pairs in length and are in frame to the coding sequence. Furthermore favorable nucleic acid sequences encoding transit peptides may comprise sequences derived from more than one biological and/or chemical source and may include a nucleic acid sequence derived from the amino-terminal region of the mature protein, which in its native state is linked to the transit peptide. In a preferred embodiment of the invention said amino-terminal region of the mature protein is typically less than 150 amino acids, preferably less than 140, 130, 120, 110, 100 or 90 amino acids, more preferably less than 80, 70, 60, 50, 40, 35, 30, 25 or 20 amino acids and most preferably less than 19, 18, 17, 16, 15, 14, 13, 12, 11 or 10 amino acids in length. But even shorter or longer stretches are also possible. In addition target sequences, which facilitate the transport of proteins to other cell compartments such as the vacuole, endoplasmic reticulum, Golgi complex, glyoxysomes, peroxisomes or mitochondria may be also part of the inventive nucleic acid sequence. The proteins translated from said inventive nucleic acid sequences are a kind of fusion proteins that means the nucleic acid sequences encoding the transit peptide for example the ones shown in table V, preferably the last one of the table are joint to the nucleic acid sequences shown in table I, application no. 18, columns 5 and 7. The person skilled in the art is able to join said sequences in a functional manner. Advantageously the transit peptide part is cleaved off from the protein part shown in table II, application no. 18, columns 5 and 7 during the transport preferably into the plastids. All products of the cleavage of the preferred transit peptide shown in the last line of table V have preferably the N-terminal amino acid sequences QIA CSS or QIA EFQLTT in front of the start methionine of the protein mentioned in table II, application no. 18, columns 5 and 7. Other short amino acid sequences of an range of 1 to 20 amino acids preferable 2 to 15 amino acids, more preferable 3 to 10 amino acids most preferably 4 to 8 amino acids are also possible in front of the start methionine of the protein mentioned in table II, application no. 18, columns 5 and 7. In case of the amino acid sequence QIA CSS the three amino acids in front of the start methionine are stemming from the LIC (=ligatation independent cloning) cassette. Said short amino acid sequence is preferred in the case of the expression of E. coli genes. In case of the amino acid sequence QIA EFQLTT the six amino acids in front of the start methionine are stemming from the LIC cassette. Said short amino acid sequence is preferred in the case of the expression of S. cerevisiae genes. The skilled worker knows that other short sequences are also useful in the expression of the genes mentioned in table I, application no. 18, columns 5 and 7. Furthermore the skilled worker is aware of the fact that there is not a need for such short sequences in the expression of the genes.

[4789] Table V: Examples of transit peptides disclosed by von Heijne et al. for the disclosure of Table V see paragraph [0030.2.0.0] above.

[4790] Alternatively to the targeting of the sequences shown in table II, application no. 18, columns 5 and 7 preferably of sequences in general encoded in the nucleus with the aid of the targeting sequences mentioned for example in table V alone or in combination with other targeting sequences preferably into the plastids, the nucleic acids of the invention can directly introduced into the plastidal genome. Therefore in a preferred embodiment the nucleic acid sequences shown in table I, application no. 18, columns 5 and 7 are directly introduced and expressed in plastids.

The term “introduced” in the context of this specification shall mean the insertion of a nucleic acid sequence into the organism by means of a “transfection”, “transduction” or preferably by “transformation”.
A plastid, such as a chloroplast, has been “transformed” by an exogenous (preferably foreign) nucleic acid sequence if nucleic acid sequence has been introduced into the plastid that means that this sequence has crossed the membrane or the membranes of the plastid. The foreign DNA may be integrated (covalently linked) into plastid DNA making up the genome of the plastid, or it may remain unintegrated (e.g., by including a chloroplast origin of replication). “Stably” integrated DNA sequences are those, which are inherited through plastid replication, thereby transferring new plastids, with the features of the integrated DNA sequence to the progeny.

[4791] for the disclosure of the paragraphs [0030.2.0.17] and [0030.3.0.17] see paragraphs [0030.2.0.0] and [0030.3.0.0] above.

[4792] For the inventive process it is of great advantage that by transforming the plastids the intraspecies specific transgene flow is blocked, because a lot of species such as corn, cotton and rice have a strict maternal inheritance of plastids. By placing the genes specified in table I, application no. 18, columns 5 and 7 or active fragments thereof in the plastids of plants, these genes will not be present in the pollen of said plants.

A further preferred embodiment of the invention relates to the use of so called “chloroplast localization sequences”, in which a first RNA sequence or molecule is capable of transporting or “chaperoning” a second RNA sequence, such as a RNA sequence transcribed from the sequences depicted in table I, application no. 18, columns 5 and 7 or a sequence encoding a protein, as depicted in table II, application no. 18, columns 5 and 7, from an external environment inside a cell or outside a plastid into a chloroplast. In one embodiment the chloroplast localization signal is substantially similar or complementary to a complete or intact viroid sequence. The chloroplast localization signal may be encoded by a DNA sequence, which is transcribed into the chloroplast localization RNA. The term “viroid” refers to a naturally occurring single stranded RNA molecule (Flores, C R Acad Sci III. 2001 October; 324(10): 943-52). Viroids usually contain about 200-500 nucleotides and generally exist as circular molecules. Examples of viroids that contain chloroplast localization signals include but are not limited to ASBVd, PLMVd, CChMVd and ELVd. The viroid sequence or a functional part of it can be fused to the sequences depicted in table I, application no. 18, columns 5 and 7 or a sequence encoding a protein, as depicted in table II, application no. 18, columns 5 and 7 in such a manner that the viroid sequence transports a sequence transcribed from a sequence as depicted in table I, application no. 18, columns 5 and 7 or a sequence encoding a protein as depicted in table II, application no. 18, columns 5 and 7 into the chloroplasts. A preferred embodiment uses a modified ASBVd (Navarro et al., Virology. 2000 Mar. 1; 268(1): 218-25).
In a further specific embodiment the protein to be expressed in the plastids such as the proteins depicted in table II, application no. 18, columns 5 and 7 are encoded by different nucleic acids. Such a method is disclosed in WO 2004/040973, which shall be incorporated by reference. WO 2004/040973 teaches a method, which relates to the translocation of an RNA corresponding to a gene or gene fragment into the chloroplast by means of a chloroplast localization sequence. The genes, which should be expressed in the plant or plants cells, are split into nucleic acid fragments, which are introduced into different compartments in the plant e.g. the nucleus, the plastids and/or mitochondria. Additionally plant cells are described in which the chloroplast contains a ribozyme fused at one end to an RNA encoding a fragment of a protein used in the inventive process such that the ribozyme can trans-splice the translocated fusion RNA to the RNA encoding the gene fragment to form and as the case may be reunite the nucleic acid fragments to an intact mRNA encoding a functional protein for example as disclosed in table II, application no. 18, columns 5 and 7.

[4793] In a preferred embodiment of the invention the nucleic acid sequences as shown in table I, application no. 18, columns 5 and 7 used in the inventive process are transformed into plastids, which are metabolical active. Those plastids should preferably maintain at a high copy number in the plant or plant tissue of interest, most preferably the chloroplasts found in green plant tissues, such as leaves or cotyledons or in seeds.

[4794] For a good expression in the plastids the nucleic acid sequences as shown in table I, application no. 18, columns 5 and 7 are introduced into an expression cassette using a preferably a promoter and terminator, which are active in plastids preferably a chloroplast promoter. Examples of such promoters include the psbA promoter from the gene from spinach or pea, the rbcL promoter, and the atpB promoter from corn.

[4795] for the disclosure of the paragraphs [0031.0.0.17] and [0032.0.0.17] see paragraphs [0031.0.0.0] and [0032.0.0.0] above.

[4796] Advantageously the process for the production of the fine chemical leads to an enhanced production of the fine chemical. The terms “enhanced” or “increase” mean at least a 10%, 20%, 30%, 40% or 50%, preferably at least 60%, 70%, 80%, 90% or 100%, more preferably 150%, 200%, 300%, 400% or 500% higher production of the fine chemical in comparison to the reference as defined below, e.g. that means in comparison to an organism without the aforementioned modification of the activity of a protein as shown in table II, application no. 18, column 3. Preferably the modification of the activity of a protein as shown in table II, application no. 18, column 3 or their combination can be achieved by joining the protein to a transit peptide.

[4797] Surprisingly it was found, that the transgenic expression of the Saccharomyces cerevisiae protein as shown in table II, application no. 18, column 3 in plastids of a plant such as Arabidopsis thaliana for example through the linkage to at least one targeting sequence for example as mentioned in table V conferred an increase in the fine chemical content of the transformed plants.

[4798] for the disclosure of this paragraph see paragraph [0035.0.0.0] above.

[4799] The sequence of b1551 (Accession number PIR:B64910) from Escherichia coli has been published in Blattner et al., Science 277 (5331), 1453-1474 (1997), and its activity is being defined as “Qin prophage”. Accordingly, in one embodiment, the process of the present invention comprises the use of a “Qin prophage” or its homolog, e.g. as shown herein, for the production of the fine chemical, meaning of Coenzyme Q9 and/or Coenzyme Q10, in particular for increasing the amount of Coenzyme Q9 in free or bound form in an organism or a part thereof, as mentioned. In one embodiment, in the process of the present invention the activity of a b1551 protein is increased or generated, e.g. from Escherichia coli or a homolog thereof, preferably linked at least to one transit peptide as mentioned for example in table V.

In another embodiment, in the process of the present invention the activity of a b1551 protein is increased or generated in a subcellular compartment of the organism or organism cell such as in an organelle like a plastid or mitochondria.
The sequence of b1556 (Accession number NP_{—}416074) from Escherichia coli has been published in Blattner et al., Science 277 (5331), 1453-1474 (1997), and its activity is being defined as “Qin prophage”. Accordingly, in one embodiment, the process of the present invention comprises the use of a “Qin prophage” or its homolog, e.g. as shown herein, for the production of the fine chemical, meaning of Coenzyme Q9 and/or Coenzyme Q10, in particular for increasing the amount of Coenzyme Q9 in free or bound form in an organism or a part thereof, as mentioned. In one embodiment, in the process of the present invention the activity of a b1556 protein is increased or generated, e.g. from Escherichia coli or a homolog thereof, preferably linked at least to one transit peptide as mentioned for example in table V.
In another embodiment, in the process of the present invention the activity of a b1556 protein is increased or generated in a subcellular compartment of the organism or organism cell such as in an organelle like a plastid or mitochondria.
The sequence of b1704 (Accession number NP_{—}416219) from Escherichia coli has been published in Blattner et al., Science 277 (5331), 1453-1474 (1997), and its activity is being defined as “3-deoxy-D-arabinoheptulosonate-7-phosphate synthase (DAHP synthetase), tryptophan-repressible”. Accordingly, in one embodiment, the process of the present invention comprises the use of a “3-deoxy-D-arabinoheptulosonate-7-phosphate synthase (DAHP synthetase), tryptophan-repressible” or its homolog, e.g. as shown herein, for the production of the fine chemical, meaning of Coenzyme Q9 and/or Coenzyme Q10, in particular for increasing the amount of Coenzyme Q9 and/or Coenzyme Q10 in free or bound form in an organism or a part thereof, as mentioned. In one embodiment, in the process of the present invention the activity of a b1704 protein is increased or generated, e.g. from Escherichia coli or a homolog thereof, preferably linked at least to one transit peptide as mentioned for example in table V.
In another embodiment, in the process of the present invention the activity of a b1704 protein is increased or generated in a subcellular compartment of the organism or organism cell such as in an organelle like a plastid or mitochondria.
The sequence of b2600 (Accession number NP_{—}417091) from Escherichia coli has been published in Blattner et al., Science 277 (5331), 1453-1474 (1997), and its activity is being defined as “bifunctional chorismate mutase/prephenate dehydrogenase”. Accordingly, in one embodiment, the process of the present invention comprises the use of a “bifunctional chorismate mutase/prephenate dehydrogenase” or its homolog, e.g. as shown herein, for the production of the fine chemical, meaning of Coenzyme Q9 and/or Coenzyme Q10, in particular for increasing the amount of Coenzyme Q9 and/or Coenzyme Q10 in free or bound form in an organism or a part thereof, as mentioned. In one embodiment, in the process of the present invention the activity of a b2600 protein is increased or generated, e.g. from Escherichia coli or a homolog thereof, preferably linked at least to one transit peptide as mentioned for example in table V.
In another embodiment, in the process of the present invention the activity of a b2600 protein is increased or generated in a subcellular compartment of the organism or organism cell such as in an organelle like a plastid or mitochondria.
The sequence of b2965 (Accession number NP_{—}417440) from Escherichia coli has been published in Blattner et al., Science 277 (5331), 1453-1474 (1997), and its activity is being defined as “ornithine decarboxylase”. Accordingly, in one embodiment, the process of the present invention comprises the use of a “ornithine decarboxylase” or its homolog, e.g. as shown herein, for the production of the fine chemical, meaning of Coenzyme Q9 and/or Coenzyme Q10, in particular for increasing the amount of Coenzyme Q9 in free or bound form in an organism or a part thereof, as mentioned. In one embodiment, in the process of the present invention the activity of a b2965 protein is increased or generated, e.g. from Escherichia coli or a homolog thereof, preferably linked at least to one transit peptide as mentioned for example in table V.
In another embodiment, in the process of the present invention the activity of a b2965 protein is increased or generated in a subcellular compartment of the organism or organism cell such as in an organelle like a plastid or mitochondria.
The sequence of b4039 (Accession number PIR:S25660) from Escherichia coli has been published in Blattner et al., Science 277 (5331), 1453-1474 (1997), and its activity is being defined as “4-hydroxybenzoate synthetase”. Accordingly, in one embodiment, the process of the present invention comprises the use of a “4-hydroxybenzoate synthetase” or its homolog, e.g. as shown herein, for the production of the fine chemical, meaning of Coenzyme Q9 and/or Coenzyme Q10, in particular for increasing the amount of Coenzyme Q9 in free or bound form in an organism or a part thereof, as mentioned. In one embodiment, in the process of the present invention the activity of a b4039 protein is increased or generated, e.g. from Escherichia coli or a homolog thereof, preferably linked at least to one transit peptide as mentioned for example in table V.
In another embodiment, in the process of the present invention the activity of a b4039 protein is increased or generated in a subcellular compartment of the organism or organism cell such as in an organelle like a plastid or mitochondria.

[4800] In one embodiment, the homolog of the b1551, b1556, b1704, b1704, b2600, b2965 or b4039 is a homolog having said activity and being derived from bacteria. In one embodiment, the homolog of the b1551, b1556, b1704, b1704, b2600, b2965 or b4039 is a homolog having said activity and being derived from Proteobacteria. In one embodiment, the homolog of the b1551, b1556, b1704, b1704, b2600, b2965 or b4039 is a homolog having said activity and being derived from Gammaproteobacteria. In one embodiment, the homolog of the b1551, b1556, b1704, b1704, b2600, b2965 or b4039 is a homolog having said activity and being derived from Enterobacteriales. In one embodiment, the homolog of the b1551, b1556, b1704, b1704, b2600, b2965 or b4039 is a homolog having said activity and being derived from Enterobacteriaceae. In one embodiment, the homolog of the b1551, b1556, b1704, b1704, b2600, b2965 or b4039 is a homolog having said activity and being derived from Escherichia, preferably from Escherichia coli.

[4801] for the disclosure of this paragraph see paragraph [0038.0.0.0] above.

[4802] In accordance with the invention, a protein or polypeptide has the “activity of an protein as shown in table II, application no. 18, column 3” if its de novo activity, or its increased expression directly or indirectly leads to an increased in the fine chemical level in the organism or a part thereof, preferably in a cell of said organism, more preferably in an organelle such as a plastid or mitochondria of said organism and the protein has the above mentioned activities of a protein as shown in table II, application no. 18, column 3, preferably in the event the nucleic acid sequences encoding said proteins is functionally joined to the nucleic acid sequence of a transit peptide. Throughout the specification the activity or preferably the biological activity of such a protein or polypeptide or an nucleic acid molecule or sequence encoding such protein or polypeptide is identical or similar if it still has the biological or enzymatic activity of a protein as shown in table II, application no. 18, column 3, or which has at least 10% of the original enzymatic activity, preferably 20%, particularly preferably 30%, most particularly preferably 40% in comparison to a protein as shown in table II, application no. 18, column 3 of Saccharomyces cerevisiae.

[4803] for the disclosure of the paragraphs [0040.0.0.17] to [0047.0.0.16] see paragraphs [0040.0.0.0] to [0047.0.0.0] above.

[4804] Preferably, the reference, control or wild type differs form the subject of the present invention only in the cellular activity, preferably of the plastidial activity of the polypeptide of the invention, e.g. as result of an increase in the level of the nucleic acid molecule of the present invention or an increase of the specific activity of the polypeptide of the invention, e.g. by or in the expression level or activity of an protein having the activity of a protein as shown in table II, application no. 18, column 3 its biochemical or genetical causes and the increased amount of the fine chemical.

[4805] for the disclosure of the paragraphs [0049.0.0.17] to [0051.0.0.16] see paragraphs [0049.0.0.0] to [0051.0.0.0] above.

[4806] For example, the molecule number or the specific activity of the polypeptide or the nucleic acid molecule may be increased. Larger amounts of the fine chemical can be produced if the polypeptide or the nucleic acid of the invention is expressed de novo in an organism lacking the activity of said protein, preferably the nucleic acid molecules as mentioned in table I, application no. 18, columns 5 and 7 alone or preferably in combination with a transit peptide for example as mentioned in table V or in another embodiment by introducing said nucleic acid molecules into an organelle such as an plastid or mitochondria in the transgenic organism. However, it is also possible to modify the expression of the gene which is naturally present in the organisms, for example by integrating a nucleic acid sequence, encoding a plastidic targeting sequence in front (5 prime) of the coding sequence, leading to a functional preprotein, which is directed for example to the plastids.

[4807] for the disclosure of the paragraphs [0053.0.0.17] to [0058.0.0.16] see paragraphs [0053.0.0.0] to [0058.0.0.0] above.

[4808] In case the activity of the Escherichia coli protein b1551 or its homologs, e.g. a “Qin prophage” is increased advantageously in an organelle such as a plastid or mitochondria, preferably, in one embodiment an increase of the fine chemical, preferably of Coenzyme Q9 in free or bound form between 50% and 84% or more is conferred.

In case the activity of the Escherichia coli protein b1556 or its homologs, e.g. a “Qin prophage” is increased advantageously in an organelle such as a plastid or mitochondria, preferably, in one embodiment an increase of the fine chemical, preferably of Coenzyme Q9 in free or bound form between 53% and 98% or more is conferred.
In case the activity of the Escherichia coli protein b1704 or its homologs, e.g. a “3-deoxy-D-arabinoheptulosonate-7-phosphate synthase (DAHP synthetase), tryptophan-repressible” is increased advantageously in an organelle such as a plastid or mitochondria, preferably, in one embodiment an increase of the fine chemical, preferably of Coenzyme Q9 in free or bound form between 43% and 236% or more is conferred.
In case the activity of the Escherichia coli protein b1704 or its homologs, e.g. a “3-deoxy-D-arabinoheptulosonate-7-phosphate synthase (DAHP synthetase), tryptophan-repressible” is increased advantageously in an organelle such as a plastid or mitochondria, preferably, in one embodiment an increase of the fine chemical, preferably of Coenzyme Q10 in free or bound form between 28% and 369% or more is conferred.
In case the activity of the Escherichia coli protein b1704 or its homologs, e.g. a “3-deoxy-D-arabinoheptulosonate-7-phosphate synthase (DAHP synthetase), tryptophan-repressible” is increased advantageously in an organelle such as a plastid or mitochondria, preferably, in one embodiment an increase of the fine chemical, preferably of Coenzyme Q10 in free or bound form between 28% and 369% or more and of coenzyme Q9 in free or bound form between 43% and 236% is conferred.
In case the activity of the Escherichia coli protein b2600 or its homologs, e.g. a “bifunctional chorismate mutase/prephenate dehydrogenase” is increased advantageously in an organelle such as a plastid or mitochondria, preferably, in one embodiment an increase of the fine chemical, preferably of Coenzyme Q10 in free or bound form between 87% and 101% or more is conferred.
In case the activity of the Escherichia coli protein b2965 or its homologs, e.g. a “ornithine decarboxylase is increased advantageously in an organelle such as a plastid or mitochondria, preferably, in one embodiment an increase of the fine chemical, preferably of Coenzyme Q9 in free or bound form between 40% and 198% or more is conferred.
In case the activity of the Escherichia coli protein b4039 or its homologs, e.g. a “4-hydroxybenzoate synthetase” is increased advantageously in an organelle such as a plastid or mitochondria, preferably, in one embodiment an increase of the fine chemical, preferably of Coenzyme Q9 in free or bound form between 53% and 113% or more is conferred.

[4809] In case the activity of the Escherichia coli proteins b1551, b1556, b1704, b1704, b2600, b2965 and/or b4039 or their homologs, are increased advantageously in an organelle such as a plastid or mitochondria, preferably an increase of the fine chemical such as Coenzyme Q9 or Coenzyme Q10 or mixtures thereof in free or bound form is conferred.

[4810] for the disclosure of the paragraphs [0061.0.0.17] and [0062.0.0.17] see paragraphs [0061.0.0.0] and [0062.0.0.0] above.

[4811] A protein having an activity conferring an increase in the amount or level of the fine chemical, preferably upon targeting to the plastids preferably has the structure of the polypeptide described herein, in particular of the polypeptides comprising the consensus sequence shown in table IV, application no. 18, column 7 or of the polypeptide as shown in the amino acid sequences as disclosed in table II, application no. 18, columns 5 and 7 or the functional homologues thereof as described herein, or is encoded by the nucleic acid molecule characterized herein or the nucleic acid molecule according to the invention, for example by the nucleic acid molecule as shown in table I, application no. 18, columns 5 and 7 or its herein described functional homologues and has the herein mentioned activity.

[4812] /

[4813] for the disclosure of the paragraphs [0065.0.0.17] and [0066.0.0.17] see paragraphs [0065.0.0.0] and [0066.0.0.0] above.

[4814] In one embodiment, the process of the present invention comprises one or more of the following steps
[4815] a) stabilizing a protein conferring the increased expression of a protein encoded by the nucleic acid molecule of the invention or of the polypeptide of the invention, e.g. of a polypeptide having the activity of a protein as indicated in table II, application no. 18, columns 5 and 7 or its homologs activity having herein-mentioned Coenzyme Q9 and/or Coenzyme Q10 increasing activity; and/or
[4816] b) stabilizing a mRNA conferring the increased expression of a protein encoded by the nucleic acid molecule of the invention, which is in the sense of the invention a fusion of a nucleic acid sequence encoding a transit peptide and of a nucleic acid sequence as shown in table I, application no. 18, columns 5 and 7, e.g. a nucleic acid sequence encoding a polypeptide having the activity of a protein as indicated in table II, application no. 18, columns 5 and 7 or its homologs activity or of a mRNA encoding the polypeptide of the present invention having herein-mentioned Coenzyme Q9 and/or Coenzyme Q10increasing activity; and/or
[4817] c) increasing the specific activity of a protein conferring the increased expression of a protein encoded by the nucleic acid molecule of the invention or of the polypeptide of the present invention having herein-mentioned Coenzyme Q9 and/or Coenzyme Q10 increasing activity, e.g. of a polypeptide having the activity of a protein as indicated in table II, application no. 18, columns 5 and 7 or its homologs activity, or decreasing the inhibitory regulation of the polypeptide of the invention; and/or
[4818] d) generating or increasing the expression of an endogenous or artificial transcription factor mediating the expression of a protein conferring the increased expression of a protein encoded by the nucleic acid molecule of the invention or of the polypeptide of the invention having herein-mentioned Coenzyme Q9 and/or Coenzyme Q10 increasing activity, e.g. of a polypeptide having the activity of a protein as indicated in table II, application no. 18, columns 5 and 7 or its homologs activity; and/or
[4819] e) stimulating activity of a protein conferring the increased expression of a protein encoded by the nucleic acid molecule of the present invention or a polypeptide of the present invention having herein-mentioned Coenzyme Q9 and/or Coenzyme Q10 increasing activity, e.g. of a polypeptide having the activity of a protein as indicated in table II, application no. 18, columns 5 and 7 or its homologs activity, by adding one or more exogenous inducing factors to the organisms or parts thereof; and/or
[4820] f) expressing a transgenic gene encoding a protein conferring the increased expression of a polypeptide encoded by the nucleic acid molecule of the present invention or a polypeptide of the present invention, having herein-mentioned Coenzyme Q9 and/or Coenzyme Q10 increasing activity, e.g. of a polypeptide having the activity of a protein as indicated in table II, application no. 18, columns 5 and 7 or its homologs activity, and/or
[4821] g) increasing the copy number of a gene conferring the increased expression of a nucleic acid molecule encoding a polypeptide encoded by the nucleic acid molecule of the invention or the polypeptide of the invention having herein-mentioned Coenzyme Q9 and/or Coenzyme Q10 increasing activity, e.g. of a polypeptide having the activity of a protein as indicated in table II, application no. 18, columns 5 and 7 or its homologs activity; and/or
[4822] h) increasing the expression of the endogenous gene encoding the polypeptide of the invention, e.g. a polypeptide having the activity of a protein as indicated in table II, application no. 18, columns 5 and 7 or its homologs activity, by adding positive expression or removing negative expression elements, e.g. homologous recombination can be used to either introduce positive regulatory elements like for plants the 35S enhancer into the promoter or to remove repressor elements form regulatory regions. Further gene conversion methods can be used to disrupt repressor elements or to enhance to activity of positive elements. Positive elements can be randomly introduced in plants by T-DNA or transposon mutagenesis and lines can be identified in which the positive elements have be integrated near to a gene of the invention, the expression of which is thereby enhanced; and/or
[4823] i) modulating growth conditions of an organism in such a manner, that the expression or activity of the gene encoding the protein of the invention or the protein itself is enhanced for example microorganisms or plants can be grown for example under a higher temperature regime leading to an enhanced expression of heat shock proteins, which can lead an enhanced fine chemical production; and/or
[4824] j) selecting of organisms with especially high activity of the proteins of the invention from natural or from mutagenized resources and breeding them into the target organisms, eg the elite crops; and/or
[4825] k) directing a protein encoded by the nucleic acid molecule of the invention or of the polypeptide of the present invention having herein-mentioned Coenzyme Q9 and/or Coenzyme Q10 increasing activity, e.g. of polypeptide having the activity of a protein as indicated in table II, application no. 18, columns 5 and 7 or its homologs activity, to the plastids by the addition of a plastidial targeting sequence; and/or
[4826] l) generating the expression of a protein encoded by the nucleic acid molecule of the invention or of the polypeptide of the present invention having herein-mentioned Coenzyme Q9 and/or Coenzyme Q10 increasing activity, e.g. of a polypeptide having the activity of a protein as indicated in table II, application no. 18, columns 5 and 7 or its homologs activity in plastids by the stable or transient transformation advantageously stable transformation of organelles preferably plastids with an inventive nucleic acid sequence preferably in form of an expression cassette containing said sequence leading to the plastidial expression of the nucleic acids or polypeptides of the invention; and/or
[4827] m) generating the expression of a protein encoded by the nucleic acid molecule of the invention or of the polypeptide of the present invention having herein-mentioned Coenzyme Q9 and/or Coenzyme Q10 increasing activity, e.g. of a polypeptide having the activity of a protein as indicated in table II, application no. 18, columns 5 and 7 or its homologs activity in plastids by integration of a nucleic acid of the invention into the plastidal genome under control of preferable a plastidial promoter.

[4828] Preferably, said mRNA is the nucleic acid molecule of the present invention and/or the protein conferring the increased expression of a protein encoded by the nucleic acid molecule of the present invention alone or link to a transit nucleic acid sequence or transit peptide encoding nucleic acid sequence or the polypeptide having the herein mentioned activity, e.g. conferring the increase of the fine chemical after increasing the expression or activity of the encoded polypeptide preferably in organelles such as plastids or having the activity of a polypeptide having an activity as the protein as shown in table II, application no. 18, column 3 or its homologs. Preferably the increase of the fine chemical takes place in plastids.

[4829] for the disclosure of the paragraphs [0069.0.0.17] to [0079.0.0.16] see paragraphs [0069.0.0.0] to [0079.0.0.0] above.

[4830] The activation of an endogenous polypeptide having above-mentioned activity, e.g. having the activity of a protein as shown in table II, application no. 18, column 3 or of the polypeptide of the invention, e.g. conferring the increase of the fine chemical after increase of expression or activity in the cytsol and/or in an organelle like a plastid, preferentially in the plastid, can also be increased by introducing a synthetic transcription factor, which binds close to the coding region of the gene encoding the protein as shown in table II, application no. 18, column 3 and activates its transcription. A chimeric zinc finger protein can be constructed, which comprises a specific DNA-binding domain and an activation domain as e.g. the VP16 domain of Herpes Simplex virus. The specific binding domain can bind to the regulatory region of the gene encoding the protein as shown in table II, application no. 18, column 3. The expression of the chimeric transcription factor in a organism, in particular in a plant, leads to a specific expression of the protein as shown in table II, application no. 18, column 3, see e.g. in WO01/52620, Oriz, Proc. Natl. Acad. Sci. USA, 2002, Vol. 99, 13290 or Guan, Proc. Natl. Acad. Sci. USA, 2002, Vol. 99, 13296.

[4831] for the disclosure of the paragraphs [0081.0.0.17] to [0084.0.0.17] see paragraphs [0081.0.0.0] to [0084.0.0.0] above.

[4832] Owing to the introduction of a gene or a plurality of genes conferring the expression of the nucleic acid molecule of the invention or the nucleic acid molecule used in the method of the invention or the polypeptide of the invention or the polypeptide used in the method of the invention as described below, for example the nucleic acid construct mentioned below into an organism alone or in combination with other genes, it is possible not only to increase the biosynthetic flux towards the end product, but also to increase, modify or create de novo an advantageous, preferably novel metabolites composition in the organism, e.g. Coenzyme Q9 and/or Coenzyme Q10 and mixtures thereof.

[4833] for the disclosure of this paragraph see paragraph [0086.0.0.0] above.

[4834] By influencing the metabolism thus, it is possible to produce, in the process according to the invention, further advantageous compounds. Examples of such compounds are, in addition to Coenzyme Q9 and/or Coenzyme Q10 compounds such as other Coenzymes such as Coenzyme Q0 to Q8, vitamins, amino acids or fatty acids.

[4835] Accordingly, in one embodiment, the process according to the invention relates to a process, which comprises:
[4836] a) providing a non-human organism, preferably a microorganism, a non-human animal, a plant or animal cell, a plant or animal tissue or a plant, more preferably a microorganism, a plant or a plant tissue;
[4837] b) increasing the activity of a protein as shown in table II, application no. 18, column 3 or of a polypeptide being encoded by the nucleic acid molecule of the present invention and described below, e.g. conferring an increase of the fine chemical in the organism, preferably in the microorganism, the non-human animal, the plant or animal cell, the plant or animal tissue or the plant, more preferably a microorganism, a plant or a plant tissue, in the cytsol or in the plastids, preferentially in the plastids,
[4838] c) growing the organism, preferably the microorganism, the non-human animal, the plant or animal cell, the plant or animal tissue or the plant under conditions which permit the production of the fine chemical in the organism, preferably the microorganism, the plant cell, the plant tissue or the plant; and
[4839] d) if desired, recovering, optionally isolating, the free and/or bound the fine chemical and, optionally further free and/or bound amino acids synthesized by the organism, the microorganism, the non-human animal, the plant or animal cell, the plant or animal tissue or the plant.

[4840] The organism, in particular the microorganism, non-human animal, the plant or animal cell, the plant or animal tissue or the plant is advantageously grown in such a way that it is not only possible to recover, if desired isolate the free or bound the fine chemical or the free and bound the fine chemical but as option it is also possible to produce, recover and, if desired isolate, other free or/and bound Coenzymes such as Coenzyme Q0 to Q8 or mixtures thereof.

The organism such as microorganisms or plants or the recovered, and if desired isolated, fine chemical can then be processed further directly into foodstuffs or animal feeds or for other applications, for example according to the disclosures made in the following US patent publications:
U.S. Pat. No. 6,380,252: Use of L-acetylcarnitine, L-isovalerylcarnitine, L-propionylcarnitine for increasing the levels of IGF-1, U.S. Pat. No. 6,372,198: Dentifrice for the mineralization and remineralization of teeth, U.S. Pat. No. 6,368,617: Dietary supplement, U.S. Pat. No. 6,350,473: Method for treating hypercholesterolemia, hyperlipidemia, and atherosclerosis, U.S. Pat. No. 6,335,361: Method of treating benign forgetfulness, v6,329,432: Mesozeaxanthin formulations for treatment of retinal disorders, U.S. Pat. No. 6,328,987: Cosmetic skin care compositions containing alpha interfereon, U.S. Pat. No. 6,312,703: Compressed lecithin preparations, U.S. Pat. No. 6,306,392: Composition comprising a carnitine and glutathione, useful to increase the absorption of glutathione and synergize its effects, U.S. Pat. No. 6,303,586: Supportive therapy for diabetes, hyperglycemia and hypoglycemia, U.S. Pat. No. 6,297,281: Association of no synthase inhibitors with trappers of oxygen reactive forms, U.S. Pat. No. 6,294,697: Discrete-length polyethylene glycols, U.S. Pat. No. 6,277,842: Dietary supplemental method for fat and weight reduction, U.S. Pat. No. 6,261,250: Method and apparatus for enhancing cardiovascular activity and health through rhythmic limb elevation, U.S. Pat. No. 6,258,855: Method of retarding and ameliorating carpal tunnel syndrome, U.S. Pat. No. 6,258,848: Methods and compositions for increasing insulin sensitivity, U.S. Pat. No. 6,258,847: Use of 2-mercaptoethanolamine (2-MEA) and related aminothiol compounds and copper(II)-3,5 di-isopropyl salicylates and related compounds in the prevention and treatment of various diseases, U.S. Pat. No. 6,255,354: Preparation of a pulmonary surfactant for instillation and oral application, U.S. Pat. No. 6,254,547: Breath methylated alkane contour: a new marker of oxidative stress and disease, U.S. Pat. No. 6,248,552: Enzyme-based assay for determining effects of exogenous and endogenous factors on cellular energy production, U.S. Pat. No. 6,248,363: Solid carriers for improved delivery of active ingredients in pharmaceutical compositions, U.S. Pat. No. 6,245,800: Method of preventing or treating statin-induced toxic effects using L-carnitine or an alkanoyl L-carnitine, U.S. Pat. No. 6,245,378: Nutritional supplement for facilitating skeletal muscle adaptation to strenuous exercise and counteracting defatigation in asthenic individuals, U.S. Pat. No. 6,242,491: Use of creatine or creatine compounds for skin preservation, U.S. Pat. No. 6,232,346: Composition for improvement of cellular nutrition and mitochondrial energetics, U.S. Pat. No. 6,231,836: Folic acid dentifrice, U.S. Pat. No. 6,228,891: Use of 2,3-dimethoxy-5-methyl-6decaprenyl-1,4-benzoquinone, U.S. Pat. No. 6,228,402: Xylitol-containing non-human foodstuff and method, U.S. Pat. No. 6,228,347: Antioxidant gel for gingival conditions, U.S. Pat. No. 6,218,436: Pharmaceutically active carotenoids, U.S. Pat. No. 6,203,818: Nutritional supplement for cardiovascular health, U.S. Pat. No. 6,200,550: Oral care compositions comprising coenzyme Q10, U.S. Pat. No. 6,191,172: Water-soluble compositions of bioactive lipophilic compounds, U.S. Pat. No. 6,184,255: Pharmaceutical composition comprising coenzyme Q10, U.S. Pat. No. 6,166,077: Use of L-acetylcarnitine, L-isovalerylcarnitine, L-propionylcarnitine for increasing the levels of IGF-1, U.S. Pat. No. 6,162,419: Stabilized ascorbyl compositions, U.S. Pat. No. 6,159,508: Xylitol-containing non-human foodstuff and method, U.S. Pat. No. 6,159,476: Herbal supplement for increased muscle strength and endurance for athletes, U.S. Pat. No. 6,153,582: Defined serum-free medical solution for ophthalmology, U.S. Pat. No. 6,136,859: Pharmaceutical formulation for treating liver disorders, U.S. Pat. No. 6,107,281: Compounds and their combinations for the treatment of influenza infection, U.S. Pat. No. 6,106,286: Method and device for administering medicine to the periodontium, U.S. Pat. No. 6,099,854: Dry composition containing flavonol useful as a food supplement, U.S. Pat. No. 6,086,910: Food supplements, U.S. Pat. No. 6,080,788: Composition for improvement of cellular nutrition and mitochondrial energetics, U.S. Pat. No. 6,069,167: Use of antioxidant agents to treat cholestatic liver disease, U.S. Pat. No. 6,063,820: Medical food for diabetics, U.S. Pat. No. 6,054,261: Coenzyme Q.sub.10 compositions for organ protection during perfusion, U.S. Pat. No. 6,051,250: Process for the stabilization of vesicles of amphiphilic lipid(s) and composition for topical application containing the said stabilized vesicles,
The fermentation broth, fermentation products, plants or plant products can be purified in the customary manner by hydrolysis with strong bases, extraction and crystallization or via thin layer chromatography and other methods known to the person skilled in the art and described herein below. Products of these different work-up procedures are fatty acids or fatty acid compositions which still comprise fermentation broth, plant particles and cell components in different amounts, advantageously in the range of from 0 to 99% by weight, preferably below 80% by weight, especially preferably between below 50% by weight.
Coenzyme Q10 production was reported in Agrobacterium sp., Protaminobacter rubber and Paracoccus denitrificans. Coenzyme Q9 production was reported in Candida tropicalis. Production of ubiquiones with side chain length of 6-10 units, e.g. including Coenzyme Q10 and Coenzyme Q9 was reported for controlled continuous culture of phototrophic bacteria (wild-type strains of Rhodobacter capsulatus, Rhodobacter sphaeroides, Thiocapsa roseopersicina and Ectothiorhodospira shaposhnikovii. Cells mostly contained one main ubiquinone, whereby the content and composition dependent on growth conditions, substrates and other factors. Preferred is a production of more than 0.1, preferably more than 1 to 6 mg/g dry cells in one of said organisms or in any other microorganism, even more preferred are more than 10 mg/g dry cells, 20 mg/g dry cells, 50 mg/g dry cells, 100 mg/g dry cells, 200 mg/g dry cells, 300 mg/g dry cells, 500 mg/g dry cells or more.

[4841] for the disclosure of the paragraphs [0090.0.0.17] to [0097.0.0.17] see paragraphs [0090.0.0.0] to [0097.0.0.0] above.

[4842] With regard to the nucleic acid sequence as depicted a nucleic acid construct which contains a nucleic acid sequence mentioned herein or an organism (=transgenic organism) which is transformed with said nucleic acid sequence or said nucleic acid construct, “transgene” means all those constructs which have been brought about by genetic manipulation methods, preferably in which either
[4843] a) the nucleic acid sequence as shown in table I, application no. 18, columns 5 and 7 or a derivative thereof, or
[4844] b) a genetic regulatory element, for example a promoter, which is functionally linked to the nucleic acid sequence as shown table I, application no. 18, columns 5 and 7 or a derivative thereof, or
[4845] c) (a) and (b)
   is/are not present in its/their natural genetic environment or has/have been modified by means of genetic manipulation methods, it being possible for the modification to be, by way of example, a substitution, addition, deletion, inversion or insertion of one or more nucleotide. “Natural genetic environment” means the natural chromosomal locus in the organism of origin or the presence in a genomic library. In the case of a genomic library, the natural, genetic environment of the nucleic acid sequence is preferably at least partially still preserved. The environment flanks the nucleic acid sequence at least on one side and has a sequence length of at least 50 bp, preferably at least 500 bp, particularly preferably at least 1000 bp, very particularly preferably at least 5000 bp.

[4846] The use of the nucleic acid sequence according to the invention or of the nucleic acid construct according to the invention for the generation of transgenic plants is therefore also subject matter of the invention. As mentioned above the inventive nucleic acid sequence consists advantageously of the nucleic acid sequences as depicted in the sequence protocol and disclosed in table I, application no. 18, columns 5 and 7 joined to a nucleic acid sequence encoding a transit peptide, or a targeting nucleic acid sequence which directs the nucleic acid sequences disclosed in table I, application no. 18, columns 5 and 7 to the organelle preferentially the plastids. Alternatively the inventive nucleic acids sequences consist advantageously of the nucleic acid sequences as depicted in the sequence protocol and disclosed in table I, application no. 18, columns 5 and 7 joined preferably to a nucleic acids sequence mediating the stable integration of nucleic acids into the plastidial genome and optionally sequences mediating the transcription of the sequence in the plastidial compartment. A transient expression is in principal also desirable and possible.

[4847] for the disclosure of this paragraph see paragraph [0100.0.0.0] above.

[4848] In an advantageous embodiment of the invention, the organism takes the form of a plant whose Coenzyme Q9 and/or Coenzyme Q10 content is modified advantageously owing to the nucleic acid molecule of the present invention expressed. This is important for plant breeders since, for example, the nutritional value of plants for animals is dependent on the abovementioned Coenzyme Q9 and/or Coenzyme Q10 and the general amount of Coenzyme Q9 and/or Coenzyme Q10 in feed. After the activity of the protein as shown in table II, application no. 18, column 3 has been increased or generated, or after the expression of nucleic acid molecule or polypeptide according to the invention has been generated or increased, the transgenic plant generated thus is grown on or in a nutrient medium or else in the soil and subsequently harvested.

[4849] for the disclosure of the paragraphs [0102.0.0.17] to [0110.0.0.17] see paragraphs [0102.0.0.0] to [0110.0.0.0] above.

[4850] In a preferred embodiment, the fine chemical (Coenzyme Q9 and/or Coenzyme Q10) is produced in accordance with the invention and, if desired, is isolated. The production of further Coenzymes such as Coenzyme Q0 to Q8 and mixtures thereof or mixtures of other Coenzymes by the process according to the invention is advantageous. It may be advantageous to increase the pool of free Coenzymes such as Coenzyme Q9 and/or Coenzyme Q10 and others as aforementioned in the transgenic organisms by the process according to the invention in order to isolate high amounts of the pure fine chemical.

[4851] In another preferred embodiment of the invention a combination of the increased expression of the nucleic acid sequence or the protein of the invention together with the transformation of a nucleic acid encoding a protein or polypeptide for example another gene of the Coenzyme Q9 and/or Coenzyme Q10 biosynthesis, or a compound, which functions as a sink for the desired Coenzyme Q9 and/or Coenzyme Q10 in the organism is useful to increase the production of the respective fine chemical.

[4852] In a preferred embodiment, the respective fine chemical is produced in accordance with the invention and, if desired, is isolated. The production of further Coenzymes other then Coenzyme Q9 and/or Coenzyme Q10 or compounds for which the respective fine chemical is a biosynthesis precursor compounds, e.g. amino acids, or mixtures thereof or mixtures of other Coenzymes, in particular of Coenzyme Q0 to Q8, by the process according to the invention is advantageous.

Preferably the composition further comprises higher amounts of metabolites positively affecting or lower amounts of metabolites negatively affecting the nutrition or health of animals or humans provided with said compositions or organisms of the invention or parts thereof. Likewise, the number or activity of further genes which are required for the import or export of nutrients or metabolites, including amino acids, fatty acids, vitamins, coenzymes, antioxidants etc. or any one of their precursors, required for the cell's biosynthesis of the respective fine chemical may be increased so that the concentration of necessary or relevant precursors, e.g. of isoprenoids, acetyl CoA, HMG-CoA, mevalonate, Isopentenyl pyrophosphate, Geranyl pyrophosphate, Farnesyl Pyrophosphate, or other cofactors or intermediates within the organelle, e.g. in mitochondria or plastids, resp., within (a) cell(s) or within the corresponding storage compartments is increased. Owing to the increased or novel generated activity of the polypeptide of the invention or used in the method of the invention or owing to the increased number of nucleic acid sequences of the invention or used in the method of the invention and/or to the modulation of further genes which are involved in the biosynthesis of the respective fine chemical, e.g. by increasing the activity of enzymes synthesizing precursors, e.g. Lovastatin, HMG-CoA Reductase, Mevalonate Kinase, or by destroying the activity of one or more genes which are involved in the breakdown of the respective fine chemical, it is possible to increase the yield, production and/or production efficiency of the respective fine chemical in the host organism, such as plants or the microorganisms.

[4853] In the case of the fermentation of microorganisms, the abovementioned desired fine chemical may accumulate in the medium and/or the cells. If microorganisms are used in the process according to the invention, the fermentation broth can be processed after the cultivation. Depending on the requirement, all or some of the biomass can be removed from the fermentation broth by separation methods such as, for example, centrifugation, filtration, decanting or a combination of these methods, or else the biomass can be left in the fermentation broth. The fermentation broth can subsequently be reduced, or concentrated, with the aid of known methods such as, for example, rotary evaporator, thin-layer evaporator, falling film evaporator, by reverse osmosis or by nanofiltration. Afterwards advantageously further compounds for formulation can be added such as corn starch or silicates. This concentrated fermentation broth advantageously together with compounds for the formulation can subsequently be processed by lyophilization, spray drying, and spray granulation or by other methods. Preferably the respective fine chemical comprising compositions are isolated from the organisms, such as the microorganisms or plants or the culture medium in or on which the organisms have been grown, or from the organism and the culture medium, in the known manner, for example via extraction, distillation, crystallization, chromatography or a combination of these methods. These purification methods can be used alone or in combination with the aforementioned methods such as the separation and/or concentration methods.

[4854] Transgenic plants which comprise the fine chemical such as Coenzyme Q9 and/or Coenzyme Q10 synthesized in the process according to the invention can advantageously be marketed directly without there being any need for the fine chemical synthesized to be isolated. Plants for the process according to the invention are listed as meaning intact plants and all plant parts, plant organs or plant parts such as leaf, stem, seeds, root, tubers, anthers, fibers, root hairs, stalks, embryos, calli, cotelydons, petioles, flowers, harvested material, plant tissue, reproductive tissue and cell cultures which are derived from the actual transgenic plant and/or can be used for bringing about the transgenic plant. In this context, the seed comprises all parts of the seed such as the seed coats, epidermal cells, seed cells, endosperm or embryonic tissue.

However, the respective fine chemical produced in the process according to the invention can also be isolated from the organisms, advantageously plants, (in the form of their organic extracts, e.g. alcohol, or other organic solvents or water containing extract and/or free Coenzyme Q9 and/or Coenzyme Q10 or other extracts. The respective fine chemical produced by this process can be obtained by harvesting the organisms, either from the medium in which they grow, or from the field. This can be done via pressing or extraction of the plant parts. To increase the efficiency of extraction it is beneficial to clean, to temper and if necessary to hull and to flake the plant material. To allow for greater ease of disruption of the plant parts, specifically the seeds, they can previously be comminuted, steamed or roasted. Seeds, which have been pretreated in this manner can subsequently be pressed or extracted with solvents such as organic solvents like warm hexane or water or mixtures of organic solvents. The solvent is subsequently removed. In the case of microorganisms, the latter are, after harvesting, for example extracted directly without further processing steps or else, after disruption, extracted via various methods with which the skilled worker is familiar. Thereafter, the resulting products can be processed further, i.e. degummed and/or refined. In this process, substances such as the plant mucilages and suspended matter can be first removed. What is known as desliming can be affected enzymatically or, for example, chemico-physically by addition of acid such as phosphoric acid.
Well-established approaches for the harvesting of cells include filtration, centrifugation and coagulation/flocculation as described herein. Of the residual hydrocarbon, adsorbed on the cells, has to be removed. Solvent extraction or treatment with surfactants have been suggested for this purpose. However, it can be advantageous to avoid this treatment as it can result in cells devoid of most carotenoids.

[4855] The identity and purity of the compound(s) isolated can be determined by prior-art techniques. They encompass high-performance liquid chromatography (HPLC), gas chromatography (GC), spectroscopic methods, mass spectrometry (MS), staining methods, thin-layer chromatography, NIRS, enzyme assays or microbiological assays. These analytical methods are compiled in: Patek et al. (1994) Appl. Environ. Microbiol. 60:133-140; Malakhova et al. (1996) Biotekhnologiya 11 27-32; and Schmidt et al. (1998) Bioprocess Engineer. 19:67-70. Ulmann's Encyclopedia of Industrial Chemistry (1996) Bd. A27, VCH Weinheim, pp. 89-90, pp. 521-540, pp. 540-547, pp. 559-566, 575-581 and pp. 581-587; Michal, G (1999) Biochemical Pathways: An Atlas of Biochemistry and Molecular Biology, John Wiley and Sons; Fallon, A. et al. (1987) Applications of HPLC in Biochemistry in: Laboratory Techniques in Biochemistry and Molecular Biology, vol. 17.

[4856] Coenzymes can for example be detected advantageously via LC separation methods. The unambiguous detection for the presence of Coenzymes products can be obtained by analyzing recombinant organisms using analytical standard methods like LC-MS, LC-MSMS, or TLC. The material to be analyzed can be disrupted by sonication, grinding in a glass mill, liquid nitrogen and grinding, cooking, or via other applicable methods; see also Biotechnology of Vitamins, Pigments and Growth Factors, edited by Erik J. Vandamme, London, 1989, p. 96 to 103.

[4857] In a preferred embodiment, the present invention relates to a process for the production of the fine chemical comprising or generating in an organism or a part thereof, preferably in a cell compartment such as a plastid or mitochondria, the expression of at least one nucleic acid molecule comprising a nucleic acid molecule selected from the group consisting of:
[4858] a) nucleic acid molecule encoding, preferably at least the mature form, of the polypeptide shown in table II, application no. 18, columns 5 and 7 or a fragment thereof, which confers an increase in the amount of the fine chemical in an organism or a part thereof;
[4859] b) nucleic acid molecule comprising, preferably at least the mature form, of the nucleic acid molecule shown in table I, application no. 18, columns 5 and 7;
[4860] c) nucleic acid molecule whose sequence can be deduced from a polypeptide sequence encoded by a nucleic acid molecule of (a) or (b) as result of the degeneracy of the genetic code and conferring an increase in the amount of the fine chemical in an organism or a part thereof;
[4861] d) nucleic acid molecule encoding a polypeptide which has at least 50% identity with the amino acid sequence of the polypeptide encoded by the nucleic acid molecule of (a) to (c) and conferring an increase in the amount of the fine chemical in an organism or a part thereof;
[4862] e) nucleic acid molecule which hybridizes with a nucleic acid molecule of (a) to (c) under stringent hybridisation conditions and conferring an increase in the amount of the fine chemical in an organism or a part thereof;
[4863] f) nucleic acid molecule encoding a polypeptide, the polypeptide being derived by substituting, deleting and/or adding one or more amino acids of the amino acid sequence of the polypeptide encoded by the nucleic acid molecules (a) to (d), preferably to (a) to (c) and conferring an increase in the amount of the fine chemical in an organism or a part thereof;
[4864] g) nucleic acid molecule encoding a fragment or an epitope of a polypeptide which is encoded by one of the nucleic acid molecules of (a) to (e), preferably to (a) to (c) and conferring an increase in the amount of the fine chemical in an organism or a part thereof;
[4865] h) nucleic acid molecule comprising a nucleic acid molecule which is obtained by amplifying nucleic acid molecules from a cDNA library or a genomic library using the primers shown in table Ill, application no. 18, column 7 and conferring an increase in the amount of the fine chemical in an organism or a part thereof;
[4866] i) nucleic acid molecule encoding a polypeptide which is isolated, e.g. from an expression library, with the aid of monoclonal antibodies against a polypeptide encoded by one of the nucleic acid molecules of (a) to (h), preferably to (a) to (c), and conferring an increase in the amount of the fine chemical in an organism or a part thereof;
[4867] j) nucleic acid molecule which encodes a polypeptide comprising the consensus sequence shown in table IV, application no. 18, column 7 and conferring an increase in the amount of the fine chemical in an organism or a part thereof;
[4868] k) nucleic acid molecule comprising one or more of the nucleic acid molecule encoding the amino acid sequence of a polypeptide encoding a domain of the polypeptide shown in table II, application no. 18, columns 5 and 7 and conferring an increase in the amount of the fine chemical in an organism or a part thereof; and
[4869] l) nucleic acid molecule which is obtainable by screening a suitable library under stringent conditions with a probe comprising one of the sequences of the nucleic acid molecule of (a) to (k), preferably to (a) to (c), or with a fragment of at least 15 nt, preferably 20 nt, 30 nt, 50 nt, 100 nt, 200 nt or 500 nt of the nucleic acid molecule characterized in (a) to (k), preferably to (a) to (c), and conferring an increase in the amount of the fine chemical in an organism or a part thereof;
   or which comprises a sequence which is complementary thereto.

[4870] In one embodiment, the nucleic acid molecule used in the process of the invention distinguishes over the sequence indicated in table I A, application no. 18, columns 5 and 7 by one or more nucleotides. In one embodiment, the nucleic acid molecule used in the process of the invention does not consist of the sequence indicated in table I A, application no. 18, columns 5 and 7. In one embodiment, the nucleic acid molecule used in the process of the invention is less than 100%, 99.999%, 99.99%, 99.9% or 99% identical to a sequence indicated in table I A, application no. 18, columns 5 and 7. In another embodiment, the nucleic acid molecule does not encode a polypeptide of a sequence indicated in table II A, application no. 18, columns 5 and 7.

[4871] In one embodiment, the nucleic acid molecule used in the process of the invention distinguishes over the sequence indicated in table I B, application no. 18, columns 5 and 7, by one or more nucleotides. In one embodiment, the nucleic acid molecule used in the process of the invention does not consist of the sequence indicated in table I B, application no. 18, columns 5 and 7. In one embodiment, the nucleic acid molecule used in the process of the invention is less than 100%, 99.999%, 99.99%, 99.9% or 99% identical to a sequence indicated in table I B, application no. 18, columns 5 and 7. In another embodiment, the nucleic acid molecule does not encode a polypeptide of a sequence indicated in table II B, application no. 18, columns 5 and 7.

[4872] In one embodiment, the nucleic acid molecule used in the process distinguishes over the sequence shown in table I, application no. 18, columns 5 and 7 by one or more nucleotides or does not consist of the sequence shown in table I, application no. 18, columns 5 and 7. In one embodiment, the nucleic acid molecule of the present invention is less than 100%, 99.999%, 99.99%, 99.9% or 99% identical to the sequence shown in table I, application no. 18, columns 5 and 7. In another embodiment, the nucleic acid molecule does not encode a polypeptide of the sequence shown in table II, application no. 18, columns 5 and 7.

[4873] for the disclosure of the paragraphs [0118.0.0.17] to [0120.0.0.17] see paragraphs [0118.0.0.0] to [0120.0.0.0] above.

[4874] Nucleic acid molecules with the sequence shown in table I, application no. 18, columns 5 and 7, nucleic acid molecules which are derived from the amino acid sequences shown in table II, application no. 18, columns 5 and 7 or from polypeptides comprising the consensus sequence shown in table IV, application no. 18, column 7, or their derivatives or homologues encoding polypeptides with the enzymatic or biological activity of a protein as shown in table II, application no. 18, column 3 or conferring the fine chemical increase after increasing its expression or activity are advantageously increased in the process according to the invention by expression either in the cytsol or in an organelle such as a plastid or mitochondria or both, preferably in plastids.

[4875] for the disclosure of this paragraph see paragraph [0122.0.0.0] above.

[4876] Nucleic acid molecules, which are advantageous for the process according to the invention and which encode polypeptides with the activity of a protein as shown in table II, application no. 18, column 3 can be determined from generally accessible databases.

[4877] for the disclosure of this paragraph see paragraph [0124.0.0.0] above.

[4878] The nucleic acid molecules used in the process according to the invention take the form of isolated nucleic acid sequences, which encode polypeptides with the activity of the proteins as shown in table II, application no. 18, column 3 and conferring the fine chemical increase by expression either in the cytsol or in an organelle such as a plastid or mitochondria or both, preferably in plastids.

[4879] for the disclosure of the paragraphs [0126.0.0.17] to [0133.0.0.17] see paragraphs [0126.0.0.0] to [0133.0.0.0] above.

[4880] However, it is also possible to use artificial sequences, which differ in one or more bases from the nucleic acid sequences found in organisms, or in one or more amino acid molecules from polypeptide sequences found in organisms, in particular from the polypeptide sequences shown in table II, application no. 18, columns 5 and 7 or the functional homologues thereof as described herein, preferably conferring above-mentioned activity, i.e. conferring the fine chemical increase after increasing its activity, e.g. after increasing the activity of a protein as shown in table II, application no. 18, column 3 by for example expression either in the cytsol or in an organelle such as a plastid or mitochondria or both, preferably in plastids.

[4881] for the disclosure of the paragraphs [0135.0.0.17] to [0140.0.0.17] see paragraphs [0135.0.0.0] to [0140.0.0.0] above.

[4882] Synthetic oligonucleotide primers for the amplification, e.g. as shown in table III, application no. 18, column 7, by means of polymerase chain reaction can be generated on the basis of a sequence shown herein, for example the sequence shown in table I, application no. 18, columns 5 and 7 or the sequences derived from table II, application no. 18, columns 5 and 7.

[4883] Moreover, it is possible to identify conserved regions from various organisms by carrying out protein sequence alignments with the polypeptide used in the process of the invention, in particular with sequences of the polypeptide of the invention, from which conserved regions, and in turn, degenerate primers can be derived. Conserved regions are those, which show a very little variation in the amino acid in one particular position of several homologs from different origin. The consensus sequence shown in table IV, application no. 18, column 7 is derived from said alignments.

[4884] Degenerated primers can then be utilized by PCR for the amplification of fragments of novel proteins having above-mentioned activity, e.g. conferring the increase of the fine chemical after increasing the expression or activity or having the activity of a protein as shown in table II, application no. 18, column 3 or further functional homologs of the polypeptide of the invention from other organisms.

[4885] for the disclosure of the paragraphs [0144.0.0.17] to [0151.0.0.17] see paragraphs [0144.0.0.0] to [0151.0.0.0] above.

[4886] Polypeptides having above-mentioned activity, i.e. conferring the fine chemical increase, derived from other organisms, can be encoded by other DNA sequences which hybridize to the sequences shown in table I, application no. 18, columns 5 and 7, preferably of table I B, application no. 18, columns 5 and 7 under relaxed hybridization conditions and which code on expression for peptides having the Coenzyme Q9 and/or Coenzyme Q10 increasing activity.

[4887] for the disclosure of the paragraphs [0153.0.0.17] to [0159.0.0.17] see paragraphs [0153.0.0.0] to [0159.0.0.0] above.

[4888] Further, the nucleic acid molecule of the invention comprises a nucleic acid molecule, which is a complement of one of the nucleotide sequences of above mentioned nucleic acid molecules or a portion thereof. A nucleic acid molecule which is complementary to one of the nucleotide sequences shown in table I, application no. 18, columns 5 and 7, preferably shown in table I B, application no. 18, columns 5 and 7 is one which is sufficiently complementary to one of the nucleotide sequences shown in table I, application no. 18, columns 5 and 7, preferably shown in table I B, application no. 18, columns 5 and 7 such that it can hybridize to one of the nucleotide sequences shown in table I, application no. 18, columns 5 and 7, preferably shown in table I B, application no. 18, columns 5 and 7, thereby forming a stable duplex. Preferably, the hybridisation is performed under stringent hybridization conditions. However, a complement of one of the herein disclosed sequences is preferably a sequence complement thereto according to the base pairing of nucleic acid molecules well known to the skilled person. For example, the bases A and G undergo base pairing with the bases T and U or C, resp. and visa versa. Modifications of the bases can influence the base-pairing partner.

[4889] The nucleic acid molecule of the invention comprises a nucleotide sequence which is at least about 30%, 35%, 40% or 45%, preferably at least about 50%, 55%, 60% or 65%, more preferably at least about 70%, 80%, or 90%, and even more preferably at least about 95%, 97%, 98%, 99% or more homologous to a nucleotide sequence shown in table I, application no. 18, columns 5 and 7, preferably shown in table I B, application no. 18, columns 5 and 7, or a portion thereof and preferably has above mentioned activity, in particular having a fine chemical increasing activity after increasing the activity or an activity of a gene product as shown in table II, application no. 18, column 3 by for example expression either in the cytsol or in an organelle such as a plastid or mitochondria or both, preferably in plastids.

[4890] The nucleic acid molecule of the invention comprises a nucleotide sequence which hybridizes, preferably hybridizes under stringent conditions as defined herein, to one of the nucleotide sequences shown in table I, application no. 18, columns 5 and 7, preferably shown in table I B, application no. 18, columns 5 and 7, or a portion thereof and encodes a protein having above-mentioned activity, e.g. conferring of a Coenzyme Q9 and/or Coenzyme Q10 increase by for example expression either in the cytsol or in an organelle such as a plastid or mitochondria or both, preferably in plastids, and optionally, the activity of a protein as shown in table II, application no. 18, column 3.

[4891] Moreover, the nucleic acid molecule of the invention can comprise only a portion of the coding region of one of the sequences shown in table I, application no. 18, columns 5 and 7, preferably shown in table I B, application no. 18, columns 5 and 7, for example a fragment which can be used as a probe or primer or a fragment encoding a biologically active portion of the polypeptide of the present invention or of a polypeptide used in the process of the present invention, i.e. having above-mentioned activity, e.g. conferring an increase of the fine chemical if its activity is increased by for example expression either in the cytsol or in an organelle such as a plastid or mitochondria or both, preferably in plastids. The nucleotide sequences determined from the cloning of the present protein-according-to-the-invention-encoding gene allows for the generation of probes and primers designed for use in identifying and/or cloning its homologues in other cell types and organisms. The probe/primer typically comprises substantially purified oligonucleotide. The oligonucleotide typically comprises a region of nucleotide sequence that hybridizes under stringent conditions to at least about 12, 15 preferably about 20 or 25, more preferably about 40, 50 or 75 consecutive nucleotides of a sense strand of one of the sequences set forth, e.g., in table I, application no. 18, columns 5 and 7, an anti-sense sequence of one of the sequences, e.g., set forth in table I, application no. 18, columns 5 and 7, preferably shown in table I B, application no. 18, columns 5 and 7, or naturally occurring mutants thereof. Primers based on a nucleotide of invention can be used in PCR reactions to clone homologues of the polypeptide of the invention or of the polypeptide used in the process of the invention, e.g. as the primers described in the examples of the present invention, e.g. as shown in the examples. A PCR with the primers shown in table III, application no. 18, column 7 will result in a fragment of the gene product as shown in table II, column 3.

[4892] for the disclosure of this paragraph see paragraph [0164.0.0.0] above.

[4893] The nucleic acid molecule of the invention encodes a polypeptide or portion thereof which includes an amino acid sequence which is sufficiently homologous to the amino acid sequence shown in table II, application no. 18, columns 5 and 7 such that the protein or portion thereof maintains the ability to participate in the fine chemical production, in particular a Coenzyme Q9 and/or Coenzyme Q10 increasing activity as mentioned above or as described in the examples in plants or microorganisms is comprised.

[4894] As used herein, the language “sufficiently homologous” refers to proteins or portions thereof which have amino acid sequences which include a minimum number of identical or equivalent amino acid residues (e.g., an amino acid residue which has a similar side chain as an amino acid residue in one of the sequences of the polypeptide of the present invention) to an amino acid sequence shown in table II, application no. 18, columns 5 and 7 such that the protein or portion thereof is able to participate in the increase of the fine chemical production. For examples having the activity of a protein as shown in table II, column 3 and as described herein.

[4895] In one embodiment, the nucleic acid molecule of the present invention comprises a nucleic acid that encodes a portion of the protein of the present invention. The protein is at least about 30%, 35%, 40%, 45% or 50%, preferably at least about 55%, 60%, 65% or 70%, and more preferably at least about 75%, 80%, 85%, 90%, 91%, 92%, 93% or 94% and most preferably at least about 95%, 97%, 98%, 99% or more homologous to an entire amino acid sequence of table II, application no. 18, columns 5 and 7 and having above-mentioned activity, e.g. conferring preferably the increase of the fine chemical by for example expression either in the cytsol or in an organelle such as a plastid or mitochondria or both, preferably in plastids.

[4896] for the disclosure of the paragraphs [0168.0.0.17] and [0169.0.0.17] see paragraphs [0168.0.0.0] and [0169.0.0.0] above.

[4897] The invention further relates to nucleic acid molecules that differ from one of the nucleotide sequences shown in table I, application no. 18, columns 5 and 7 (and portions thereof) due to degeneracy of the genetic code and thus encode a polypeptide of the present invention, in particular a polypeptide having above mentioned activity, e.g. conferring an increase in the fine chemical in a organism, e.g. as that polypeptides depicted by the sequence shown in table II, application no. 18, columns 5 and 7 or the functional homologues. Advantageously, the nucleic acid molecule of the invention comprises, or in an other embodiment has, a nucleotide sequence encoding a protein comprising, or in an other embodiment having, an amino acid sequence shown in table II, application no. 18, columns 5 and 7 or the functional homologues. In a still further embodiment, the nucleic acid molecule of the invention encodes a full length protein which is substantially homologous to an amino acid sequence shown in table II, application no. 18, columns 5 and 7 or the functional homologues. However, in a preferred embodiment, the nucleic acid molecule of the present invention does not consist of the sequence shown in table I, application no. 18, columns 5 and 7, preferably as indicated in table I A, application no. 18, columns 5 and 7. Preferably the nucleic acid molecule of the invention is a functional homologue or identical to a nucleic acid molecule indicated in table I B, application no. 18, columns 5 and 7.

[4898] for the disclosure of the paragraphs [0171.0.0.17] to [0173.0.0.17] see paragraphs [0171.0.0.0] to [0173.0.0.0] above.

[4899] Accordingly, in another embodiment, a nucleic acid molecule of the invention is at least 15, 20, 25 or 30 nucleotides in length. Preferably, it hybridizes under stringent conditions to a nucleic acid molecule comprising a nucleotide sequence of the nucleic acid molecule of the present invention or used in the process of the present invention, e.g. comprising the sequence shown in table I, application no. 18, columns 5 and 7. The nucleic acid molecule is preferably at least 20, 30, 50, 100, 250 or more nucleotides in length.

[4900] for the disclosure of this paragraph see paragraph [0175.0.0.0] above.

[4901] Preferably, nucleic acid molecule of the invention that hybridizes under stringent conditions to a sequence shown in table I, application no. 18, columns 5 and 7 corresponds to a naturally-occurring nucleic acid molecule of the invention. As used herein, a “naturally-occurring” nucleic acid molecule refers to an RNA or DNA molecule having a nucleotide sequence that occurs in nature (e.g., encodes a natural protein). Preferably, the nucleic acid molecule encodes a natural protein having abovementioned activity, e.g. conferring the fine chemical increase after increasing the expression or activity thereof or the activity of a protein of the invention or used in the process of the invention by for example expression the nucleic acid sequence of the gene product in the cytsol and/or in an organelle such as a plastid or mitochondria, preferably in plastids.

[4902] for the disclosure of this paragraph see paragraph [0177.0.0.0] above.

[4903] For example, nucleotide substitutions leading to amino acid substitutions at “non-essential” amino acid residues can be made in a sequence of the nucleic acid molecule of the invention or used in the process of the invention, e.g. shown in table I, application no. 18, columns 5 and 7.

[4904] for the disclosure of the paragraphs [0179.0.0.17] and [0180.0.0.17] see paragraphs [0179.0.0.0] and [0180.0.0.0] above.

[4905] Accordingly, the invention relates to nucleic acid molecules encoding a polypeptide having above-mentioned activity, e.g. conferring an increase in the fine chemical in an organisms or parts thereof by for example expression either in the cytsol or in an organelle such as a plastid or mitochondria or both, preferably in plastids that contain changes in amino acid residues that are not essential for said activity. Such polypeptides differ in amino acid sequence from a sequence contained in the sequences shown in table II, application no. 18, columns 5 and 7, preferably shown in table II A, application no. 18, columns 5 and 7 yet retain said activity described herein. The nucleic acid molecule can comprise a nucleotide sequence encoding a polypeptide, wherein the polypeptide comprises an amino acid sequence at least about 50% identical to an amino acid sequence shown in table II, application no. 18, columns 5 and 7, preferably shown in table II A, application no. 18, columns 5 and 7 and is capable of participation in the increase of production of the fine chemical after increasing its activity, e.g. its expression by for example expression either in the cytsol or in an organelle such as a plastid or mitochondria or both, preferably in plastids. Preferably, the protein encoded by the nucleic acid molecule is at least about 60% identical to the sequence shown in table II, application no. 18, columns 5 and 7, preferably shown in table II A, application no. 18, columns 5 and 7, more preferably at least about 70% identical to one of the sequences shown in table II, application no. 18, columns 5 and 7, preferably shown in table II A, application no. 18, columns 5 and 7, even more preferably at least about 80%, 90%, 95% homologous to the sequence shown in table II, application no. 18, columns 5 and 7, preferably shown in table II A, application no. 18, columns 5 and 7, and most preferably at least about 96%, 97%, 98%, or 99% identical to the sequence shown in table II, application no. 18, columns 5 and 7, preferably shown in table II A, application no. 18, columns 5 and 7.

[4906] for the disclosure of the paragraphs [0182.0.0.17] to [0188.0.0.17] see paragraphs [0182.0.0.0] to [0188.0.0.0] above.

[4907] Functional equivalents derived from one of the polypeptides as shown in table II, application no. 18, columns 5 and 7, preferably shown in table II B, application no. 18, columns 5 and 7 resp., according to the invention by substitution, insertion or deletion have at least 30%, 35%, 40%, 45% or 50%, preferably at least 55%, 60%, 65% or 70% by preference at least 80%, especially preferably at least 85% or 90%, 91%, 92%, 93% or 94%, very especially preferably at least 95%, 97%, 98% or 99% homology with one of the polypeptides as shown in table II, application no. 18, columns 5 and 7, preferably shown in table II B, application no. 18, columns 5 and 7 resp., according to the invention and are distinguished by essentially the same properties as the polypeptide as shown in table II, application no. 18, columns 5 and 7, preferably shown in table II B, application no. 18, columns 5 and 7.

[4908] Functional equivalents derived from the nucleic acid sequence as shown in table I, application no. 18, columns 5 and 7, preferably shown in table I B, application no. 18, columns 5 and 7 resp., according to the invention by substitution, insertion or deletion have at least 30%, 35%, 40%, 45% or 50%, preferably at least 55%, 60%, 65% or 70% by preference at least 80%, especially preferably at least 85% or 90%, 91%, 92%, 93% or 94%, very especially preferably at least 95%, 97%, 98% or 99% homology with one of the polypeptides as shown in table II, application no. 18, columns 5 and 7, preferably shown in table II B, application no. 18, columns 5 and 7 resp., according to the invention and encode polypeptides having essentially the same properties as the polypeptide as shown in table II, application no. 18, columns 5 and 7, preferably shown in table II B, application no. 18, columns 5 and 7.

[4909] for the disclosure of this paragraph see paragraph [0191.0.0.0] above.

[4910] A nucleic acid molecule encoding an homologous to a protein sequence of table II, application no. 18, columns 5 and 7, preferably shown in table II B, application no. 18, columns 5 and 7 resp., can be created by introducing one or more nucleotide substitutions, additions or deletions into a nucleotide sequence of the nucleic acid molecule of the present invention, in particular of table I, application no. 18, columns 5 and 7, preferably shown in table I B, application no. 18, columns 5 and 7 resp., such that one or more amino acid substitutions, additions or deletions are introduced into the encoded protein. Mutations can be introduced into the encoding sequences of table I, application no. 18, columns 5 and 7, preferably shown in table I B, application no. 18, columns 5 and 7 resp., by standard techniques, such as site-directed mutagenesis and PCR-mediated mutagenesis.

[4911] for the disclosure of the paragraphs [0193.0.0.17] to [0196.0.0.17] see paragraphs [0193.0.0.0] to [0196.0.0.0] above.

[4912] Homologues of the nucleic acid sequences used, with the sequence shown in table I, application no. 18, columns 5 and 7, preferably shown in table I B, application no. 18, columns 5 and 7, comprise also allelic variants with at least approximately 30%, 35%, 40% or 45% homology, by preference at least approximately 50%, 60% or 70%, more preferably at least approximately 90%, 91%, 92%, 93%, 94% or 95% and even more preferably at least approximately 96%, 97%, 98%, 99% or more homology with one of the nucleotide sequences shown or the abovementioned derived nucleic acid sequences or their homologues, derivatives or analogues or parts of these. Allelic variants encompass in particular functional variants which can be obtained by deletion, insertion or substitution of nucleotides from the sequences shown, preferably from table I, application no. 18, columns 5 and 7, preferably shown in table I B, application no. 18, columns 5 and 7, or from the derived nucleic acid sequences, the intention being, however, that the enzyme activity or the biological activity of the resulting proteins synthesized is advantageously retained or increased.

[4913] In one embodiment of the present invention, the nucleic acid molecule of the invention or used in the process of the invention comprises the sequences shown in any of the table I, application no. 18, columns 5 and 7, preferably shown in table I B, application no. 18, columns 5 and 7. It is preferred that the nucleic acid molecule comprises as little as possible other nucleotides not shown in any one of table I, application no. 18, columns 5 and 7, preferably shown in table I B, application no. 18, columns 5 and 7. In one embodiment, the nucleic acid molecule comprises less than 500, 400, 300, 200, 100, 90, 80, 70, 60, 50 or 40 further nucleotides. In a further embodiment, the nucleic acid molecule comprises less than 30, 20 or 10 further nucleotides. In one embodiment, the nucleic acid molecule use in the process of the invention is identical to the sequences shown in table I, application no. 18, columns 5 and 7, preferably shown in table I B, application no. 18, columns 5 and 7.

[4914] Also preferred is that the nucleic acid molecule used in the process of the invention encodes a polypeptide comprising the sequence shown in table II, application no. 18, columns 5 and 7, preferably shown in table II B, application no. 18, columns 5 and 7. In one embodiment, the nucleic acid molecule encodes less than 150, 130, 100, 80, 60, 50, 40 or 30 further amino acids. In a further embodiment, the encoded polypeptide comprises less than 20, 15, 10, 9, 8, 7, 6 or 5 further amino acids. In one embodiment used in the inventive process, the encoded polypeptide is identical to the sequences shown in table II, application no. 18, columns 5 and 7, preferably shown in table II B, application no. 18, columns 5 and 7.

[4915] In one embodiment, the nucleic acid molecule of the invention or used in the process encodes a polypeptide comprising the sequence shown in table II, application no. 18, columns 5 and 7, preferably shown in table II B, application no. 18, columns 5 and 7 comprises less than 100 further nucleotides. In a further embodiment, said nucleic acid molecule comprises less than 30 further nucleotides. In one embodiment, the nucleic acid molecule used in the process is identical to a coding sequence of the sequences shown in table I, application no. 18, columns 5 and 7, preferably shown in table I B, application no. 18, columns 5 and 7.

[4916] Polypeptides (=proteins), which still have the essential biological or enzymatic activity of the polypeptide of the present invention conferring an increase of the fine chemical i.e. whose activity is essentially not reduced, are polypeptides with at least 10% or 20%, by preference 30% or 40%, especially preferably 50% or 60%, very especially preferably 80% or 90 or more of the wild type biological activity or enzyme activity, advantageously, the activity is essentially not reduced in comparison with the activity of a polypeptide shown in table II, application no. 18, columns 5 and 7 expressed under identical conditions.

[4917] Homologues of table I, application no. 18, columns 5 and 7 or of the derived sequences of table II, application no. 18, columns 5 and 7 also mean truncated sequences, cDNA, single-stranded DNA or RNA of the coding and noncoding DNA sequence. Homologues of said sequences are also understood as meaning derivatives, which comprise noncoding regions such as, for example, UTRs, terminators, enhancers or promoter variants. The promoters upstream of the nucleotide sequences stated can be modified by one or more nucleotide substitution(s), insertion(s) and/or deletion(s) without, however, interfering with the functionality or activity either of the promoters, the open reading frame (=ORF) or with the 3′-regulatory region such as terminators or other 3′ regulatory regions, which are far away from the ORF. It is furthermore possible that the activity of the promoters is increased by modification of their sequence, or that they are replaced completely by more active promoters, even promoters from heterologous organisms. Appropriate promoters are known to the person skilled in the art and are mentioned herein below.

[4918] for the disclosure of the paragraphs [0203.0.0.17] to [0215.0.0.17] see paragraphs [0203.0.0.0] to [0215.0.0.0] above.

[4919] Accordingly, in one embodiment, the invention relates to a nucleic acid molecule, which comprises a nucleic acid molecule selected from the group consisting of:
[4920] a) nucleic acid molecule encoding, preferably at least the mature form, of the polypeptide shown in table II, application no. 18, columns 5 and 7, preferably in table II B, application no. 18, columns 5 and 7; or a fragment thereof conferring an increase in the amount of the fine chemical in an organism or a part thereof
[4921] b) nucleic acid molecule comprising, preferably at least the mature form, of the nucleic acid molecule shown in table I, application no. 18, columns 5 and 7, preferably in table I B, application no. 18, columns 5 and 7 or a fragment thereof conferring an increase in the amount of the fine chemical in an organism or a part thereof;
[4922] c) nucleic acid molecule whose sequence can be deduced from a polypeptide sequence encoded by a nucleic acid molecule of (a) or (b) as result of the degeneracy of the genetic code and conferring an increase in the amount of the fine chemical in an organism or a part thereof;
[4923] d) nucleic acid molecule encoding a polypeptide whose sequence has at least 50% identity with the amino acid sequence of the polypeptide encoded by the nucleic acid molecule of (a) to (c) and conferring an increase in the amount of the fine chemical in an organism or a part thereof;
[4924] e) nucleic acid molecule which hybridizes with a nucleic acid molecule of (a) to (c) under stringent hybridisation conditions and conferring an increase in the amount of the fine chemical in an organism or a part thereof;
[4925] f) nucleic acid molecule encoding a polypeptide, the polypeptide being derived by substituting, deleting and/or adding one or more amino acids of the amino acid sequence of the polypeptide encoded by the nucleic acid molecules (a) to (d), preferably to (a) to (c), and conferring an increase in the amount of the fine chemical in an organism or a part thereof;
[4926] g) nucleic acid molecule encoding a fragment or an epitope of a polypeptide which is encoded by one of the nucleic acid molecules of (a) to (e), preferably to (a) to (c) and conferring an increase in the amount of the fine chemical in an organism or a part thereof;
[4927] h) nucleic acid molecule comprising a nucleic acid molecule which is obtained by amplifying a cDNA library or a genomic library using the primers in table III, application no. 18, column 7 and conferring an increase in the amount of the fine chemical in an organism or a part thereof;
[4928] i) nucleic acid molecule encoding a polypeptide which is isolated, e.g. from a expression library, with the aid of monoclonal antibodies against a polypeptide encoded by one of the nucleic acid molecules of (a) to (g), preferably to (a) to (c) and conferring an increase in the amount of the fine chemical in an organism or a part thereof;
[4929] j) nucleic acid molecule which encodes a polypeptide comprising the consensus sequence shown in table IV, application no. 18, column 7 and conferring an increase in the amount of the fine chemical in an organism or a part thereof;
[4930] k) nucleic acid molecule encoding the amino acid sequence of a polypeptide encoding a domain of the polypeptide shown in table II, application no. 18, columns 5 and 7 and conferring an increase in the amount of the fine chemical in an organism or a part thereof; and
[4931] l) nucleic acid molecule which is obtainable by screening a suitable nucleic acid library under stringent hybridization conditions with a probe comprising one of the sequences of the nucleic acid molecule of (a) to (k) or with a fragment of at least 15 nt, preferably 20 nt, 30 nt, 50 nt, 100 nt, 200 nt or 500 nt of the nucleic acid molecule characterized in (a) to (h) or of the nucleic acid molecule shown in table I, application no. 18, columns 5 and 7 or a nucleic acid molecule encoding, preferably at least the mature form of, the polypeptide shown in table II, application no. 18, columns 5 and 7, and conferring an increase in the amount of the fine chemical in an organism or a part thereof; or which encompasses a sequence which is complementary thereto;
   whereby, preferably, the nucleic acid molecule according to (a) to (l) distinguishes over the sequence depicted in table I A and/or I B, application no. 18, columns 5 and 7 by one or more nucleotides. In one embodiment, the nucleic acid molecule of the invention does not consist of the sequence shown in table I A and/or I B, application no. 18, columns 5 and 7. In another embodiment, the nucleic acid molecule of the present invention is at least 30% identical and less than 100%, 99.999%, 99.99%, 99.9% or 99% identical to the sequence shown in table IA and/or I B, application no. 18, columns 5 and 7. In a further embodiment the nucleic acid molecule does not encode the polypeptide sequence shown in table II A and/or II B, application no. 18, columns 5 and 7. Accordingly, in one embodiment, the nucleic acid molecule of the present invention encodes in one embodiment a polypeptide which differs at least in one or more amino acids from the polypeptide shown in table II A and/or II B, application no. 18, columns 5 and 7 does not encode a protein of the sequence shown in table II A and/or II B, application no. 18, columns 5 and 7. Accordingly, in one embodiment, the protein encoded by a sequence of a nucleic acid according to (a) to (l) does not consist of the sequence shown in table IA and/or I B, application no. 18, columns 5 and 7. In a further embodiment, the protein of the present invention is at least 30% identical to protein sequence depicted in table II A and/or II B, application no. 18, columns 5 and 7 and less than 100%, preferably less than 99.999%, 99.99% or 99.9%, more preferably less than 99%, 985, 97%, 96% or 95% identical to the sequence shown in table II A and/or II B, application no. 18, columns 5 and 7.

[4932] for the disclosure of the paragraphs [0217.0.0.17] to [0226.0.0.17] see paragraphs [0217.0.0.0] to [0226.0.0.0] above.

[4933] In general, vector systems preferably also comprise further cis-regulatory regions such as promoters and terminators and/or selection markers by means of which suitably transformed organisms can be identified. While vir genes and T-DNA sequences are located on the same vector in the case of cointegrated vector systems, binary systems are based on at least two vectors, one of which bears vir genes, but no T-DNA, while a second one bears T-DNA, but no vir gene. Owing to this fact, the last-mentioned vectors are relatively small, easy to manipulate and capable of replication in E. coli and in Agrobacterium. These binary vectors include vectors from the series pBIB-HYG, pPZP, pBecks, pGreen. Those which are preferably used in accordance with the invention are Bin19, pBI101, pBinAR, pGPTV and pCAMBIA. An overview of binary vectors and their use is given by Hellens et al, Trends in Plant Science (2000) 5, 446-451. The vectors are preferably modified in such a manner, that they already contain the nucleic acid coding for the transitpeptide and that the nucleic acids of the invention, preferentially the nucleic acid sequences encoding the polypeptides shown in table II, application no. 18, columns 5 and 7 can be cloned 3″ prime to the transitpeptide encoding sequence, leading to a functional preprotein, which is directed to the plastids and which means that the mature protein fulfills its biological activity.

[4934] for the disclosure of the paragraphs [0228.0.0.17] to [0239.0.0.17] see paragraphs [0228.0.0.0] to [0239.0.0.0] above.

[4935] The abovementioned nucleic acid molecules can be cloned into the nucleic acid constructs or vectors according to the invention in combination together with further genes, or else different genes are introduced by transforming several nucleic acid constructs or vectors (including plasmids) into a host cell, advantageously into a plant cell or a microorganisms.

In addition to the sequence mentioned in Table I, application no. 18, columns 5 and 7 or its derivatives, it is advantageous additionally to express and/or mutate further genes in the organisms. Especially advantageously, additionally at least one further gene of the Coenzyme Q9 and/or Coenzyme Q10 biosynthetic pathway is expressed in the organisms such as plants or microorganisms. It is also possible that the regulation of the natural genes has been modified advantageously so that the gene and/or its gene product is no longer subject to the regulatory mechanisms which exist in the organisms. This leads to an increased synthesis of the respective desired fine chemical since, for example, feedback regulations no longer exist to the same extent or not at all. In addition it might be advantageously to combine the sequences shown in Table I, application no. 18, columns 5 and 7 with genes which generally support or enhances to growth or yield of the target organism, for example genes which lead to faster growth rate of microorganisms or genes which produces stress-, pathogen, or herbicide resistant plants.

[4936] In a further embodiment of the process of the invention, therefore, organisms are grown, in which there is simultaneous direct or indirect overexpression of at least one nucleic acid or one of the genes which code for proteins involved in the Coenzyme Q metabolism, in particular in synthesis of Coenzyme Q9 and/or Coenzyme Q10. Indirect overexpression might be brought about by the manipulation of the regulation of the endogenous gene, for example through promoter mutations or the expression of natural or artificial transcriptional regulators.

[4937] Further advantageous nucleic acid sequences which can be expressed in combination with the sequences used in the process and/or the abovementioned biosynthesis genes are the sequences encoding further genes of the isoprenoid biosynthetic pathway such as genes for acetyl CoA, HMG-CoA, Mevalonate, Isopentyl pyrophosphate, Geranyl pyrophosphate, Farnesyl pyrophosphate e.g. HMG-CoA Reductase, Mevalonate, Kinase, etc. It is also possible that the regulation of the natural genes has been modified advantageously so that the gene and/or its gene product is no longer subject to the regulatory mechanisms which exist in the organisms. This leads to an increased synthesis of the isoprenoids, coenzyme precursor or coenzymes, preferably Q9 and/or Q10, as desired since, for example, feedback regulations no longer exist to the same extent or not at all.

[4938] In a further advantageous embodiment of the process of the invention, the organisms used in the process are those in which advantageously simultaneously a Coenzyme Q9 and/or Coenzyme Q10 degrading protein is attenuated, in particular by reducing the rate of expression of the corresponding gene, or by inactivating the gene for example the mutagenesis and/or selection. In another advantageous embodiment the synthesis of competitive pathways which rely on the same precoursers are down regulated or interrupted.

[4939] The respective fine chemical produced can be isolated from the organism by methods with which the skilled worker are familiar, for example via extraction, salt precipitation, and/or different chromatography methods. The process according to the invention can be conducted batchwise, semibatchwise or continuously. The fine chemical and other Coenzymes produced by this process can be obtained by harvesting the organisms, either from the crop in which they grow, or from the field. This can be done via for example pressing or extraction of the plant parts.

[4940] Preferrably, the compound is a composition comprising the essentially pure Coenzyme Q9 and/or Coenzyme Q10 or a recovered or isolated Coenzyme Q9 and/or Coenzyme Q10.

[4941] for the disclosure of the paragraphs [0243.0.0.17] to [0264.0.0.17] see paragraphs [0243.0.0.0] to [0264.0.0.0] above.

[4942] Other preferred sequences for use in operable linkage in gene expression constructs are targeting sequences, which are required for targeting the gene product into specific cell compartments (for a review, see Kermode, Crit. Rev. Plant Sci. 15, 4 (1996) 285-423 and references cited therein), for example into the vacuole, the nucleus, all types of plastids, such as amyloplasts, chloroplasts, chromoplasts, the extracellular space, the mitochondria, the endoplasmic reticulum, elaioplasts, peroxisomes, glycosomes, and other compartments of cells or extracellular preferred are sequences, which are involved in targeting to plastids as mentioned above. Sequences, which must be mentioned in this context are, in particular, the signal-peptide- or transit-peptide-encoding sequences which are known per se. For example, plastid-transit-peptide-encoding sequences enable the targeting of the expression product into the plastids of a plant cell. Targeting sequences are also known for eukaryotic and to a lower extent for prokaryotic organisms and can advantageously be operable linked with the nucleic acid molecule of the present invention as shown in table I, application no. 18, columns 5 and 7 and described herein to achieve an expression in one of said compartments or extracellular.

[4943] for the disclosure of the paragraphs [0266.0.0.17] to [0287.0.0.17] see paragraphs [0266.0.0.0] to [0287.0.0.0] above.

[4944] Accordingly, one embodiment of the invention relates to a vector where the nucleic acid molecule according to the invention is linked operably to regulatory sequences which permit the expression in a prokaryotic or eukaryotic or in a prokaryotic and eukaryotic host. A further preferred embodiment of the invention relates to a vector in which a nucleic acid sequence encoding one of the polypeptides shown in table II, application no. 18, columns 5 and 7 or their homologs is functionally linked to a plastidial targeting sequence. A further preferred embodiment of the invention relates to a vector in which a nucleic acid sequence encoding one of the polypeptides shown in table II, application no. 18, columns 5 and 7 or their homologs is functionally linked to a regulatory sequences which permit the expression in plastids.

[4945] for the disclosure of the paragraphs [0289.0.0.17] to [0296.0.0.17] see paragraphs [0289.0.0.0] to [0296.0.0.0] above.

[4946] Moreover, native polypeptide conferring the increase of the fine chemical in an organism or part thereof can be isolated from cells (e.g., endothelial cells), for example using the antibody of the present invention as described below, in particular, an anti-b1551, anti-b1556, anti-b1704, anti-b2600, anti-b2965 and/or anti-b4039 protein antibody or an antibody against polypeptides as shown in table II, application no. 18, columns 5 and 7, which can be produced by standard techniques utilizing the polypeptide of the present invention or fragment thereof, i.e., the polypeptide of this invention. Preferred are monoclonal antibodies.

[4947] for the disclosure of this paragraph see paragraph [0298.0.0.0] above.

[4948] In one embodiment, the present invention relates to a polypeptide having the sequence shown in table II, application no. 18, columns 5 and 7 or as coded by the nucleic acid molecule shown in table I, application no. 18, columns 5 and 7 or functional homologues thereof.

[4949] In one advantageous embodiment, in the method of the present invention the activity of a polypeptide is increased comprising or consisting of the consensus sequence shown in table IV, application no. 18, columns 7 and in one another embodiment, the present invention relates to a polypeptide comprising or consisting of the consensus sequence shown in table IV, application no. 18, column 7 whereby 20 or less, preferably 15 or 10, preferably 9, 8, 7, or 6, more preferred 5 or 4, even more preferred 3, even more preferred 2, even more preferred 1, most preferred 0 of the amino acids positions indicated can be replaced by any amino acid.

[4950] for the disclosure of the paragraphs [0301.0.0.17] to [0304.0.0.17] see paragraphs [0301.0.0.0] to [0304.0.0.0] above.

[4951] In one advantageous embodiment, the method of the present invention comprises the increasing of a polypeptide comprising or consisting of plant or microorganism specific consensus sequences.

In one embodiment, said polypeptide of the invention distinguishes over the sequence shown in table II A and/or II B, application no. 18, columns 5 and 7 by one or more amino acids. In one embodiment, polypeptide distinguishes form the sequence shown in table II A and/or II B, application no. 18, columns 5 and 7 by more than 5, 6, 7, 8 or 9 amino acids, preferably by more than 10, 15, 20, 25 or 30 amino acids, even more preferred are more than 40, 50, or 60 amino acids and, preferably, the sequence of the polypeptide of the invention distinguishes from the sequence shown in table II A and/or II B, application no. 18, columns 5 and 7 by not more than 80% or 70% of the amino acids, preferably not more than 60% or 50%, more preferred not more than 40% or 30%, even more preferred not more than 20% or 10%. In an other embodiment, said polypeptide of the invention does not consist of the sequence shown in table II A and/or II B, application no. 18, columns 5 and 7.

[4952] for the disclosure of this paragraph see paragraph [0306.0.0.0] above.

[4953] In one embodiment, the invention relates to polypeptide conferring an increase in the fine chemical in an organism or part being encoded by the nucleic acid molecule of the invention or used in the process of the invention and having a sequence which distinguishes from the sequence as shown in table II A and/or II B, application no. 18, columns 5 and 7 by one or more amino acids. In another embodiment, said polypeptide of the invention does not consist of the sequence shown in table II A and/or II B, application no. 18, columns 5 and 7. In a further embodiment, said polypeptide of the present invention is less than 100%, 99.999%, 99.99%, 99.9% or 99% identical. In one embodiment, said polypeptide does not consist of the sequence encoded by the nucleic acid molecules shown in table I A and/or I B, application no. 18, columns 5 and 7.

[4954] In one embodiment, the present invention relates to a polypeptide having the activity of the protein as shown in table II A and/or II B, application no. 18, column 3, which distinguishes over the sequence depicted in table II A and/or II B, application no. 18, columns 5 and 7 by one or more amino acids, preferably by more than 5, 6, 7, 8 or 9 amino acids, preferably by more than 10, 15, 20, 25 or 30 amino acids, even more preferred are more than 40, 50, or 60 amino acids but even more preferred by less than 70% of the amino acids, more preferred by less than 50%, even more preferred my less than 30% or 25%, more preferred are 20% or 15%, even more preferred are less than 10%. In a further preferred embodiment the polypeptide of the invention takes the form of a preprotein consisting of a plastidial transitpeptide joint to a polypeptide having the activity of the protein as shown in table II A and/or II B, column 3, from which the transitpeptide is preferably cleaved off upon transport of the preprotein into the organelle for example into the plastid or mitochondria.

[4955] for the disclosure of the paragraphs [0309.0.0.17] to [0311.0.0.17] see paragraphs [0309.0.0.0] to [0311.0.0.0] above.

[4956] A polypeptide of the invention can participate in the process of the present invention. The polypeptide or a portion thereof comprises preferably an amino acid sequence, which is sufficiently homologous to an amino acid sequence shown in table II, application no. 18, columns 5 and 7.

[4957] Further, the polypeptide can have an amino acid sequence which is encoded by a nucleotide sequence which hybridizes, preferably hybridizes under stringent conditions as described above, to a nucleotide sequence of the nucleic acid molecule of the present invention. Accordingly, the polypeptide has an amino acid sequence which is encoded by a nucleotide sequence that is at least about 35%, 40%, 45%, 50%, 55%, 60%, 65% or 70%, preferably at least about 75%, 80%, 85% or 90, and more preferably at least about 91%, 92%, 93%, 94% or 95%, and even more preferably at least about 96%, 97%, 98%, 99% or more homologous to one of the amino acid sequences as shown in table II A and/or II B, application no. 18, columns 5 and 7. The preferred polypeptide of the present invention preferably possesses at least one of the activities according to the invention and described herein. A preferred polypeptide of the present invention includes an amino acid sequence encoded by a nucleotide sequence which hybridizes, preferably hybridizes under stringent conditions, to a nucleotide sequence of table I A and/or I B, application no. 18, columns 5 and 7 or which is homologous thereto, as defined above.

[4958] Accordingly the polypeptide of the present invention can vary from the sequences shown in table II A and/or II B, application no. 18, columns 5 and 7 in amino acid sequence due to natural variation or mutagenesis, as described in detail herein. Accordingly, the polypeptide comprise an amino acid sequence which is at least about 35%, 40%, 45%, 50%, 55%, 60%, 65% or 70%, preferably at least about 75%, 80%, 85% or 90, and more preferably at least about 91%, 92%, 93%, 94% or 95%, and most preferably at least about 96%, 97%, 98%, 99% or more homologous to an entire amino acid sequence shown in table II A and/or II B, application no. 18, columns 5 and 7.

[4959] for the disclosure of this paragraph see paragraph [0315.0.0.0] above.

[4960] Biologically active portions of an polypeptide of the present invention include peptides comprising amino acid sequences derived from the amino acid sequence of the polypeptide of the present invention or used in the process of the present invention, e.g., the amino acid sequence shown in table II, application no. 18, columns 5 and 7 or the amino acid sequence of a protein homologous thereto, which include fewer amino acids than a full length polypeptide of the present invention or used in the process of the present invention or the full length protein which is homologous to an polypeptide of the present invention or used in the process of the present invention depicted herein, and exhibit at least one activity of polypeptide of the present invention or used in the process of the present invention.

[4961] for the disclosure of this paragraph see paragraph [0317.0.0.0] above.

[4962] Manipulation of the nucleic acid molecule of the invention may result in the production of a protein having differences from the wild-type protein as shown in table II, application no. 18, column 3. Differences shall mean at least one amino acid different from the sequences as shown in table II, application no. 18, column 3, preferably at least 2, 3, 4, 5, 6, 7, 8, 9 or 10 amino acids, more preferably at least 15, 20, 25, 30, 35, 40, 45 or 50 amino acids different from the sequences as shown in table II, application no. 18, column 3. These proteins may be improved in efficiency or activity, may be present in greater numbers in the cell than is usual, or may be decreased in efficiency or activity in relation to the wild type protein.

[4963] Any mutagenesis strategies for the polypeptide of the present invention or the polypeptide used in the process of the present invention to result in increasing said activity are not meant to be limiting; variations on these strategies will be readily apparent to one skilled in the art. Using such strategies, and incorporating the mechanisms disclosed herein, the nucleic acid molecule and polypeptide of the invention may be utilized to generate plants or parts thereof, expreising wildtype proteins or mutated proteins of the proteins as shown in table II, application no. 18, column 3. The nucleic acid molecules and polypeptide molecules of the invention are expressed such that the yield, production, and/or efficiency of production of a desired compound is improved.

[4964] for the disclosure of the paragraphs [0320.0.0.17] to [0322.0.0.17] see paragraphs [0320.0.0.0] to [0322.0.0.0] above.

[4965] In one embodiment, a protein (=polypeptide) as shown in table II, application no. 18, column 3 refers to a polypeptide having an amino acid sequence corresponding to the polypeptide of the invention or used in the process of the invention, whereas a “non-inventive protein or polypeptide” or “other polypeptide” refers to a polypeptide having an amino acid sequence corresponding to a protein which is not substantially homologous to a polypeptide of the invention, preferably which is not substantially homologous to a polypeptide or protein as shown in table II, application no. 18, column 3, e.g., a protein which does not confer the activity described herein and which is derived from the same or a different organism.

[4966] for the disclosure of the paragraphs [0324.0.0.17] to [0329.0.0.17] see paragraphs [0324.0.0.0] to [0329.0.0.0] above.

[4967] In an especially preferred embodiment, the polypeptide according to the invention furthermore also does not have the sequences of those proteins, which are encoded by the sequences shown in table II, application no. 18, columns 5 and 7.

[4968] for the disclosure of the paragraphs [0331.0.0.17] to [0346.0.0.17] see paragraphs [0331.0.0.0] to [0346.0.0.0] above.

[4969] Accordingly the present invention relates to any cell transgenic for any nucleic acid characterized as part of the invention, e.g. conferring the increase of the fine chemical in a cell or an organism or a part thereof, e.g. the nucleic acid molecule of the invention, the nucleic acid construct of the invention, the antisense molecule of the invention, the vector of the invention or a nucleic acid molecule encoding the polypeptide of the invention, e.g. encoding a polypeptide having an activity as the protein as shown in table II, application no. 18, column 3. Due to the above mentioned activity the fine chemical content in a cell or an organism is increased. For example, due to modulation or manipulation, the cellular activity is increased preferably in organelles such as plastids or mitochondria, e.g. due to an increased expression or specific activity or specific targeting of the subject matters of the invention in a cell or an organism or a part thereof especially in organelles such as plastids or mitochondria. Transgenic for a polypeptide having a protein or activity means herein that due to modulation or manipulation of the genome, the activity of protein as shown in table II, application no. 18, column 3 or a protein as shown in table II, application no. 18, column 3-like activity is increased in the cell or organism or part thereof especially in organelles such as plastids or mitochondria. Examples are described above in context with the process of the invention.

[4970] for the disclosure of this paragraph see paragraph [0348.0.0.0] above.

[4971] A naturally occurring expression cassette—for example the naturally occurring combination of the promoter of the gene encoding a protein as shown in table II, application no. 18, column 3 with the corresponding encoding gene—becomes a transgenic expression cassette when it is modified by non-natural, synthetic “artificial” methods such as, for example, mutagenization. Such methods have been described (U.S. Pat. No. 5,565,350; WO 00/15815; also see above).

[4972] for the disclosure of the paragraphs [0350.0.0.17] to [0358.0.0.17] see paragraphs [0350.0.0.0] to [0358.0.0.0] above.

[4973] Transgenic plants comprising Coenzyme Q9, Coenzyme Q10 or mixtures thereof synthesized in the process according to the invention can be marketed directly without isolation of the compounds synthesized. In the process according to the invention, plants are understood as meaning all plant parts, plant organs such as leaf, stalk, root, tubers or seeds or propagation material or harvested material or the intact plant. In this context, the seed encompasses all parts of the seed such as the seed coats, epidermal cells, seed cells, endosperm or embryonic tissue. The Coenzyme Q9 and/or Coenzyme Q10 produced in the process according to the invention may, however, also be isolated from the plant in the form of their free Coenzyme Q9 and/or Coenzyme Q10 produced by this process can be isolated by harvesting the plants either from the culture in which they grow or from the field. This can be done for example via expressing, grinding and/or extraction of the plant parts, preferably the plant leaves, plant fruits, flowers and the like.

The invention furthermore relates to the use of the transgenic plants according to the invention and of the cells, cell cultures, parts—such as, for example, roots, leaves, flowers and the like as mentioned above in the case of transgenic plant organisms—derived from them, and to transgenic propagation material such as seeds or fruits and the like as mentioned above, for the production of foodstuffs or feeding stuffs, cosmetics, pharmaceuticals or fine chemicals.

[4974] for the disclosure of the paragraphs [0360.0.0.17] to [0362.0.0.17] see paragraphs [0360.0.0.0] to [0362.0.0.0] above.

[4975] In this manner, more than 50% by weight, advantageously more than 60% by weight, preferably more than 70% by weight, especially preferably more than 80% by weight, very especially preferably more than 90% by weight, of the Coenzyme Q9 and/or Coenzyme Q10 produced in the process can be isolated. The resulting fine chemical can, if appropriate, subsequently be further purified, if desired mixed with other active ingredients such as other xanthophylls, fatty acids, vitamins, amino acids, carbohydrates, antibiotics and the like, and, if appropriate, formulated.

[4976] In one embodiment, Coenzyme Q9 and/or Coenzyme Q10 is the fine chemical.

[4977] The Coenzyme Q9 and/or Coenzyme Q10, in particular the respective fine chemicals obtained in the process are suitable as starting material for the synthesis of further products of value. For example, they can be used in combination with each other or alone for the production of pharmaceuticals, health products, foodstuffs, animal feeds, nutrients or cosmetics. Accordingly, the present invention relates a method for the production of pharmaceuticals, health products, food stuff, animal feeds, nutrients or cosmetics comprising the steps of the process according to the invention, including the isolation of the Coenzyme Q9 and/or Coenzyme Q10 containing, in particular Coenzyme Q9 and/or Coenzyme Q10 containing composition produced or the respective fine chemical produced if desired and formulating the product with a pharmaceutical acceptable carrier or formulating the product in a form acceptable for an application in agriculture. A further embodiment according to the invention is the use of the Coenzyme Q9 and/or Coenzyme Q10 produced in the process or of the transgenic organisms in animal feeds, foodstuffs, medicines, food supplements, cosmetics or pharmaceuticals.

[4978] for the disclosure of the paragraphs [0366.0.0.17] to [0369.0.0.17] see paragraphs [0366.0.0.0] to [0369.0.0.0] above.

[4979] The fermentation broths obtained in this way, containing in particular Coenzyme Q9 and/or Coenzyme Q10 in mixtures with other organic acids, amino acids, polypeptides or polysaccarides, normally have a dry matter content of from 1 to 70% by weight, preferably 7.5 to 25% by weight. Sugar-limited fermentation is additionally advantageous, e.g. at the end, for example over at least 30% of the fermentation time. This means that the concentration of utilizable sugar in the fermentation medium is kept at, or reduced to, 0 to 10 g/l, preferably to 0 to 3 g/l during this time. The fermentation broth is then processed further. Depending on requirements, the biomass can be removed or isolated entirely or partly by separation methods, such as, for example, centrifugation, filtration, decantation, coagulation/flocculation or a combination of these methods, from the fermentation broth or left completely in it.

The fermentation broth can then be thickened or concentrated by known methods, such as, for example, with the aid of a rotary evaporator, thin-film evaporator, falling film evaporator, by reverse osmosis or by nanofiltration. This concentrated fermentation broth can then be worked up by freeze-drying, spray drying, spray granulation or by other processes.

[4980] Accordingly, it is possible to purify the Coenzyme Q9 and/or Coenzyme Q10, in particular the Coenzyme Q9 and/or Coenzyme Q10 produced according to the invention further. For this purpose, the product-containing composition, e.g. a total or partial extraction fraction using organic solvents, is subjected for example to separation via e.g. an open column chromatography or HPLC in which case the desired product or the impurities are retained wholly or partly on the chromatography resin. These chromatography steps can be repeated if necessary, using the same or different chromatography resins. The skilled worker is familiar with the choice of suitable chromatography resins and their most effective use.

[4981] for the disclosure of the paragraphs [0372.0.0.17] to [0376.0.0.17], [0376.1.0.17] and [0377.0.0.17] see paragraphs [0372.0.0.0] to [0376.0.0.0], [0376.1.0.0] and [0377.0.0.0] above.

[4982] In one embodiment, the present invention relates to a method for the identification of a gene product conferring an increase in the fine chemical production in a cell, comprising the following steps:
[4983] (a) contacting e.g. hybridising, the nucleic acid molecules of a sample, e.g. cells, tissues, plants or microorganisms or a nucleic acid library, which can contain a candidate gene encoding a gene product conferring an increase in the fine chemical after expression, with the nucleic acid molecule of the present invention;
[4984] (b) identifying the nucleic acid molecules, which hybridize under relaxed stringent conditions with the nucleic acid molecule of the present invention in particular to the nucleic acid molecule sequence shown in table I, application no. 18, columns 5 and 7, preferably in table I B, application no. 18, columns 5 and 7, and, optionally, isolating the full length cDNA clone or complete genomic clone;
[4985] (c) introducing the candidate nucleic acid molecules in host cells, preferably in a plant cell or a microorganism, appropriate for producing the fine chemical;
[4986] (d) expressing the identified nucleic acid molecules in the host cells;
[4987] (e) assaying the fine chemical level in the host cells; and
[4988] (f) identifying the nucleic acid molecule and its gene product which expression confers an increase in the fine chemical level in the host cell after expression compared to the wild type.

[4989] for the disclosure of the paragraphs [0379.0.0.17] to [0383.0.0.17] see paragraphs [0379.0.0.0] to [0383.0.0.0] above.

[4990] The screen for a gene product or an agonist conferring an increase in the fine chemical production can be performed by growth of an organism for example a microorganism in the presence of growth reducing amounts of an inhibitor of the synthesis of the fine chemical. Better growth, eg higher dividing rate or high dry mass in comparison to the control under such conditions would identify a gene or gene product or an agonist conferring an increase in fine chemical production.

One can think to screen for increased fine chemical production by for example resistance to drugs blocking fine chemical synthesis and looking whether this effect is dependent on the proteins as shown in table II, application no. 18, column 3, eg comparing near identical organisms with low and high activity of the proteins as shown in table II, application no. 18, column 3.

[4991] for the disclosure of the paragraphs [0385.0.0.17] to [0404.0.0.17] see paragraphs [0385.0.0.0] to [0404.0.0.0] above.

[4992] Accordingly, the nucleic acid of the invention, or the nucleic acid molecule identified with the method of the present invention or the complement sequences thereof, the polypeptide of the invention, the nucleic acid construct of the invention, the organisms, the host cell, the microorganisms, the plant, plant tissue, plant cell, or the part thereof the invention, the vector of the invention, the agonist identifled with the method of the invention, the nucleic acid molecule identified with the method of the present invention, can be used for the production of the fine chemical or of the fine chemical and one or more other Coenzymes, in particular Coenzymes such as Coenzyme Q0 to Q8.

Accordingly, the nucleic acid of the invention, or the nucleic acid molecule identified with the method of the present invention or the complement sequences thereof, the polypeptide of the invention, the nucleic acid construct of the invention, the organisms, the host cell, the microorganisms, the plant, plant tissue, plant cell, or the part thereof of the invention, the vector of the invention, the agonist identified with the method of the invention, the antibody of the present invention, can be used for the reduction of the fine chemical in an organism or part thereof, e.g. in a cell.

[4993] for the disclosure of the paragraphs [0406.0.0.17] to [0435.0.0.17] see paragraphs [0406.0.0.0] to [0435.0.0.0] above.

[4994] Production of Coenzyme Q9 and/or Coenzyme Q10 in Chlamydomonas reinhardtii

The Coenzyme Q9 and/or Coenzyme Q10 production can be analysed as mentioned herein.
The proteins and nucleic acids can be analysed as mentioned below.
In addition a production in other organisms such as plants or microorganisms such as yeast, Mortierella or Escherichia coli is possible.

[4995] for the disclosure of the paragraphs [0437.0.0.17] and [0438.0.0.17] see paragraphs [0437.0.0.0] and [0438.0.0.0] above.

### Example 9

### Analysis of the Effect of the Nucleic Acid Molecule on the Production of Coenzyme Q9 and/or Coenzyme Q10

[4996] The effect of the genetic modification of plants or algae on the production of a desired compound (such as Coenzyme Q9 and/or Coenzyme Q10) can be determined by growing the modified plant under suitable conditions (such as those described above) and analyzing the medium and/or the cellular components for the elevated production of desired product (i.e. of Coenzyme Q9 and/or Coenzyme Q10). These analytical techniques are known to the skilled worker and comprise spectroscopy, thin-layer chromatography, various types of staining methods, enzymatic and microbiological methods and analytical chromatography such as high-performance liquid chromatography (see, for example, Ullman, Encyclopedia of Industrial Chemistry, Vol. A2, p. 89-90 and p. 443-613, VCH: Weinheim (1985); Fallon, A., et al., (1987) “Applications of HPLC in Biochemistry” in: Laboratory Techniques in Biochemistry and Molecular Biology, Vol. 17; Rehm et al. (1993) Biotechnology, Vol. 3, Chapter III: “Product recovery and purification”, p. 469-714, VCH: Weinheim; Belter, P.A., et al. (1988) Bioseparations: downstream processing for Biotechnology, John Wiley and Sons; Kennedy, J. F., and Cabral, J. M. S. (1992) Recovery processes for biological Materials, John Wiley and Sons; Shaeiwitz, J. A., and Henry, J. D. (1988) Biochemical Separations, in: Ullmann's Encyclopedia of Industrial Chemistry, Vol. B3; Chapter 11, p. 1-27, VCH: Weinheim; and Dechow, F. J. (1989) Separation and purification techniques in biotechnology, Noyes Publications) or the methods mentioned above.

[4997] for the disclosure of this paragraph see [0441.0.0.0] above.

[4998] Purification of and Determination of the Coenzyme Q9 and/or Coenzyme Q10 Content:

[4999] Abbreviations: GC-MS, gas liquid chromatography/mass spectrometry; TLC, thin-layer chromatography.

The unambiguous detection for the presence of xanthophylls can be obtained by analyzing recombinant organisms using analytical standard methods: LC, LC-MSMS or TLC, as described The total Coenzyme Q9 and/or Coenzyme Q10 produced in the organism for example in algae used in the inventive process can be analysed for example according to the following procedure:
The material such as algae or plants to be analyzed can be disrupted by sonication, grinding in a glass mill, liquid nitrogen and grinding or via other applicable methods. Plant material is initially homogenized mechanically by comminuting in a pestle and mortar to make it more amenable to extraction.

[5000] A typical sample pretreatment consists of a total lipid extraction using such polar organic solvents as acetone or alcohols as methanol, or ethers, saponification, partition between phases, separation of non-polar epiphase from more polar hypophasic derivatives and chromatography. E.g.:

For analysis, solvent delivery and aliquot removal can be accomplished with a robotic system comprising a single injector valve Gilson 232XL and a 402 2S1V diluter [Gilson, Inc. USA, 3000 W. Beltline Highway, Middleton, Wis.]. For saponification, 3 ml of 50% potassium hydroxide hydro-ethanolic solution (4 water:1 ethanol) can be added to each vial, followed by the addition of 3 ml of octanol. The saponification treatment can be conducted at room temperature with vials maintained on an IKA HS 501 horizontal shaker [Labworld-online, Inc., Wilmington, N.C.] for fifteen hours at 250 movements/minute, followed by a stationary phase of approximately one hour.
Following saponification, the supernatant can be diluted with 0.10 ml of methanol. The addition of methanol can be conducted under pressure to ensure sample homogeneity. Using a 0.25 ml syringe, a 0.1 ml aliquot can be removed and transferred to HPLC vials for analysis.
For HPLC analysis, a Hewlett Packard 1100 HPLC, complete with a quaternary pump, vacuum degassing system, six-way injection valve, temperature regulated autosampler, column oven and Photodiode Array detector can be used [Agilent Technologies available through Ultra Scientific Inc., 250 Smith Street, North Kingstown, R.I.]. The column can be a Waters YMC30, 5-micron, 4.6×250 mm with a guard column of the same material [Waters, 34 Maple Street, Milford, Mass.]. The solvents for the mobile phase can be 81 methanol: 4 water: 15 tetrahydrofuran (THF) stabilized with 0.2% BHT (2,6-di-tert-butyl-4-methylphenol). Injections were 20 μl. Separation can be isocratic at 30° C. with a flow rate of 1.7 ml/minute. The peak responses can be measured by absorbance at 447 nm.

[5001] One example is the analysis of the coenzymes. The unambiguous detection for the presence of the coenzymes products can be obtained by analyzing recombinant organisms using analytical standard methods, especially HPLC with UV or electrochemical detection as for example described in The Journal of Lipid Research, Vol. 39, 2099-2105, 1998.

Possible methods for the production and preparation of coenzymes like Coenzyme Q10 has also been described for example in WO2003056024, J57129695, J57202294, DE3416853 and DD-229152. Further methods for the isolation of the respective fine chemical can also been found in WO 9500634, Fat-Sci. Technol.; (1992) 94, 4, 153-57, DD-294280, DD-293048, JP-145413, DD-273002, DD-271128, SU1406163, JP166837, JP-176705, Acta-Biotechnol.; (1986) 6, 3, 277-79, DD-229152, DE3416854, DE3416853, JP-202840, JP-048433, JP-125306, JP-087137, JP-014026, WO2003056024 and WO200240682.
Plant material is initially homogenized mechanically by comminuting in a pestle and mortar to make it more amenable to extraction.

[5002] for the disclosure of the paragraphs [0446.0.0.17] to [0496.0.0.17] see paragraphs [0446.0.0.0] to [0496.0.0.0] above.

[5003] Usually acetone or hexane is used for the extraction of the Coenzymes and further purification is achieved by column chromatography with a suitable resin.

If necessary, these chromatography steps may be repeated, using identical or other chromatography resins. The skilled worker is familiar with the selection of suitable chromatography resin and the most effective use for a particular molecule to be purified.
In addition depending on the produced fine chemical purification is also possible with crystallization or distillation. Both methods are well known to a person skilled in the art.
[5004] The results of the different plant analyses can be seen from the table, which follows:

TABLE VI

| ORF | Metabolite | Method | Min | Max |
|---|---|---|---|---|
| b1551 | Coenzyme Q9 | LC | 1.50 | 1.84 |
| b1556 | Coenzyme Q9 | LC | 1.53 | 1.98 |
| b1704 | Coenzyme Q9 | LC | 1.43 | 3.36 |
| b1704 | Coenzyme Q10 | LC | 1.28 | 4.69 |
| b2600 | Coenzyme Q10 | LC | 1.87 | 2.01 |
| b2965 | Coenzyme Q9 | LC | 1.40 | 2.98 |
| b4039 | Coenzyme Q9 | LC | 1.53 | 2.13 |

[5005] for the disclosure of the paragraphs [0499.0.0.17] and [0500.0.0.17] see paragraphs [0499.0.0.0] and [0500.0.0.0] above.

### Example 15a

### Engineering Ryegrass Plants by Over-Expressing b1551 from Escherichia coli or Homologs of b1551 from Other Organisms

[5006] for the disclosure of the paragraphs [0502.0.0.17] to [0508.0.0.17] see paragraphs [0502.0.0.0] to [0508.0.0.0] above.

### Example 15b

### Engineering Soybean Plants by Over-Expressing b1551 from Escherichia coli or Homologs of b1551 from Other Organisms

[5007] for the disclosure of the paragraphs [0510.0.0.17] to [0513.0.0.17] see paragraphs [0510.0.0.0] to [0513.0.0.0] above.

### Example 15c

### Engineering Corn Plants by Over-Expressing b1551 from Escherichia coli or Homologs of b1551 from Other Organisms

[5008] for the disclosure of the paragraphs [0515.0.0.17] to [0544.0.0.17] see paragraphs [0515.0.0.0] to [0540.0.0.0] above.

### Example 15d

### Engineering Wheat Plants by Over-Expressing b1551 from Escherichia coli or Homologs of b1551 from Other Organisms

[5009] for the disclosure of the paragraphs [0542.0.0.17] to [0544.0.0.17] see paragraphs [0542.0.0.0] to [0544.0.0.0] above.

### Example 15e

### Engineering Rapeseed/Canola Plants by Over-Expressing b1551 from Escherichia coli or Homologs of b1551 from Other Organisms

[5010] for the disclosure of the paragraphs [0546.0.0.17] to [0549.0.0.17] see paragraphs [0544.0.0.0] to [0549.0.0.0] above.

### Example 15f

### Engineering Alfalfa Plants by Over-Expressing b1551 from Escherichia coli or Homologs of b1551 from Other Organisms

[5011] for the disclosure of the paragraphs [0551.0.0.17] to [0554.0.0.17] see paragraphs [0551.0.0.0] to [0554.0.0.0] above.

### Example 16

### Metabolite Profiling Info from Zea mays

[5012] Zea mays plants were engineered as described in Example 15c.
Metabolic results were either obtained from regenerated primary transformants (T0) or from the following progeny generation (T1) in comparison to appropriate control plants. The results are shown in table VII

TABLE VII

| ORF_NAME | Metabolite | MIN | MAX |
|---|---|---|---|
| b1704 | Coenzyme Q10 | 5.56 | 8.85 |
| b2600 | Coenzyme Q10 | 1.69 | 9.81 |

Table VII shows the increase in Coenzyme Q10 in genetically modified corn plants expressing the Escherichia coli nucleic acid sequence b1704 or b2600.
In one embodiment, in case the activity of the Escherichia coli protein b1704 or its homologs, e.g. a “3-deoxy-D-arabinoheptulosonate-7-phosphate synthase (DAHP synthetase), tryptophan-repressible”, is increased in corn plants, preferably, an increase of the fine chemical Coenzyme Q10 between 446% and 785% is conferred.
In one embodiment, in case the activity of the Escherichia coli protein b2600 or its homologs, e.g. a “bifunctional chorismate mutase/prephenate dehydrogenase”, is increased in corn plants, preferably, an increase of the fine chemical Coenzyme Q10 acid between 69% and 881% is conferred.

[5013] for the disclosure of this paragraph see [0554.2.0.0] above.

[5014] for the disclosure of this paragraph see [0555.0.0.0] above.

[5015] for the disclosure of this paragraph see [0001.0.0.0].

[5016] Plants produce several important secondary metabolites from phenylalanine through the phenylpropanoid pathway. Such substances include flavonoids, lignins, tannins, salicylic acid and hydroxycinnamic acid esters. Recent work on the phenylpropanoid pathway has shown that the traditional view of lignin biosynthesis is incorrect. Although the hydroxylation and methylation reactions of the pathway were long thought to occur at the level of the free hydroxycinnamic acids, it turns now out, that the enzymes catalyzing phenylpropanoid 3-hydroxylation and 3-O-methylation reactions uses shikimate and CoA conjugates as substrates. The recent cloning of a aldehyde dehydrogenase involved in ferulic acid and sinapic acid biosynthesis suggest that both substances are derived at least in part through oxidation of coniferaldehyde and sinapaldehyde (see Nair et al., 2004, Plant Cell, 16, 544-554 and citations therein).

[5017] Ferulic acid is a substance found in the seeds and leaves of most plants, especially in the brans of grasses such as wheat, rice, and oats. Its chemical structure strongly resembles that of curcumin, the substance responsible for the yellow color of the spice turmeric.

[5018] The amount of ferulic acid in plant materials varies widely depending on the species and growing conditions; supplements are therefore a more reliable source of this substance than food or unprocessed herbal materials.

[5019] Ferulic acid has antioxidant properties that make it an important anti-aging supplement, and they also contribute to ferulic acid's other potential uses. These include applications in diabetes, cardiovascular disease, cancer, neuroprotection, bone degeneration, menopause, immunity, and (perhaps) athletic performance.

[5020] In male rats fed a high cholesterol diet, ferulic acid supplementation significantly lowered total cholesterol and triglyceride concentrations in the blood, as compared to a control group. Moreover, HDL (‘good cholesterol’) is increased with ferulic acid supplementation.

Like many other dietary substances, ferulic acid is an antioxidant—but it is an unusually good one. It is especially good at neutralizing the free radicals known as ‘superoxide’, ‘hydroxyl radical’, and ‘nitric oxide’. It acts synergistically with other antioxidants, giving them extra potency. In addition, ferulic acid can be activated to even higher antioxidant activity by exposure to UV light, suggesting that it might help to protect skin from sun damage.
In microbiological applications ferulic acid is useful as a substrate for vanillin production, as for example described in WO 9735999 or DE19960106 or for melanin production (WO 9720944).

[5021] Cinnamic acids, which include caffeic and ferulic acids, are also powerful antioxidants. Experiments have found that these compounds can stop the growth of cancer cells.

In addition sinapic acid is an intermediate in syringyl lignin biosynthesis in angiosperms, and in some taxa serves as a precursor for soluble secondary metabolites. The biosynthesis and accumulation of the sinapate esters sinapoylglucose, sinapoylmalate, and sinapoylcholine are developmentally regulated in at least Arabidopsis and other members of the Brassicaceae (Ruegger et al., 1999, 119(1): 101-10, 1999).
Due to these interesting physiological roles and agrobiotechnological potential of ferulic acid or sinapic acid there is a need to identify the genes of enzymes and other proteins involved in ferulic acid or sinapic acid metabolism, and to generate mutants or transgenic plant lines with which to modify the ferulic acid or sinapic acid content in plants.

[5022] One way to increase the productive capacity of biosynthesis is to apply recombinant DNA technology. Thus, it would be desirable to produce ferulic acid or sinapic acid in plants. That type of production permits control over quality, quantity and selection of the most suitable and efficient producer organisms. The latter is especially important for commercial production economics and therefore availability to consumers. In addition it is desirable to produce ferulic acid or sinapic acid in plants in order to increase plant productivity and resistance against biotic and abiotic stress as discussed before.

Methods of recombinant DNA technology have been used for some years to improve the production of fine chemicals in microorganisms and plants by amplifying individual biosynthesis genes and investigating the effect on production of fine chemicals. It is for example reported, that the xanthophyll astaxanthin could be produced in the nectaries of transgenic tobacco plants. Those transgenic plants were prepared by Argobacterium tumifaciens-mediated transformation of tobacco plants using a vector that contained a ketolase-encoding gene from H. pluvialis denominated crtO along with the Pds gene from tomato as the promoter and to encode a leader sequence. Those results indicated that about 75 percent of the carotenoids found in the flower of the transformed plant contained a keto group.

[5023] Thus, it would be advantageous if an algae, plant or other microorganism were available which produce large amounts ferulic acid or sinapic acid. The invention discussed hereinafter relates in some embodiments to such transformed prokaryotic or eukaryotic microorganisms.

It would also be advantageous if plants were available whose roots, leaves, stem, fruits or flowers produced large amounts of ferulic acid or sinapic acid. The invention discussed hereinafter relates in some embodiments to such transformed plants.

[5024] Therefore improving the quality of foodstuffs and animal feeds is an important task of the food-and-feed industry. This is necessary since, for example ferulic acid or sinapic acid, as mentioned above, which occur in plants and some microorganisms are limited with regard to the supply of mammals. Especially advantageous for the quality of foodstuffs and animal feeds is as balanced as possible a specific ferulic acid or sinapic acid profile in the diet since an excess of ferulic acid or sinapic acid above a specific concentration in the food has a positive effect. A further increase in quality is only possible via addition of further ferulic acid or sinapic acid, which are limiting.

[5025] To ensure a high quality of foods and animal feeds, it is therefore necessary to add ferulic acid or sinapic acid in a balanced manner to suit the organism.

[5026] Accordingly, there is still a great demand for new and more suitable genes which encode enzymes or other proteins which participate in the biosynthesis of ferulic acid or sinapic acid and make it possible to produce them specifically on an industrial scale without unwanted byproducts forming. In the selection of genes for biosynthesis two characteristics above all are particularly important. On the one hand, there is as ever a need for improved processes for obtaining the highest possible contents of ferulic acid or sinapic acid; on the other hand as less as possible byproducts should be produced in the production process.

[5027] for the disclosure of this paragraph see [0013.0.0.0] above.

[5028] Accordingly, in a first embodiment, the invention relates to a process for the production of a fine chemical, whereby the fine chemical is a ferulic acid or sinapic acid. Accordingly, in the present invention, the term “the fine chemical” as used herein relates to a ferulic acid or sinapic acid. Further, the term “the fine chemicals” as used herein also relates to fine chemicals comprising ferulic acid or sinapic acid.

[5029] In one embodiment, the term “the fine chemical” or “the respective fine chemical” means at least one chemical compound with ferulic acid or sinapic acid activity.

In one embodiment, the term “the fine chemical” means ferulic acid. In one embodiment, the term “the fine chemical” means sinapic acid depending on the context in which the term is used. Throughout the specification the term “the fine chemical” means ferulic acid or sinapic acid, its salts, ester, thioester or in free form or bound to other compounds such sugars or sugarpolymers, like glucoside, e.g. diglucoside.

[5030] Accordingly, the present invention relates to a process for the production of sinapic acid or ferulic acid which comprises
[5031] (a) increasing or generating the activity of a protein as shown in table II, application no. 19, column 3 encoded by the nucleic acid sequences as shown in table I, application no. 19, column 5, in an organelle of a microorganism or plant, or
[5032] (b) increasing or generating the activity of a protein as shown in table II, application no. 19, column 3 encoded by the nucleic acid sequences as shown in table I, application no. 19, column 5 in the plastid of a microorganism or plant, or in one or more parts thereof; and
[5033] (c) growing the organism under conditions which permit the production of the fine chemical, thus sinapic acid or ferulic acid or fine chemicals comprising sinapic acid or ferulic acid, in said organism or in the culture medium surrounding the organism.

[5034] Accordingly, the term “the fine chemical” means in one embodiment “sinapic acid or ferulic acid” in relation to all sequences listed in Table I to IV, application no. 19

[5035] In another embodiment the present invention is related to a process for the production of sinapic acid or ferulic acid, which comprises
[5036] (a) increasing or generating the activity of a protein as shown in table II, application no. 19 column 3 encoded by the nucleic acid sequences as shown in table I, application no. 19, column 5, in an organelle of a non-human organism, or
[5037] (b) increasing or generating the activity of a protein as shown in table II, application no. 19, column 3 encoded by the nucleic acid sequences as shown in table I, application no. 19, column 5, which are joined to a nucleic acid sequence encoding a transit peptide in a non-human organism, or in one or more parts thereof; or
[5038] (c) increasing or generating the activity of a protein as shown in table II, application no. 19, column 3 encoded by the nucleic acid sequences as shown in table I, application no. 19, column 5, which are joined to a nucleic acid sequence encoding chloroplast localization sequence, in a non-human organism, or in one or more parts thereof, and
[5039] (d) growing the organism under conditions which permit the production of sinapic acid or ferulic acid in said organism.

[5040] Advantageously the activity of the protein as shown in table II, application no. 19, column 3 encoded by the nucleic acid sequences as shown in table I, application no. 19, column 5 is increased or generated in the abovementioned process in the plastid of a microorganism or plant.

[5041] for the disclosure of the paragraphs [0019.0.0.18] to [0024.0.0.18] see paragraphs [0019.0.0.0] and [0024.0.0.0] above.

[5042] Even more preferred nucleic acid sequences are encoding transit peptides as disclosed by von Heijne et al. [Plant Molecular Biology Reporter, Vol. 9 (2), 1991: 104-126], which are hereby incorporated by reference. Table V shows some examples of the transit peptide sequences disclosed by von Heijne et al. According to the disclosure of the invention especially in the examples the skilled worker is able to link other nucleic acid sequences disclosed by von Heijne et al. to the nucleic acid sequences shown in table I, application no. 19, columns 5 and 7. Most preferred nucleic acid sequences encoding transit peptides are derived from the genus Spinacia such as chloroplast 30S ribosomal protein PSrp-1, root acyl carrier protein II, acyl carrier protein, ATP synthase: γ subunit, ATP synthase: δ subunit, cytochrom f, ferredoxin I, ferredoxin NADP oxidoreductase (=FNR), nitrite reductase, phosphoribulokinase, plastocyanin or carbonic anhydrase. The skilled worker will recognize that various other nucleic acid sequences encoding transit peptides can easily isolated from plastid-localized proteins, which are expressed from nuclear genes as precursors and are then targeted to plastids. Such transit peptides encoding sequences can be used for the construction of other expression constructs. The transit peptides advantageously used in the inventive process and which are part of the inventive nucleic acid sequences and proteins are typically 20 to 120 amino acids, preferably 25 to 110, 30 to 100 or 35 to 90 amino acids, more preferably 40 to 85 amino acids and most preferably 45 to 80 amino acids in length and functions post-translationally to direct the protein to the plastid preferably to the chloroplast. The nucleic acid sequences encoding such transit peptides are localized upstream of nucleic acid sequence encoding the mature protein. For the correct molecular joining of the transit peptide encoding nucleic acid and the nucleic acid encoding the protein to be targeted it is sometimes necessary to introduce additional base pairs at the joining position, which forms restriction enzyme recognition sequences useful for the molecular joining of the different nucleic acid molecules. This procedure might lead to very few additional amino acids at the N-terminal of the mature imported protein, which usually and preferably do not interfere with the protein function. In any case, the additional base pairs at the joining position which forms restriction enzyme recognition sequences have to be chosen with care, in order to avoid the formation of stop codons or codons which encode amino acids with a strong influence on protein folding, like e.g. proline. It is preferred that such additional codons encode small n.d. structural flexible amino acids such as glycine or alanine.

[5043] As mentioned above the nucleic acid sequences coding for the proteins as shown in table II, application no. 19, column 3 and its homologs as disclosed in table I, application no. 19, columns 5 and 7 are joined to a nucleic acid sequence encoding a transit peptide, This nucleic acid sequence encoding a transit peptide ensures transport of the protein to the plastid. The nucleic acid sequence of the gene to be expressed and the nucleic acid sequence encoding the transit peptide are operably linked. Therefore the transit peptide is fused in frame to the nucleic acid sequence coding for proteins as shown in table II, application no. 19, column 3 and its homologs as disclosed in table I, application no. 19, columns 5 and 7.

[5044] for the disclosure of the paragraphs [0027.0.0.18] to [0029.0.0.17] see paragraphs [0027.0.0.0] and [0029.0.0.0] above.

[5045] Alternatively, nucleic acid sequences coding for the transit peptides may be chemically synthesized either in part or wholly according to structure of transit peptide sequences disclosed in the prior art. Said natural or chemically synthesized sequences can be directly linked to the sequences encoding the mature protein or via a linker nucleic acid sequence, which may be typically less than 500 base pairs, preferably less than 450, 400, 350, 300, 250 or 200 base pairs, more preferably less than 150, 100, 90, 80, 70, 60, 50, 40 or 30 base pairs and most preferably less than 25, 20, 15, 12, 9, 6 or 3 base pairs in length and are in frame to the coding sequence. Furthermore favorable nucleic acid sequences encoding transit peptides may comprise sequences derived from more than one biological and/or chemical source and may include a nucleic acid sequence derived from the amino-terminal region of the mature protein, which in its native state is linked to the transit peptide. In a preferred embodiment of the invention said amino-terminal region of the mature protein is typically less than 150 amino acids, preferably less than 140, 130, 120, 110, 100 or 90 amino acids, more preferably less than 80, 70, 60, 50, 40, 35, 30, 25 or 20 amino acids and most preferably less than 19, 18, 17, 16, 15, 14, 13, 12, 11 or 10 amino acids in length. But even shorter or longer stretches are also possible. In addition target sequences, which facilitate the transport of proteins to other cell compartments such as the vacuole, endoplasmic reticulum, Golgi complex, glyoxysomes, peroxisomes or mitochondria may be also part of the inventive nucleic acid sequence. The proteins translated from said inventive nucleic acid sequences are a kind of fusion proteins that means the nucleic acid sequences encoding the transit peptide for example the ones shown in table V, preferably the last one of the table are joint to the nucleic acid sequences shown in table I, application no. 19, columns 5 and 7. The person skilled in the art is able to join said sequences in a functional manner. Advantageously the transit peptide part is cleaved off from the protein part shown in table II, application no. 18, columns 5 and 7 during the transport preferably into the plastids. All products of the cleavage of the preferred transit peptide shown in the last line of table V have preferably the N-terminal amino acid sequences QIA CSS or QIA EFQLTT in front of the start methionine of the protein mentioned in table II, application no. 19, columns 5 and 7. Other short amino acid sequences of an range of 1 to 20 amino acids preferable 2 to 15 amino acids, more preferable 3 to 10 amino acids most preferably 4 to 8 amino acids are also possible in front of the start methionine of the protein mentioned in table II, application no. 19, columns 5 and 7. In case of the amino acid sequence QIA CSS the three amino acids in front of the start methionine are stemming from the LIC (=ligatation independent cloning) cassette. Said short amino acid sequence is preferred in the case of the expression of E. coli genes. In case of the amino acid sequence QIA EFQLTT the six amino acids in front of the start methionine are stemming from the LIC cassette. Said short amino acid sequence is preferred in the case of the expression of S. cerevisiae genes. The skilled worker knows that other short sequences are also useful in the expression of the genes mentioned in table I, application no. 19, columns 5 and 7. Furthermore the skilled worker is aware of the fact that there is not a need for such short sequences in the expression of the genes.

[5046] Table V: Examples of transit peptides disclosed by von Heijne et al.: for the disclosure of the Table V see paragraphs [0030.2.0.0] above.

[5047] Alternatively to the targeting of the sequences shown in table II, application no. 19, columns 5 and 7 preferably of sequences in general encoded in the nucleus with the aid of the targeting sequences mentioned for example in table V alone or in combination with other targeting sequences preferably into the plastids, the nucleic acids of the invention can directly introduced into the plastidal genome. Therefore in a preferred embodiment the nucleic acid sequences shown in table I, application no. 19, columns 5 and 7 are directly introduced and expressed in plastids.

The term “introduced” in the context of this specification shall mean the insertion of a nucleic acid sequence into the organism by means of a “transfection”, “transduction” or preferably by “transformation”.
A plastid, such as a chloroplast, has been “transformed” by an exogenous (preferably foreign) nucleic acid sequence if nucleic acid sequence has been introduced into the plastid that means that this sequence has crossed the membrane or the membranes of the plastid. The foreign DNA may be integrated (covalently linked) into plastid DNA making up the genome of the plastid, or it may remain unintegrated (e.g., by including a chloroplast origin of replication). “Stably” integrated DNA sequences are those, which are inherited through plastid replication, thereby transferring new plastids, with the features of the integrated DNA sequence to the progeny.

[5048] for the disclosure of the paragraphs [0030.2.0.18] and [0030.3.0.18] see paragraphs [0030.2.0.0] and [0030.3.0.0] above.

[5049] For the inventive process it is of great advantage that by transforming the plastids the intraspecies specific transgene flow is blocked, because a lot of species such as corn, cotton and rice have a strict maternal inheritance of plastids. By placing the genes specified in table I, application no. 19, columns 5 and 7 or active fragments thereof in the plastids of plants, these genes will not be present in the pollen of said plants.

A further preferred embodiment of the invention relates to the use of so called “chloroplast localization sequences”, in which a first RNA sequence or molecule is capable of transporting or “chaperoning” a second RNA sequence, such as a RNA sequence transcribed from the sequences depicted in table 1, application no. 19, columns 5 and 7 or a sequence encoding a protein, as depicted in table II, application no. 19, columns 5 and 7, from an external environment inside a cell or outside a plastid into a chloroplast. In one embodiment the chloroplast localization signal is substantially similar or complementary to a complete or intact viroid sequence. The chloroplast localization signal may be encoded by a DNA sequence, which is transcribed into the chloroplast localization RNA. The term “viroid” refers to a naturally occurring single stranded RNA molecule (Flores, C R Acad Sci III. 2001 October; 324(10): 943-52). Viroids usually contain about 200-500 nucleotides and generally exist as circular molecules. Examples of viroids that contain chloroplast localization signals include but are not limited to ASBVd, PLMVd, CChMVd and ELVd. The viroid sequence or a functional part of it can be fused to the sequences depicted in table, 1, application no. 19, columns 5 and 7 or a sequence encoding a protein, as depicted in table II, application no. 19, columns 5 and 7 in such a manner that the viroid sequence transports a sequence transcribed from a sequence as depicted in table 1 application no. 19, columns 5 and 7 or a sequence encoding a protein as depicted in table II, application no. 19, columns 5 and 7 into the chloroplasts. A preferred embodiment uses a modified ASBVd (Navarro et al., Virology. 2000 Mar. 1; 268(1): 218-25).
In a further specific embodiment the protein to be expressed in the plastids such as the proteins depicted in table II, application no. 19, columns 5 and 7 are encoded by different nucleic acids. Such a method is disclosed in WO 2004/040973, which shall be incorporated by reference. WO 2004/040973 teaches a method, which relates to the translocation of an RNA corresponding to a gene or gene fragment into the chloroplast by means of a chloroplast localization sequence. The genes, which should be expressed in the plant or plants cells, are split into nucleic acid fragments, which are introduced into different compartments in the plant e.g. the nucleus, the plastids and/or mitochondria. Additionally plant cells are described in which the chloroplast contains a ribozyme fused at one end to an RNA encoding a fragment of a protein used in the inventive process such that the ribozyme can trans-splice the translocated fusion RNA to the RNA encoding the gene fragment to form and as the case may be reunite the nucleic acid fragments to an intact mRNA encoding a functional protein for example as disclosed in table II, application no. 19, columns 5 and 7.

[5050] In a preferred embodiment of the invention the nucleic acid sequences as shown in table I, application no. 19, columns 5 and 7 used in the inventive process are transformed into plastids, which are metabolical active. Those plastids should preferably maintain at a high copy number in the plant or plant tissue of interest, most preferably the chloroplasts found in green plant tissues, such as leaves or cotyledons or in seeds.

[5051] For a good expression in the plastids the nucleic acid sequences as shown in table I, application no. 19, columns 5 and 7 are introduced into an expression cassette using a preferably a promoter and terminator, which are active in plastids preferably a chloroplast promoter. Examples of such promoters include the psbA promoter from the gene from spinach or pea, the rbcL promoter, and the atpB promoter from corn.

[5052] for the disclosure of the paragraphs [0031.0.0.18] and [0032.0.0.18] see paragraphs [0031.0.0.0] and [0032.0.0.0] above.

[5053] Advantageously the process for the production of the fine chemical leads to an enhanced production of the fine chemical. The terms “enhanced” or “increase” mean at least a 10%, 20%, 30%, 40% or 50%, preferably at least 60%, 70%, 80%, 90% or 100%, more preferably 150%, 200%, 300%, 400% or 500% higher production of the fine chemical in comparison to the reference as defined below, e.g. that means in comparison to an organism without the aforementioned modification of the activity of a protein as shown in table II, application no. 19, column 3. Preferably the modification of the activity of a protein as shown in table II, application no. 19, column 3 or their combination can be achieved by joining the protein to a transit peptide.

[5054] Surprisingly it was found, that the transgenic expression of the E. coli proteins shown in table II, application no. 19, column 3 in plastids of a plant such as Arabidopsis thaliana for example through the linkage to at least one targeting sequence—for example as mentioned in table V—conferred an increase in the respective fine chemical indicated in column 6 “metabolite” of each table I to IV in the transformed plant.

Surprisingly it was found, that the transgenic expression of the E. coli protein b0931, b1556 or b1797 in combination with a plastidal targeting sequence in Arabidopsis thaliana conferred an increase in sinapic acid.
Surprisingly it was found, that the transgenic expression of the Saccharomyces cerevisiae protein shown in table II, application no. 19, column 3 in plastids of a plant such as Arabidopsis thaliana for example through the linkage to at least one targeting sequence—for example as mentioned in table V—conferred an increase in the respective fine chemical indicated in column 6 “metabolite” of each table I to IV in the transformed plant.
Surprisingly it was found, that the transgenic expression of the Saccharomyces cerevisiae protein YDR035W in combination with a plastidal targeting sequence in Arabidopsis thaliana conferred an increase in ferulic acid.

[5055] for the disclosure of this paragraph see paragraph [0035.0.0.0] above.

The sequence of b0931 (PIR:JQ0756) from Escherichia coli has been published in Blattner et al., Science 277 (5331), 1453-1474 (1997), and its activity is being defined as “nicotinate phosphoribosyltransferase “. Accordingly, in one embodiment, the process of the present invention comprises the use of a” nicotinate phosphoribosyltransferase” or its homolog, e.g. as shown herein, for the production of the fine chemical, meaning of sinapic acid, in particular for increasing the amount of sinapic acid in free or bound form in an organism or a part thereof, as mentioned. In one embodiment, in the process of the present invention the activity of a b0931 protein is increased or generated, e.g. from Escherichia coli or a homolog thereof, preferably linked at least to one transit peptide as mentioned for example in table V.
In another embodiment, in the process of the present invention the activity of a b0931 protein is increased or generated in a subcellular compartment of the organism or organism cell such as in an organelle like a plastid or mitochondria.
The sequence of b1556 from Escherichia coli (Accession NP_{—}416074) has been published in Blattner et al., Science 277 (5331), 1453-1474 (1997), and its activity is being defined as “Qin prophage”. Accordingly, in one embodiment, the process of the present invention comprises the use of a “Qin prophage” or its homolog, e.g. as shown herein, for the production of the fine chemical, meaning of sinapic acid, in particular for increasing the amount of sinapic acid in free or bound form in an organism or a part thereof, as mentioned. In one embodiment, in the process of the present invention the activity of a b1556 protein is increased or generated, e.g. from Escherichia coli or a homolog thereof, preferably linked at least to one transit peptide as mentioned for example in table V.
In another embodiment, in the process of the present invention the activity of a b1556 protein is increased or generated in a subcellular compartment of the organism or organism cell such as in an organelle like a plastid or mitochondria.
The sequence of b1797 from Escherichia coli (Accession PIR:E64940) has been published in Blattner et al., Science 277 (5331), 1453-1474 (1997), and its activity is being defined as “putative tellurite resistance protein “. Accordingly, in one embodiment, the process of the present invention comprises the use of a “putative tellurite resistance protein” or its homolog, e.g. as shown herein, for the production of the fine chemical, meaning of sinapic acid, in particular for increasing the amount of sinapic acid in free or bound form in an organism or a part thereof, as mentioned. In one embodiment, in the process of the present invention the activity of a b1797 protein is increased or generated, e.g. from Escherichia coli or a homolog thereof, preferably linked at least to one transit peptide as mentioned for example in table V.
In another embodiment, in the process of the present invention the activity of a b1797 protein is increased or generated in a subcellular compartment of the organism or organism cell such as in an organelle like a plastid or mitochondria.
The sequence of YDR035W from Saccharomyces cerevisiae (Accession NP_{—}010320) has been published in Goffeau, A. et al., Science 274 (5287), 546-547 (1996), and its activity is being defined as “3-deoxy-D-arabino-heptulosonate 7-phosphate (DAHP) synthase “. Accordingly, in one embodiment, the process of the present invention comprises the use of a” 3-deoxy-D-arabino-heptulosonate 7-phosphate (DAHP) synthase “or its homolog, e.g. as shown herein, for the production of the fine chemical, meaning of ferulic acid, in particular for increasing the amount of ferulic acid in free or bound form in an organism or a part thereof, as mentioned. In one embodiment, in the process of the present invention the activity of a YDR035W protein is increased or generated, e.g. from Saccharomyces cerevisiae or a homolog thereof, preferably linked at least to one transit peptide as mentioned for example in table V.
In another embodiment, in the process of the present invention the activity of a YDR035W protein is increased or generated in a subcellular compartment of the organism or organism cell such as in an organelle like a plastid or mitochondria.

[5056] In one embodiment, the homolog of the b0931, b1556, and b1797 is a homolog having said activity and being derived from bacteria. In one embodiment, the homolog of the b0931, b1556, and b1797 is a homolog having said activity and being derived from Proteobacteria. In one embodiment, the homolog of the b0931, b1556, and b1797 is a homolog having said activity and being derived from Gammaproteobacteria. In one embodiment, the homolog of the b0931, b1556, and b1797 is a homolog having said activity and being derived from Enterobacteriales. In one embodiment, the homolog of the b0931, b1556, and b1797 is a homolog having said activity and being derived from Enterobacteriaceae. In one embodiment, the homolog of the b0931, b1556, and b1797 is a homolog having said activity and being derived from Escherichia, preferably from Escherichia coli.

[5057] Homologs of the polypeptide disclosed in table II, application no. 19, column 3 may be the polypeptides encoded by the nucleic acid molecules indicated in table I, application no. 19, column 7, resp., or may be the polypeptides indicated in table II, application no. 19, column 7, resp.

[5058] for the disclosure of this paragraph see paragraph [0038.0.0.0] above.

[5059] In accordance with the invention, a protein or polypeptide has the “activity of an protein as shown in table II, application no. 19, column 3” if its de novo activity, or its increased expression directly or indirectly leads to an increased in the level of the fine chemical indicated in the respective line of table II, application no. 19, column 6 “metabolite” in the organism or a part thereof, preferably in a cell of said organism, more preferably in an organelle such as a plastid or mitochondria of said organism. The protein has the above mentioned activities of a protein as shown in table II, application no. 19, column 3, preferably in the event the nucleic acid sequences encoding said proteins is functionally joined to the nucleic acid sequence of a transit peptide. Throughout the specification the activity or preferably the biological activity of such a protein or polypeptide or an nucleic acid molecule or sequence encoding such protein or polypeptide is identical or similar if it still has the biological or enzymatic activity of a protein as shown in table II, application no. 19, column 3, or which has at least 10% of the original enzymatic activity, preferably 20%, particularly preferably 30%, most particularly preferably 40% in comparison to a protein as shown in the respective line of table II, application no. 19, column 3 of E. coli.

[5060] for the disclosure of the paragraphs [0040.0.0.18] to [0047.0.0.17] see paragraphs [0040.0.0.0] to [0047.0.0.0] above.

[5061] Preferably, the reference, control or wild type differs form the subject of the present invention only in the cellular activity, preferably of the plastidial activity of the polypeptide of the invention, e.g. as result of an increase in the level of the nucleic acid molecule of the present invention or an increase of the specific activity of the polypeptide of the invention, e.g. by or in the expression level or activity of an protein having the activity of a respective protein as shown in table II, application no. 19, column 3 its biochemical or genetical causes and the increased amount of the respective fine chemical.

[5062] for the disclosure of the paragraphs [0049.0.0.18] to [0051.0.0.17] see paragraphs [0049.0.0.0] to [0051.0.0.0] above.

[5063] For example, the molecule number or the specific activity of the polypeptide or the nucleic acid molecule may be increased. Larger amounts of the fine chemical can be produced if the polypeptide or the nucleic acid of the invention is expressed de novo in an organism lacking the activity of said protein, preferably the nucleic acid molecules as mentioned in table I, application no. 19, columns 5 and 7 alone or preferably in combination with a transit peptide for example as mentioned in table V or in another embodiment by introducing said nucleic acid molecules into an organelle such as an plastid or mitochondria in the transgenic organism. However, it is also possible to modify the expression of the gene which is naturally present in the organisms, for example by integrating a nucleic acid sequence, encoding a plastidic targeting sequence in front (5 prime) of the coding sequence, leading to a functional preprotein, which is directed for example to the plastids.

[5064] for the disclosure of the paragraphs [0053.0.0.18] to [0058.0.0.17] see paragraphs [0053.0.0.0] to [0058.0.0.0] above.

In case the activity of the Escherichia coli protein b0931 or its homologs, e.g. a “nicotinate phosphoribosyltransferase” is increased, advantageously in an organelle such as a plastid or mitochondria, preferably, an increase of the fine chemical, preferably of free sinapic acid between 29% and 97% or more is conferred.
In case the activity of the Escherichia coli protein b1556 or its homologs, e.g. a “Qin prophage” is increased, advantageously in an organelle such as a plastid or mitochondria, preferably, an increase of the fine chemical, preferably of free sinapic acid between 40% and 88% or more is conferred.
In case the activity of the Escherichia coli protein b1797 or its homologs, e.g. a “putative tellurite resistance protein” is increased, advantageously in an organelle such as a plastid or mitochondria, preferably, an increase of the fine chemical, preferably of free sinapic acid between 29% and 36% or more is conferred.
In case the activity of the Saccharomyces cerevisiae protein YDR035W or its homologs, e.g. a “3-deoxy-D-arabino-heptulosonate 7-phosphate (DAHP) synthase” is increased, advantageously in an organelle such as a plastid or mitochondria, preferably, an increase of the fine chemical, preferably of free ferulic acid between 37% and 75% or more is conferred.

[5065] for the disclosure of the paragraphs [0061.0.0.18] and [0062.0.0.18] see paragraphs [0061.0.0.0] and [0062.0.0.0] above.

[5066] A protein having an activity conferring an increase in the amount or level of the fine chemical, preferably upon targeting to the plastids, has in one embodiment the structure of the polypeptide described herein, in particular of the polypeptides comprising the consensus sequence shown in table IV, application no. 19, column 7 or of the polypeptide as shown in the amino acid sequences as disclosed in table II, application no. 19, columns 5 and 7 or the functional homologues thereof as described herein, or is encoded by the nucleic acid molecule characterized herein or the nucleic acid molecule according to the invention, for example by the nucleic acid molecule as shown in table I, application no. 19, columns 5 and 7 or its herein described functional homologues and has the herein mentioned activity.

[5067] For the purposes of the present invention, the reference to the fine chemical, e.g. to the term “sinapic acid or ferulic acid”, also encompasses the corresponding salt and esters, ethers or sinapic acid or ferulic acid bound to proteins, e.g. lipoproteins or other components or cross-linked to cell wall material like cellulose, hemicellulose or pectins.

[5068] for the disclosure of the paragraphs [0065.0.0.18] and [0066.0.0.18] see paragraphs [0065.0.0.0] and [0066.0.0.0] above.

[5069] In one embodiment, the process of the present invention comprises one or more of the following steps
[5070] a) stabilizing a protein conferring the increased expression of a protein encoded by the nucleic acid molecule of the invention or of the polypeptide of the invention, e.g. of a polypeptide having the activity of a protein as indicated in table II, application no. 19, columns 5 and 7 or its homologs activity having herein-mentioned sinapic acid or ferulic acid increasing activity; and/or
[5071] b) stabilizing a mRNA conferring the increased expression of a protein encoded by the nucleic acid molecule of the invention, which is in the sense of the invention a fusion of a nucleic acid sequence encoding a transit peptide and of a nucleic acid sequence as shown in table I, application no. 19, columns 5 and 7, e.g. a nucleic acid sequence encoding a polypeptide having the activity of a protein as indicated in table II, application no. 19, columns 5 and 7 or its homologs activity or of a mRNA encoding the polypeptide of the present invention having herein-mentioned sinapic acid or ferulic acid increasing activity; and/or
[5072] c) increasing the specific activity of a protein conferring the increased expression of a protein encoded by the nucleic acid molecule of the invention or of the polypeptide of the present invention having herein-mentioned sinapic acid or ferulic acid increasing activity, e.g. of a polypeptide having the activity of a protein as indicated in table II, application no. 19, columns 5 and 7 or its homologs activity, or decreasing the inhibitory regulation of the polypeptide of the invention; and/or
[5073] d) generating or increasing the expression of an endogenous or artificial transcription factor mediating the expression of a protein conferring the increased expression of a protein encoded by the nucleic acid molecule of the invention or of the polypeptide of the invention having herein-mentioned sinapic acid or ferulic acid increasing activity, e.g. of a polypeptide having the activity of a protein as indicated in table II, application no. 19, columns 5 and 7 or its homologs activity; and/or
[5074] e) stimulating activity of a protein conferring the increased expression of a protein encoded by the nucleic acid molecule of the present invention or a polypeptide of the present invention having herein-mentioned sinapic acid or ferulic acid increasing activity, e.g. of a polypeptide having the activity of a protein as indicated in table II, application no. 19, columns 5 and 7 or its homologs activity, by adding one or more exogenous inducing factors to the organisms or parts thereof; and/or
[5075] f) expressing a transgenic gene encoding a protein conferring the increased expression of a polypeptide encoded by the nucleic acid molecule of the present invention or a polypeptide of the present invention, having herein-mentioned sinapic acid or ferulic acid increasing activity, e.g. of a polypeptide having the activity of a protein as indicated in table II, application no. 19, columns 5 and 7 or its homologs activity, and/or
[5076] g) increasing the copy number of a gene conferring the increased expression of a nucleic acid molecule encoding a polypeptide encoded by the nucleic acid molecule of the invention or the polypeptide of the invention having herein-mentioned sinapic acid or ferulic acid increasing activity, e.g. of a polypeptide having the activity of a protein as indicated in table II, application no. 19, columns 5 and 7 or its homologs activity; and/or
[5077] h) increasing the expression of the endogenous gene encoding the polypeptide of the invention, e.g. a polypeptide having the activity of a protein as indicated in table II, application no. 19, columns 5 and 7 or its homologs activity, by adding positive expression or removing negative expression elements, e.g. homologous recombination can be used to either introduce positive regulatory elements like for plants the 35S enhancer into the promoter or to remove repressor elements form regulatory regions. Further gene conversion methods can be used to disrupt repressor elements or to enhance to activity of positive elements. Positive elements can be randomly introduced in plants by T-DNA or transposon mutagenesis and lines can be identified in which the positive elements have be integrated near to a gene of the invention, the expression of which is thereby enhanced; and/or
[5078] i) modulating growth conditions of an organism in such a manner, that the expression or activity of the gene encoding the protein of the invention or the protein itself is enhanced for example microorganisms or plants can be grown for example under a higher temperature regime leading to an enhanced expression of heat shock proteins, which can lead an enhanced fine chemical production; and/or
[5079] j) selecting of organisms with especially high activity of the proteins of the invention from natural or from mutagenized resources and breeding them into the target organisms, eg the elite crops; and/or
[5080] k) directing a protein encoded by the nucleic acid molecule of the invention or of the polypeptide of the present invention having herein-mentioned sinapic acid or ferulic acid increasing activity, e.g. of polypeptide having the activity of a protein as indicated in table II, application no. 19, columns 5 and 7 or its homologs activity, to the plastids by the addition of a plastidial targeting sequence; and/or
[5081] l) generating the expression of a protein encoded by the nucleic acid molecule of the invention or of the polypeptide of the present invention having herein-mentioned sinapic acid or ferulic acid increasing activity, e.g. of a polypeptide having the activity of a protein as indicated in table II, application no. 19, columns 5 and 7 or its homologs activity in plastids by the stable or transient transformation advantageously stable transformation of organelles preferably plastids with an inventive nucleic acid sequence preferably in form of an expression cassette containing said sequence leading to the plastidial expression of the nucleic acids or polypeptides of the invention; and/or
[5082] m) generating the expression of a protein encoded by the nucleic acid molecule of the invention or of the polypeptide of the present invention having herein-mentioned sinapic acid or ferulic acid increasing activity, e.g. of a polypeptide having the activity of a protein as indicated in table II, application no. 19, columns 5 and 7 or its homologs activity in plastids by integration of a nucleic acid of the invention into the plastidal genome under control of preferable a plastidial promoter.

[5083] Preferably, said mRNA is the nucleic acid molecule of the present invention and/or the protein conferring the increased expression of a protein encoded by the nucleic acid molecule of the present invention alone or link to a transit nucleic acid sequence or transit peptide encoding nucleic acid sequence or the polypeptide having the herein mentioned activity, e.g. conferring the increase of the respective fine chemical as indicated in column 6 of application no. 19 in Table I to IV, resp., after increasing the expression or activity of the encoded polypeptide preferably in organelles such as plastids or having the activity of a polypeptide having an activity as the protein as shown in table II, application no. 19, column 3 or its homologs. Preferably the increase of the fine chemical takes place in plastids.

[5084] for the disclosure of the paragraphs [0069.0.0.18] to [0079.0.0.17] see paragraphs [0069.0.0.0] to [0079.0.0.0] above.

[5085] The activation of an endogenous polypeptide having above-mentioned activity, e.g. having the activity of a protein as shown in table II, application no. 19, column 3 or of the polypeptide of the invention, e.g. conferring the increase of the respective fine chemical after increase of expression or activity in the cytsol and/or in an organelle like a plastid, preferentially in the plastid, can also be increased by introducing a synthetic transcription factor, which binds close to the coding region of the gene encoding the protein as shown in table II, application no. 19, column 3 and activates its transcription. A chimeric zinc finger protein can be constructed, which comprises a specific DNA-binding domain and an activation domain as e.g. the VP16 domain of Herpes Simplex virus. The specific binding domain can bind to the regulatory region of the gene encoding the protein as shown in table II, application no. 19, column 3. The expression of the chimeric transcription factor in a organism, in particular in a plant, leads to a specific expression of the protein as shown in table II, application no. 19, column 3, see e.g. in WO01/52620, Oriz, Proc. Natl. Acad. Sci. USA, 2002, Vol. 99, 13290 or Guan, Proc. Natl. Acad. Sci. USA, 2002, Vol. 99, 13296.

[5086] for the disclosure of the paragraphs [0081.0.0.18] to [0084.0.0.18] see paragraphs [0081.0.0.0] to [0084.0.0.0] above.

[5087] Owing to the introduction of a gene or a plurality of genes conferring the expression of the nucleic acid molecule of the invention or the nucleic acid molecule used in the method of the invention or the polypeptide of the invention or the polypeptide used in the method of the invention as described below, for example the nucleic acid construct mentioned below into an organism alone or in combination with other genes, it is possible not only to increase the biosynthetic flux towards the end product, but also to increase, modify or create de novo an advantageous, preferably novel metabolites composition in the organism, e.g. an advantageous sinapic acid or ferulic acid containing composition comprising a higher content of different phenolic compounds, like salicylic acid, benzoic acid, cinnamic acid and caffeic acid wich have defense, antioxidant or other useful activities. it can also be advantageous to increase the level of a metabolic precursor of sinapic acid or ferulic acid in the organism or part thereof.

Depending on the choice of the organism used for the process according to the present invention, for example a microorganism or a plant, compositions or mixtures of various carotenoids and sinapic acid or ferulic acid can be produced.

[5088] for the disclosure of this paragraph see paragraph [0086.0.0.0] above.

[5089] By influencing the metabolism thus, it is possible to produce, in the process according to the invention, further advantageous compounds. Examples of such compounds are carotenoids, e.g. carotenes or xanthophylls, in particular ketocarotenoids, or hydrocarotenoids, e.g. beta-cryptoxanthin, zeaxanthin, astaxanthin, lycopene, alpha-carotene, or beta-carentene, or compounds for which sinapic acid or ferulic acid is a precursor compound.

[5090] Accordingly, in one embodiment, the process according to the invention relates to a process, which comprises:
[5091] a) providing a non-human organism, preferably a microorganism, a non-human animal, a plant or animal cell, a plant or animal tissue or a plant, more preferably a microorganism, a plant or a plant tissue;
[5092] b) increasing the activity of a protein as shown in table II, application no. 19, column 3 or of a polypeptide being encoded by the nucleic acid molecule of the present invention and described below, e.g. conferring an increase of the respective fine chemical as indicated in any one of Tables I to IV, application no. 19, column 6 “metabolite” in the organism, preferably in the microorganism, the non-human animal, the plant or animal cell, the plant or animal tissue or the plant, more preferably a microorganism, a plant or a plant tissue, in the cytsol or in the plastids, preferentially in the plastids,
[5093] c) growing the organism, preferably the microorganism, the non-human animal, the plant or animal cell, the plant or animal tissue or the plant under conditions which permit the production of the respective fine chemical in the organism, preferably the microorganism, the plant cell, the plant tissue or the plant; and
   if desired, recovering, optionally isolating, the respective free and/or bound fine chemical as indicated in any one of Tables I to IV, application no. 19, column 6 “metabolite”.

[5094] The organism, in particular the microorganism, non-human animal, the plant or animal cell, the plant or animal tissue or the plant is advantageously grown in such a way that it is not only possible to recover, if desired isolate the free or bound respective fine chemical but as option it is also possible to produce, recover and, if desired isolate, other free or/and bound derivatives of sinapic acid or ferulic acid.

[5095] for the disclosure of the paragraphs [0090.0.0.18] to [0097.0.0.18] see paragraphs [0090.0.0.0] to [0097.0.0.0] above.

[5096] With regard to the nucleic acid sequence as depicted a nucleic acid construct which contains a nucleic acid sequence mentioned herein or an organism (=transgenic organism) which is transformed with said nucleic acid sequence or said nucleic acid construct, “transgene” means all those constructs which have been brought about by genetic manipulation methods, preferably in which either
[5097] a) the nucleic acid sequence as shown in table I, application no. 19, columns 5 and 7 or a derivative thereof, or
[5098] b) a genetic regulatory element, for example a promoter, which is functionally linked to the nucleic acid sequence as shown table I, application no. 19, columns 5 and 7 or a derivative thereof, or
[5099] c) (a) and (b)
   is/are not present in its/their natural genetic environment or has/have been modified by means of genetic manipulation methods, it being possible for the modification to be, by way of example, a substitution, addition, deletion, inversion or insertion of one or more nucleotide. “Natural genetic environment” means the natural chromosomal locus in the organism of origin or the presence in a genomic library. In the case of a genomic library, the natural, genetic environment of the nucleic acid sequence is preferably at least partially still preserved. The environment flanks the nucleic acid sequence at least on one side and has a sequence length of at least 50 bp, preferably at least 500 bp, particularly preferably at least 1000 bp, very particularly preferably at least 5000 bp.

[5100] The use of the nucleic acid sequence according to the invention or of the nucleic acid construct according to the invention for the generation of transgenic plants is therefore also subject matter of the invention. As mentioned above the inventive nucleic acid sequence consists advantageously of the nucleic acid sequences as depicted in the sequence protocol and disclosed in table I, application no. 19, columns 5 and 7 joined to a nucleic acid sequence encoding a transit peptide, or a targeting nucleic acid sequence which directs the nucleic acid sequences disclosed in table I, application no. 19, columns 5 and 7 to the organelle preferentially the plastids. Alternatively the inventive nucleic acids sequences consist advantageously of the nucleic acid sequences as depicted in the sequence protocol and disclosed in table I, application no. 19, columns 5 and 7 joined preferably to a nucleic acids sequence mediating the stable integration of nucleic acids into the plastidial genome and optionally sequences mediating the transcription of the sequence in the plastidial compartment. A transient expression is in principal also desirable and possible.

[5101] for the disclosure of this paragraph see paragraph [0100.0.0.0] above.

[5102] In an advantageous embodiment of the invention, the organism takes the form of a plant whose sinapic acid or ferulic acid content is modified advantageously owing to the nucleic acid molecule of the present invention expressed. This is important for plant breeders since, for example, the nutritional value of plants for poultry is dependent on the abovementioned sinapic acid or ferulic acid content as antioxidant source in feed. Further, this is also important for the production of cosmetic compostions since, for example, the antioxidant level of plant extracts is depending on the abovementioned sinapic acid or ferulic acid content and the general amount of antioxidants e.g. as vitamins.

After the activity of the protein as shown in table II, application no. 19, column 3 has been increased or generated, or after the expression of nucleic acid molecule or polypeptide according to the invention has been generated or increased, the transgenic plant generated thus is grown on or in a nutrient medium or else in the soil and subsequently harvested.

[5103] for the disclosure of the paragraphs [0102.0.0.18] to [0110.0.0.18] see paragraphs [0102.0.0.0] to [0110.0.0.0] above.

[5104] In a preferred embodiment, the respective fine chemical as indicated in any one of Tables I to IV, application no. 19, column 6 “metabolite” (sinapic acid or ferulic acid) is produced in accordance with the invention and, if desired, is isolated. The production of further phenolic compounds or compound with antioxidant activities like for example vitamins, provitamins or carotenoids, e.g. carotenes or xanthophylls, or mixtures thereof or mixtures with other compounds by the process according to the invention is advantageous.

Thus, the content of plant components and preferably also further impurities is as low as possible, and the abovementioned sinapic acid or ferulic acid are obtained in as pure form as possible. In these applications, the content of plant components advantageously amounts to less than 10%, preferably 1%, more preferably 0.1%, very especially preferably 0.01% or less.

[5105] In another preferred embodiment of the invention a combination of the increased expression of the nucleic acid sequence or the protein of the invention together with the transformation of a protein or polypeptide or a compound, which functions as a sink for the desired fine chemical, for example sinapic acid or ferulic acid in the organism, is useful to increase the production of the respective fine chemical (as indicated in any one of Tables I to IV, application no. 19, column 6 “metabolite”).

[5106] In the case of the fermentation of microorganisms, the abovementioned sinapic acid or ferulic acid may accumulate in the medium and/or the cells. If microorganisms are used in the process according to the invention, the fermentation broth can be processed after the cultivation. Depending on the requirement, all or some of the biomass can be removed from the fermentation broth by separation methods such as, for example, centrifugation, filtration, decanting or a combination of these methods, or else the biomass can be left in the fermentation broth. The fermentation broth can subsequently be reduced, or concentrated, with the aid of known methods such as, for example, rotary evaporator, thin-layer evaporator, falling film evaporator, by reverse osmosis or by nanofiltration. Afterwards advantageously further compounds for formulation can be added such as corn starch or silicates. This concentrated fermentation broth advantageously together with compounds for the formulation can subsequently be processed by lyophilization, spray drying, spray granulation or by other methods. Preferably the respective fine chemical as indicated for application no. 19 in any one of Tables I to IV, column 6 “metabolite” or the sinapic acid or ferulic acid comprising compositions are isolated from the organisms, such as the microorganisms or plants or the culture medium in or on which the organisms have been grown, or from the organism and the culture medium, in the known manner, for example via extraction, distillation, crystallization, chromatography or a combination of these methods. These purification methods can be used alone or in combination with the aforementioned methods such as the separation and/or concentration methods.

[5107] Transgenic plants which comprise the sinapic acid or ferulic acid, synthesized in the process according to the invention can advantageously be marketed directly without there being any need for sinapic acid or ferulic acid synthesized to be isolated. Plants for the process according to the invention are listed as meaning intact plants and all plant parts, plant organs or plant parts such as leaf, stem, seeds, root, tubers, anthers, fibers, root hairs, stalks, embryos, calli, cotelydons, petioles, harvested material, plant tissue, reproductive tissue and cell cultures which are derived from the actual transgenic plant and/or can be used for bringing about the transgenic plant. In this context, the seed comprises all parts of the seed such as the seed coats, epidermal cells, seed cells, endosperm or embryonic tissue.

The site of sinapic acid or ferulic acid biosynthesis in plants is, inter alia, the leaf tissue so that the isolation of leafs makes sense. However, this is not limiting, since the expression may also take place in a tissue-specific manner in all of the remaining parts of the plant, in particular in seeds. A further preferred embodiment therefore relates to a seed-specific isolation of sinapic acid or ferulic acid.
However, the respective fine chemical as indicated for application no. 19 in any one of Tables I to IV, column 6, “metabolite” produced in the process according to the invention can also be isolated from the organisms, advantageously plants, in the form of their esters, ether or pyranosides, as extracts, e.g. ether, alcohol, or other organic solvents or water containing extract and/or free sinapic acid or ferulic acid. The respective fine chemical produced by this process can be obtained by harvesting the organisms, either from the crop in which they grow, or from the field. This can be done via pressing or extraction of the plant parts, preferably the plant seeds. To increase the efficiency of oil extraction it is beneficial to clean, to temper and if necessary to hull and to flake the plant material especially the seeds. e.g the esters or pyranosides, extracts, e.g. ether, alcohol, or other organic solvents or water containing extract and/or free sinapic acid or ferulic acid can be obtained by what is known as cold beating or cold pressing without applying heat. To allow for greater ease of disruption of the plant parts, specifically the seeds, they are previously comminuted, steamed or roasted. The seeds, which have been pretreated in this manner can subsequently be pressed or extracted with solvents such as preferably warm hexane. The solvent is subsequently removed. In the case of microorganisms, the latter are, after harvesting, for example extracted directly without further processing steps or else, after disruption, extracted via various methods with which the skilled worker is familiar. In this manner, more than 96% of the compounds produced in the process can be isolated. Thereafter, the resulting products are processed further, i.e. degummed and/or refined. In this process, substances such as the plant mucilages and suspended matter are first removed. What is known as desliming can be affected enzymatically or, for example, chemico-physically by addition of acid such as phosphoric acid.
Because sinapic acid or ferulic acid in microorganisms may be localized intracellularly, their recovery essentials comes down to the isolation of the biomass. Well-established approaches for the harvesting of cells include filtration, centrifugation and coagulation/flocculation as described herein.

[5108] Sinapic acid or ferulic acid can for example be analyzed advantageously via HPLC, LC or GC separation methods and detected by MS oder MSMS methods. The unambiguous detection for the presence of sinapic acid or ferulic acid containing products can be obtained by analyzing recombinant organisms using analytical standard methods: GC, GC-MS, or TLC, as described on several occasions by Christie and the references therein (1997, in: Advances on Lipid Methodology, Fourth Edition: Christie, Oily Press, Dundee, 119-169; 1998, Gaschromatographie-Massenspektrometrie-Verfahren [Gas chromatography/mass spectrometric methods], Lipide 33:343-353). The material to be analyzed can be disrupted by sonication, grinding in a glass mill, liquid nitrogen and grinding, cooking, or via other applicable methods; see also Biotechnology of Vitamins, Pigments and Growth Factors, Edited by Erik J. Vandamme, London, 1989, p. 96 to 103.

[5109] In a preferred embodiment, the present invention relates to a process for the production of the respective fine chemical as indicated for application no. 19 in any one of Tables I to IV, column 6 “metabolite”, comprising or generating in an organism or a part thereof, preferably in a cell compartment such as a plastid or mitochondria, the expression of at least one nucleic acid molecule comprising a nucleic acid molecule selected from the group consisting of:
[5110] a) nucleic acid molecule encoding, preferably at least the mature form, of the polypeptide shown in table II, application no. 19, columns 5 and 7 or a fragment thereof, which confers an increase in the amount of the respective fine chemical in an organism or a part thereof;
[5111] b) nucleic acid molecule comprising, preferably at least the mature form, of the nucleic acid molecule shown in table I, application no. 19, columns 5 and 7;
[5112] c) nucleic acid molecule whose sequence can be deduced from a polypeptide sequence encoded by a nucleic acid molecule of (a) or (b) as result of the degeneracy of the genetic code and conferring an increase in the amount of the respective fine chemical in an organism or a part thereof;
[5113] d) nucleic acid molecule encoding a polypeptide which has at least 50% identity with the amino acid sequence of the polypeptide encoded by the nucleic acid molecule of (a) to (c) and conferring an increase in the amount of the respective fine chemical in an organism or a part thereof;
[5114] e) nucleic acid molecule which hybridizes with a nucleic acid molecule of (a) to (c) under stringent hybridisation conditions and conferring an increase in the amount of the respective fine chemical in an organism or a part thereof;
[5115] f) nucleic acid molecule encoding a polypeptide, the polypeptide being derived by substituting, deleting and/or adding one or more amino acids of the amino acid sequence of the polypeptide encoded by the nucleic acid molecules (a) to (d), preferably to (a) to (c) and conferring an increase in the amount of the respective fine chemical in an organism or a part thereof;
[5116] g) nucleic acid molecule encoding a fragment or an epitope of a polypeptide which is encoded by one of the nucleic acid molecules of (a) to (e), preferably to (a) to (c) and conferring an increase in the amount of the respective fine chemical
[5117] h) nucleic acid molecule comprising a nucleic acid molecule which is obtained by amplifying nucleic acid molecules from a cDNA library or a genomic library using the primers shown in table III, application no. 19, column 7 and conferring an increase in the amount of the respective fine chemical in an organism or a part thereof;
[5118] i) nucleic acid molecule encoding a polypeptide which is isolated, e.g. from an expression library, with the aid of monoclonal antibodies against a polypeptide encoded by one of the nucleic acid molecules of (a) to (h), preferably to (a) to (c), and conferring an increase in the amount of the respective fine chemical in an organism or a part thereof;
[5119] j) nucleic acid molecule which encodes a polypeptide comprising the consensus sequence shown in table IV, application no. 19, column 7 and conferring an increase in the amount of the respective fine chemical in an organism or a part thereof;
[5120] k) nucleic acid molecule comprising one or more of the nucleic acid molecule encoding the amino acid sequence of a polypeptide encoding a domain of the polypeptide shown in table II, application no. 19, columns 5 and 7 and conferring an increase in the amount of the fine chemical in an organism or a part thereof; and
[5121] l) nucleic acid molecule which is obtainable by screening a suitable library under stringent conditions with a probe comprising one of the sequences of the nucleic acid molecule of (a) to (k), preferably to (a) to (c), or with a fragment of at least 15 nt, preferably 20 nt, 30 nt, 50 nt, 100 nt, 200 nt or 500 nt of the nucleic acid molecule characterized in (a) to (k), preferably to (a) to (c), and conferring an increase in the amount of the respective fine chemical in an organism or a part thereof;
   or which comprises a sequence which is complementary thereto.

[5122] In one embodiment, the nucleic acid molecule used in the process of the invention distinguishes over the sequence indicated in table I A, application no. 19, columns 5 and 7 by one or more nucleotides. In one embodiment, the nucleic acid molecule used in the process of the invention does not consist of the sequence indicated in table I A, application no. 19, columns 5 and 7. In one embodiment, the nucleic acid molecule used in the process of the invention is less than 100%, 99.999%, 99.99%, 99.9% or 99% identical to a sequence indicated in table I A, application no. 19, columns 5 and 7. In another embodiment, the nucleic acid molecule does not encode a polypeptide of a sequence indicated in table II A, application no. 19, columns 5 and 7.

[5123] In one embodiment, the nucleic acid molecule used in the process of the invention distinguishes over the sequence indicated in table I B, application no. 19, columns 5 and 7, by one or more nucleotides. In one embodiment, the nucleic acid molecule used in the process of the invention does not consist of the sequence indicated in table I B, application no. 19, columns 5 and 7. In one embodiment, the nucleic acid molecule used in the process of the invention is less than 100%, 99.999%, 99.99%, 99.9% or 99% identical to a sequence indicated in table I B, application no. 19, columns 5 and 7. In another embodiment, the nucleic acid molecule does not encode a polypeptide of a sequence indicated in table II B, application no. 19, columns 5 and 7.

[5124] In one embodiment, the nucleic acid molecule used in the process distinguishes over the sequence shown in table I, application no. 19, columns 5 and 7 by one or more nucleotides or does not consist of the sequence shown in table I, application no. 19, columns 5 and 7. In one embodiment, the nucleic acid molecule of the present invention is less than 100%, 99.999%, 99.99%, 99.9% or 99% identical to the sequence shown in table I, application no. 19, columns 5 and 7. In another embodiment, the nucleic acid molecule does not encode a polypeptide of the sequence shown in table II, application no. 19, columns 5 and 7.

[5125] for the disclosure of the paragraphs [0118.0.0.18] to [0120.0.0.18] see paragraphs [0118.0.0.0] to [0120.0.0.0] above.

[5126] The expression of nucleic acid molecules with the sequence shown in table I, application no. 19, columns 5 and 7, or nucleic acid molecules which are derived from the amino acid sequences shown in table II, application no. 19, columns 5 and 7 or from polypeptides comprising the consensus sequence shown in table IV, application no. 19, column 7, or their derivatives or homologues encoding polypeptides with the enzymatic or biological activity of a protein as shown in table II, application no. 19, column 3, and conferring an increase of the respective fine chemical (column 6 of application no. 19 in any one of Tables I to IV) after increasing its plastidic expression and/or specific activity in the plastids is advantageously increased in the process according to the invention by expression either in the cytsol or in an organelle such as a plastid or mitochondria or both, preferably in plastids.

[5127] for the disclosure of this paragraph see paragraph [0122.0.0.0] above.

[5128] Nucleic acid molecules, which are advantageous for the process according to the invention and which encode polypeptides with the activity of a protein as shown in table II, application no. 19, column 3 can be determined from generally accessible databases.

[5129] for the disclosure of this paragraph see paragraph [0124.0.0.0] above.

[5130] The nucleic acid molecules used in the process according to the invention take the form of isolated nucleic acid sequences, which encode polypeptides with the activity of the proteins as shown in table II, application no. 19, column 3 and which confer an increase in the level of the respective fine chemical indicated in table II, application no. 19, column 6 by being expressed either in the cytsol or in an organelle such as a plastid or mitochondria or both, preferably in plastids, and the gene product being localized in the plastid and other parts of the cell or in the plastid as described above.

[5131] for the disclosure of the paragraphs [0126.0.0.18] to [0133.0.0.18] see paragraphs [0126.0.0.0] to [0133.0.0.0] above.

[5132] Production strains which are also advantageously selected in the process according to the invention are microorganisms selected from the group of green algae, like Spongioccoccum exentricum, Chlorella sorokiniana (pyrenoidosa, 7-11-05), or algae of the genus Haematococcus, Phaedactylum tricornatum, Volvox or Dunaliella.

The invention also contemplates embodiments in which the sinapic acid or ferulic acid or sinapic acid or ferulic acid precursor compounds in the production of the respective fine chemical, are present in a photosynthetic active organisms chosen as the host; for example, cyanobacteria, moses, algae or plants which, even as a wild type, are capable of producing sinapic acid or ferulic acid.

[5133] However, it is also possible to use artificial sequences, which differ in one or more bases from the nucleic acid sequences found in organisms, or in one or more amino acid molecules from polypeptide sequences found in organisms, in particular from the polypeptide sequences shown in table II, application no. 19, columns 5 and 7 or the functional homologues thereof as described herein, preferably conferring above-mentioned activity, i.e. conferring an increase of the respective fine chemical after increasing its plastidic activity, e.g. after increasing the activity of a protein as shown in table II, application no. 19, column 3 by—for example—expression either in the cytsol or in an organelle such as a plastid or mitochondria or both, preferably in plastids and the gene product, e.g. the polypeptide, being localized in the plastid and other parts of the cell or in the plastid as described above.

[5134] for the disclosure of the paragraphs [0135.0.0.18] to [0140.0.0.18] see paragraphs [0135.0.0.0] to [0140.0.0.0] above.

[5135] Synthetic oligonucleotide primers for the amplification, e.g. as shown in table III, application no. 19, column 7, by means of polymerase chain reaction can be generated on the basis of a sequence shown herein, for example the sequence shown in table I, application no. 19, columns 5 and 7 or the sequences derived from table II, application no. 19, columns 5 and 7.

[5136] Moreover, it is possible to identify conserved regions from various organisms by carrying out protein sequence alignments with the polypeptide used in the process of the invention, in particular with sequences of the polypeptide of the invention, from which conserved regions, and in turn, degenerate primers can be derived. Conserved regions are those, which show a very little variation in the amino acid in one particular position of several homologs from different origin. The consensus sequence shown in table IV, application no. 19, column 7 is derived from said alignments.

[5137] Degenerated primers can then be utilized by PCR for the amplification of fragments of novel proteins having above-mentioned activity, e.g. conferring the increase of the fine chemical after increasing the expression or activity or having the activity of a protein as shown in table II, application no. 19, column 3 or further functional homologs of the polypeptide of the invention from other organisms.

[5138] for the disclosure of the paragraphs [0144.0.0.18] to [0151.0.0.18] see paragraphs [0144.0.0.0] to [0151.0.0.0] above.

[5139] Polypeptides having above-mentioned activity, i.e. conferring the increase of the respective fine chemical indicated in table I, application no. 19, column 6, and being derived from other organisms, can be encoded by other DNA sequences which hybridize to the sequences shown in table I, application no. 19, columns 5 and 7, preferably of table I B, application no. 19, columns 5 and 7 under relaxed hybridization conditions and which code on expression for peptides having the respective fine chemical, i.e. sinapic acid or ferulic acid increasing activity, when expressed in a way that the gene product, e.g. the polypeptide, being localized in the plastid and other parts of the cell or in the plastid as described above.

[5140] for the disclosure of the paragraphs [0153.0.0.18] to [0159.0.0.18] see paragraphs [0153.0.0.0] to [0159.0.0.0] above.

[5141] Further, the nucleic acid molecule of the invention comprises a nucleic acid molecule, which is a complement of one of the nucleotide sequences of above mentioned nucleic acid molecules or a portion thereof. A nucleic acid molecule which is complementary to one of the nucleotide sequences shown in table I, application no. 19, columns 5 and 7, preferably shown in table I B, application no. 19, columns 5 and 7 is one which is sufficiently complementary to one of the nucleotide sequences shown in table I, application no. 19, columns 5 and 7, preferably shown in table I B, application no. 19, columns 5 and 7 such that it can hybridize to one of the nucleotide sequences shown in table I, application no. 19, columns 5 and 7, preferably shown in table I B, application no. 19, columns 5 and 7, thereby forming a stable duplex. Preferably, the hybridisation is performed under stringent hybridization conditions. However, a complement of one of the herein disclosed sequences is preferably a sequence complement thereto according to the base pairing of nucleic acid molecules well known to the skilled person. For example, the bases A and G undergo base pairing with the bases T and U or C, resp. and visa versa. Modifications of the bases can influence the base-pairing partner.

[5142] The nucleic acid molecule of the invention comprises a nucleotide sequence which is at least about 30%, 35%, 40% or 45%, preferably at least about 50%, 55%, 60% or 65%, more preferably at least about 70%, 80%, or 90%, and even more preferably at least about 95%, 97%, 98%, 99% or more homologous to a nucleotide sequence shown in table I, application no. 19, columns 5 and 7, preferably shown in table I B, application no. 19, columns 5 and 7, or a portion thereof and preferably has above mentioned activity, in particular having a respective fine chemical increasing activity after increasing the activity or an activity of a gene product as shown in table II, application no. 19, column 3 by for example expression either in the cytsol or in an organelle such as a plastid or mitochondria or both, preferably in plastids, and the gene product, e.g. the polypeptide, being localized in the plastid and other parts of the cell or in the plastid as described above.

[5143] The nucleic acid molecule of the invention comprises a nucleotide sequence which hybridizes, preferably hybridizes under stringent conditions as defined herein, to one of the nucleotide sequences shown in table I, application no. 19, columns 5 and 7, preferably shown in table I B, application no. 19, columns 5 and 7, or a portion thereof and encodes a protein having above-mentioned activity, e.g. conferring of a sinapic acid or ferulic acid increase by for example expression either in the cytsol or in an organelle such as a plastid or mitochondria or both, preferably in plastids, and optionally, the activity of a protein as shown in table II, application no. 19, column 3, and the gene product, e.g. the polypeptide, being localized in the plastid and other parts of the cell or in the plastid as described above.

[5144] Moreover, the nucleic acid molecule of the invention can comprise only a portion of the coding region of one of the sequences shown in table I, application no. 19, columns 5 and 7, preferably shown in table I B, application no. 19, columns 5 and 7, for example a fragment which can be used as a probe or primer or a fragment encoding a biologically active portion of the polypeptide of the present invention or of a polypeptide used in the process of the present invention, i.e. having above-mentioned activity, e.g. conferring an increase of the respective fine chemical indicated in Table I, application no. 19, column 6, if its activity is increased by for example expression either in the cytsol or in an organelle such as a plastid or mitochondria or both, preferably in plastids, and the gene product, e.g. the polypeptide, being localized in the plastid and other parts of the cell or in the plastid as described above. The nucleotide sequences determined from the cloning of the present protein-according-to-the-invention-encoding gene allows for the generation of probes and primers designed for use in identifying and/or cloning its homologues in other cell types and organisms. The probe/primer typically comprises substantially purified oligonucleotide. The oligonucleotide typically comprises a region of nucleotide sequence that hybridizes under stringent conditions to at least about 12, 15 preferably about 20 or 25, more preferably about 40, 50 or 75 consecutive nucleotides of a sense strand of one of the sequences set forth, e.g., in table I, application no. 19, columns 5 and 7, an anti-sense sequence of one of the sequences, e.g., set forth in table I, application no. 19, columns 5 and 7, preferably shown in table I B, application no. 19, columns 5 and 7, or naturally occurring mutants thereof. Primers based on a nucleotide of invention can be used in PCR reactions to clone homologues of the polypeptide of the invention or of the polypeptide used in the process of the invention, e.g. as the primers described in the examples of the present invention, e.g. as shown in the examples. A PCR with the primers shown in table Ill, application no. 19, column 7 will result in a fragment of the gene product as shown in table II, column 3.

[5145] for the disclosure of this paragraph see paragraph [0164.0.0.0] above.

[5146] The nucleic acid molecule of the invention encodes a polypeptide or portion thereof which includes an amino acid sequence which is sufficiently homologous to the amino acid sequence shown in table II, application no. 19, columns 5 and 7 such that the protein or portion thereof maintains the ability to participate in the fine chemical production, in particular sinapic acid or ferulic acid increasing the activity as mentioned above or as described in the examples in plants or microorganisms is comprised.

[5147] As used herein, the language “sufficiently homologous” refers to proteins or portions thereof which have amino acid sequences which include a minimum number of identical or equivalent amino acid residues (e.g., an amino acid residue which has a similar side chain as an amino acid residue in one of the sequences of the polypeptide of the present invention) to an amino acid sequence shown in table II, application no. 19, columns 5 and 7 such that the protein or portion thereof is able to participate in the increase of the fine chemical production. For examples having the activity of a protein as shown in table II, column 3 and as described herein.

[5148] In one embodiment, the nucleic acid molecule of the present invention comprises a nucleic acid that encodes a portion of the protein of the present invention. The protein is at least about 30%, 35%, 40%, 45% or 50%, preferably at least about 55%, 60%, 65% or 70%, and more preferably at least about 75%, 80%, 85%, 90%, 91%, 92%, 93% or 94% and most preferably at least about 95%, 97%, 98%, 99% or more homologous to an entire amino acid sequence of table II, application no. 19, columns 5 and 7 and having above-mentioned activity, e.g. conferring preferably the increase of the respective fine chemical by for example expression either in the cytsol or in an organelle such as a plastid or mitochondria or both, preferably in plastids, and the gene product, e.g. the polypeptide, being localized in the plastid and other parts of the cell or in the plastid as described above.

[5149] for the disclosure of the paragraphs [0168.0.0.18] and [0169.0.0.18] see paragraphs [0168.0.0.0] and [0169.0.0.0] above.

[5150] The invention further relates to nucleic acid molecules that differ from one of the nucleotide sequences shown in table I, application no. 19, columns 5 and 7 (and portions thereof) due to degeneracy of the genetic code and thus encode a polypeptide of the present invention, in particular a polypeptide having above mentioned activity, e.g. conferring an increase in the respective fine chemical in a organism, e.g. as that polypeptides depicted by the sequence shown in table II, application no. 19, columns 5 and 7 or the functional homologues. Advantageously, the nucleic acid molecule of the invention comprises, or in an other embodiment has, a nucleotide sequence encoding a protein comprising, or in an other embodiment having, an amino acid sequence shown in table II, application no. 19, columns 5 and 7 or the functional homologues. In a still further embodiment, the nucleic acid molecule of the invention encodes a full length protein which is substantially homologous to an amino acid sequence shown in table II, application no. 19, columns 5 and 7 or the functional homologues. However, in a preferred embodiment, the nucleic acid molecule of the present invention does not consist of the sequence shown in table I, application no. 19, columns 5 and 7, preferably as indicated in table I A, application no. 19, columns 5 and 7. Preferably the nucleic acid molecule of the invention is a functional homologue or identical to a nucleic acid molecule indicated in table I B, application no. 19, columns 5 and 7.

[5151] for the disclosure of the paragraphs [0171.0.0.18] to [0173.0.0.18] see paragraphs [0171.0.0.0] to [0173.0.0.0] above.

[5152] Accordingly, in another embodiment, a nucleic acid molecule of the invention is at least 15, 20, 25 or 30 nucleotides in length. Preferably, it hybridizes under stringent conditions to a nucleic acid molecule comprising a nucleotide sequence of the nucleic acid molecule of the present invention or used in the process of the present invention, e.g. comprising the sequence shown in table I, application no. 19, columns 5 and 7. The nucleic acid molecule is preferably at least 20, 30, 50, 100, 250 or more nucleotides in length.

[5153] for the disclosure of this paragraph see paragraph [0175.0.0.0] above.

[5154] Preferably, nucleic acid molecule of the invention that hybridizes under stringent conditions to a sequence shown in table I, application no. 19, columns 5 and 7 corresponds to a naturally-occurring nucleic acid molecule of the invention. As used herein, a “naturally-occurring” nucleic acid molecule refers to an RNA or DNA molecule having a nucleotide sequence that occurs in nature (e.g., encodes a natural protein). Preferably, the nucleic acid molecule encodes a natural protein having abovementioned activity, e.g. conferring the respective fine chemical increase after increasing the expression or activity thereof or the activity of a protein of the invention or used in the process of the invention by for example expression the nucleic acid sequence of the gene product in the cytsol and/or in an organelle such as a plastid or mitochondria, preferably in plastids.

[5155] for the disclosure of this paragraph see paragraph [0177.0.0.0] above.

[5156] For example, nucleotide substitutions leading to amino acid substitutions at “non-essential” amino acid residues can be made in a sequence of the nucleic acid molecule of the invention or used in the process of the invention, e.g. shown in table I, application no. 19, columns 5 and 7.

[5157] for the disclosure of the paragraphs [0179.0.0.18] and [0180.0.0.18] see paragraphs [0179.0.0.0] and [0180.0.0.0] above.

[5158] Accordingly, the invention relates to nucleic acid molecules encoding a polypeptide having above-mentioned activity, e.g. conferring an increase in the the respective fine chemical in an organisms or parts thereof by for example expression either in the cytsol or in an organelle such as a plastid or mitochondria or both, preferably in plastids (as described), that contain changes in amino acid residues that are not essential for said activity. Such polypeptides differ in amino acid sequence from a sequence contained in the sequences shown in table II, application no. 19, columns 5 and 7, preferably shown in table II A, application no. 19, columns 5 and 7 yet retain said activity described herein. The nucleic acid molecule can comprise a nucleotide sequence encoding a polypeptide, wherein the polypeptide comprises an amino acid sequence at least about 50% identical to an amino acid sequence shown in table II, application no. 19, columns 5 and 7, preferably shown in table II A, application no. 19, columns 5 and 7 and is capable of participation in the increase of production of the fine chemical after increasing its activity, e.g. its expression by for example expression either in the cytsol or in an organelle such as a plastid or mitochondria or both, preferably in plastids and the gene product, e.g. the polypeptide, being localized in the plastid and other parts of the cell or in the plastid as described above. Preferably, the protein encoded by the nucleic acid molecule is at least about 60% identical to the sequence shown in table II, application no. 19, columns 5 and 7, preferably shown in table II A, application no. 19, columns 5 and 7, more preferably at least about 70% identical to one of the sequences shown in table II, application no. 19, columns 5 and 7, preferably shown in table II A, application no. 19, columns 5 and 7, even more preferably at least about 80%, 90%, 95% homologous to the sequence shown in table II, application no. 19, columns 5 and 7, preferably shown in table II A, application no. 19, columns 5 and 7, and most preferably at least about 96%, 97%, 98%, or 99% identical to the sequence shown in table II, application no. 19, columns 5 and 7, preferably shown in table II A, application no. 19, columns 5 and 7.

[5159] for the disclosure of the paragraphs [0182.0.0.18] to [0188.0.0.18] see paragraphs [0182.0.0.0] to [0188.0.0.0] above.

[5160] Functional equivalents derived from one of the polypeptides as shown in table II, application no. 19, columns 5 and 7, preferably shown in table II B, application no. 19, columns 5 and 7 resp., according to the invention by substitution, insertion or deletion have at least 30%, 35%, 40%, 45% or 50%, preferably at least 55%, 60%, 65% or 70% by preference at least 80%, especially preferably at least 85% or 90%, 91%, 92%, 93% or 94%, very especially preferably at least 95%, 97%, 98% or 99% homology with one of the polypeptides as shown in table II, application no. 19, columns 5 and 7, preferably shown in table II B, application no. 19, columns 5 and 7 resp., according to the invention and are distinguished by essentially the same properties as the polypeptide as shown in table II, application no. 18, columns 5 and 7, preferably shown in table II B, application no. 19, columns 5 and 7.

[5161] Functional equivalents derived from the nucleic acid sequence as shown in table I, application no. 19, columns 5 and 7, preferably shown in table I B, application no. 19, columns 5 and 7 resp., according to the invention by substitution, insertion or deletion have at least 30%, 35%, 40%, 45% or 50%, preferably at least 55%, 60%, 65% or 70% by preference at least 80%, especially preferably at least 85% or 90%, 91%, 92%, 93% or 94%, very especially preferably at least 95%, 97%, 98% or 99% homology with one of the polypeptides as shown in table II, application no. 19, columns 5 and 7, preferably shown in table II B, application no. 19, columns 5 and 7 resp., according to the invention and encode polypeptides having essentially the same properties as the polypeptide as shown in table II, application no. 19, columns 5 and 7, preferably shown in table II B, application no. 19, columns 5 and 7.

[5162] for the disclosure of this paragraph see paragraph [0191.0.0.0] above.

[5163] A nucleic acid molecule encoding an homologous to a protein sequence of table II, application no. 19, columns 5 and 7, preferably shown in table II B, application no. 19, columns 5 and 7 resp., can be created by introducing one or more nucleotide substitutions, additions or deletions into a nucleotide sequence of the nucleic acid molecule of the present invention, in particular of table I, application no. 19, columns 5 and 7, preferably shown in table I B, application no. 19, columns 5 and 7 resp., such that one or more amino acid substitutions, additions or deletions are introduced into the encoded protein. Mutations can be introduced into the encoding sequences of table I, application no. 19, columns 5 and 7, preferably shown in table I B, application no. 19, columns 5 and 7 resp., by standard techniques, such as site-directed mutagenesis and PCR-mediated mutagenesis.

[5164] for the disclosure of the paragraphs [0193.0.0.18] to [0196.0.0.18] see paragraphs [0193.0.0.0] to [0196.0.0.0] above.

[5165] Homologues of the nucleic acid sequences used, with the sequence shown in table I, application no. 19, columns 5 and 7, preferably shown in table I B, application no. 19, columns 5 and 7, comprise also allelic variants with at least approximately 30%, 35%, 40% or 45% homology, by preference at least approximately 50%, 60% or 70%, more preferably at least approximately 90%, 91%, 92%, 93%, 94% or 95% and even more preferably at least approximately 96%, 97%, 98%, 99% or more homology with one of the nucleotide sequences shown or the abovementioned derived nucleic acid sequences or their homologues, derivatives or analogues or parts of these. Allelic variants encompass in particular functional variants which can be obtained by deletion, insertion or substitution of nucleotides from the sequences shown, preferably from table I, application no. 19, columns 5 and 7, preferably shown in table I B, application no. 19, columns 5 and 7, or from the derived nucleic acid sequences, the intention being, however, that the enzyme activity or the biological activity of the resulting proteins synthesized is advantageously retained or increased.

[5166] In one embodiment of the present invention, the nucleic acid molecule of the invention or used in the process of the invention comprises the sequences shown in any of the table I, application no. 19, columns 5 and 7, preferably shown in table I B, application no. 19, columns 5 and 7. It is preferred that the nucleic acid molecule comprises as little as possible other nucleotides not shown in any one of table I, application no. 19, columns 5 and 7, preferably shown in table I B, application no. 19, columns 5 and 7. In one embodiment, the nucleic acid molecule comprises less than 500, 400, 300, 200, 100, 90, 80, 70, 60, 50 or 40 further nucleotides. In a further embodiment, the nucleic acid molecule comprises less than 30, 20 or 10 further nucleotides. In one embodiment, the nucleic acid molecule use in the process of the invention is identical to the sequences shown in table I, application no. 19, columns 5 and 7, preferably shown in table I B, application no. 19, columns 5 and 7.

[5167] Also preferred is that the nucleic acid molecule used in the process of the invention encodes a polypeptide comprising the sequence shown in table II, application no. 19, columns 5 and 7, preferably shown in table II B, application no. 19, columns 5 and 7. In one embodiment, the nucleic acid molecule encodes less than 150, 130, 100, 80, 60, 50, 40 or 30 further amino acids. In a further embodiment, the encoded polypeptide comprises less than 20, 15, 10, 9, 8, 7, 6 or 5 further amino acids. In one embodiment used in the inventive process, the encoded polypeptide is identical to the sequences shown in table II, application no. 19, columns 5 and 7, preferably shown in table II B, application no. 19, columns 5 and 7.

[5168] In one embodiment, the nucleic acid molecule of the invention or used in the process encodes a polypeptide comprising the sequence shown in table II, application no. 19, columns 5 and 7, preferably shown in table II B, application no. 19, columns 5 and 7 comprises less than 100 further nucleotides. In a further embodiment, said nucleic acid molecule comprises less than 30 further nucleotides. In one embodiment, the nucleic acid molecule used in the process is identical to a coding sequence of the sequences shown in table I, application no. 19, columns 5 and 7, preferably shown in table I B, application no. 19, columns 5 and 7.

[5169] Polypeptides (=proteins), which still have the essential biological or enzymatic activity of the polypeptide of the present invention conferring an increase of the respective fine chemical indicated in column 6 of Table I, application no. 19, i.e. whose activity is essentially not reduced, are polypeptides with at least 10% or 20%, by preference 30% or 40%, especially preferably 50% or 60%, very especially preferably 80% or 90 or more of the wild type biological activity or enzyme activity, advantageously, the activity is essentially not reduced in comparison with the activity of a polypeptide shown in table II, application no. 19, columns 5 and 7 expressed under identical conditions.

[5170] Homologues of table I, application no. 19, columns 5 and 7 or of the derived sequences of table II, application no. 19, columns 5 and 7 also mean truncated sequences, cDNA, single-stranded DNA or RNA of the coding and noncoding DNA sequence. Homologues of said sequences are also understood as meaning derivatives, which comprise noncoding regions such as, for example, UTRs, terminators, enhancers or promoter variants. The promoters upstream of the nucleotide sequences stated can be modified by one or more nucleotide substitution(s), insertion(s) and/or deletion(s) without, however, interfering with the functionality or activity either of the promoters, the open reading frame (=ORF) or with the 3′-regulatory region such as terminators or other 3′ regulatory regions, which are far away from the ORF. It is furthermore possible that the activity of the promoters is increased by modification of their sequence, or that they are replaced completely by more active promoters, even promoters from heterologous organisms. Appropriate promoters are known to the person skilled in the art and are mentioned herein below.

[5171] for the disclosure of the paragraphs [0203.0.0.18] to [0215.0.0.18] see paragraphs [0203.0.0.0] to [0215.0.0.0] above.

[5172] Accordingly, in one embodiment, the invention relates to a nucleic acid molecule, which comprises a nucleic acid molecule selected from the group consisting of:
[5173] a) nucleic acid molecule encoding, preferably at least the mature form, of the polypeptide shown in table II, application no. 19, columns 5 and 7, preferably in table II B, application no. 19, columns 5 and 7; or a fragment thereof conferring an increase in the amount of the fine chemical according to table II B, application no. 19, column 6 in an organism or a part thereof
[5174] b) nucleic acid molecule comprising, preferably at least the mature form, of the nucleic acid molecule shown in table I, application no. 19, columns 5 and 7, preferably in table I B, application no. 19, columns 5 and 7 or a fragment thereof conferring an increase in the amount of the fine chemical according to table II B, application no. 19, column 6 in an organism or a part thereof;
[5175] c) nucleic acid molecule whose sequence can be deduced from a polypeptide sequence encoded by a nucleic acid molecule of (a) or (b) as result of the degeneracy of the genetic code and conferring an increase in the amount of the fine chemical according to table II B, application no. 19, column 6 in an organism or a part thereof;
[5176] d) nucleic acid molecule encoding a polypeptide whose sequence has at least 50% identity with the amino acid sequence of the polypeptide encoded by the nucleic acid molecule of (a) to (c) and conferring an increase in the amount of the fine chemical according to table II B, application no. 19, column 6 in an organism or a part thereof;
[5177] e) nucleic acid molecule which hybridizes with a nucleic acid molecule of (a) to (c) under stringent hybridisation conditions and conferring an increase in the amount of the fine chemical according to table II B, application no. 19, column 6 in an organism or a part thereof;
[5178] f) nucleic acid molecule encoding a polypeptide, the polypeptide being derived by substituting, deleting and/or adding one or more amino acids of the amino acid sequence of the polypeptide encoded by the nucleic acid molecules (a) to (d), preferably to (a) to (c), and conferring an increase in the amount of the fine chemical according to table II B, application no. 19, column 6 in an organism or a part thereof;
[5179] g) nucleic acid molecule encoding a fragment or an epitope of a polypeptide which is encoded by one of the nucleic acid molecules of (a) to (e), preferably to (a) to (c) and conferring an increase in the amount of the fine chemical according to table II B, application no. 19, column 6 in an organism or a part thereof;
[5180] h) nucleic acid molecule comprising a nucleic acid molecule which is obtained by amplifying a cDNA library or a genomic library using the primers in table III, application no. 19, column 7 and conferring an increase in the amount of the fine chemical according to table II B, application no. 19, column 6 in an organism or a part thereof;
[5181] i) nucleic acid molecule encoding a polypeptide which is isolated, e.g. from a expression library, with the aid of monoclonal antibodies against a polypeptide encoded by one of the nucleic acid molecules of (a) to (g), preferably to (a) to (c) and conferring an increase in the amount of the fine chemical in an organism or a part thereof;
[5182] j) nucleic acid molecule which encodes a polypeptide comprising the consensus sequence shown in table IV, application no. 19, column 7 and conferring an increase in the amount of the fine chemical in an organism or a part thereof;
[5183] k) nucleic acid molecule encoding the amino acid sequence of a polypeptide encoding a domain of the polypeptide shown in table II, application no. 19, columns 5 and 7 and conferring an increase in the amount of the fine chemical according to table II B, application no. 19, column 6 in an organism or a part thereof; and
[5184] l) nucleic acid molecule which is obtainable by screening a suitable nucleic acid library under stringent hybridization conditions with a probe comprising one of the sequences of the nucleic acid molecule of (a) to (k) or with a fragment of at least 15 nt, preferably 20 nt, 30 nt, 50 nt, 100 nt, 200 nt or 500 nt of the nucleic acid molecule characterized in (a) to (h) or of the nucleic acid molecule shown in table I, application no. 19, columns 5 and 7 or a nucleic acid molecule encoding, preferably at least the mature form of, the polypeptide shown in table II, application no. 19, columns 5 and 7, and conferring an increase in the amount of the fine chemical according to table II B, application no. 19, column 6 in an organism or a part thereof; or which encompasses a sequence which is complementary thereto;
   whereby, preferably, the nucleic acid molecule according to (a) to (l) distinguishes over the sequence depicted in table I A and/or I B, application no. 19, columns 5 and 7 by one or more nucleotides. In one embodiment, the nucleic acid molecule of the invention does not consist of the sequence shown in table I A and/or I B, application no. 19, columns 5 and 7. In another embodiment, the nucleic acid molecule of the present invention is at least 30% identical and less than 100%, 99.999%, 99.99%, 99.9% or 99% identical to the sequence shown in table I A and/or I B, application no. 1 8, columns 5 and 7. In a further embodiment the nucleic acid molecule does not encode the polypeptide sequence shown in table II A and/or II B, application no. 19, columns 5 and 7. Accordingly, in one embodiment, the nucleic acid molecule of the present invention encodes in one embodiment a polypeptide which differs at least in one or more amino acids from the polypeptide shown in table II A and/or II B, application no. 19, columns 5 and 7 does not encode a protein of the sequence shown in table II A and/or II B, application no. 19, columns 5 and 7. Accordingly, in one embodiment, the protein encoded by a sequence of a nucleic acid according to (a) to (l) does not consist of the sequence shown in table I A and/or I B, application no. 19, columns 5 and 7. In a further embodiment, the protein of the present invention is at least 30% identical to protein sequence depicted in table II A and/or II B, application no. 19, columns 5 and 7 and less than 100%, preferably less than 99.999%, 99.99% or 99.9%, more preferably less than 99%, 985, 97%, 96% or 95% identical to the sequence shown in table II A and/or II B, application no. 19, columns 5 and 7.

[5185] for the disclosure of the paragraphs [0217.0.0.18] to [0226.0.0.18] see paragraphs [0217.0.0.0] to [0226.0.0.0] above.

[5186] In general, vector systems preferably also comprise further cis-regulatory regions such as promoters and terminators and/or selection markers by means of which suitably transformed organisms can be identified. While vir genes and T-DNA sequences are located on the same vector in the case of cointegrated vector systems, binary systems are based on at least two vectors, one of which bears vir genes, but no T-DNA, while a second one bears T-DNA, but no vir gene. Owing to this fact, the last-mentioned vectors are relatively small, easy to manipulate and capable of replication in E. coli and in Agrobacterium. These binary vectors include vectors from the series pBIB-HYG, pPZP, pBecks, pGreen. Those which are preferably used in accordance with the invention are Bin19, pBI101, pBinAR, pGPTV and pCAMBIA. An overview of binary vectors and their use is given by Hellens et al, Trends in Plant Science (2000) 5, 446-451. The vectors are preferably modified in such a manner, that they already contain the nucleic acid coding for the transitpeptide and that the nucleic acids of the invention, preferentially the nucleic acid sequences encoding the polypeptides shown in table II, application no. 19, columns 5 and 7 can be cloned 3″ prime to the transitpeptide encoding sequence, leading to a functional preprotein, which is directed to the plastids and which means that the mature protein fulfills its biological activity.

[5187] for the disclosure of the paragraphs [0228.0.0.18] to [0239.0.0.18] see paragraphs [0228.0.0.0] to [0239.0.0.0] above.

[5188] The abovementioned nucleic acid molecules can be cloned into the nucleic acid constructs or vectors according to the invention in combination together with further genes, or else different genes are introduced by transforming several nucleic acid constructs or vectors (including plasmids) into a host cell, advantageously into a plant cell or a microorganisms.

In addition to the sequence mentioned in Table I, application no. 19, columns 5 and 7 or its derivatives, it is advantageous additionally to express and/or mutate further genes in the organisms. It can be especially advantageously, if additionally at least one further gene of the sinapic acid or ferulic acid biosynthetic pathway, e.g. of the phenylpropanoid pathway, is expressed in the organisms such as plants or microorganisms. It is also possible that the regulation of the natural genes has been modified advantageously so that the gene and/or its gene product is no longer subject to the regulatory mechanisms which exist in the organisms. This leads to an increased synthesis of the amino acids desired since, for example, feedback regulations no longer exist to the same extent or not at all. In addition it might be advantageously to combine the sequences shown in Table I, application no. 19, columns 5 and 7 with genes which generally support or enhances the growth or yield of the target organism, for example genes which lead to faster growth rate of microorganisms or genes which produces stress-, pathogen, or herbicide resistant plants.

[5189] In a further embodiment of the process of the invention, therefore, organisms are grown, in which there is simultaneous direct or indirect overexpression of at least one nucleic acid or one of the genes which code for proteins involved in the phenylpropanoid metabolism. Indirect overexpression might be achieved by the manipulation of the regulation of the endogenous gene, for example through promoter mutations or the expression of natural or artificial transcriptional regulators.

[5190] Further advantageous nucleic acid sequences which can be expressed in combination with the sequences used in the process and/or the abovementioned biosynthesis genes are the sequences encoding further genes of the phenylpropanoid pathway like cinnamate-4-hydroxylase (C4H), chalcone synthase (CHS), Ferulate 5-hydroxylase (F5H) or phenylalanine ammonia-lyase (PAL). These genes may lead to an increased synthesis of sinapic acid or ferulic acid.

[5191] In a further advantageous embodiment of the process of the invention, the organisms used in the process are those in which simultaneously a sinapic acid or ferulic acid degrading protein is attenuated, in particular by reducing the rate of expression of the corresponding gene.

[5192] The respective fine chemical produced can be isolated from the organism by methods with which the skilled worker is familiar. For example, via extraction, salt precipitation, and/or different chromatography methods. The process according to the invention can be conducted batchwise, semibatchwise or continuously. The respective fine chemical produced by this process can be obtained by harvesting the organisms, either from the crop in which they grow, or from the field. This can be done via pressing or extraction of the plant parts.

[5193] for the disclosure of the paragraphs [0243.0.0.18] to [0264.0.0.18] see paragraphs [0243.0.0.0] to [0264.0.0.0] above.

[5194] Other preferred sequences for use in operable linkage in gene expression constructs are targeting sequences, which are required for targeting the gene product into specific cell compartments (for a review, see Kermode, Crit. Rev. Plant Sci. 15, 4 (1996) 285-423 and references cited therein), for example into the vacuole, the nucleus, all types of plastids, such as amyloplasts, chloroplasts, chromoplasts, the extracellular space, the mitochondria, the endoplasmic reticulum, elaioplasts, peroxisomes, glycosomes, and other compartments of cells or extracellular preferred are sequences, which are involved in targeting to plastids as mentioned above. Sequences, which must be mentioned in this context are, in particular, the signal-peptide- or transit-peptide-encoding sequences which are known per se. For example, plastid-transit-peptide-encoding sequences enable the targeting of the expression product into the plastids of a plant cell. Targeting sequences are also known for eukaryotic and to a lower extent for prokaryotic organisms and can advantageously be operable linked with the nucleic acid molecule of the present invention as shown in table I, application no. 19, columns 5 and 7 and described herein to achieve an expression in one of said compartments or extracellular.

[5195] for the disclosure of the paragraphs [0266.0.0.18] to [0287.0.0.18] see paragraphs [0266.0.0.0] to [0287.0.0.0] above.

[5196] Accordingly, one embodiment of the invention relates to a vector where the nucleic acid molecule according to the invention is linked operably to regulatory sequences which permit the expression in a prokaryotic or eukaryotic or in a prokaryotic and eukaryotic host. A further preferred embodiment of the invention relates to a vector in which a nucleic acid sequence encoding one of the polypeptides shown in table II, application no. 19, columns 5 and 7 or their homologs is functionally linked to a plastidial targeting sequence. A further preferred embodiment of the invention relates to a vector in which a nucleic acid sequence encoding one of the polypeptides shown in table II, application no. 19, columns 5 and 7 or their homologs is functionally linked to a regulatory sequences which permit the expression in plastids.

[5197] for the disclosure of the paragraphs [0289.0.0.18] to [0296.0.0.18] see paragraphs [0289.0.0.0] to [0296.0.0.0] above.

[5198] Moreover, a native polypeptide conferring the increase of the respective fine chemical in an organism or part thereof can be isolated from cells (e.g., endothelial cells), for example using the antibody of the present invention as described herein, in particular, an antibody against polypeptides as shown in table II, application no. 19, columns 5 and 7, which can be produced by standard techniques utilizing the polypeptide of the present invention or fragment thereof, i.e., the polypeptide of this invention. Preferred are monoclonal antibodies.

[5199] for the disclosure of this paragraph see paragraph [0298.0.0.0] above.

[5200] In one embodiment, the present invention relates to a polypeptide having the sequence shown in table II, application no. 19, columns 5 and 7 or as coded by the nucleic acid molecule shown in table I, application no. 19, columns 5 and 7 or functional homologues thereof.

[5201] In one advantageous embodiment, in the method of the present invention the activity of a polypeptide is increased comprising or consisting of the consensus sequence shown in table IV, application no. 19, columns 7 and in one another embodiment, the present invention relates to a polypeptide comprising or consisting of the consensus sequence shown in table IV, application no. 19, column 7 whereby 20 or less, preferably 15 or 10, preferably 9, 8, 7, or 6, more preferred 5 or 4, even more preferred 3, even more preferred 2, even more preferred 1, most preferred 0 of the amino acids positions indicated can be replaced by any amino acid.

[5202] for the disclosure of the paragraphs [0301.0.0.18] to [0304.0.0.18] see paragraphs [0301.0.0.0] to [0304.0.0.0] above.

[5203] In one advantageous embodiment, the method of the present invention comprises the increasing of a polypeptide comprising or consisting of plant or microorganism specific consensus sequences.

In one embodiment, said polypeptide of the invention distinguishes over the sequence shown in table II A and/or II B, application no. 19, columns 5 and 7 by one or more amino acids. In one embodiment, polypeptide distinguishes form the sequence shown in table II A and/or II B, application no. 19, columns 5 and 7 by more than 5, 6, 7, 8 or 9 amino acids, preferably by more than 10, 15, 20, 25 or 30 amino acids, even more preferred are more than 40, 50, or 60 amino acids and, preferably, the sequence of the polypeptide of the invention distinguishes from the sequence shown in table II A and/or II B, application no. 19, columns 5 and 7 by not more than 80% or 70% of the amino acids, preferably not more than 60% or 50%, more preferred not more than 40% or 30%, even more preferred not more than 20% or 10%. In an other embodiment, said polypeptide of the invention does not consist of the sequence shown in table II A and/or II B, application no. 19, columns 5 and 7.

[5204] for the disclosure of this paragraph see paragraph [0306.0.0.0] above.

[5205] In one embodiment, the invention relates to polypeptide conferring an increase of level of the respective fine chemical indicated in Table II A and/or II B, application no. 19, column 6 in an organism or part being encoded by the nucleic acid molecule of the invention or used in the process of the invention and having a sequence which distinguishes from the sequence as shown in table II A and/or II B, application no. 19, columns 5 and 7 by one or more amino acids. In another embodiment, said polypeptide of the invention does not consist of the sequence shown in table II A and/or II B, application no. 19, columns 5 and 7. In a further embodiment, said polypeptide of the present invention is less than 100%, 99.999%, 99.99%, 99.9% or 99% identical. In one embodiment, said polypeptide does not consist of the sequence encoded by the nucleic acid molecules shown in table I A and/or I B, application no. 19, columns 5 and 7.

[5206] In one embodiment, the present invention relates to a polypeptide having the activity of the protein as shown in table II A and/or II B, application no. 19, column 3, which distinguishes over the sequence depicted in table II A and/or II B, application no. 19, columns 5 and 7 by one or more amino acids, preferably by more than 5, 6, 7, 8 or 9 amino acids, preferably by more than 10, 15, 20, 25 or 30 amino acids, even more preferred are more than 40, 50, or 60 amino acids but even more preferred by less than 70% of the amino acids, more preferred by less than 50%, even more preferred my less than 30% or 25%, more preferred are 20% or 15%, even more preferred are less than 10%. In a further preferred embodiment the polypeptide of the invention takes the form of a preprotein consisting of a plastidial transitpeptide joint to a polypeptide having the activity of the protein as shown in table II A and/or II B, column 3, from which the transitpeptide is preferably cleaved off upon transport of the preprotein into the organelle, for example into the plastid or mitochondria.

[5207] for the disclosure of the paragraphs [0309.0.0.18] to [0311.0.0.18] see paragraphs [0309.0.0.0] to [0311.0.0.0] above.

[5208] A polypeptide of the invention can participate in the process of the present invention. The polypeptide or a portion thereof comprises preferably an amino acid sequence, which is sufficiently homologous to an amino acid sequence shown in table II, application no. 19, columns 5 and 7.

[5209] Further, the polypeptide can have an amino acid sequence which is encoded by a nucleotide sequence which hybridizes, preferably hybridizes under stringent conditions as described above, to a nucleotide sequence of the nucleic acid molecule of the present invention. Accordingly, the polypeptide has an amino acid sequence which is encoded by a nucleotide sequence that is at least about 35%, 40%, 45%, 50%, 55%, 60%, 65% or 70%, preferably at least about 75%, 80%, 85% or 90, and more preferably at least about 91%, 92%, 93%, 94% or 95%, and even more preferably at least about 96%, 97%, 98%, 99% or more homologous to one of the amino acid sequences as shown in table II A and/or II B, application no. 19, columns 5 and 7. The preferred polypeptide of the present invention preferably possesses at least one of the activities according to the invention and described herein. A preferred polypeptide of the present invention includes an amino acid sequence encoded by a nucleotide sequence which hybridizes, preferably hybridizes under stringent conditions, to a nucleotide sequence of table I A and/or I B, application no. 19, columns 5 and 7 or which is homologous thereto, as defined above.

[5210] Accordingly the polypeptide of the present invention can vary from the sequences shown in table II A and/or II B, application no. 19, columns 5 and 7 in amino acid sequence due to natural variation or mutagenesis, as described in detail herein. Accordingly, the polypeptide comprise an amino acid sequence which is at least about 35%, 40%, 45%, 50%, 55%, 60%, 65% or 70%, preferably at least about 75%, 80%, 85% or 90, and more preferably at least about 91%, 92%, 93%, 94% or 95%, and most preferably at least about 96%, 97%, 98%, 99% or more homologous to an entire amino acid sequence shown in table II A and/or II B, application no. 19, columns 5 and 7.

[5211] for the disclosure of this paragraph see paragraph [0315.0.0.0] above.

[5212] Biologically active portions of an polypeptide of the present invention include peptides comprising amino acid sequences derived from the amino acid sequence of the polypeptide of the present invention or used in the process of the present invention, e.g., the amino acid sequence shown in table II, application no. 19, columns 5 and 7 or the amino acid sequence of a protein homologous thereto, which include fewer amino acids than a full length polypeptide of the present invention or used in the process of the present invention or the full length protein which is homologous to an polypeptide of the present invention or used in the process of the present invention depicted herein, and exhibit at least one activity of polypeptide of the present invention or used in the process of the present invention.

[5213] for the disclosure of this paragraph see paragraph [0317.0.0.0] above.

[5214] Manipulation of the nucleic acid molecule of the invention may result in the production of a protein having differences from the wild-type protein as shown in table II, application no. 19, column 3. Differences shall mean at least one amino acid different from the sequences as shown in table II, application no. 19, column 3, preferably at least 2, 3, 4, 5, 6, 7, 8, 9 or 10 amino acids, more preferably at least 15, 20, 25, 30, 35, 40, 45 or 50 amino acids different from the sequences as shown in table II, application no. 19, column 3. These proteins may be improved in efficiency or activity, may be present in greater numbers in the cell than is usual, or may be decreased in efficiency or activity in relation to the wild type protein.

[5215] Any mutagenesis strategies for the polypeptide of the present invention or the polypeptide used in the process of the present invention to result in increasing said activity are not meant to be limiting; variations on these strategies will be readily apparent to one skilled in the art. Using such strategies, and incorporating the mechanisms disclosed herein, the nucleic acid molecule and polypeptide of the invention may be utilized to generate plants or parts thereof, expressing wildtype proteins or mutated proteins of the proteins as shown in table II, application no. 19, column 3. The nucleic acid molecules and polypeptide molecules of the invention are expressed such that the yield, production, and/or efficiency of production of a desired compound is improved.

[5216] Preferably, the compound is a composition comprising the essentially pure fine chemical, i.e. sinapic acid or ferulic acid or a recovered or isolated sinapic acid or ferulic acid in free or bound form.

[5217] for the disclosure of the paragraphs [0320.0.0.18] to [0322.0.0.18] see paragraphs [0320.0.0.0] to [0322.0.0.0] above.

[5218] In one embodiment, a protein (=polypeptide) as shown in table II, application no. 19, column 3 refers to a polypeptide having an amino acid sequence corresponding to the polypeptide of the invention or used in the process of the invention, whereas a “non-inventive protein or polypeptide” or “other polypeptide” refers to a polypeptide having an amino acid sequence corresponding to a protein which is not substantially homologous to a polypeptide of the invention, preferably which is not substantially homologous to a polypeptide or protein as shown in table II, application no. 19, column 3, e.g., a protein which does not confer the activity described herein and which is derived from the same or a different organism.

[5219] for the disclosure of the paragraphs [0324.0.0.18] to [0329.0.0.18] see paragraphs [0324.0.0.0] to [0329.0.0.0] above.

[5220] In an especially preferred embodiment, the polypeptide according to the invention furthermore also does not have the sequences of those proteins, which are encoded by the sequences shown in table II, application no. 19, columns 5 and 7.

[5221] for the disclosure of the paragraphs [0331.0.0.18] to [0346.0.0.18] see paragraphs [0331.0.0.0] to [0346.0.0.0] above.

[5222] Accordingly the present invention relates to any cell transgenic for any nucleic acid characterized as part of the invention, e.g. conferring the increase of the respective fine chemical indicated in column 6 of application no. 19 in any one of Talbes I to IV in a cell or an organism or a part thereof, e.g. the nucleic acid molecule of the invention, the nucleic acid construct of the invention, the antisense molecule of the invention, the vector of the invention or a nucleic acid molecule encoding the polypeptide of the invention, e.g. encoding a polypeptide having an activity as the protein as shown in table II, application no. 19, column 3. Due to the above mentioned activity the respective fine chemical content in a cell or an organism is increased. For example, due to modulation or manipulation, the cellular activity is increased preferably in organelles such as plastids or mitochondria, e.g. due to an increased expression or specific activity or specific targeting of the subject matters of the invention in a cell or an organism or a part thereof especially in organelles such as plastids or mitochondria. Transgenic for a polypeptide having a protein or activity means herein that due to modulation or manipulation of the genome, the activity of protein as shown in table II, application no. 19, column 3 or a protein as shown in table II, application no. 19, column 3-like activity is increased in the cell or organism or part thereof especially in organelles such as plastids or mitochondria. Examples are described above in context with the process of the invention.

[5223] for the disclosure of this paragraph see paragraph [0348.0.0.0] above.

[5224] A naturally occurring expression cassette—for example the naturally occurring combination of the promoter of the gene encoding a protein as shown in table II, application no. 19, column 3 with the corresponding encoding gene—becomes a transgenic expression cassette when it is modified by non-natural, synthetic “artificial” methods such as, for example, mutagenization. Such methods have been described (U.S. Pat. No. 5,565,350; WO 00/15815; also see above).

[5225] for the disclosure of the paragraphs [0350.0.0.18] to [0358.0.0.18] see paragraphs [0350.0.0.0] to [0358.0.0.0] above.

[5226] Transgenic plants comprising the respective fine chemical synthesized in the process according to the invention can be marketed directly without isolation of the compounds synthesized. In the process according to the invention, plants are understood as meaning all plant parts, plant organs such as leaf, stalk, root, tubers or seeds or propagation material or harvested material or the intact plant. In this context, the seed encompasses all parts of the seed such as the seed coats, epidermal cells, seed cells, endosperm or embryonic tissue. The respective fine chemical indicated in column 6 of any one of Tables I to IV, application no. 19 and being produced in the process according to the invention may, however, also be isolated from the plant as one of the above mentioned derivates of sinapic acid or ferulic acid itself and can be isolated by harvesting the plants either from the culture in which they grow or from the field. This can be done for example via pressing out, grinding and/or extraction of the plant parts, preferably the plant seeds, plant fruits, plant tubers and the like.

[5227] for the disclosure of the paragraphs [0360.0.0.18] to [0362.0.0.18] see paragraphs [0360.0.0.0] to [0362.0.0.0] above.

[5228] In this manner, more than 50% by weight, advantageously more than 60% by weight, preferably more than 70% by weight, especially preferably more than 80% by weight, very especially preferably more than 90% by weight, of the respective fine chemical produced in the process can be isolated. The resulting composition or fraction comprising the respective fine chemical can, if appropriate, subsequently be further purified, if desired mixed with other active ingredients such as fatty acids, vitamins, amino acids, carbohydrates, antibiotics, covitamins, antioxidants, carotenoids, and the like, and, if appropriate, formulated.

[5229] In one embodiment, the composition is the fine chemical.

[5230] The fine chemical indicated in column 6 of application no. 19 in Table I, being obtained in the process of the invention are suitable as starting material for the synthesis of further products of value. For example, they can be used in combination with each other or alone for the production of pharmaceuticals, foodstuffs, animal feeds or cosmetics. Accordingly, the present invention relates a method for the production of pharmaceuticals, food stuff, animal feeds, nutrients or cosmetics comprising the steps of the process according to the invention, including the isolation of a composition comprising the fine chemical, e.g. sinapic acid or ferulic acid or the isolated respective fine chemical produced, if desired, and formulating the product with a pharmaceutical acceptable carrier or formulating the product in a form acceptable for an application in agriculture. A further embodiment according to the invention is the use of the respective fine chemical indicated in application no. 19, Table I, column 6, and being produced in the process or the use of the transgenic organisms in animal feeds, foodstuffs, medicines, food supplements, cosmetics or pharmaceuticals.

[5231] for the disclosure of the paragraphs [0366.0.0.18] to [0369.0.0.18] see paragraphs [0366.0.0.0] to [0369.0.0.0] above.

[5232] The fermentation broths obtained in this way, containing in particular the respective fine chemical indicated in column 6 of any one of Tables I to IV; application no. 19 or containing mixtures with other compounds, in particular with other phenolic acids, normally have a dry matter content of from 7.5 to 25% by weight. The fermentation broth can be processed further. Depending on requirements, the biomass can be separated, such as, for example, by centrifugation, filtration, decantation, coagulation/flocculation or a combination of these methods, from the fermentation broth or left completely in it. The fermentation broth can be thickened or concentrated by known methods, such as, for example, with the aid of a rotary evaporator, thin-film evaporator, falling film evaporator, by reverse osmosis or by nanofiltration. This concentrated fermentation broth can then be worked up by extraction, freeze-drying, spray drying, spray granulation or by other processes.

[5233] A wide range of advantageous methods and techniques for the isolation of sinapic acid or ferulic acid can be found in the state of the art.

Accordingly, it is possible to further purify the produced sinapic acid or ferulic acid. For this purpose, the product-containing composition, e.g. a total or partial lipid extraction fraction using organic solvents, e.g. as described above, is subjected for example to a saponification to remove triglycerides, partition between e.g. hexane/methanol (separation of non-polar epiphase from more polar hypophasic derivates) and separation via e.g. an open column chromatography or HPLC in which case the desired product or the impurities are retained wholly or partly on the chromatography resin. These chromatography steps can be repeated if necessary, using the same or different chromatography resins. The skilled worker is familiar with the choice of suitable chromatography resins and their most effective use.

[5234] for the disclosure of the paragraphs [0372.0.0.18] to [0376.0.0.18], [0376.1.0.18] and [0377.0.0.18] see paragraphs [0372.0.0.0] to [0376.0.0.0], [0376.1.0.0] and [0377.0.0.0] above.

[5235] In one embodiment, the present invention relates to a method for the identification of a gene product conferring an increase in the fine chemical production in a cell, comprising the following steps:
[5236] (a) contacting e.g. hybridising, the nucleic acid molecules of a sample, e.g. cells, tissues, plants or microorganisms or a nucleic acid library, which can contain a candidate gene encoding a gene product conferring an increase in the respective fine chemical after expression, with the nucleic acid molecule of the present invention;
[5237] (b) identifying the nucleic acid molecules, which hybridize under relaxed stringent conditions with the nucleic acid molecule of the present invention in particular to the nucleic acid molecule sequence shown in table I, application no. 19, columns 5 and 7, preferably in table I B, application no. 19, columns 5 and 7, and, optionally, isolating the full length cDNA clone or complete genomic clone;
[5238] (c) introducing the candidate nucleic acid molecules in host cells, preferably in a plant cell or a microorganism, appropriate for producing the respective fine chemical;
[5239] (d) expressing the identified nucleic acid molecules in the host cells;
[5240] (e) assaying the respective fine chemical level in the host cells; and
[5241] (f) identifying the nucleic acid molecule and its gene product which expression confers an increase in the respective fine chemical as indicated for application no. 19 in any one of Tables I to IV level in the host cell after expression compared to the wild type.

[5242] for the disclosure of the paragraphs [0379.0.0.18] to [0383.0.0.18] see paragraphs [0379.0.0.0] to [0383.0.0.0] above.

[5243] The screen for a gene product or an agonist conferring an increase in the fine chemical production can be performed by growth of an organism for example a microorganism in the presence of growth reducing amounts of an inhibitor of the synthesis of the fine chemical. Better growth, eg higher dividing rate or high dry mass in comparison to the control under such conditions would identify a gene or gene product or an agonist conferring an increase in fine chemical production.

One can think to screen for increased fine chemical production by for example resistance to drugs blocking fine chemical synthesis and looking whether this effect is dependent on the proteins as shown in table II, application no. 19, column 3, eg comparing near identical organisms with low and high activity of the proteins as shown in table II, application no. 19, column 3.

[5244] for the disclosure of the paragraphs [0385.0.0.18] to [0404.0.0.18] see paragraphs [0385.0.0.0] to [0404.0.0.0] above.

[5245] Accordingly, the nucleic acid of the invention, the polypeptide of the invention, the nucleic acid construct of the invention, the organisms, the host cell, the microorganisms, the plant, plant tissue, plant cell, or the part thereof the invention, the vector of the invention, the agonist identified with the method of the invention, the nucleic acid molecule identified with the method of the present invention, can be used for the production of the respective fine chemical indicated in Column 6, Table I, application no. 19 or for the production of the respective fine chemical and one or more other carotenoids, vitamins or fatty acids. In one embodiment, in the process of the present invention, the produced sinapic acid or ferulic acid is used to protect fatty acids against oxidation, e.g. it is in a further step added in a pure form or only partly isolated to a composition comprising fatty acids.

Accordingly, the nucleic acid of the invention, or the nucleic acid molecule identified with the method of the present invention or the complement sequences thereof, the polypeptide of the invention, the nucleic acid construct of the invention, the organisms, the host cell, the microorganisms, the plant, plant tissue, plant cell, or the part thereof of the invention, the vector of the invention, the agonist identified with the method of the invention, the antibody of the present invention, can be used for the reduction of the respective fine chemical in a organism or part thereof, e.g. in a cell.

[5246] The nucleic acid molecule of the invention, the vector of the invention or the nucleic acid construct of the invention may also be useful for the production of organisms resistant to inhibitors of the sinapic acid or ferulic acid production biosynthesis pathways. In particular, the overexpression of the polypeptide of the present invention may protect an organism such as a microorganism or a plant against inhibitors, which block the sinapic acid or ferulic acid biosynthesis, in particular the respective fine chemical synthesis in said organism.

As sinapic acid or ferulic acid can protect organisms against damages of oxidative stress, especially singlet oxygens, a increased level of the respective fine chemical can protect plants against herbicides which cause the toxic buildup of oxidative compounds, e.g. singlet oxygens. For example, inhibition of the protoporphorineogen oxidase (Protox), an enzyme important in the synthesis of chlorophyll and heme biosynthesis results in the loss of chlorophyll and carotenoids and in leaky membranes; the membrane destruction is due to creation of free oxygen radicals (which is also reported for other classic photosynthetic inhibitor herbicides).
Accordingly, in one embodiment, the increase of the level of the respective fine chemical is used to protect plants against herbicides destroying membranes due to the creation of free oxygen radicals.
Examples of inhibitors or herbicides building up oxidative stress are aryl triazion, e.g. sulfentrazone, carfentrazone; or diphenylethers, e.g. acifluorfen, lactofen, or oxyfluorfen; or N-Phenylphthalimide, e.g. flumiclorac or flumioxazin; substituted ureas, e.g. fluometuron, tebuthiuron, diuron, or linuron; triazines, e.g. atrazine, prometryn, ametryn, metributzin, prometon, simazine, or hexazinone: or uracils, e.g. bromacil or terbacil.

[5247] In a further embodiment the present invention relates to the use of the antagonist of the present invention, the plant of the present invention or a part thereof, the microorganism or the host cell of the present invention or a part thereof for the production a cosmetic composition or a pharmaceutical composition. Such a composition has an antioxidative activity, photoprotective activity, can be used to protect, treat or heal the above mentioned diseases, e.g. hypercholesterolemic or cardiovascular diseases, certain cancers, and cataract formation or can be used as an immunostimulatory agent.

Sinapic acid or ferulic acid can be also used as stabilizer of other colours or oxygen sensitive compounds, like fatty acids, in particular unsaturated fatty acids.

[5248] for the disclosure of the paragraphs [0406.0.0.18] to [0416.0.0.18] see paragraphs [0406.0.0.0] to [0416.0.0.0] above.

[5249] An in vivo mutagenesis of organisms such as algae (e.g. Spongiococcum sp, e.g. Spongiococcum exentricum, Chlorella sp., Haematococcus, Phaedactylum tricornatum, Volvox or Dunaliella), Synechocystis sp. PCC 6803, Physcometrella patens, Saccharomyces, Mortierella, Escherichia and others mentioned above, which are beneficial for the production of sinapic acid or ferulic acid can be carried out by passing a plasmid DNA (or another vector DNA) containing the desired nucleic acid sequence or nucleic acid sequences, e.g. the nucleic acid molecule of the invention or the vector of the invention, through E. coli and other microorganisms (for example Bacillus spp. or yeasts such as Saccharomyces cerevisiae) which are not capable of maintaining the integrity of its genetic information. Usual mutator strains have mutations in the genes for the DNA repair system [for example mutHLS, mutD, mutT and the like; for comparison, see Rupp, W. D. (1996) DNA repair mechanisms in Escherichia coli and Salmonella, pp. 2277-2294, ASM: Washington]. The skilled worker knows these strains. The use of these strains is illustrated for example in Greener, A. and Callahan, M. (1994) Strategies 7; 32-34.

In-vitro mutation methods such as increasing the spontaneous mutation rates by chemical or physical treatment are well known to the skilled person. Mutagens like 5-bromo-uracil, N-methyl-N-nitro-N-nitrosoguanidine (=NTG), ethyl methanesulfonate (=EMS), hydroxylamine and/or nitrous acid are widely used as chemical agents for random in-vitro mutagenesis. The most common physical method for mutagenesis is the treatment with UV irradiation. Another random mutagenesis technique is the error-prone PCR for introducing amino acid changes into proteins. Mutations are deliberately introduced during PCR through the use of error-prone DNA polymerases and special reaction conditions known to a person skilled in the art. For this method randomized DNA sequences are cloned into expression vectors and the resulting mutant libraries screened for altered or improved protein activity as described below.
Site-directed mutagenesis method such as the introduction of desired mutations with an M13 or phagemid vector and short oligonucleotides primers is a well-known approach for site-directed mutagenesis. The clou of this method involves cloning of the nucleic acid sequence of the invention into an M13 or phagemid vector, which permits recovery of single-stranded recombinant nucleic acid sequence. A mutagenic oligonucleotide primer is then designed whose sequence is perfectly complementary to nucleic acid sequence in the region to be mutated, but with a single difference: at the intended mutation site it bears a base that is complementary to the desired mutant nucleotide rather than the original. The mutagenic oligonucleotide is then allowed to prime new DNA synthesis to create a complementary full-length sequence containing the desired mutation. Another site-directed mutagenesis method is the PCR mismatch primer mutagenesis method also known to the skilled person. DpnI site-directed mutagenesis is a further known method as described for example in the Stratagene Quickchange™ site-directed mutagenesis kit protocol. A huge number of other methods are also known and used in common practice.
Positive mutation events can be selected by screening the organisms for the production of the desired fine chemical.

[5250] for the disclosure of the paragraphs [0418.0.0.18] to [0427.0.0.18] see paragraphs [0418.0.0.0] to [0427.0.0.0] above.

[5251] for the disclosure of the paragraphs [0427.1.9.18] see paragraphs [0428.1.9.9] above

[5252] for the disclosure of the paragraphs [0427.2.9.18] see paragraph [0428.2.9.9] above.

[5253] for the disclosure of the paragraphs [0427.3.9.18] see paragraph [0428.3.9.9] above.

[5254] Sinapic acid or ferulic acid may be produced in Synechocystis spec. PCC 6803

The cells of each of independent Synechocystis spec. PCC 6803 strains cultured on the BG-11 km agar medium, and untransformed wild-type cells (on BG11 agar medium without kanamycin) can be used to inoculate liquid cultures. For this, cells of a mutant or of the wild-type Synechocystis spec. PCC 6803 are transferred from plate into 10 ml of liquid culture in each case. These cultures are cultivated at 28° C. and 30 μmol photons*(m²*s)⁻¹ (30 μE) for about 3 days. After determination of the OD₇₃₀ of the individual cultures, the OD₇₃₀ of all cultures is synchronized by appropriate dilutions with BG-11 (wild types) or e.g. BG-11 km (mutants). These cell density-synchronized cultures are used to inoculate three cultures of the mutant and of the wild-type control. It is thus possible to carry out biochemical analyses using in each case three independently grown cultures of a mutant and of the corresponding wild types. The cultures are grown until the optical density was OD₇₃₀=0.3.
The cell culture medium is removed by centrifugation in an Eppendorf bench centrifuge at 14000 rpm twice. The subsequent disruption of the cells and extraction sinapic acid or ferulic acid take place by incubation in an Eppendorf shaker at 30° C., 1000 rpm in 100% methanol for 15 minutes twice, combining the supernatants obtained in each case.
In order to avoid oxidation, the resulting extracts can be analyzed immediate after the extraction with the aid of a Waters Alliance 2690 HPLC system. Sinapic acid or ferulic acid can be separated on a reverse phase column and identified by means of a standard. The fluorescence of the substances which can be detected with the aid of a Jasco FP 920 fluorescence detector, can serve as detection system.

[5255] for the disclosure of the paragraphs [0428.0.0.18] to [0436.0.0.18] see paragraphs [0428.0.0.0] to [0436.0.0.0] above.

[5256] for the disclosure of the paragraphs [0437.0.0.18] and [0438.0.0.18] see paragraphs [0437.0.0.0] and [0438.0.0.0] above.

### Example 8

### Analysis of the Effect of the Nucleic Acid Molecule on the Production of the Respective Fine Chemical Indicated in Table I, Application No. 19, Column 6

[5257] The effect of the genetic modification in plants, fungi, algae, ciliates or on the production of a desired compound (such as a ferulic acid or sinapic acid) can be determined by growing the modified microorganisms or the modified plant under suitable conditions (such as those described above) and analyzing the medium and/or the cellular components for the elevated production of desired product (i.e. of ferulic acid or sinapic acid). These analytical techniques are known to the skilled worker and comprise spectroscopy, thin-layer chromatography, various types of staining methods, enzymatic and microbiological methods and analytical chromatography such as high-performance liquid chromatography (see, for example, Ullman, Encyclopedia of Industrial Chemistry, Vol. A2, p. 89-90 and p. 443-613, VCH: Weinheim (1985); Fallon, A., et al., (1987) “Applications of HPLC in Biochemistry” in: Laboratory Techniques in Biochemistry and Molecular Biology, Vol. 17; Rehm et al. (1993) Biotechnology, Vol. 3, Chapter III: “Product recovery and purification”, p. 469-714, VCH: Weinheim; Belter, P.A., et al. (1988) Bioseparations: downstream processing for Biotechnology, John Wiley and Sons; Kennedy, J. F., and Cabral, J. M. S. (1992) Recovery processes for biological Materials, John Wiley and Sons; Shaeiwitz, J. A., and Henry, J. D. (1988) Biochemical Separations, in: Ullmann's Encyclopedia of Industrial Chemistry, Vol. B3; Chapter 11, p. 1-27, VCH: Weinheim; and Dechow, F. J. (1989) Separation and purification techniques in biotechnology, Noyes Publications).

Alternatively ferulic acid acid can be detected as described in Mattila, P. and Kumpulainen J., J. Agric Food Chem. 2002 Jun. 19; 50(13):3660-7.
Alternatively sinapic acid can be detected as described in Noda, M. and Matsumoto, M., Biochim Biophys Acta. 1971 Feb. 2; 231(1):131-3.

[5258] for the disclosure of this paragraph see [0441.0.0.0] above.

### Example 9

### Purification of the Ferulic Acid or Sinapic Acid

[5259] Abbreviations; GC-MS, gas liquid chromatography/mass spectrometry; TLC, thin-layer chromatography.

The unambiguous detection for the presence of ferulic acid or sinapic acid can be obtained by analyzing recombinant organisms using analytical standard methods: LC, LC-MSMS or TLC, as described. The total amount produced in the organism for example in yeasts used in the inventive process can be analysed for example according to the following procedure:
The material such as yeasts, E. coli or plants to be analyzed can be disrupted by sonication, grinding in a glass mill, liquid nitrogen and grinding or via other applicable methods.
Plant material is initially homogenized mechanically by comminuting in a pestle and mortar to make it more amenable to extraction.
A typical sample pretreatment consists of a total lipid extraction using such polar organic solvents as acetone or alcohols as methanol, or ethers, saponification, partition between phases, separation of non-polar epiphase from more polar hypophasic derivatives and chromatography.
For analysis, solvent delivery and aliquot removal can be accomplished with a robotic system comprising a single injector valve Gilson 232XL and a 402 2S1V diluter [Gilson, Inc. USA, 3000 W. Beltline Highway, Middleton, Wis.]. For saponification, 3 ml of 50% potassium hydroxide hydro-ethanolic solution (4 water-1 ethanol) can be added to each vial, followed by the addition of 3 ml of octanol. The saponification treatment can be conducted at room temperature with vials maintained on an IKA HS 501 horizontal shaker [Labworld-online, Inc., Wilmington, N.C.] for fifteen hours at 250 movements/minute, followed by a stationary phase of approximately one hour.
Following saponification, the supernatant can be diluted with 0.17 ml of methanol. The addition of methanol can be conducted under pressure to ensure sample homogeneity. Using a 0.25 ml syringe, a 0.1 ml aliquot can be removed and transferred to HPLC vials for analysis.
For HPLC analysis, a Hewlett Packard 1100 HPLC, complete with a quaternary pump, vacuum degassing system, six-way injection valve, temperature regulated autosampler, column oven and Photodiode Array detector can be used [Agilent Technologies available through Ultra Scientific Inc., 250 Smith Street, North Kingstown, R.I.]. The column can be a Waters YMC30, 5-micron, 4.6×250 mm with a guard column of the same material [Waters, 34 Maple Street, Milford, Mass.]. The solvents for the mobile phase can be 81 methanol: 4 water: 15 tetrahydrofuran (THF) stabilized with 0.2% BHT (2,6-di-tert-butyl-4-methylphenol). Injections were 20 μl. Separation can be isocratic at 30° C. with a flow rate of 1.7 ml/minute. The peak responses can be measured by absorbance at 447 nm.
Alternatively ferulic acid acid can be detected as described in Mattila, P. and Kumpulainen J., J. Agric Food Chem. 2002 Jun. 19; 50(13):3660-7.
Alternatively sinapic acid can be detected as described in Noda, M. and Matsumoto, M., Biochim Biophys Acta. 1971 Feb. 2; 231(1):131-3.

[5260] Characterization of the Transgenic Plants

In order to confirm that sinapic acid or ferulic acid biosynthesis in the transgenic plants is influenced by the expression of the polypeptides described herein, the sinapic acid or ferulic acid content in leaves, seeds and/or preferably flowers of the plants transformed with the described constructs (Arabidopsis thaliana, Brassica napus and Nicotiana tabacum) is analyzed. For this purpose, the transgenic plants are grown in a greenhouse, and plants which express the gene coding for polypeptide of the invention or used in the method of the invention are identified at the Northern level. The sinapic acid or ferulic acid content in flowers, leaves or seeds of these plants is measured. In all, the sinapic acid or ferulic acid concentration is raised by comparison with untransformed plants.

[5261] If required and desired, further chromatography steps with a suitable resin may follow. Advantageously, the sinapic acid or ferulic acid can be further purified with a so-called RTHPLC. As eluent acetonitrile/water or chloroform/acetonitrile mixtures can be used. If necessary, these chromatography steps may be repeated, using identical or other chromatography resins. The skilled worker is familiar with the selection of suitable chromatography resin and the most effective use for a particular molecule to be purified.

[5262] In addition depending on the produced fine chemical purification is also possible with cristalisation or destilation. Both methods are well known to a person skilled in the art.

[5263] for the disclosure of the paragraphs [0446.0.0.18] to [0496.0.0.18] see paragraphs [0446.0.0.0] to [0496.0.0.0] above.

[5264] As an alternative, the sinapic acid or ferulic acid can be detected advantageously as described above.
[5265] The results of the different plant analyses can be seen from the table, which follows:

TABLE VI

| | | Method/ | Min.- | Max.- |
|---|---|---|---|---|
| ORF | Metabolite | Analytics | Value | Value |
| b0931 | Sinapic acid | GC | 1.29 | 1.97 |
| b1556 | Sinapic acid | GC | 1.40 | 1.88 |
| b1797 | Sinapic acid | GC | 1.29 | 1.36 |
| YDR035W | Ferulic acid | LC | 1.37 | 1.75 |

[5266] for the disclosure of the paragraphs [0499.0.0.18] and [0500.0.0.18] see paragraphs [0499.0.0.0] and [0500.0.0.0] above.

### Example 15a

### Engineering Ryegrass Plants by Over-Expressing b0931 from E. coli or Homologs of b0931 from Other Organisms

[5267] for the disclosure of the paragraphs [0502.0.0.18] to [0508.0.0.18] see paragraphs [0502.0.0.0] to [0508.0.0.0] above.

### Example 15b

### Engineering Soybean Plants by Over-Expressing b0931 from E. coli or Homologs of b0931 from Other Organisms

[5268] for the disclosure of the paragraphs [0510.0.0.18] to [0540.0.0.18] see paragraphs [0510.0.0.0] to [0513.0.0.0] above.

### Example 15c

### Engineering Corn Plants by Over-Expressing b0931 from E. coli or Homologs of b0931 from Other Organisms

[5269] for the disclosure of the paragraphs [0515.0.0.18] to [0544.0.0.18] see paragraphs [0515.0.0.0] to [0540.0.0.0] above.

### Example 15d

### Engineering Wheat Plants by Over-Expressing b0931 from E. coli or Homologs of b0931 from Other Organisms

[5270] for the disclosure of the paragraphs [0542.0.0.18] to [0544.0.0.18] see paragraphs [0542.0.0.0] to [0544.0.0.0] above.

### Example 15e

### Engineering Rapeseed/Canola Plants by Over-Expressing b0931 from E. coli or Homologs of b0931 from Other Organisms

[5271] for the disclosure of the paragraphs [0546.0.0.18] to [0549.0.0.18] see paragraphs [0544.0.0.0] to [0549.0.0.0] above.

### Example 15f

### Engineering Alfalfa Plants by Over-Expressing b0931 from E. coli or Homologs of b0931 from Other Organisms

[5272] for the disclosure of the paragraphs [0551.0.0.18] to [0554.0.0.18] see paragraphs [0551.0.0.0] to [0554.0.0.0] above.

[5273] /.

[5274] for the disclosure of this paragraph see [0554.2.0.0] above.

[5275] for the disclosure of this paragraph see [0555.0.0.0] above.

[5276] for the disclosure of this paragraph see [0001.0.0.0].

[5277] Carbohydrates are aldehyde or ketone compounds with multiple hydroxyl groups. Many carbohydrates have the empirical formula (CH₂O)ₙ; some also contain nitrogen, phosphorus, or sulfur.

Carbohydrates are classified in monosaccharides, oligosaccharides, and polysaccharides.
Monosaccharides, or simple sugars, consist of a single polyhydroxy aldehyde or ketone unit. Monosaccharides of more than four carbons tend to have cyclic structures.
Oligosaccharides consist of short chains of monosaccharide units, or residues, usually 2 to 19 units, joined by glycosidic bonds.
The polysaccharides are sugar polymers containing more than 20 or so monosaccharide units, and some have hundreds or thousands of units. Some polysaccharides are linear chains; others are branched.
Carbohydrates are called saccharides or, if they are relatively small, sugars.
In the present invention, saccharides means all of the aforementioned carbohydrate, e.g. monosaccharides, preferably fructose, glucose, inositol, galactose, arabinose, xylose or other pentoses or hexoses; oligosaccharides, preferably disaccharides like sucrose, lactose or trisaccharides like raffinose; or polysaccharides like starch or cellulose.

[5278] Carbohydrates are the most abundant class of organic compounds found in living organisms.

They are a major source of metabolic energy, both for plants and for animals. Aside from the sugars and starches that meet this vital nutritional role, carbohydrates function in energy storage (for example starch or glycogen), in signaling (by glycoproteins and glycolipids, e.g. blood group determinants), fuel the nervous system, muscle and virtually all cells, are parts of nucleic acids (in genes, mRNA, tRNA, ribosomes), and as cell surface markers as recognition sites on cell surfaces and signaling in glycolipids and glycoproteins and also serve as a structural material for example as cell wall components (cellulose).

[5279] Glucose, also called dextrose, is the most widely distributed sugar in the plant and animal kingdoms and it is the sugar present in blood as “blood sugar”. It occupies a central position in the metabolism of plants, animals, and many microorganisms. Glucose is rich in potential energy, and thus a good fuel; in the body is catabolised to produce ATP. It is stored as a high molecular weight polymer such as starch or glycogen or is converted to fatty acids. It is also a remarkably versatile precursor, capable of supplying a huge array of metabolic intermediates for biosynthetic reactions.

Based on its manifold features, glucose is used in nutrition and medicine.
Fructose, also called levulose or “fruit sugar”, is the most important ketose sugar. Fructose is a hexose and is a reducing sugar. Fructose is used a sweetener by diabetics because it does not rise the blood sugar level, even in large amounts.
Fructose and glucose are the main carbohydrate constituents of honey. Those hexoses are further the main components of many oligo- and polysaccharides, like sucrose, raffinose, stachyose, trehalose, starch, cellulose or dextran.
The most frequent disaccharide is sucrose (saccharose, beta-D-fructofuranosyl-alpha-D-glucopyranosid, cane sugar, beet sugar, sugar in a narrow sense of a name for commercially available sucrose meaning sucrose is the sugar that is commonly called “sugar”) which consists of the six-carbon sugars D-glucose and D-fructose. It is formed by plants but not by animals. Sucrose is a major intermediate product of photosynthesis; in many plants it is the principal form in which sugar is transported from the leaves to other parts of the plant body. In mammalians sucrose is an obligatory component of blood and its content in blood is kept at the stable level. It is strongly necessary for brain cells as well as for normal functioning of the central nervous system. Sugar is widely-known as a source of glycogen—a substance, feeding liver, heart and muscles. It is one of the most widely-used food products and is the major disaccharide in most diets. It is present in honey, maple sugar, fruits, berries, and vegetables. It may be added to food products as liquid or crystalline sucrose or as invert sugar. It is commercially prepared from sugar cane or sugar beets. Sucrose can provide a number of desirable functional qualities to food products including sweetness, mouth-feel, and the ability to transform between amorphous and crystalline states. High-concentrated sucrose is a natural preserving agent, it determines gel-formation processes, gives necessary viscosity to the products. Sucrose is a raw material for caramel, colour etc. Sucrose is further an excellent fermentation feedstock, which is of specific interest for fermentation industry (including a number of non-food industries-pharmaceutical industries). The presence of eight hydroxyl groups in the sucrose molecule provides a theoretical possibility of a very large number of sucrose derivatives. Sucrose derivatives are used by industries in production of detergents, emulsifiers (sucrose+fatty acids) and adhesives (sucrose octa acetate).
Sucrose is a precursor to a group of carbohydrates in plants known as the raffinose family of oligosaccharides found in many plant seeds especially legumes. This family contains the trisaccharide raffinose, the tetrasaccharide stachyose and the pentasaccharide verbascose. Oligosaccharides of the raffinose-series are major components in many food legumes (Shallenberger et al., J. Agric. Food Chem., 9, 1372; 1961). Raffinose (beta-D-fructofuranosyl-6-O-alpha-D-galactopyranosyl-alpha-D-glucopyranosid, melitriose, gossypose, melitose), which consists of sucrose with a-galactose attached through its C-4 atom to the 1 position on the fructose residue and is thought to be second only to sucrose among the nonstructural carbohydrates with respect to abundance in the plant kingdom. It may be ubiquitous, at least among higher plants. Raffinose accumulate in significant quantities in the edible portion of many economically significant crop species. Examples include soybean, sugar beet, cotton, canola and all of the major edible leguminous crops including beans, peas, lentil and lupine.
An important key intermediates in the formation of raffinose and stachyose is myo-inositol (cyclohexan-1,2,3,4,5,6-hexaole), the most common cyclitol. Myo-inositol is fundamental to many different aspects of plant growth and development. In addition to its role as the precursor for phytic acid biosynthesis, myo-inositol is also used for uronide and pentose biosynthesis, it is also present in phosphoinositides of plant cell membranes, as well as other complex plant lipids including glycophosphoceramides. Furthermore, it is also a precursor of other naturally occurring inositol isomers, and many of these as well as myo-inositol are distributed as methyl ethers in a species specific pattern throughout the plant kingdom. Myo-inositol is an important growth factor.
The most carbohydrates found in nature occur as polysaccharides which are polymers of medium to high molecular weight. Polysaccharides, also called glycans, differ from each other in the identity of their recurring monosaccharide units, in the length of their chains, in the types of bonds linking the units, and in the degree of branching.
Starch is the most valuable polysaccharide. Normal native starches consist of a mixture of 15-30% amylose and 70-85% amylopectin. Amylose structurally is a linear polymer of anhydroglucose units, of molecular weight approximately between 40 000 and 340 000, the chains containing 250 to 2000 anhydroglucose units. Amylopectin is considered to be composed of anhydroglucose chains with many branch points; the molecular weight may reach as high as 80 000 000.
Starch is the most important, abundant, digestible food polysaccharide. It occurs as the reserve polysaccharide in the leaf, stem, root, seed, fruit and pollen of many higher plants. It occurs as discrete, partially-crystalline granules whose size, shape, and gelatinization temperature depend on the botanical source of the starch. Common food starches are derived from seed (wheat, maize, rice, barley) and root (potato, cassava/tapioca) sources. Starches have been modified to improve desired functional characteristics and are added in relatively small amounts to foods as food additives. Another important polysaccharide is cellulose. Cellulose is the most commonly seen polysaccharide and scientist estimate that over one trillion tons of cellulose are synthesized by plants each year. Cellulose forms the cell wall of plants. It is yet a third polymer of the monosaccharide glucose. Cellulose differs from starch and glycogen because the glucose units form a two-dimensional structure, with hydrogen bonds holding together nearby polymers, thus giving the molecule added stability. A single “cellulose fiber” can consist of up to 10000 individual anhydroglucose units. In cellulose, the individual fiber molecules are arranged in bundles and thus form so called micro fibrils which ultimately result in a “densely woven” net like structure of cellulose molecules. The strong cohesion between the individual cellulose fibers is due to the huge number of strong hydrogen bonds.
Cellulose is the major polysaccharide of grass, leaves and trees and is said to include around 50% of all biological carbon found on our planet. It is the basic material of natural substances such as wood, flax or cotton and consists of long, unbranched fiber molecules. Cellulose, as plant fiber, cannot be digested by human beings therefore cellulose passes through the digestive tract without being absorbed into the body. Some animals, such as cows and termites, contain bacteria in their digestive tract that help them to digest cellulose. Nevertheless, cellulose is of importance in human nutrition in that fiber is an essential part of the diet, giving bulk to food and promoting intestinal motility.

[5280] The polysaccharides starch and cellulose are the most important raw material in the industrial and commercial production of glucose. In the common procedure starch or cellulose are acidly or enzymatically hydrolysed to glucose. Many crops can be used as the source of starch Maize, rice, wheat, potato, cassava, arrowroot, and sago are all used in various parts of the world. In the United States, cornstarch is used almost exclusively.

The enzymatic process has two main steps. A first step in which the starch is heated for 1-2 hours up to approximately 100° C. During this the starch is hydrolyzed into smaller carbohydrates containing on average 5-10 glucose units each. Some variations on this process briefly heat the starch mixture to 130° C. or hotter one or more times. This heat treatment improves the solubility of starch in water, but deactivates the enzyme, and fresh enzyme must be added to the mixture after each heating.
In the second step the partially hydrolyzed starch is completely hydrolyzed to glucose by using a glucoamylase. The resulting glucose solution is further purified by filtration and concentrated in a multiple-effect evaporator. The endproduct of the process is solid D-glucose, which is a starting material for the synthesis of fructose.
In the body glucose can be converted to UDP glucose, which is an intermediate for the cell wall synthesis and other interacting pathways such as sucrose, starch and glycogen biosynthesis.
Fructose commonly known as fruit sugar, fructose is a simple carbohydrate widely distributed in organism, plants, and animals. Fructose is often recommended for, and consumed by, people with diabetes mellitus or hypoglycemia, because it has a very low Glycemic Index relative to sucrose. Fructose is usually produced from starch by enzymatically transforming it into glucose syrup and subsequently treating with an isomerase, leading to a conversion of glucose to fructose.
Sucrose—commonly referred to as table sugar—is a disaccharide comprising glucose and fructose. Sucrose is obtained commercially from the expressed juice of sugar cane or of sugar beet. The refining process removes impurities from the sugar plant, producing white sugar crystals.
Myo-inositol exists in nature either in its free form (found, for example, in sugarcane, beet molasses, and almond hulls) or as a hexaphosphate called phytin (found, for example, in corn steep liquor). Industrial purification of phytin from corn steep liquor involves precipitation with calcium, followed by hydrolysis with a strong acid. Separation of free form inositols from plant extracts involves treatment with acid and separation of myo-inositol by column (U.S. Pat. No. 5,482,631) or the use of ion-exchange (U.S. Pat. No. 4,482,761).
Myo-inositol, the major nutritionally active form of inositol, is vital to many biological processes of the body, participating in a diverse range of activities. Myo-inositol is one of nine distinct isomers of inositol. It is for example essential for the growth of rodents, but not for most other animals, including humans. Humans can make myo-inositol endogenously, which they do from glucose. Nevertheless myo-inositol influences certain biological activities inside the body. It may affect behavior and may have antidepressant and anti-anxiety activities. It is synthesized in general from phytin.
Myo-inositol is metabolized to phosphatidylinositol a small but important component of cell membranes. Phosphatidylinositol can be further converted to phosphatidylinositol-4,5-bisphosphate, which is a key intermediate in biological signaling. Phosphatidylinositol-4,5-bisphosphate is the precursor of at least three second-messenger molecules, which are as follows: a) inositol-1,4,5-triphosphate, diacylglycerol, and phosphatidylinositol-3,4,5-triphosphate, which is involved in signal transduction. Inositol-1,4,5triphosphate is a modifier of the intracellular calcium level. Diacylglycerol regulates some members of the protein kinase C family.
The various forms of inositol (e.g. phosphatidylinositol or inositides such as 1,4,5inositoltriphosphate=IP3) are active in cell-to-cell communication, including the transmission of nerve impulses. Tissues that are affected include the brain, liver and muscles. Inositol is an indirect source of glucose and glucoronic acid, which is essential to detoxification by the liver.
Cellulose is a very important industrial product. As disclosed above, it serves as row material for monosaccharides. It is further used in the manufacture of paper, textiles, plastics, explosives, packaging material (Cellophane®), feed, food and fermentation products. Cellulose is obtained primarily by acid or alkaline hydrolyze.
Oxidized cellulose leads to anhydroglucose in the polymer chain of cellulose. It is an inherently non-homogeneous natural raw material, which when selectively, yet not exclusively, oxidised on the C6 carbon atom will yield oxidised product also containing byproducts formed by other oxidation routes.
Starch is a polymer of anhydroglucose units linked by alpha-1,4 linkages. It is one of the most abundant renewable polymers found in nature. Starch occurs intracellularly as large clusters or granules. These granular starch consists of microscopic granules, which differ in size and shape, depending on the plant source. The granules are insoluble in water at room temperature. There is a quite number of methods known for the extraction of starch. For example a slurry of grinded starch containing plant material is heated, whereby the granules swell and eventually burst, dispersing the starch molecules into the solution. During the liquefaction step, the long-chained starch is further degraded into smaller branched and linear units (maltodextrins) by an alpha-amylase. A large number of processes have been described for converting starch to starch hydrolysates, such as maltose, glucose or specialty syrups, either for use as sweeteners or as precursors for other saccharides such as fructose. A process for enzymatic hydrolysis of granular starch into a soluble starch hydrolysate is disclosed in US 20050042737.

[5281] Carbohydrates play a major role in human and animal diets, comprising some 40-75% of energy intake. Their most important nutritional property is digestibility. Some of them are hydrolyzed by enzymes of the human gastrointestinal system to monosaccharides that are absorbed in the small intestine and enter the pathways of carbohydrate metabolism. Others can be digested by certain animals.

Carbohydrates, fat and protein are the energy yielding nutrients in animal feed. In the average diet for farm animals, carbohydrates are included at levels of 70-80%. For example pig diets are mainly based on cereals which contain the main part of the energy providing nutrients that are essential for pigs.
With view to the increasing global demand for food because of the growing world population and at the same time the shrinking availability of arable land, it is important to increase the food and feed quality, particularly the availability of certain essential nutrients, preferably carbohydrates, preferably polysaccharides like starch or cellulose and/or monosaccharides like fructose, glucose and/or myo-inositol and/or trisaccharides like raffinose and/or disaccharides like sucrose. Nutritional improvements in foods and feeds could help to meet these demands for improved quality. Modern agricultural biotechnology, which involves the application of cellular and molecular techniques to transfer DNA that encodes a desired trait to food and feed crops, is a powerful complement to traditional methods to meet global food and feed requirements.

[5282] Furthermore the physicochemical properties such as viscosity and the capacity to bind water and ions, vary between different cereals. Consequently, different cereal properties affect digestion and fermentation as well as microbial populations in the gastro-intestinal tract in various ways. Gastro-intestinal disturbances comprise a major problem for health of humans and animals.

There is a need for suitable dietary composition and food or feed ingredients, preferably cereals, legumes or fruits which promotes a beneficial gut environment and thereby preventing gastro-intestinal disorders.
Therefore improving the quality of foodstuffs and animal feeds is an important task of the food-and-feed industry. This is necessary since, for example, carbohydrates, which occur in plants and some microorganisms are limited with regard to the supply of mammals. Especially advantageous for the quality of foodstuffs and animal feeds is as balanced as possible a carbohydrate profile in the diet since a great excess of some sugars above a specific concentration in the food has only some or little or no positive effect.

[5283] Genetically modified plants having improved nutritional profiles are known in the state of art. US 20030070192 discloses a DNA expression cassette which alters the sugar alcohol of transformed plants.

U.S. Pat. No. 5,908,975 concerns methods for synthesis and accumulation of fructose polymers in transgenic plants by selective expression of bacterial fructosyltransferase genes using tissue specific promoters and a vacuole targeting sequence.
WO89/12386 describes a method for the production of glucose and fructose polymers in transgenic tomato plants.
A stress tolerance sequences including proteins like galactinol synthase (GOLS) and raffinose synthase (RAFS), which are up regulated in response to stress and lead to the production of raffinose is disclosed in US 20050055748.
U.S. Pat. No. 6,887,708 provides nucleotide sequences encoding polypeptides having the function of GIGANTEA gene of Arabidopsis thaliana which allows the manipulation of the starch accumulation process in plants.
Grain having an embryo with a genotype heterozygous for two or more wild type genes (for example, Aa/Bb) and an endosperm having a genotype heterozygous for such genes and leading to plants with altered the normal starch synthesis pathway is disclosed in US 20050091716.

[5284] Nevertheless, there is a constant need for providing novel enzyme activities or direct or indirect regulators and thus alternative methods with advantageous properties for producing carbohydrates, preferably polysaccharides like starch or cellulose and/or monosaccharides like fructose, glucose and/or myo-inositol and/or trisaccharides like raffinose and/or disaccharides like sucrose or its precursor in organisms, e.g. in transgenic organisms.

[5285] Another problem is the seasonal change in carbohydrate composition of plants and optimum harvest periods for are complicated by issues of timing.

[5286] To ensure constantly a high quality of foods and animal feeds, it is necessary to add one or a plurality of carbohydrates, preferably polysaccharides like starch or cellulose and/or monosaccharides like fructose, glucose and/or myo-inositol and/or trisaccharides like raffinose and/or disaccharides like sucrose in a balanced manner to suit the organism.

[5287] Accordingly, there is still a great demand for new and more suitable genes which encode enzymes which participate in the biosynthesis of carbohydrates, preferably polysaccharides like starch or cellulose and/or monosaccharides like fructose, glucose and/or myo-inositol and/or trisaccharides like raffinose and/or disaccharides like sucrose and make it possible to produce them specifically on an industrial scale without unwanted byproducts forming. In the selection of genes for or regulators of biosynthesis two characteristics above all are particularly important. On the one hand, there is as ever a need for improved processes for obtaining the highest possible contents of carbohydrates, preferably polysaccharides like starch or cellulose and/or monosaccharides like fructose, glucose and/or myo-inositol and/or trisaccharides like raffinose and/or disaccharides like sucrose; on the other hand as less as possible byproducts should be produced in the production process.

The added carbohydrates further beneficially affects the microflora by selectively stimulating the growth and/or activity of beneficial bacteria.
Another aspect is the significant reduction of cost of production and manufacturing not only to the nutrition, in particular sweetener industry, but also agriculture and cosmetic and health industry.

[5288] for the disclosure of this paragraph see [0013.0.0.0] above.

[5289] Accordingly, in a first embodiment, the invention relates to a process for the production of a fine chemical, whereby the fine chemical is myo-inositol, fructose, glucose, UDP-glucose, raffinose and/or starch and/or cellulose in free or bound form for example bound to lipids, proteins or carbohydrates. Accordingly, in the present invention, the term “the fine chemical” as used herein relates to “myo-inositol, fructose, glucose, UDP-glucose, raffinose and/or starch and/cellulose in free or bound form”. Further, the term “the fine chemicals” as used herein also relates to fine chemicals comprising myo-inositol, fructose, glucose, UDP-glucose, raffinose and/or starch and/or cellulose in free or bound form.

A measure for the content of the polysaccharides, preferably starch and cellulose, of the invention can be the content of anhydroglucose. This compound is the analyte, which indicates the presence of the polysaccharides, preferably starch and cellulose, of the invention if the samples are prepared and measured as described in the examples

[5290] In one embodiment, the term “myo-inositol, fructose, glucose, UDP-glucose, raffinose and/or starch and/or cellulose in free or bound form”, “the fine chemical” or “the respective fine chemical” means at least one chemical compound selected from the group consisting of myo-inositol, fructose, glucose, UDP-glucose, raffinose and/or starch and/or cellulose or mixtures thereof in free or bound form. Throughout the specification the term “the fine chemical” or “the respective fine chemical” means a compound selected from the group myo-inositol, fructose, glucose, UDP-glucose, raffinose and/or starch and/or cellulose or mixtures thereof in free form or bound to other compounds such as protein(s) such as enzyme(s), peptide(s), polypeptide(s), membranes or part thereof, or lipids, proteins or carbohydrates or mixtures thereof or in compositions with lipids.

In one embodiment, the term “the fine chemical” and the term “the respective fine chemical” mean at least one chemical compound with an activity of the abovementioned fine chemical.
In one embodiment, the term “the fine chemical” and the term “the respective fine chemical” mean at least one chemical compound with an activity of the above mentioned fine chemical

[5291] Accordingly, the present invention relates to a process for the production of myo-inositol, fructose, glucose, UDP-glucose, raffinose and/or starch and/or cellulose in free or bound form, which comprises
[5292] (a) increasing or generating the activity of a protein as shown in table II, application no. 20, column 3 encoded by the nucleic acid sequences as shown in table I, application no. 20, column 5, in an organelle of a microorganism or plant, or
[5293] (b) increasing or generating the activity of a protein as shown in table II, application no. 20, column 3 encoded by the nucleic acid sequences as shown in table I, application no. 20, column 5 in the plastid of a microorganism or plant, or in one or more parts thereof; and
[5294] (c) growing the organism under conditions which permit the production of the fine chemical, thus, myo-inositol, fructose, glucose, UDP-glucose, raffinose and/or starch and/or cellulose or fine chemicals comprising myo-inositol, fructose, glucose, UDP-glucose, raffinose and/or starch and/cellulose, are produced in said organism or in the culture medium surrounding the organism.

[5295] Accordingly, the term “the fine chemical” means “myo-inositol, fructose, glucose, UDP-glucose, raffinose and/or starch and/or cellulose in free or bound form” in relation to all sequences listed in table I, application no. 20, columns 5 and 7 or homologs thereof. Accordingly, the term “the fine chemical” can mean “myo-inositol, fructose, glucose, UDP-glucose, raffinose and/or starch and/or cellulose in free or bound form”, owing to circumstances and the context. Preferably the term “the fine chemical” means “myo-inositol, fructose, glucose, UDP-glucose, raffinose and/or starch and/cellulose”. In order to illustrate that the meaning of the term “the respective fine chemical” means “myo-inositol, fructose, glucose, UDP-glucose, raffinose and/or starch and/or cellulose in free or bound form” owing to the sequences listed in the context the term “the respective fine chemical” is also used.

[5296] In another embodiment the present invention is related to a process for the production of myo-inositol, fructose, glucose, UDP-glucose, raffinose and/or starch and/cellulose, which comprises
[5297] (a) increasing or generating the activity of a protein as shown in table II, application no. 20, column 3 encoded by the nucleic acid sequences as shown in table I, application no. 20, column 5, in an organelle of a non-human organism, or
[5298] (b) increasing or generating the activity of a protein as shown in table II, application no. 20, column 3 encoded by the nucleic acid sequences as shown in table I, application no. 20, column 5, which are joined to a nucleic acid sequence encoding a transit peptide in a non-human organism, or in one or more parts thereof; or
[5299] (c) increasing or generating the activity of a protein as shown in table II, application no. 20, column 3 encoded by the nucleic acid sequences as shown in table I, application no. 20, column 5, which are joined to a nucleic acid sequence encoding chloroplast localization sequence, in a non-human organism, or in one or more parts thereof, and
[5300] (d) growing the organism under conditions which permit the production of myo-inositol, fructose, glucose, UDP-glucose, raffinose and/or starch and/or cellulose in said organism.

[5301] In another embodiment, the present invention relates to a process for the production of myo-inositol, fructose, glucose, UDP-glucose, raffinose and/or starch and/cellulose, which comprises
[5302] (a) increasing or generating the activity of a protein as shown in table II, application no. 20, column 3 encoded by the nucleic acid sequences as shown in table I, application no. 20, column 5, in an organelle of a microorganism or plant through the transformation of the organelle, or
[5303] (b) increasing or generating the activity of a protein as shown in table II, application no. 20, column 3 encoded by the nucleic acid sequences as shown in table I, application no. 20, column 5 in the plastid of a microorganism or plant, or in one or more parts thereof through the transformation of the plastids; and
[5304] (c) growing the organism under conditions which permit the production of the fine chemical, thus, myo-inositol, fructose, glucose, UDP-glucose, raffinose and/or starch and/or cellulose or fine chemicals comprising myo-inositol, fructose, glucose, UDP-glucose, raffinose and/or starch and/or cellulose in said organism or in the culture medium surrounding the organism.

[5305] Advantageously the activity of the protein as shown in table II, application no. 20, column 3 encoded by the nucleic acid sequences as shown in table I, application no. 20, column 5 is increased or generated in the abovementioned process in the plastid of a microorganism or plant.

[5306] for the disclosure of the paragraphs [0019.0.0.19] to [0024.0.0.18] see paragraphs [0019.0.0.0] and [0024.0.0.0] above.

[5307] Even more preferred nucleic acid sequences are encoding transit peptides as disclosed by von Heijne et al. [Plant Molecular Biology Reporter, Vol. 9 (2), 1991: 104-126], which are hereby incorporated by reference. Table V shows some examples of the transit peptide sequences disclosed by von Heijne et al. According to the disclosure of the invention especially in the examples the skilled worker is able to link other nucleic acid sequences disclosed by von Heijne et al. to the nucleic acid sequences shown in table I, application no. 20, columns 5 and 7. Most preferred nucleic acid sequences encoding transit peptides are derived from the genus Spinacia such as chloroplast 30S ribosomal protein PSrp-1, root acyl carrier protein II, acyl carrier protein, ATP synthase: γ subunit, ATP synthase: δ subunit, cytochrom f, ferredoxin I, ferredoxin NADP oxidoreductase (=FNR), nitrite reductase, phosphoribulokinase, plastocyanin or carbonic anhydrase. The skilled worker will recognize that various other nucleic acid sequences encoding transit peptides can easily isolated from plastid-localized proteins, which are expressed from nuclear genes as precursors and are then targeted to plastids. Such transit peptides encoding sequences can be used for the construction of other expression constructs. The transit peptides advantageously used in the inventive process and which are part of the inventive nucleic acid sequences and proteins are typically 20 to 120 amino acids, preferably 25 to 110, 30 to 100 or 35 to 90 amino acids, more preferably 40 to 85 amino acids and most preferably 45 to 80 amino acids in length and functions post-translationally to direct the protein to the plastid preferably to the chloroplast. The nucleic acid sequences encoding such transit peptides are localized upstream of nucleic acid sequence encoding the mature protein. For the correct molecular joining of the transit peptide encoding nucleic acid and the nucleic acid encoding the protein to be targeted it is sometimes necessary to introduce additional base pairs at the joining position, which forms restriction enzyme recognition sequences useful for the molecular joining of the different nucleic acid molecules. This procedure might lead to very few additional amino acids at the N-terminal of the mature imported protein, which usually and preferably do not interfere with the protein function. In any case, the additional base pairs at the joining position which forms restriction enzyme recognition sequences have to be chosen with care, in order to avoid the formation of stop codons or codons which encode amino acids with a strong influence on protein folding, like e.g. proline. It is preferred that such additional codons encode small n.d. structural flexible amino acids such as glycine or alanine.

[5308] As mentioned above the nucleic acid sequences coding for the proteins as shown in table II, application no. 20, column 3 and its homologs as disclosed in table I, application no. 20, columns 5 and 7 are joined to a nucleic acid sequence encoding a transit peptide, This nucleic acid sequence encoding a transit peptide ensures transport of the protein to the plastid. The nucleic acid sequence of the gene to be expressed and the nucleic acid sequence encoding the transit peptide are operably linked. Therefore the transit peptide is fused in frame to the nucleic acid sequence coding for proteins as shown in table II, application no. 20, column 3 and its homologs as disclosed in table I, application no. 20, columns 5 and 7.

[5309] for the disclosure of the paragraphs [0027.0.0.19] to [0029.0.0.18] see paragraphs [0027.0.0.0] and [0029.0.0.0] above.

[5310] Alternatively, nucleic acid sequences coding for the transit peptides may be chemically synthesized either in part or wholly according to structure of transit peptide sequences disclosed in the prior art. Said natural or chemically synthesized sequences can be directly linked to the sequences encoding the mature protein or via a linker nucleic acid sequence, which may be typically less than 500 base pairs, preferably less than 450, 400, 350, 300, 250 or 200 base pairs, more preferably less than 150, 100, 90, 80, 70, 60, 50, 40 or 30 base pairs and most preferably less than 25, 20, 15, 12, 9, 6 or 3 base pairs in length and are in frame to the coding sequence. Furthermore favorable nucleic acid sequences encoding transit peptides may comprise sequences derived from more than one biological and/or chemical source and may include a nucleic acid sequence derived from the amino-terminal region of the mature protein, which in its native state is linked to the transit peptide. In a preferred embodiment of the invention said amino-terminal region of the mature protein is typically less than 150 amino acids, preferably less than 140, 130, 120, 110, 100 or 90 amino acids, more preferably less than 80, 70, 60, 50, 40, 35, 30, 25 or 20 amino acids and most preferably less than 19, 18, 17, 16, 15, 14, 13, 12, 11 or 10 amino acids in length. But even shorter or longer stretches are also possible. In addition target sequences, which facilitate the transport of proteins to other cell compartments such as the vacuole, endoplasmic reticulum, Golgi complex, glyoxysomes, peroxisomes or mitochondria may be also part of the inventive nucleic acid sequence. The proteins translated from said inventive nucleic acid sequences are a kind of fusion proteins that means the nucleic acid sequences encoding the transit peptide for example the ones shown in table V, preferably the last one of the table are joint to the nucleic acid sequences shown in table I, application no. 20, columns 5 and 7. The person skilled in the art is able to join said sequences in a functional manner. Advantageously the transit peptide part is cleaved off from the protein part shown in table II, application no. 20, columns 5 and 7 during the transport preferably into the plastids. All products of the cleavage of the preferred transit peptide shown in the last line of table V have preferably the N-terminal amino acid sequences QIA CSS or QIA EFQLTT in front of the start methionine of the protein mentioned in table II, application no. 20, columns 5 and 7. Other short amino acid sequences of an range of 1 to 20 amino acids preferable 2 to 15 amino acids, more preferable 3 to 10 amino acids most preferably 4 to 8 amino acids are also possible in front of the start methionine of the protein mentioned in table II, application no. 20, columns 5 and 7. In case of the amino acid sequence QIA CSS the three amino acids in front of the start methionine are stemming from the LIC (=ligatation independent cloning) cassette. Said short amino acid sequence is preferred in the case of the expression of E. coli genes. In case of the amino acid sequence QIA EFQLTT the six amino acids in front of the start methionine are stemming from the LIC cassette. Said short amino acid sequence is preferred in the case of the expression of S. cerevisiae genes. The skilled worker knows that other short sequences are also useful in the expression of the genes mentioned in table I, application no. 20, columns 5 and 7. Furthermore the skilled worker is aware of the fact that there is not a need for such short sequences in the expression of the genes.

[5311] Table V: Examples of transit peptides disclosed by von Heijne et al. for the disclosure of Table V see paragraph [0030.2.0.0] above.

[5312] Alternatively to the targeting of the sequences shown in table II, application no. 20, columns 5 and 7 preferably of sequences in general encoded in the nucleus with the aid of the targeting sequences mentioned for example in table V alone or in combination with other targeting sequences preferably into the plastids, the nucleic acids of the invention can directly introduced into the plastidal genome. Therefore in a preferred embodiment the nucleic acid sequences shown in table I, application no. 20, columns 5 and 7 are directly introduced and expressed in plastids.

The term “introduced” in the context of this specification shall mean the insertion of a nucleic acid sequence into the organism by means of a “transfection”, “transduction” or preferably by “transformation”.
A plastid, such as a chloroplast, has been “transformed” by an exogenous (preferably foreign) nucleic acid sequence if nucleic acid sequence has been introduced into the plastid that means that this sequence has crossed the membrane or the membranes of the plastid. The foreign DNA may be integrated (covalently linked) into plastid DNA making up the genome of the plastid, or it may remain unintegrated (e.g., by including a chloroplast origin of replication). “Stably” integrated DNA sequences are those, which are inherited through plastid replication, thereby transferring new plastids, with the features of the integrated DNA sequence to the progeny.

[5313] for the disclosure of the paragraphs [0030.2.0.19] and [0030.3.0.19] see paragraphs [0030.2.0.0] and [0030.3.0.0] above.

[5314] For the inventive process it is of great advantage that by transforming the plastids the intraspecies specific transgene flow is blocked, because a lot of species such as corn, cotton and rice have a strict maternal inheritance of plastids. By placing the genes specified in table I, application no. 20, columns 5 and 7 or active fragments thereof in the plastids of plants, these genes will not be present in the pollen of said plants.

A further preferred embodiment of the invention relates to the use of so called “chloroplast localization sequences”, in which a first RNA sequence or molecule is capable of transporting or “chaperoning” a second RNA sequence, such as a RNA sequence transcribed from the sequences depicted in table I, application no. 20, columns 5 and 7 or a sequence encoding a protein, as depicted in table II, application no. 20, columns 5 and 7, from an external environment inside a cell or outside a plastid into a chloroplast. In one embodiment the chloroplast localization signal is substantially similar or complementary to a complete or intact viroid sequence. The chloroplast localization signal may be encoded by a DNA sequence, which is transcribed into the chloroplast localization RNA. The term “viroid” refers to a naturally occurring single stranded RNA molecule (Flores, C R Acad Sci III. 2001 October; 324(10): 943-52). Viroids usually contain about 200-500 nucleotides and generally exist as circular molecules. Examples of viroids that contain chloroplast localization signals include but are not limited to ASBVd, PLMVd, CChMVd and ELVd. The viroid sequence or a functional part of it can be fused to the sequences depicted in table I, application no. 20, columns 5 and 7 or a sequence encoding a protein, as depicted in table II, application no. 20, columns 5 and 7 in such a manner that the viroid sequence transports a sequence transcribed from a sequence as depicted in table I, application no. 20, columns 5 and 7 or a sequence encoding a protein as depicted in table II, application no. 20, columns 5 and 7 into the chloroplasts. A preferred embodiment uses a modified ASBVd (Navarro et al., Virology. 2000 Mar. 1; 268(1): 218-25).
In a further specific embodiment the protein to be expressed in the plastids such as the proteins depicted in table II, application no. 20, columns 5 and 7 are encoded by different nucleic acids. Such a method is disclosed in WO 2004/040973, which shall be incorporated by reference. WO 2004/040973 teaches a method, which relates to the translocation of an RNA corresponding to a gene or gene fragment into the chloroplast by means of a chloroplast localization sequence. The genes, which should be expressed in the plant or plants cells, are split into nucleic acid fragments, which are introduced into different compartments in the plant e.g. the nucleus, the plastids and/or mitochondria. Additionally plant cells are described in which the chloroplast contains a ribozyme fused at one end to an RNA encoding a fragment of a protein used in the inventive process such that the ribozyme can trans-splice the translocated fusion RNA to the RNA encoding the gene fragment to form and as the case may be reunite the nucleic acid fragments to an intact mRNA encoding a functional protein for example as disclosed in table II, application no. 20, columns 5 and 7.

[5315] In a preferred embodiment of the invention the nucleic acid sequences as shown in table I, application no. 20, columns 5 and 7 used in the inventive process are transformed into plastids, which are metabolical active. Those plastids should preferably maintain at a high copy number in the plant or plant tissue of interest, most preferably the chloroplasts found in green plant tissues, such as leaves or cotyledons or in seeds.

[5316] For a good expression in the plastids the nucleic acid sequences as shown in table I, application no. 20, columns 5 and 7 are introduced into an expression cassette using a preferably a promoter and terminator, which are active in plastids preferably a chloroplast promoter. Examples of such promoters include the psbA promoter from the gene from spinach or pea, the rbcL promoter, and the atpB promoter from corn.

[5317] for the disclosure of the paragraphs [0031.0.0.19] and [0032.0.0.19] see paragraphs [0031.0.0.0] and [0032.0.0.0] above.

[5318] Advantageously the process for the production of the fine chemical leads to an enhanced production of the fine chemical. The terms “enhanced” or “increase” mean at least a 10%, 20%, 30%, 40% or 50%, preferably at least 60%, 70%, 80%, 90% or 100%, more preferably 150%, 200%, 300%, 400% or 500% higher production of the fine chemical in comparison to the reference as defined below, e.g. that means in comparison to an organism without the aforementioned modification of the activity of a protein as shown in table II, application no. 20, column 3. Preferably the modification of the activity of a protein as shown in table II, application no. 20, column 3 or their combination can be achieved by joining the protein to a transit peptide.

[5319] Surprisingly it was found, that the transgenic expression of the Saccharomyces cerevisiae protein as shown in table II, application no. 20, column 3 in plastids of a plant such as Arabidopsis thaliana for example through the linkage to at least one targeting sequence for example as mentioned in table V conferred an increase in the fine chemical content of the transformed plants.

[5320] for the disclosure of this paragraph see paragraph [0035.0.0.0] above.

The sequence of b0146 (Accession number A43671) from Escherichia coli has been published in Blattner et al., Science 277 (5331), 1453-1474 (1997), and its activity is being defined as “sugar fermentation stimulation protein”. Accordingly, in one embodiment, the process of the present invention comprises the use of a “sugar fermentation stimulation protein” or its homolog, e.g. as shown herein, for the production of the fine chemical, meaning of starch and/or cellulose in free or bound from, in particular for increasing the amount of starch and/or cellulose in free or bound form in an organism or a part thereof, as mentioned. In one embodiment, in the process of the present invention the activity of a b0146 protein is increased or generated, e.g. from Escherichia coli or a homolog thereof, preferably linked at least to one transit peptide as mentioned for example in table V.
In another embodiment, in the process of the present invention the activity of a b0146 protein is increased or generated in a subcellular compartment of the organism or organism cell such as in an organelle like a plastid or mitochondria.
The sequence of b0342 (Accession number PIR:XXECTG) from Escherichia coli has been published in Blattner et al., Science 277 (5331), 1453-1474 (1997), and its activity is being defined as “thiogalactoside acetyltransferase”. Accordingly, in one embodiment, the process of the present invention comprises the use of a “thiogalactoside acetyltransferase” or its homolog, e.g. as shown herein, for the production of the fine chemical, meaning of starch and/or cellulose in free or bound from, in particular for increasing the amount of starch and/or cellulose in free or bound form in an organism or a part thereof, as mentioned. In one embodiment, in the process of the present invention the activity of a b0342 protein is increased or generated, e.g. from Escherichia coli or a homolog thereof, preferably linked at least to one transit peptide as mentioned for example in table V.
In another embodiment, in the process of the present invention the activity of a b0342 protein is increased or generated in a subcellular compartment of the organism or organism cell such as in an organelle like a plastid or mitochondria.
The sequence of b0523 (Accession number DEECPE) from Escherichia coli has been published in Blattner et al., Science 277 (5331), 1453-1474 (1997), and its activity is being defined as “phosphoribosylaminoimidazole carboxylase=AIR carboxylase, catalytic subunit”. Accordingly, in one embodiment, the process of the present invention comprises the use of a “phosphoribosylaminoimidazole carboxylase=AIR carboxylase, catalytic subunit” or its homolog, e.g. as shown herein, for the production of the fine chemical, meaning of starch and/or cellulose in free or bound from, in particular for increasing the amount of starch and/or cellulose in free or bound form in an organism or a part thereof, as mentioned. In one embodiment, in the process of the present invention the activity of a b0523 protein is increased or generated, e.g. from Escherichia coli or a homolog thereof, preferably linked at least to one transit peptide as mentioned for example in table V.
In another embodiment, in the process of the present invention the activity of a b0523 protein is increased or generated in a subcellular compartment of the organism or organism cell such as in an organelle like a plastid or mitochondria.
The sequence of b0598 (Accession number QOECNA) from Escherichia coli has been published in Blattner et al., Science 277 (5331), 1453-1474 (1997), and its activity is being defined as “carbon starvation protein”. Accordingly, in one embodiment, the process of the present invention comprises the use of a “carbon starvation protein” or its homolog, e.g. as shown herein, for the production of the fine chemical, meaning of glucose in free or bound from, in particular for increasing the amount of glucose in free or bound form in an organism or a part thereof, as mentioned. In one embodiment, in the process of the present invention the activity of a b0598 protein is increased or generated, e.g. from Escherichia coli or a homolog thereof, preferably linked at least to one transit peptide as mentioned for example in table V.
In another embodiment, in the process of the present invention the activity of a b0598 protein is increased or generated in a subcellular compartment of the organism or organism cell such as in an organelle like a plastid or mitochondria.
The sequence of b0644 (Accession number B64799) from Escherichia coli has been published in Blattner et al., Science 277 (5331), 1453-1474 (1997), and its activity is being defined as a “hypothetical protein”. Accordingly, in one embodiment, the process of the present invention comprises the use of a “uncharacterized protein” or its homolog, e.g. as shown herein, for the production of the fine chemical, meaning of starch and/or cellulose in free or bound from, in particular for increasing the amount of starch and/or cellulose in free or bound form in an organism or a part thereof, as mentioned. In one embodiment, in the process of the present invention the activity of a b0644 protein is increased or generated, e.g. from Escherichia coli or a homolog thereof, preferably linked at least to one transit peptide as mentioned for example in table V.
In another embodiment, in the process of the present invention the activity of a b0644 protein is increased or generated in a subcellular compartment of the organism or organism cell such as in an organelle like a plastid or mitochondria.
The sequence of b0760 (Accession number JC6038) from Escherichia coli has been published in Blattner et al., Science 277 (5331), 1453-1474 (1997), and its activity is being defined as “ATP-binding component of molybdate transport system”. Accordingly, in one embodiment, the process of the present invention comprises the use of a “ATP-binding component of molybdate transport system” or its homolog, e.g. as shown herein, for the production of the fine chemical, meaning of glucose in free or bound form, in particular for increasing the amount of glucose in free or bound form in an organism or a part thereof, as mentioned. In one embodiment, in the process of the present invention the activity of a b0760 protein is increased or generated, e.g. from Escherichia coli or a homolog thereof, preferably linked at least to one transit peptide as mentioned for example in table V.
In another embodiment, in the process of the present invention the activity of a b0760 protein is increased or generated in a subcellular compartment of the organism or organism cell such as in an organelle like a plastid or mitochondria.
The sequence of b1046 (Accession number PIR:C64847) from Escherichia coli has been published in Blattner et al., Science 277 (5331), 1453-1474 (1997), and its activity is being defined as “putative synthase with phospholipase D/nuclease domain”. Accordingly, in one embodiment, the process of the present invention comprises the use of a “putative synthase with phospholipase D/nuclease domain” or its homolog, e.g. as shown herein, for the production of the fine chemical, meaning of starch and/or cellulose in free or bound from, in particular for increasing the amount of starch and/or cellulose in free or bound form in an organism or a part thereof, as mentioned. In one embodiment, in the process of the present invention the activity of a b1046 protein is increased or generated, e.g. from Escherichia coli or a homolog thereof, preferably linked at least to one transit peptide as mentioned for example in table V.
In another embodiment, in the process of the present invention the activity of a b1046 protein is increased or generated in a subcellular compartment of the organism or organism cell such as in an organelle like a plastid or mitochondria.
The sequence of b1095 (Accession number NP_{—}415613) from Escherichia coli has been published in Blattner et al., Science 277 (5331), 1453-1474 (1997), and its activity is being defined as “3-oxoacyl-[acyl-carrier-protein] synthase II”. Accordingly, in one embodiment, the process of the present invention comprises the use of a “3-oxoacyl[acyl-carrier-protein] synthase II” or its homolog, e.g. as shown herein, for the production of the fine chemical, meaning of fructose in free or bound form, in particular for increasing the amount of fructose in free or bound form in an organism or a part thereof, as mentioned. In one embodiment, in the process of the present invention the activity of a b1095 protein is increased or generated, e.g. from Escherichia coli or a homolog thereof, preferably linked at least to one transit peptide as mentioned for example in table V.
In another embodiment, in the process of the present invention the activity of a b1095 protein is increased or generated in a subcellular compartment of the organism or organism cell such as in an organelle like a plastid or mitochondria.
The sequence of b1095 (Accession number NP_{—}415613) from Escherichia coli has been published in Blattner et al., Science 277 (5331), 1453-1474 (1997), and its activity is being defined as “3-oxoacyl-[acyl-carrier-protein] synthase II”. Accordingly, in one embodiment, the process of the present invention comprises the use of a “3-oxoacyl[acyl-carrier-protein] synthase II” or its homolog, e.g. as shown herein, for the production of the fine chemical, meaning of myo-inositol in free or bound form, in particular for increasing the amount of myo-inositol in free or bound form in an organism or a part thereof, as mentioned. In one embodiment, in the process of the present invention the activity of a b1095 protein is increased or generated, e.g. from Escherichia coli or a homolog thereof, preferably linked at least to one transit peptide as mentioned for example in table V.
In another embodiment, in the process of the present invention the activity of a b1095 protein is increased or generated in a subcellular compartment of the organism or organism cell such as in an organelle like a plastid or mitochondria.
The sequence of b1095 (Accession number NP_{—}415613) from Escherichia coli has been published in Blattner et al., Science 277 (5331), 1453-1474 (1997), and its activity is being defined as “3-oxoacyl-[acyl-carrier-protein] synthase II”. Accordingly, in one embodiment, the process of the present invention comprises the use of a “3-oxoacyl[acyl-carrier-protein] synthase II” or its homolog, e.g. as shown herein, for the production of the fine chemical, meaning of glucose in free or bound form, in particular for increasing the amount of glucose in free or bound form in an organism or a part thereof, as mentioned. In one embodiment, in the process of the present invention the activity of a b1095 protein is increased or generated, e.g. from Escherichia coli or a homolog thereof, preferably linked at least to one transit peptide as mentioned for example in table V.
In another embodiment, in the process of the present invention the activity of a b1095 protein is increased or generated in a subcellular compartment of the organism or organism cell such as in an organelle like a plastid or mitochondria.
In another embodiment, in the process of the present invention the activity of a b1095 protein is increased or generated in a subcellular compartment of the organism or organism cell such as in an organelle like a plastid or mitochondria. Furthermore in one embodiment, the process of the present invention comprises the use of a “3-oxoacyl[acyl-carrier-protein] synthase II” or its homolog, e.g. as shown herein for the production of the fine chemicals, in particular for increasing the amount of one or of any combination of 2 or 3 of the fine chemicals, e.g. compounds, selected from the group of “fructose, glucose and myo-inositol”.
The sequence of b1136 (Accession number PIR:DCECIS) from Escherichia coli has been published in Blattner et al., Science 277 (5331), 1453-1474 (1997), and its activity is being defined as “isocitrate dehydrogenase (NADP)”. Accordingly, in one embodiment, the process of the present invention comprises the use of a “isocitrate dehydrogenase (NADP)” or its homolog, e.g. as shown herein, for the production of the fine chemical, meaning of starch and/or cellulose in free or bound form, in particular for increasing the amount of starch and/or cellulose in free or bound form in an organism or a part thereof, as mentioned. In one embodiment, in the process of the present invention the activity of a b1136 protein is increased or generated, e.g. from Escherichia coli or a homolog thereof, preferably linked at least to one transit peptide as mentioned for example in table V.
In another embodiment, in the process of the present invention the activity of a b1136 protein is increased or generated in a subcellular compartment of the organism or organism cell such as in an organelle like a plastid or mitochondria.
The sequence of b1399 (Accession number B64891) from Escherichia coli has been published in Blattner et al., Science 277 (5331), 1453-1474 (1997), and its activity is being defined as “phenylacetic acid degradation operon negative regulatory protein paaX”. Accordingly, in one embodiment, the process of the present invention comprises the use of a “phenylacetic acid degradation operon negative regulatory protein paaX” or its homolog, e.g. as shown herein, for the production of the fine chemical, meaning of myo-inositol in free or bound form, in particular for increasing the amount of myo-inositol in free or bound form in an organism or a part thereof, as mentioned. In one embodiment, in the process of the present invention the activity of a b1399 protein is increased or generated, e.g. from Escherichia coli or a homolog thereof, preferably linked at least to one transit peptide as mentioned for example in table V.
In another embodiment, in the process of the present invention the activity of a b1399 protein is increased or generated in a subcellular compartment of the organism or organism cell such as in an organelle like a plastid or mitochondria.
The sequence of b1410 (Accession number NP_{—}415928) from Escherichia coli has been published in Blattner et al., Science 277 (5331), 1453-1474 (1997), and its activity is being defined as “putative methylase with S-adenosyl-L-methionine-dependent methyltransferase domain and alpha/beta-hydrolase domain”. Accordingly, in one embodiment, the process of the present invention comprises the use of a “putative methylase with S-adenosyl-L-methionine-dependent methyltransferase domain and alpha/beta-hydrolase domain” or its homolog, e.g. as shown herein, for the production of the fine chemical, meaning of glucose in free or bound form, in particular for increasing the amount of glucose in free or bound form in an organism or a part thereof, as mentioned. In one embodiment, in the process of the present invention the activity of a b1410 protein is increased or generated, e.g. from Escherichia coli or a homolog thereof, preferably linked at least to one transit peptide as mentioned for example in table V.
In another embodiment, in the process of the present invention the activity of a b1410 protein is increased or generated in a subcellular compartment of the organism or organism cell such as in an organelle like a plastid or mitochondria.
The sequence of b1410 (Accession number NP_{—}415928) from Escherichia coli has been published in Blattner et al., Science 277 (5331), 1453-1474 (1997), and its activity is being defined as “putative methylase with S-adenosyl-L-methionine-dependent methyltransferase domain and alpha/beta-hydrolase domain”. Accordingly, in one embodiment, the process of the present invention comprises the use of a “putative methylase with S-adenosyl-L-methionine-dependent methyltransferase domain and alpha/beta-hydrolase domain” or its homolog, e.g. as shown herein, for the production of the fine chemical, meaning of myo-inositol in free or bound form, in particular for increasing the amount of myo-inositol in free or bound form in an organism or a part thereof, as mentioned. In one embodiment, in the process of the present invention the activity of a b1410 protein is increased or generated, e.g. from Escherichia coli or a homolog thereof, preferably linked at least to one transit peptide as mentioned for example in table V.
In another embodiment, in the process of the present invention the activity of a b1410 protein is increased or generated in a subcellular compartment of the organism or organism cell such as in an organelle like a plastid or mitochondria.
The sequence of b1410 (Accession number NP_{—}415928) from Escherichia coli has been published in Blattner et al., Science 277 (5331), 1453-1474 (1997), and its activity is being defined as “putative methylase with S-adenosyl-L-methionine-dependent methyltransferase domain and alpha/beta-hydrolase domain”. Accordingly, in one embodiment, the process of the present invention comprises the use of a “putative methylase with S-adenosyl-L-methionine-dependent methyltransferase domain and alpha/beta-hydrolase domain” or its homolog, e.g. as shown herein, for the production of the fine chemical, meaning of fructose in free or bound form, in particular for increasing the amount of fructose in free or bound form in an organism or a part thereof, as mentioned. In one embodiment, in the process of the present invention the activity of a b1410 protein is increased or generated, e.g. from Escherichia coli or a homolog thereof, preferably linked at least to one transit peptide as mentioned for example in table V.
In another embodiment, in the process of the present invention the activity of a b1410 protein is increased or generated in a subcellular compartment of the organism or organism cell such as in an organelle like a plastid or mitochondria.
In another embodiment, in the process of the present invention the activity of a b1410 protein is increased or generated in a subcellular compartment of the organism or organism cell such as in an organelle like a plastid or mitochondria. Furthermore in one embodiment, the process of the present invention comprises the use of a “putative methylase with S-adenosyl-L-methionine-dependent methyltransferase domain and alpha/beta-hydrolase domain” or its homolog, e.g. as shown herein for the production of the fine chemicals, in particular for increasing the amount of one or of any combination of 2 or 3 of the fine chemicals, e.g. compounds, selected from the group of “fructose, glucose and myo-inositol”.
The sequence of b1556 (Accession number NP_{—}416074) from Escherichia coli has been published in Blattner et al., Science 277 (5331), 1453-1474 (1997), and its activity is being defined as “Qin prophage”. Accordingly, in one embodiment, the process of the present invention comprises the use of a “Qin prophage” or its homolog, e.g. as shown herein, for the production of the fine chemical, meaning of sucrose in free or bound form, in particular for increasing the amount of sucrose in free or bound form in an organism or a part thereof, as mentioned. In one embodiment, in the process of the present invention the activity of a b1556 protein is increased or generated, e.g. from Escherichia coli or a homolog thereof, preferably linked at least to one transit peptide as mentioned for example in table V.
In another embodiment, in the process of the present invention the activity of a b1556 protein is increased or generated in a subcellular compartment of the organism or organism cell such as in an organelle like a plastid or mitochondria.
The sequence of b1556 (Accession number NP_{—}416074) from Escherichia coli has been published in Blattner et al., Science 277 (5331), 1453-1474 (1997), and its activity is being defined as “Qin prophage”. Accordingly, in one embodiment, the process of the present invention comprises the use of a “Qin prophage” or its homolog, e.g. as shown herein, for the production of the fine chemical, meaning of myo-inositol in free or bound form, in particular for increasing the amount of myo-inositol in free or bound form in an organism or a part thereof, as mentioned. In one embodiment, in the process of the present invention the activity of a b1556 protein is increased or generated, e.g. from Escherichia coli or a homolog thereof, preferably linked at least to one transit peptide as mentioned for example in table V.
In another embodiment, in the process of the present invention the activity of a b1556 protein is increased or generated in a subcellular compartment of the organism or organism cell such as in an organelle like a plastid or mitochondria.
The sequence of b1556 (Accession number NP_{—}416074) from Escherichia coli has been published in Blattner et al., Science 277 (5331), 1453-1474 (1997), and its activity is being defined as “Qin prophage”. Accordingly, in one embodiment, the process of the present invention comprises the use of a “Qin prophage” or its homolog, e.g. as shown herein, for the production of the fine chemical, meaning of raffinose in free or bound form, in particular for increasing the amount of raffinose in free or bound form in an organism or a part thereof, as mentioned. In one embodiment, in the process of the present invention the activity of a b1556 protein is increased or generated, e.g. from Escherichia coli or a homolog thereof, preferably linked at least to one transit peptide as mentioned for example in table V.
In another embodiment, in the process of the present invention the activity of a b1556 protein is increased or generated in a subcellular compartment of the organism or organism cell such as in an organelle like a plastid or mitochondria.
In another embodiment, in the process of the present invention the activity of a b1556 protein is increased or generated in a subcellular compartment of the organism or organism cell such as in an organelle like a plastid or mitochondria. Furthermore in one embodiment, the process of the present invention comprises the use of a “Qin prophage” or its homolog, e.g. as shown herein for the production of the fine chemicals, in particular for increasing the amount of one or of any combination of 2 or 3 of the fine chemicals, e.g. compounds, selected from the group of “sucrose, raffinose and myo-inositol”.
The sequence of b1704 (Accession number NP_{—}416219) from Escherichia coli has been published in Blattner et al., Science 277 (5331), 1453-1474 (1997), and its activity is being defined as “3-deoxy-D-arabinoheptulosonate-7-phosphate synthase (DAHP synthetase)”. Accordingly, in one embodiment, the process of the present invention comprises the use of a “3-deoxy-D-arabinoheptulosonate-7-phosphate synthase (DAHP synthetase)” or its homolog, e.g. as shown herein, for the production of the fine chemical, meaning of starch and/or cellulose in free or bound form, in particular for increasing the amount of starch and/or cellulose in free or bound form in an organism or a part thereof, as mentioned. In one embodiment, in the process of the present invention the activity of a b1704 protein is increased or generated, e.g. from Escherichia coli or a homolog thereof, preferably linked at least to one transit peptide as mentioned for example in table V.
In another embodiment, in the process of the present invention the activity of a b1704 protein is increased or generated in a subcellular compartment of the organism or organism cell such as in an organelle like a plastid or mitochondria.
The sequence of b1980 (Accession number F64962) from Escherichia coli has been published in Blattner et al., Science 277 (5331), 1453-1474 (1997), and its activity is being defined as “putative transport protein”. Accordingly, in one embodiment, the process of the present invention comprises the use of a “putative transport protein” or its homolog, e.g. as shown herein, for the production of the fine chemical, meaning of raffinose in free or bound form, in particular for increasing the amount of raffinose in free or bound form in an organism or a part thereof, as mentioned. In one embodiment, in the process of the present invention the activity of a b1980 protein is increased or generated, e.g. from Escherichia coli or a homolog thereof, preferably linked at least to one transit peptide as mentioned for example in table V.
In another embodiment, in the process of the present invention the activity of a b1980 protein is increased or generated in a subcellular compartment of the organism or organism cell such as in an organelle like a plastid or mitochondria.
The sequence of b2223 (Accession number NP_{—}416727) from Escherichia coli has been published in Blattner et al., Science 277 (5331), 1453-1474 (1997), and its activity is being defined as “short chain fatty acid transporter”. Accordingly, in one embodiment, the process of the present invention comprises the use of a “short chain fatty acid transporter” or its homolog, e.g. as shown herein, for the production of the fine chemical, meaning of myo-inositol in free or bound form, in particular for increasing the amount of myo-inositol in free or bound form in an organism or a part thereof, as mentioned. In one embodiment, in the process of the present invention the activity of a b2223 protein is increased or generated, e.g. from Escherichia coli or a homolog thereof, preferably linked at least to one transit peptide as mentioned for example in table V.
In another embodiment, in the process of the present invention the activity of a b2223 protein is increased or generated in a subcellular compartment of the organism or organism cell such as in an organelle like a plastid or mitochondria.
The sequence of b2223 (Accession number NP_{—}416727) from Escherichia coli has been published in Blattner et al., Science 277 (5331), 1453-1474 (1997), and its activity is being defined as “short chain fatty acid transporter”. Accordingly, in one embodiment, the process of the present invention comprises the use of a “short chain fatty acid transporter” or its homolog, e.g. as shown herein, for the production of the fine chemical, meaning of raffinose in free or bound form, in particular for increasing the amount of raffinose in free or bound form in an organism or a part thereof, as mentioned. In one embodiment, in the process of the present invention the activity of a b2223 protein is increased or generated, e.g. from Escherichia coli or a homolog thereof, preferably linked at least to one transit peptide as mentioned for example in table V.
In another embodiment, in the process of the present invention the activity of a b2223 protein is increased or generated in a subcellular compartment of the organism or organism cell such as in an organelle like a plastid or mitochondria.
The sequence of b2223 (Accession number NP_{—}416727) from Escherichia coli has been published in Blattner et al., Science 277 (5331), 1453-1474 (1997), and its activity is being defined as “short chain fatty acid transporter”. Accordingly, in one embodiment, the process of the present invention comprises the use of a “short chain fatty acid transporter” or its homolog, e.g. as shown herein, for the production of the fine chemical, meaning of glucose in free or bound form, in particular for increasing the amount of glucose in free or bound form in an organism or a part thereof, as mentioned. In one embodiment, in the process of the present invention the activity of a b2223 protein is increased or generated, e.g. from Escherichia coli or a homolog thereof, preferably linked at least to one transit peptide as mentioned for example in table V.
In another embodiment, in the process of the present invention the activity of a b2223 protein is increased or generated in a subcellular compartment of the organism or organism cell such as in an organelle like a plastid or mitochondria.
In another embodiment, in the process of the present invention the activity of a b2223 protein is increased or generated in a subcellular compartment of the organism or organism cell such as in an organelle like a plastid or mitochondria. Furthermore in one embodiment, the process of the present invention comprises the use of a “short chain fatty acid transporter” or its homolog, e.g. as shown herein for the production of the fine chemicals, in particular for increasing the amount of one or of any combination of 2 or 3 of the fine chemicals, e.g. compounds, selected from the group of “glucose, raffinose and myo-inositol”.
The sequence of b2284 (Accession number B65000) from Escherichia coli has been published in Blattner et al., Science 277 (5331), 1453-1474 (1997), and its activity is being defined as “NADH2 dehydrogenase”. Accordingly, in one embodiment, the process of the present invention comprises the use of a “NADH2 dehydrogenase” or its homolog, e.g. as shown herein, for the production of the fine chemical, meaning of starch and/or cellulose in free or bound form, in particular for increasing the amount of starch and/or cellulose in free or bound form in an organism or a part thereof, as mentioned. In one embodiment, in the process of the present invention the activity of a b2284 protein is increased or generated, e.g. from Escherichia coli or a homolog thereof, preferably linked at least to one transit peptide as mentioned for example in table V.
In another embodiment, in the process of the present invention the activity of a b2284 protein is increased or generated in a subcellular compartment of the organism or organism cell such as in an organelle like a plastid or mitochondria.
The sequence of b2240 (Accession number JNECGT) from Escherichia coli has been published in Blattner et al., Science 277 (5331), 1453-1474 (1997), and its activity is being defined as “glycerol-3-phosphate transport protein”. Accordingly, in one embodiment, the process of the present invention comprises the use of a “glycerol-3-phosphate transport protein” or its homolog, e.g. as shown herein, for the production of the fine chemical, meaning of starch and/or cellulose in free or bound form, in particular for increasing the amount of starch and/or cellulose in free or bound form in an organism or a part thereof, as mentioned. In one embodiment, in the process of the present invention the activity of a b2240 protein is increased or generated, e.g. from Escherichia coli or a homolog thereof, preferably linked at least to one transit peptide as mentioned for example in table V.
In another embodiment, in the process of the present invention the activity of a b2240 protein is increased or generated in a subcellular compartment of the organism or organism cell such as in an organelle like a plastid or mitochondria.
The sequence of b2965 (Accession number NP_{—}417440) from Escherichia coli has been published in Blattner et al., Science 277 (5331), 1453-1474 (1997), and its activity is being defined as “ornithine decarboxylase”. Accordingly, in one embodiment, the process of the present invention comprises the use of a “ornithine decarboxylase” or its homolog, e.g. as shown herein, for the production of the fine chemical, meaning of sucrose in free or bound form, in particular for increasing the amount of sucrose in free or bound form in an organism or a part thereof, as mentioned. In one embodiment, in the process of the present invention the activity of a b2965 protein is increased or generated, e.g. from Escherichia coli or a homolog thereof, preferably linked at least to one transit peptide as mentioned for example in table V.
In another embodiment, in the process of the present invention the activity of a b2965 protein is increased or generated in a subcellular compartment of the organism or organism cell such as in an organelle like a plastid or mitochondria.
The sequence of b3156 (Accession number H65105) from Escherichia coli has been published in Blattner et al., Science 277 (5331), 1453-1474 (1997), and its activity is being defined as “putative acyl-CoA N-acyltransferase”. Accordingly, in one embodiment, the process of the present invention comprises the use of a “putative acyl-CoA N-acyltransferase” or its homolog, e.g. as shown herein, for the production of the fine chemical, meaning of fructose in free or bound form, in particular for increasing the amount of fructose in free or bound form in an organism or a part thereof, as mentinned. In one embodiment, in the process of the present invention the activity of a b3156 protein is increased or generated, e.g. from Escherichia coli or a homolog thereof, preferably linked at least to one transit peptide as mentioned for example in table V.
In another embodiment, in the process of the present invention the activity of a b3156 protein is increased or generated in a subcellular compartment of the organism or organism cell such as in an organelle like a plastid or mitochondria.
The sequence of b3708 (Accession number WZEC) from Escherichia coli has been published in Blattner et al., Science 277 (5331), 1453-1474 (1997), and its activity is being defined as “tryptophan deaminase, PLP-dependent”. Accordingly, in one embodiment, the process of the present invention comprises the use of a “tryptophan deaminase, PLP-dependent” or its homolog, e.g. as shown herein, for the production of the fine chemical, meaning of raffinose in free or bound form, in particular for increasing the amount of raffinose in free or bound form in an organism or a part thereof, as mentioned. In one embodiment, in the process of the present invention the activity of a b3708 protein is increased or generated, e.g. from Escherichia coli or a homolog thereof, preferably linked at least to one transit peptide as mentioned for example in table V.
In another embodiment, in the process of the present invention the activity of a b3708 protein is increased or generated in a subcellular compartment of the organism or organism cell such as in an organelle like a plastid or mitochondria.
The sequence of YCR012W (Accession number KIBYG) from Saccharomyces cerevisiae has been published in Goffeau et al., Science 274 (5287), 546-547, 1996, and its activity is being defined as “3-phosphoglycerate kinase”. Accordingly, in one embodiment, the process of the present invention comprises the use of a “3-phosphoglycerate kinase” or its homolog, e.g. as shown herein, for the production of the fine chemical, meaning of raffinose in free or bound form, in particular for increasing the amount of raffinose in free or bound form in an organism or a part thereof, as mentioned. In one embodiment, in the process of the present invention the activity of a YCR012W protein is increased or generated, e.g. from Saccharomyces cerevisiae or a homolog thereof, preferably linked at least to one transit peptide as mentioned for example in table V.
In another embodiment, in the process of the present invention the activity of a YCR012W protein is increased or generated in a subcellular compartment of the organism or organism cell such as in an organelle like a plastid or mitochondria.
The sequence of YDR035W (Accession number NP_{—}010320) from Saccharomyces cerevisiae has been published in Goffeau et al., Science 274 (5287), 546-547, 1996 and Jacq et al., Nature 387 (6632 Suppl), 75-78 (1997), and its activity is being defined as a “3-deoxy-D-arabino-heptulosonate-7-phosphate (DAHP) synthase” which catalyzes the first step in aromatic amino acid biosynthesis and is feedback-inhibited by phenylalanine (Aro3p). Accordingly, in one embodiment, the process of the present invention comprises the use of a “3-deoxy-D-arabino-heptulosonate-7-phosphate synthase” or its homolog, e.g. as shown herein, for the production of the fine chemical, meaning of raffinose in free or bound form, in particular for increasing the amount of raffinose in free or bound form in an organism or a part thereof, as mentioned. In one embodiment, in the process of the present invention the activity of a YDR035W protein is increased or generated, e.g. from Saccharomyces cerevisiae or a homolog thereof, preferably linked at least to one transit peptide as mentioned for example in table V.
In another embodiment, in the process of the present invention the activity of an YDR035W protein is increased or generated in a subcellular compartment of the organism or organism cell such as in an organelle like a plastid or mitochondria.
The sequence of YDR497C (Accession number NP_{—}010785) from Saccharomyces cerevisiae has been published in Goffeau et al., Science 274 (5287), 546-547, 1996 and Jacq et al., Nature 387 (6632 Suppl), 75-78 (1997), and its activity is being defined as a “myo-inositol transporter”. Accordingly, in one embodiment, the process of the present invention comprises the use of a “myo-inositol transporter” or its homolog, e.g. as shown herein, for the production of the fine chemical, meaning of fructose in free or bound form, in particular for increasing the amount of fructose in free or bound form in an organism or a part thereof, as mentioned. In one embodiment, in the process of the present invention the activity of a YDR497C protein is increased or generated, e.g. from Saccharomyces cerevisiae or a homolog thereof, preferably linked at least to one transit peptide as mentioned for example in table V.
In another embodiment, in the process of the present invention the activity of an YDR497C protein is increased or generated in a subcellular compartment of the organism or organism cell such as in an organelle like a plastid or mitochondria.
The sequence of YDR497C (Accession number NP_{—}010785) from Saccharomyces cerevisiae has been published in Goffeau et al., Science 274 (5287), 546-547, 1996 and Jacq et al., Nature 387 (6632 Suppl), 75-78 (1997), and its activity is being defined as a “myo-inositol transporter”. Accordingly, in one embodiment, the process of the present invention comprises the use of a “myo-inositol transporter” or its homolog, e.g. as shown herein, for the production of the fine chemical, meaning of myo-inositol in free or bound form, in particular for increasing the amount of myo-inositol in free or bound form in an organism or a part thereof, as mentioned. In one embodiment, in the process of the present invention the activity of a YDR497C protein is increased or generated, e.g. from Saccharomyces cerevisiae or a homolog thereof, preferably linked at least to one transit peptide as mentioned for example in table V.
In another embodiment, in the process of the present invention the activity of an YDR497C protein is increased or generated in a subcellular compartment of the organism or organism cell such as in an organelle like a plastid or mitochondria.
In another embodiment, in the process of the present invention the activity of a YDR497C protein is increased or generated in a subcellular compartment of the organism or organism cell such as in an organelle like a plastid or mitochondria. Furthermore in one embodiment, the process of the present invention comprises the use of a “myo-inositol transporter” or its homolog, e.g. as shown herein for the production of the fine chemicals, in particular for increasing the amount of fructose and myo-inositol.
The sequence of YER063W (Accession number S50566) from Saccharomyces cerevisiae has been published in Goffeau et al., Science 274 (5287), 546-547, 1996 and Dietrich et al., Nature 387 (6632 Suppl), 78-81 (1997), and its activity is being defined as a “uncharacterized protein”. Accordingly, in one embodiment, the process of the present invention comprises the use of a “uncharacterized protein” or its homolog, e.g. as shown herein, for the production of the fine chemical, meaning of fructose in free or bound form, in particular for increasing the amount of fructose in free or bound form in an organism or a part thereof, as mentioned. In one embodiment, in the process of the present invention the activity of a YER063W protein is increased or generated, e.g. from Saccharomyces cerevisiae or a homolog thereof, preferably linked at least to one transit peptide as mentioned for example in table V.
In another embodiment, in the process of the present invention the activity of an YER063W protein is increased or generated in a subcellular compartment of the organism or organism cell such as in an organelle like a plastid or mitochondria.
The sequence of YGL065C (Accession number S64069) from Saccharomyces cerevisiae has been published in Tettelin et al., Nature 387 (6632 Suppl), 81-84 (1997), and Goffeau et al., Science 274 (5287), 546-547, 1996, and its activity is being defined as a “ALG2 protein precursor”. Accordingly, in one embodiment, the process of the present invention comprises the use of a “ALG2 protein precursor” or its homolog, e.g. as shown herein, for the production of the fine chemical, meaning of myo-inositol in free or bound form, in particular for increasing the amount of myo-inositol in free or bound form in an organism or a part thereof, as mentioned. In one embodiment, in the process of the present invention the activity of a YGL065C protein is increased or generated, e.g. from Saccharomyces cerevisiae or a homolog thereof, preferably linked at least to one transit peptide as mentioned for example in table V.
In another embodiment, in the process of the present invention the activity of an YGL065C protein is increased or generated in a subcellular compartment of the organism or organism cell such as in an organelle like a plastid or mitochondria.
The sequence of YGL065C (Accession number S64069) from Saccharomyces cerevisiae has been published in Tettelin et al., Nature 387 (6632 Suppl), 81-84 (1997), and Goffeau et al., Science 274 (5287), 546-547, 1996, and its activity is being defined as a “ALG2 protein precursor”. Accordingly, in one embodiment, the process of the present invention comprises the use of a “ALG2 protein precursor” or its homolog, e.g. as shown herein, for the production of the fine chemical, meaning of starch and/or cellulose in free or bound form, in particular for increasing the amount of starch and/or cellulose in free or bound form in an organism or a part thereof, as mentioned. In one embodiment, in the process of the present invention the activity of a YGL065C protein is increased or generated, e.g. from Saccharomyces cerevisiae or a homolog thereof, preferably linked at least to one transit peptide as mentioned for example in table V.
In another embodiment, in the process of the present invention the activity of an

[5321] YGL065C protein is increased or generated in a subcellular compartment of the organism or organism cell such as in an organelle like a plastid or mitochondria.

In another embodiment, in the process of the present invention the activity of a YGL065C protein is increased or generated in a subcellular compartment of the organism or organism cell such as in an organelle like a plastid or mitochondria. Furthermore in one embodiment, the process of the present invention comprises the use of a “ALG2 protein precursor” or its homolog, e.g. as shown herein for the production of the fine chemicals, in particular for increasing the amount of one or of any combination of the fine chemicals, e.g. compounds, selected from the group of “starch and/or cellulose and myo-inositol”.
The sequence of YGR255C (Accession number NP_{—}011771) from Saccharomyces cerevisiae has been published in Tettelin et al., Nature 387 (6632 Suppl), 81-84 (1997), and Goffeau et al., Science 274 (5287), 546-547, 1996, and its activity is being defined as a “putative flavin-dependent monooxygenase” (Coq6p), which is involved in ubiquinone (Coenzyme Q) biosynthesis“. Accordingly, in one embodiment, the process of the present invention comprises the use of a “putative flavin-dependent monooxygenase” (Coq6p), which is involved in ubiquinone (Coenzyme Q) biosynthesis” or its homolog, e.g. as shown herein, for the production of the fine chemical, meaning of glucose in free or bound form, in particular for increasing the amount of glucose in free or bound form in an organism or a part thereof, as mentioned. In one embodiment, in the process of the present invention the activity of a YGR255C protein is increased or generated, e.g. from Saccharomyces cerevisiae or a homolog thereof, preferably linked at least to one transit peptide as mentioned for example in table V.
In another embodiment, in the process of the present invention the activity of an YGR255C protein is increased or generated in a subcellular compartment of the organism or organism cell such as in an organelle like a plastid or mitochondria.
The sequence of YGR255C (Accession number NP_{—}011771) from Saccharomyces cerevisiae has been published in Tettelin et al., Nature 387 (6632 Suppl), 81-84 (1997), and Goffeau et al., Science 274 (5287), 546-547, 1996, and its activity is being defined as a “putative flavin-dependent monooxygenase” (Coq6p), which is involved in ubiquinone (Coenzyme Q) biosynthesis“. Accordingly, in one embodiment, the process of the present invention comprises the use of a “putative flavin-dependent monooxygenase”(Coq6p), which is involved in ubiquinone (Coenzyme Q) biosynthesis” or its homolog, e.g. as shown herein, for the production of the fine chemical, meaning of raffinose in free or bound form, in particular for increasing the amount of raffinose in free or bound form in an organism or a part thereof, as mentioned. In one embodiment, in the process of the present invention the activity of a YGR255C protein is increased or generated, e.g. from Saccharomyces cerevisiae or a homolog thereof, preferably linked at least to one transit peptide as mentioned for example in table V.
In another embodiment, in the process of the present invention the activity of an YGR255C protein is increased or generated in a subcellular compartment of the organism or organism cell such as in an organelle like a plastid or mitochondria.
In another embodiment, in the process of the present invention the activity of a YGR255C protein is increased or generated in a subcellular compartment of the organism or organism cell such as in an organelle like a plastid or mitochondria. Furthermore in one embodiment, the process of the present invention comprises the use of a “putative flavin-dependent monooxygenase” (Coq6p), which is involved in ubiquinone (Coenzyme Q) biosynthesis” or its homolog, e.g. as shown herein for the production of the fine chemicals, in particular for increasing the amount of glucose and raffinose.
The sequence of YGR262C (Accession number S64595) from Saccharomyces cerevisiae has been published in Tettelin et al., Nature 387 (6632 Suppl), 81-84 (1997), and Goffeau et al., Science 274 (5287), 546-547, 1996, and its activity is being defined as a “protein involved in bud-site selection”. Accordingly, in one embodiment, the process of the present invention comprises the use of a “protein involved in bud-site selection” or its homolog, e.g. as shown herein, for the production of the fine chemical, meaning of fructose in free or bound form, in particular for increasing the amount of fructose in free or bound form in an organism or a part thereof, as mentioned. In one embodiment, in the process of the present invention the activity of a YGR262C protein is increased or generated, e.g. from Saccharomyces cerevisiae or a homolog thereof, preferably linked at least to one transit peptide as mentioned for example in table V.
In another embodiment, in the process of the present invention the activity of an YGR262C protein is increased or generated in a subcellular compartment of the organism or organism cell such as in an organelle like a plastid or mitochondria.
The sequence of YGR262C (Accession number S64595) from Saccharomyces cerevisiae has been published in Tettelin et al., Nature 387 (6632 Suppl), 81-84 (1997), and Goffeau et al., Science 274 (5287), 546-547, 1996, and its activity is being defined as a “protein involved in bud-site selection”. Accordingly, in one embodiment, the process of the present invention comprises the use of a “protein involved in bud-site selection” or its homolog, e.g. as shown herein, for the production of the fine chemical, meaning of glucose in free or bound form, in particular for increasing the amount of glucose in free or bound form in an organism or a part thereof, as mentioned. In one embodiment, in the process of the present invention the activity of a YGR262C protein is increased or generated, e.g. from Saccharomyces cerevisiae or a homolog thereof, preferably linked at least to one transit peptide as mentioned for example in table V.
In another embodiment, in the process of the present invention the activity of an YGR262C protein is increased or generated in a subcellular compartment of the organism or organism cell such as in an organelle like a plastid or mitochondria.
In another embodiment, in the process of the present invention the activity of a YGR262C protein is increased or generated in a subcellular compartment of the organism or organism cell such as in an organelle like a plastid or mitochondria. Furthermore in one embodiment, the process of the present invention comprises the use of a “protein involved in bud-site selection” or its homolog, e.g. as shown herein for the production of the fine chemicals, in particular for increasing the amount of glucose and fructose.
The sequence of YHR204W (Accession number S46693) from Saccharomyces cerevisiae has been published in Goffeau et al., Science 274 (5287), 546-547, 1996, and its activity is being defined as a “mannosidase like protein”. Accordingly, in one embodiment, the process of the present invention comprises the use of a “mannosidase like protein” or its homolog, e.g. as shown herein, for the production of the fine chemical, meaning of myo-inositol in free or bound form, in particular for increasing the amount of myo-inositol in free or bound form in an organism or a part thereof, as mentioned. In one embodiment, in the process of the present invention the activity of a YHR204W protein is increased or generated, e.g. from Saccharomyces cerevisiae or a homolog thereof, preferably linked at least to one transit peptide as mentioned for example in. table V.
In another embodiment, in the process of the present invention the activity of an YHR204W protein is increased or generated in a subcellular compartment of the organism or organism cell such as in an organelle like a plastid or mitochondria.
The sequence of YIR020W-A (Accession number Q03886_YEAST) from Saccharomyces cerevisiae has been published in the UniProtKB/TrTrEMBL database and its activity is being defined as a “protein of unknown function”. Accordingly, in one embodiment, the process of the present invention comprises the use of a “protein of unknown function” or its homolog, e.g. as shown herein, for the production of the fine chemical, meaning of fructose in free or bound form, in particular for increasing the amount of fructose in free or bound form in an organism or a part thereof, as mentioned. In one embodiment, in the process of the present invention the activity of a YIR020W-A protein is increased or generated, e.g. from Saccharomyces cerevisiae or a homolog thereof, preferably linked at least to one transit peptide as mentioned for example in table V.
In another embodiment, in the process of the present invention the activity of an YIR020W-A protein is increased or generated in a subcellular compartment of the organism or organism cell such as in an organelle like a plastid or mitochondria.
The sequence of YIR020W-A (Accession number Q03886_YEAST) from Saccharomyces cerevisiae has been published in the UniProtKB/TrEMBL database, and its activity is being defined as a “protein of unknown function”. Accordingly, in one embodiment, the process of the present invention comprises the use of a “protein of unknown function” or its homolog, e.g. as shown herein, for the production of the fine chemical, meaning of glucose in free or bound form, in particular for increasing the amount of glucose in free or bound form in an organism or a part thereof, as mentioned. In one embodiment, in the process of the present invention the activity of a YIR020W-A protein is increased or generated, e.g. from Saccharomyces cerevisiae or a homolog thereof, preferably linked at least to one transit peptide as mentioned for example in table V.
In another embodiment, in the process of the present invention the activity of an YIR020W-A protein is increased or generated in a subcellular compartment of the organism or organism cell such as in an organelle like a plastid or mitochondria.
In another embodiment, in the process of the present invention the activity of a YIR020W-A protein is increased or generated in a subcellular compartment of the organism or organism cell such as in an organelle like a plastid or mitochondria. Furthermore in one embodiment, the process of the present invention comprises the use of a “protein of unknown function” or its homolog, e.g. as shown herein for the production of the fine chemicals, in particular for increasing the amount of glucose and fructose.
The sequence of YJL139C (Accession number PIR:S36856) from Saccharomyces cerevisiae has been published in Foreman et al., Nucleic Acids Res. 19:2781-2781(1991), and its activity is being defined as a “mannosyltransferase of the KTR1 family, involved in protein N-glycosylation”. Accordingly, in one embodiment, the process of the present invention comprises the use of a “mannosyltransferase of the KTR1 family, involved in protein N-glycosylation” or its homolog, e.g. as shown herein, for the production of the fine chemical, meaning of myo-inositol in free or bound form, in particular for increasing the amount of myo-inositol in free or bound form in an organism or a part thereof, as mentioned. In one embodiment, in the process of the present invention the activity of a YJL139C protein is increased or generated, e.g. from Saccharomyces cerevisiae or a homolog thereof, preferably linked at least to one transit peptide as mentioned for example in table V.
In another embodiment, in the process of the present invention the activity of an YJL139C protein is increased or generated in a subcellular compartment of the organism or organism cell such as in an organelle like a plastid or mitochondria.
The sequence of YJL139C (Accession number PIR:S36856) from Saccharomyces cerevisiae has been published in Foreman et al., Nucleic Acids Res. 19:2781-2781(1991), and its activity is being defined as a “mannosyltransferase of the KTR1 family, involved in protein N-glycosylation”. Accordingly, in one embodiment, the process of the present invention comprises the use of a “mannosyltransferase of the KTR1 family, involved in protein N-glycosylation” or its homolog, e.g. as shown herein, for the production of the fine chemical, meaning of glucose in free or bound form, in particular for increasing the amount of glucose in free or bound form in an organism or a part thereof, as mentioned. In one embodiment, in the process of the present invention the activity of a YJL139C protein is increased or generated, e.g. from Saccharomyces cerevisiae or a homolog thereof, preferably linked at least to one transit peptide as mentioned for example in table V.
In another embodiment, in the process of the present invention the activity of an YJL139C protein is increased or generated in a subcellular compartment of the organism or organism cell such as in an organelle like a plastid or mitochondria.
In another embodiment, in the process of the present invention the activity of a YJL139C protein is increased or generated in a subcellular compartment of the organism or organism cell such as in an organelle like a plastid or mitochondria. Furthermore in one embodiment, the process of the present invention comprises the use of a “mannosyltransferase of the KTR1 family, involved in protein N-glycosylation” or its homolog, e.g. as shown herein for the production of the fine chemicals, in particular for increasing the amount of “myo-inositol and fructose.
The sequence of YKR043C (Accession number NP_{—}012969) from Saccharomyces cerevisiae has been published in Goffeau et al., Science 274 (5287), 546-547, 1996, and its activity is being defined as a “phosphoglycerate mutase like protein”. Accordingly, in one embodiment, the process of the present invention comprises the use of a “phosphoglycerate mutase like protein” or its homolog, e.g. as shown herein, for the production of the fine chemical, meaning of UDP-glucose in free or bound form, in particular for increasing the amount of UDP-glucose in free or bound form in an organism or a part thereof, as mentioned. In one embodiment, in the process of the present invention the activity of a YKR043C protein is increased or generated, e.g. from Saccharomyces cerevisiae or a homolog thereof, preferably linked at least to one transit peptide as mentioned for example in table V.
In another embodiment, in the process of the present invention the activity of an YKR043C protein is increased or generated in a subcellular compartment of the organism or organism cell such as in an organelle like a plastid or mitochondria.
The sequence of YLL033W (Accession number S64784) from Saccharomyces cerevisiae has been published in Johnston et al., Nature 387 (6632 Suppl), 87-90 (1997) and Goffeau et al., Science 274 (5287), 546-547, 1996, and its activity is being defined as a “uncharacterized”. Accordingly, in one embodiment, the process of the present invention comprises the use of a “uncharacterized protein” or its homolog, e.g. as shown herein, for the production of the fine chemical, meaning of raffinose in free or bound form, in particular for increasing the amount of raffinose in free or bound form in an organism or a part thereof, as mentioned. In one embodiment, in the process of the present invention the activity of a YLL033W protein is increased or generated, e.g. from Saccharomyces cerevisiae or a homolog thereof, preferably linked at least to one transit peptide as mentioned for example in table V.
In another embodiment, in the process of the present invention the activity of an YLL033W protein is increased or generated in a subcellular compartment of the organism or organism cell such as in an organelle like a plastid or mitochondria.
The sequence of YLR153C (Accession number NP_{—}013254) from Saccharomyces cerevisiae has been published in Johnston et al., Nature 387 (6632 Suppl), 87-90 (1997) and Goffeau et al., Science 274 (5287), 546-547, 1996, and its activity is being defined as a “acetyl CoA synthetase”. Accordingly, in one embodiment, the process of the present invention comprises the use of a “acetyl CoA synthetase” or its homolog, e.g. as shown herein, for the production of the fine chemical, meaning of glucose in free or bound form, in particular for increasing the amount of glucose in free or bound form in an organism or a part thereof, as mentioned. In one embodiment, in the process of the present invention the activity of a YLR153C protein is increased or generated, e.g. from Saccharomyces cerevisiae or a homolog thereof, preferably linked at least to one transit peptide as mentioned for example in table V.
In another embodiment, in the process of the present invention the activity of an YLR153C protein is increased or generated in a subcellular compartment of the organism or organism cell such as in an organelle like a plastid or mitochondria.
The sequence of YLR174W (Accession number NP_{—}013275) from Saccharomyces cerevisiae has been published in Goffeau et al., Science 274 (5287), 546-547, 1996 and Johnston et al., Nature 387 (6632 Suppl), 87-90 (1997), and its activity is being defined as a “NADP-dependent isocitrate dehydrogenase”. Accordingly, in one embodiment, the process of the present invention comprises the use of a “NADP-dependent isocitrate dehydrogenase” or its homolog, e.g. as shown herein, for the production of the fine chemical, meaning of raffinose in free or bound form, in particular for increasing the amount of raffinose in free or bound form in an organism or a part thereof, as mentioned. In one embodiment, in the process of the present invention the activity of a YLR174W protein is increased or generated, e.g. from Saccharomyces cerevisiae or a homolog thereof, preferably linked at least to one transit peptide as mentioned for example in table V.
In another embodiment, in the process of the present invention the activity of an YLR174W protein is increased or generated in a subcellular compartment of the organism or organism cell such as in an organelle like a plastid or mitochondria.
The sequence of YLR174W (Accession number NP_{—}013275) from Saccharomyces cerevisiae has been published in Goffeau et al., Science 274 (5287), 546-547, 1996 and Johnston et al., Nature 387 (6632 Suppl), 87-90 (1997), and its activity is being defined as a “NADP-dependent isocitrate dehydrogenase”. Accordingly, in one embodiment, the process of the present invention comprises the use of a “NADP-dependent isocitrate dehydrogenase” or its homolog, e.g. as shown herein, for the production of the fine chemical, meaning of myo-inositol in free or bound form, in particular for increasing the amount of myo-inositol in free or bound form in an organism or a part thereof, as mentioned. In one embodiment, in the process of the present invention the activity of a YLR174W protein is increased or generated, e.g. from Saccharomyces cerevisiae or a homolog thereof, preferably linked at least to one transit peptide as mentioned for example in table V.
In another embodiment, in the process of the present invention the activity of an YLR174W protein is increased or generated in a subcellular compartment of the organism or organism cell such as in an organelle like a plastid or mitochondria.
In another embodiment, in the process of the present invention the activity of a YLR174W protein is increased or generated in a subcellular compartment of the organism or organism cell such as in an organelle like a plastid or mitochondria. Furthermore in one embodiment, the process of the present invention comprises the use of a “NADP-dependent isocitrate dehydrogenase” or its homolog, e.g. as shown herein for the production of the fine chemicals, in particular for increasing the amount of raffinose and myo-inositol.
The sequence of YNL022C (Accession number S62934) from Saccharomyces cerevisiae has been published in Goffeau et al., Science 274 (5287), 546-547, 1996 and Philippsen et al., Nature 387 (6632 Suppl), 93-98 (1997), and its activity is being defined as a “uncharacterized protein”. Accordingly, in one embodiment, the process of the present invention comprises the use of a “uncharacterized protein” or its homolog, e.g. as shown herein, for the production of the fine chemical, meaning of raffinose in free or bound form, in particular for increasing the amount of raffinose in free or bound form in an organism or a part thereof, as mentioned. In one embodiment, in the process of the present invention the activity of a YNL022C protein is increased or generated, e.g. from Saccharomyces cerevisiae or a homolog thereof, preferably linked at least to one transit peptide as mentioned for example in table V.
In another embodiment, in the process of the present invention the activity of an YNL022C protein is increased or generated in a subcellular compartment of the organism or organism cell such as in an organelle like a plastid or mitochondria.
The sequence of YNL241C (Accession number NP_{—}014158) from Saccharomyces cerevisiae has been published in Goffeau et al., Science 274 (5287), 546-547, 1996 and Philippsen et al., Nature 387 (6632 Suppl), 93-98 (1997), and its activity is being defined as a “glucose-6-phosphate dehydrogenase”. Accordingly, in one embodiment, the process of the present invention comprises the use of a “glucose-6-phosphate dehydrogenase” or its homolog, e.g. as shown herein, for the production of the fine chemical, meaning of glucose in free or bound form, in particular for increasing the amount of glucose in free or bound form in an organism or a part thereof, as mentioned. In one embodiment, in the process of the present invention the activity of a YNL241C protein is increased or generated, e.g. from Saccharomyces cerevisiae or a homolog thereof, preferably linked at least to one transit peptide as mentioned for example in table V.
In another embodiment, in the process of the present invention the activity of an YNL241C protein is increased or generated in a subcellular compartment of the organism or organism cell such as in an organelle like a plastid or mitochondria.
The sequence of YNL241C (Accession number NP_{—}014158) from Saccharomyces cerevisiae has been published in Goffeau et al., Science 274 (5287), 546-547, 1996 and Philippsen et al., Nature 387 (6632 Suppl), 93-98 (1997), and its activity is being defined as a “glucose-6-phosphate dehydrogenase”. Accordingly, in one embodiment, the process of the present invention comprises the use of a “glucose-6-phosphate dehydrogenase” or its homolog, e.g. as shown herein, for the production of the fine chemical, meaning of fructose in free or bound form, in particular for increasing the amount of fructose in free or bound form in an organism or a part thereof, as mentioned. In one embodiment, in the process of the present invention the activity of a YNL241C protein is increased or generated, e.g. from Saccharomyces cerevisiae or a homolog thereof, preferably linked at least to one transit peptide as mentioned for example in table V.
In another embodiment, in the process of the present invention the activity of an YNL241C protein is increased or generated in a subcellular compartment of the organism or organism cell such as in an organelle like a plastid or mitochondria.
In another embodiment, in the process of the present invention the activity of a YNL241C protein is increased or generated in a subcellular compartment of the organism or organism cell such as in an organelle like a plastid or mitochondria. Furthermore in one embodiment, the process of the present invention comprises the use of a “glucose-6-phosphate dehydrogenase” or its homolog, e.g. as shown herein for the production of the fine chemicals, in particular for increasing the amount of glucose and fructose.
The sequence of YNR012W (Accession number NP_{—}014409) from Saccharomyces cerevisiae has been published in Goffeau et al., Science 274 (5287), 546-547, 1996 and Philippsen et al., Nature 387 (6632 Suppl), 93-98 (1997), and its activity is being defined as a “uridine kinase”. Accordingly, in one embodiment, the process of the present invention comprises the use of a “uridine kinase” or its homolog, e.g. as shown herein, for the production of the fine chemical, meaning of myo-inositol in free or bound form, in particular for increasing the amount of myo-inositol in free or bound form in an organism or a part thereof, as mentioned. In one embodiment, in the process of the present invention the activity of a YNR012W protein is increased or generated, e.g. from Saccharomyces cerevisiae or a homolog thereof, preferably linked at least to one transit peptide as mentioned for example in table V.
In another embodiment, in the process of the present invention the activity of an YNR012W protein is increased or generated in a subcellular compartment of the organism or organism cell such as in an organelle like a plastid or mitochondria.
The sequence of YOR353C (Accession number NP_{—}014998) from Saccharomyces cerevisiae has been published in Goffeau et al., Science 274 (5287), 546-547, 1996 and Dujon et al., Nature 387 (6632 Suppl), 98-102 (1997)
and its activity is being defined as a “protein required for cell morphogenesis and cell separation after mitosis; Sog2p”. Accordingly, in one embodiment, the process of the present invention comprises the use of a “protein required for cell morphogenesis and cell separation after mitosis; Sog2p” or its homolog, e.g. as shown herein, for the production of the fine chemical, meaning of glucose in free or bound form, in particular for increasing the amount of glucose in free or bound form in an organism or a part thereof, as mentioned. In one embodiment, in the process of the present invention the activity of a YOR353C protein is increased or generated, e.g. from Saccharomyces cerevisiae or a homolog thereof, preferably linked at least to one transit peptide as mentioned for example in table V.
In another embodiment, in the process of the present invention the activity of an YOR353C protein is increased or generated in a subcellular compartment of the organism or organism cell such as in an organelle like a plastid or mitochondria.
The sequence of YOR353C (Accession number NP_{—}014998) from Saccharomyces cerevisiae has been published in Goffeau et al., Science 274 (5287), 546-547, 1996 and Dujon et al., Nature 387 (6632 Suppl), 98-102 (1997), and its activity is being defined as a “protein required for cell morphogenesis and cell separation after mitosis; Sog2p”. Accordingly, in one embodiment, the process of the present invention comprises the use of a “protein required for cell morphogenesis and cell separation after mitosis; Sog2p” or its homolog, e.g. as shown herein, for the production of the fine chemical, meaning of fructose in free or bound form, in particular for increasing the amount of fructose in free or bound form in an organism or a part thereof, as mentioned. In one embodiment, in the process of the present invention the activity of a YOR353C protein is increased or generated, e.g. from Saccharomyces cerevisiae or a homolog thereof, preferably linked at least to one transit peptide as mentioned for example in table V.
In another embodiment, in the process of the present invention the activity of an YOR353C protein is increased or generated in a subcellular compartment of the organism or organism cell such as in an organelle like a plastid or mitochondria.
In another embodiment, in the process of the present invention the activity of a YOR353C protein is increased or generated in a subcellular compartment of the organism or organism cell such as in an organelle like a plastid or mitochondria. Furthermore in one embodiment, the process of the present invention comprises the use of a “protein required for cell morphogenesis and cell separation after mitosis; Sog2p” or its homolog, e.g. as shown herein for the production of the fine chemicals, in particular for increasing the amount of glucose and fructose.
The sequence of YPL138C (Accession number NP_{—}015187) from Saccharomyces cerevisiae has been published in Bussey et al., Nature 387 (6632 Suppl), 103-105 (1997) and Goffeau et al., Science 274 (5287), 546-547, 1996, and its activity is being defined as a “compass (complex proteins associated with Set1p) component”. Accordingly, in one embodiment, the process of the present invention comprises the use of a “compass (complex proteins associated with Set1p) component” or its homolog, e.g. as shown herein, for the production of the fine chemical, meaning of starch and/or cellulose in free or bound form, in particular for increasing the amount of starch and/or cellulose in free or bound form in an organism or a part thereof, as mentioned. In one embodiment, in the process of the present invention the activity of a YPL138C protein is increased or generated, e.g. from Saccharomyces cerevisiae or a homolog thereof, preferably linked at least to one transit peptide as mentioned for example in table V.
In another embodiment, in the process of the present invention the activity of an YPL138C protein is increased or generated in a subcellular compartment of the organism or organism cell such as in an organelle like a plastid or mitochondria.
The sequence of YPR035W (Accession number NP_{—}015360) from Saccharomyces cerevisiae has been published in in Bussey et al., Nature 387 (6632 Suppl), 103-105 (1997) and Goffeau et al., Science 274 (5287), 546-547, 1996, and its activity is being defined as a “glutamine synthetase”. Accordingly, in one embodiment, the process of the present invention comprises the use of a “glutamine synthetase” or its homolog, e.g. as shown herein, for the production of the fine chemical, meaning of myo-inositol in free or bound form, in particular for increasing the amount of myo-inositol in free or bound form in an organism or a part thereof, as mentioned. In one embodiment, in the process of the present invention the activity of a YPR035W protein is increased or generated, e.g. from Saccharomyces cerevisiae or a homolog thereof, preferably linked at least to one transit peptide as mentioned for example in table V.
In another embodiment, in the process of the present invention the activity of an YPR035W protein is increased or generated in a subcellular compartment of the organism or organism cell such as in an organelle like a plastid or mitochondria.
The sequence of YPR035W (Accession number NP_{—}015360) from Saccharomyces cerevisiae has been published in in Bussey et al., Nature 387 (6632 Suppl), 103-105 (1997) and Goffeau et al., Science 274 (5287), 546-547, 1996, and its activity is being defined as a “glutamine synthetase”. Accordingly, in one embodiment, the process of the present invention comprises the use of a “glutamine synthetase” or its homolog, e.g. as shown herein, for the production of the fine chemical, meaning of raffinose in free or bound form, in particular for increasing the amount of raffinose in free or bound form in an organism or a part thereof, as mentioned. In one embodiment, in the process of the present invention the activity of a YPR035W protein is increased or generated, e.g. from Saccharomyces cerevisiae or a homolog thereof, preferably linked at least to one transit peptide as mentioned for example in table V.
In another embodiment, in the process of the present invention the activity of an YPR035W protein is increased or generated in a subcellular compartment of the organism or organism cell such as in an organelle like a plastid or mitochondria.
In another embodiment, in the process of the present invention the activity of a YPR035W protein is increased or generated in a subcellular compartment of the organism or organism cell such as in an organelle like a plastid or mitochondria. Furthermore in one embodiment, the process of the present invention comprises the use of a “glutamine synthetase” or its homolog, e.g. as shown herein for the production of the fine chemicals, in particular for increasing the amount of myo-inositol and raffinose.

[5322] In one embodiment, the homolog of the b0146, b0342, b0523, b0598, b0644, b0760, b1046, b1095, b1136, b1399, b1410, b1556, b1704, b1980, b2223, b2240, b2284, b2965, b3156b3708 is a homolog having said activity and being derived from bacteria. In one embodiment, the homolog of the b0146, b0342, b0523, b0598, b0644, b0760, b1046, b1095, b1136, b1399, b1410, b1556, b1704, b1980, b2223, b2240, b2284, b2965, b3156b3708 is a homolog having said activity and being derived from Proteobacteria. In one embodiment, the homolog of the b0146, b0342, b0523, b0598, b0644, b0760, b1046, b1095, b1136, b1399, b1410, b1556, b1704, b1980, b2223, b2240, b2284, b2965, b3156b3708 is a homolog having said activity and being derived from Gammaproteobacteria. In one embodiment, the homolog of the b0146, b0342, b0523, b0598, b0644, b0760, b1046, b1095, b1136, b1399, b1410, b1556, b1704, b1980, b2223, b2240, b2284, b2965, b3156b3708 is a homolog having said activity and being derived from Enterobacteriales. In one embodiment, the homolog of the b0146, b0342, b0523, b0598, b0644, b0760, b1046, b1095, b1136, b1399, b1410, b1556, b1704, b1980, b2223, b2240, b2284, b2965, b3156b3708 is a homolog having said activity and being derived from Enterobacteriaceae. In one embodiment, the homolog of the b0146, b0342, b0523, b0598, b0644, b0760, b1046, b1095, b1136, b1399, b1410, b1556, b1704, b1980, b2223, b2240, b2284, b2965, b3156b3708 is a homolog having said activity and being derived from Escherichia, preferably from Escherichia coli.

In one embodiment, the homolog of the YCR012W, YDR035W, YDR497C, YER063W, YGL065C, YGR255C, YGR262C, YHR204W, YIR020W-A, YJL139C, YKR043C, YLL033W, YLR153C, YLR174W, YNL022C, YNL241C, YNR012W, YOR353C, YPL138C or YPR035W is a homolog having said activity and being derived from an eukaryotic. In one embodiment, the homolog of the YCR012W, YDR035W, YDR497C, YER063W, YGL065C, YGR255C, YGR262C, YHR204W, YIR020W-A, YJL139C, YKR043C, YLL033W, YLR153C, YLR174W, YNL022C, YNL241C, YNR012W, YOR353C, YPL138C or YPR035W is a homolog having said activity and being derived from Fungi. In one embodiment, the homolog of the YCR012W, YDR035W, YDR497C, YER063W, YGL065C, YGR255C, YGR262C, YHR204W, YIR020W-A, YJL139C, YKR043C, YLL033W, YLR153C, YLR174W, YNL022C, YNL241C, YNR012W, YOR353C, YPL138C or YPR035W is a homolog having said activity and being derived from Ascomyceta. In one embodiment, the homolog of the YCR012W, YDR035W, YDR497C, YER063W, YGL065C, YGR255C, YGR262C, YHR204W, YIR020W-A, YJL139C, YKR043C, YLL033W, YLR153C, YLR174W, YNL022C, YNL241C, YNR012W, YOR353C, YPL138C or YPR035W is a homolog having said activity and being derived from Saccharomycotina. In one embodiment, the homolog of the YCR012W, YDR035W, YDR497C, YER063W, YGL065C, YGR255C, YGR262C, YHR204W, YIR020W-A, YJL139C, YKR043C, YLL033W, YLR153C, YLR174W, YNL022C, YNL241C, YNR012W, YOR353C, YPL138C or YPR035W is a homolog having said activity and being derived from Saccharomycetes. In one embodiment, the homolog of the YCR012W, YDR035W, YDR497C, YER063W, YGL065C, YGR255C, YGR262C, YHR204W, YIR020W-A, YJL139C, YKR043C, YLL033W, YLR153C, YLR174W, YNL022C, YNL241C, YNR012W, YOR353C, YPL138C or YPR035W is a homolog having said activity and being derived from Saccharomycetales. In one embodiment, the homolog of the YCR012W, YDR035W, YDR497C, YER063W, YGL065C, YGR255C, YGR262C, YHR204W, YIR020W-A, YJL139C, YKR043C, YLL033W, YLR153C, YLR174W, YNL022C, YNL241C, YNR012W, YOR353C, YPL138C or YPR035W is a homolog having said activity and being derived from Saccharomycetaceae. In one embodiment, the homolog of the YCR012W, YDR035W, YDR497C, YER063W, YGL065C, YGR255C, YGR262C, YHR204W, YIR020W-A, YJL139C, YKR043C, YLL033W, YLR153C, YLR174W, YNL022C, YNL241C, YNR012W, YOR353C, YPL138C or YPR035W is a homolog having said activity and being derived from Saccharomycetes.

[5323] for the disclosure of this paragraph see paragraph [0038.0.0.0] above.

[5324] In accordance with the invention, a protein or polypeptide has the “activity of an protein as shown in table II, application no. 20, column 3” if its de novo activity, or its increased expression directly or indirectly leads to an increased in the fine chemical level in the organism or a part thereof, preferably in a cell of said organism, more preferably in an organelle such as a plastid or mitochondria of said organism and the protein has the above mentioned activities of a protein as shown in table II, application no. 20, column 3, preferably in the event the nucleic acid sequences encoding said proteins is functionally joined to the nucleic acid sequence of a transit peptide. Throughout the specification the activity or preferably the biological activity of such a protein or polypeptide or an nucleic acid molecule or sequence encoding such protein or polypeptide is identical or similar if it still has the biological or enzymatic activity of a protein as shown in table II, application no. 20, column 3, or which has at least 10% of the original enzymatic activity, preferably 20%, particularly preferably 30%, most particularly preferably 40% in comparison to a protein as shown in table II, application no. 20, column 3 of Saccharomyces cerevisiae.

[5325] for the disclosure of the paragraphs [0040.0.0.19] to [0047.0.0.19] see paragraphs [0040.0.0.0] to [0047.0.0.0] above.

[5326] Preferably, the reference, control or wild type differs form the subject of the present invention only in the cellular activity, preferably of the plastidial activity of the polypeptide of the invention, e.g. as result of an increase in the level of the nucleic acid molecule of the present invention or an increase of the specific activity of the polypeptide of the invention, e.g. by or in the expression level or activity of an protein having the activity of a protein as shown in table II, application no. 20, column 3 its biochemical or genetical causes and the increased amount of the fine chemical.

[5327] for the disclosure of the paragraphs [0049.0.0.19] to [0051.0.0.19] see paragraphs [0049.0.0.0] to [0051.0.0.0] above.

[5328] For example, the molecule number or the specific activity of the polypeptide or the nucleic acid molecule may be increased. Larger amounts of the fine chemical can be produced if the polypeptide or the nucleic acid of the invention is expressed de novo in an organism lacking the activity of said protein, preferably the nucleic acid molecules as mentioned in table I, application no. 20, columns 5 and 7 alone or preferably in combination with a transit peptide for example as mentioned in table V or in another embodiment by introducing said nucleic acid molecules into an organelle such as an plastid or mitochondria in the transgenic organism. However, it is also possible to modify the expression of the gene which is naturally present in the organisms, for example by integrating a nucleic acid sequence, encoding a plastidic targeting sequence in front (5 prime) of the coding sequence, leading to a functional preprotein, which is directed for example to the plastids.

[5329] for the disclosure of the paragraphs [0053.0.0.19] to [0058.0.0.19] see paragraphs [0053.0.0.0] to [0058.0.0.0] above.

[5330] In case the activity of the Escherichia coli protein b0146 or its homologs, e.g. a “sugar fermentation stimulation protein” is increased advantageously in an organelle such as a plastid or mitochondria, preferably, in one embodiment an increase of the fine chemical, preferably of starch and/or cellulose in free or bound form between 39% and 73% or more is conferred.

In case the activity of the Escherichia coli protein b0342 or its homologs, e.g. a “thiogalactoside acetyltransferase” is increased advantageously in an organelle such as a plastid or mitochondria, preferably, in one embodiment an increase of the fine chemical, preferably of starch and/or cellulose in free or bound form between 34% and 69% or more is conferred.
In case the activity of the Escherichia coli protein b0523 or its homologs, e.g. a “phosphoribosylaminoimidazole carboxylase=AIR carboxylase, catalytic subunit” is increased advantageously in an organelle such as a plastid or mitochondria, preferably, in one embodiment an increase of the fine chemical, preferably of starch and/or cellulose in free or bound form between 49% and 78% or more is conferred.
In case the activity of the Escherichia coli protein b0598 or its homologs, e.g. a “carbon starvation protein” is increased advantageously in an organelle such as a plastid or mitochondria, preferably, in one embodiment an increase of the fine chemical, preferably of glucose in free or bound form between 58% and 104% or more is conferred.
In case the activity of the Escherichia coli protein b0644 or its homologs, e.g. a “uncharacterized protein” is increased advantageously in an organelle such as a plastid or mitochondria, preferably, in one embodiment an increase of the fine chemical, preferably of starch and/or cellulose in free or bound form between 37% and 66% or more is conferred.
In case the activity of the Escherichia coli protein b0760 or its homologs, e.g. a “ATP-binding component of molybdate transport system” is increased advantageously in an organelle such as a plastid or mitochondria, preferably, in one embodiment an increase of the fine chemical, preferably of glucose in free or bound form between 97% and 352% or more is conferred.
In case the activity of the Escherichia coli protein b1046 or its homologs, e.g. a “putative synthase with phospholipase D/nuclease domain” is increased advantageously in an organelle such as a plastid or mitochondria, preferably, in one embodiment an increase of the fine chemical, preferably of starch and/or cellulose in free or bound form between 31% and 82% or more is conferred.
In case the activity of the Escherichia coli protein b1095 or its homologs, e.g. a “3-oxoacyl-[acyl-carrier-protein] synthase II” is increased advantageously in an organelle such as a plastid or mitochondria, preferably, in one embodiment an increase of the fine chemical, preferably of fructose in free or bound form between 113% and 478% or more is conferred.
In case the activity of the Escherichia coli protein b1095 or its homologs, e.g. a “3-oxoacyl-[acyl-carrier-protein] synthase II” is increased advantageously in an organelle such as a plastid or mitochondria, preferably, in one embodiment an increase of the fine chemical, preferably of myo-inositol in free or bound form between 92% and 219% or more is conferred.
In case the activity of the Escherichia coli protein b1095 or its homologs, e.g. a “3-oxoacyl-[acyl-carrier-protein] synthase II” is increased advantageously in an organelle such as a plastid or mitochondria, preferably, in one embodiment an increase of the fine chemical, preferably of glucose in free or bound form between 72% and 358% or more is conferred.
In case the activity of the Escherichia coli protein b1095 or its homologs, e.g. a “3-oxoacyl-[acyl-carrier-protein] synthase II” is increased advantageously in an organelle such as a plastid or mitochondria, preferably, in one embodiment an increase of the fine chemical, preferably of glucose in free or bound form between 72% and 358% or more and/or of myo-inositol in free or bound form between 92% and 219% or more and/or of fructose in free or bound form between 113% and 478% or more is conferred.
In case the activity of the Escherichia coli protein b1136 or its homologs, e.g. a “isocitrate dehydrogenase (NADP)” is increased advantageously in an organelle such as a plastid or mitochondria, preferably, in one embodiment an increase of the fine chemical, preferably of starch and/or cellulose in free or bound form between 31% and 72% or more is conferred.
In case the activity of the Escherichia coli protein b1399 or its homologs, e.g. a “phenylacetic acid degradation operon negative regulatory protein paaX” is increased advantageously in an organelle such as a plastid or mitochondria, preferably, in one embodiment an increase of the fine chemical, preferably of myo-inositol in free or bound form between 27% and 108% or more is conferred.
In case the activity of the Escherichia coli protein b1410 or its homologs, e.g. a “putative methylase with S-adenosyl-L-methionine-dependent methyltransferase domain and alpha/beta-hydrolase domain” is increased advantageously in an organelle such as a plastid or mitochondria, preferably, in one embodiment an increase of the fine chemical, preferably of glucose in free or bound form between 57% and 377% or more is conferred.
In case the activity of the Escherichia coli protein b1410 or its homologs, e.g. a “putative methylase with S-adenosyl-L-methionine-dependent methyltransferase domain and alpha/beta-hydrolase domain” is increased advantageously in an organelle such as a plastid or mitochondria, preferably, in one embodiment an increase of the fine chemical, preferably of myo-inositol in free or bound form between 34% and 49% or more is conferred.
In case the activity of the Escherichia coli protein b1410 or its homologs, e.g. a “putative methylase with S-adenosyl-L-methionine-dependent methyltransferase domain and alpha/beta-hydrolase domain” is increased advantageously in an organelle such as a plastid or mitochondria, preferably, in one embodiment an increase of the fine chemical, preferably of fructose in free or bound form between 87% and 427% or more is conferred.
In case the activity of the Escherichia coli protein b1410 or its homologs, e.g. a “putative methylase with S-adenosyl-L-methionine-dependent methyltransferase domain and alpha/beta-hydrolase domain” is increased advantageously in an organelle such as a plastid or mitochondria, preferably, in one embodiment an increase of the fine chemical, preferably of glucose in free or bound form between 57% and 377% or more and/or of myo-inositol in free or bound form between 34% and 49% or more and/or of fructose in free or bound form between 87% and 427% or more is conferred.
In case the activity of the Escherichia coli protein b1556 or its homologs, e.g. a “Qin prophage” is increased advantageously in an organelle such as a plastid or mitochondria, preferably, in one embodiment an increase of the fine chemical, preferably of sucrose in free or bound form between 31% and 37% or more is conferred.
In case the activity of the Escherichia coli protein b1556 or its homologs, e.g. a “Qin prophage” is increased advantageously in an organelle such as a plastid or mitochondria, preferably, in one embodiment an increase of the fine chemical, preferably of myo-inositol between 25% and 207% or more is conferred.
In case the activity of the Escherichia coli protein b1556 or its homologs, e.g. a “Qin prophage” is increased advantageously in an organelle such as a plastid or mitochondria, preferably, in one embodiment an increase of the fine chemical, preferably of raffinose in free or bound form between 85% and 309% or more is conferred.
In case the activity of the Escherichia coli protein b1556 or its homologs, e.g. a “Qin prophage” is increased advantageously in an organelle such as a plastid or mitochondria, preferably, in one embodiment an increase of the fine chemical, preferably of sucrose in free or bound form between 31% and 37% or more and/or of myo-inositol between 25% and 207% or more and/or of raffinose in free or bound form between 85% and 309% or more is conferred.
In case the activity of the Escherichia coli protein b1704 or its homologs, e.g. a “3-deoxy-D-arabinoheptulosonate-7-phosphate synthase (DAHP synthetase), tryptophan-repressible” is increased advantageously in an organelle such as a plastid or mitochondria, preferably, in one embodiment an increase of the fine chemical, preferably of starch and/or cellulose in free or bound form between 24% and 101% or more is conferred.
In case the activity of the Escherichia coli protein b1980 or its homologs, e.g. a “uncharacterized transport protein” is increased advantageously in an organelle such as a plastid or mitochondria, preferably, in one embodiment an increase of the fine chemical, preferably of raffinose in free or bound form between 67% and 101% or more is conferred.
In case the activity of the Escherichia coli protein b2223 or its homologs, e.g. a “short chain fatty acid transporter” is increased advantageously in an organelle such as a plastid or mitochondria, preferably, in one embodiment an increase of the fine chemical, preferably of myo-inositol in free or bound form between 26% and 332% or more is conferred.
In case the activity of the Escherichia coli protein b2223 or its homologs, e.g. a “short chain fatty acid transporter” is increased advantageously in an organelle such as a plastid or mitochondria, preferably, in one embodiment an increase of the fine chemical, preferably of raffinose in free or bound form between 72% and 517% or more is conferred.
In case the activity of the Escherichia coli protein b2223 or its homologs, e.g. a “short chain fatty acid transporter” is increased advantageously in an organelle such as a plastid or mitochondria, preferably, in one embodiment an increase of the fine chemical, preferably of glucose in free or bound form between 60% and 520% or more is conferred.
In case the activity of the Escherichia coli protein b2223 or its homologs, e.g. a “short chain fatty acid transporter” is increased advantageously in an organelle such as a plastid or mitochondria, preferably, in one embodiment an increase of the fine chemical, preferably of myo-inositol in free or bound form between 26% and 332% or more and/or of raffinose in free or bound form between 72% and 517% or more and/or of glucose in free or bound form between 60% and 520% or more is conferred.
In case the activity of the Escherichia coli protein b2284 or its homologs, e.g. a “NADH2 dehydrogenase” is increased advantageously in an organelle such as a plastid or mitochondria, preferably, in one embodiment an increase of the fine chemical, preferably of starch and/or cellulose in free or bound form between 66% and 68% or more is conferred.
In case the activity of the Escherichia coli protein b2240 or its homologs, e.g. a “glycerol-3-phosphate transport protein” is increased advantageously in an organelle such as a plastid or mitochondria, preferably, in one embodiment an increase of the fine chemical, preferably of starch and/or cellulose in free or bound form between 31% and 90% or more is conferred.
In case the activity of the Escherichia coli protein b2965 or its homologs, e.g. a “ornithine decarboxylase” is increased advantageously in an organelle such as a plastid or mitochondria, preferably, in one embodiment an increase of the fine chemical, preferably of sucrose in free or bound form between 30% and 329% or more is conferred.
In case the activity of the Escherichia coli protein b3156 or its homologs, e.g. a “putative acyl-CoA N-acyltransferase” is increased advantageously in an organelle such as a plastid or mitochondria, preferably, in one embodiment an increase of the fine chemical, preferably of fructose in free or bound form between 114% and 197% or more is conferred.
In case the activity of the Escherichia coli protein b3708 or its homologs, e.g. a “tryptophan deaminase, PLP-dependent” is increased advantageously in an organelle such as a plastid or mitochondria, preferably, in one embodiment an increase of the fine chemical, preferably of raffinose in free or bound form between 61% and 249% or more is conferred.
In case the activity of the Saccharomyces cerevisiae protein YCR012W or its homologs, e.g. a “3-phosphoglycerate kinase” is increased advantageously in an organelle such as a plastid or mitochondria, preferably, in one embodiment an increase of the fine chemical, preferably of raffinose between 57% and 281% or more is conferred.
In case the activity of the Saccharomyces cerevisiae protein YDR035W or its homologs, e.g. a “3-deoxy-D-arabino-heptulosonate 7-phosphate (DAHP) synthase” is increased advantageously in an organelle such as a plastid or mitochondria, preferably, in one embodiment the increase of the fine chemical, preferably of raffinose between 71% and 440% or more is conferred.
In case the activity of the Saccharomyces cerevisiae protein YDR497C or its homologs, e.g. a “myo-inositol transporter” is increased, preferably, in one embodiment the increase of the fine chemical, preferably of fructose between 106% and 527% or more is conferred.
In case the activity of the Saccharomyces cerevisiae protein YDR497C or its homologs, e.g. a “myo-inositol transporter” is increased advantageously in an organelle such as a plastid or mitochondria, preferably, in one embodiment the increase of the fine chemical, preferably of myo-inositol between 26% and 29% or more is conferred.
In case the activity of the Saccharomyces cerevisiae protein YDR497C or its homologs, e.g. a “myo-inositol transporter” is increased advantageously in an organelle such as a plastid or mitochondria, preferably, in one embodiment the increase of the fine chemical, preferably of fructose between 106% and 527% or more and of myo-inositol between 26% and 29% or more is conferred.
In case the activity of the Saccharomyces cerevisiae protein YER063W or its homologs, e.g. a “uncharacterized protein” is increased advantageously in an organelle such as a plastid or mitochondria, preferably, in one embodiment an increase of the fine chemical, preferably of fructose between 68% and 80% or more is conferred.
In case the activity of the Saccharomyces cerevisiae protein YGL065C or its homologs, e.g. a “ALG2 protein precursor” is increased advantageously in an organelle such as a plastid or mitochondria, preferably, in one embodiment the increase of the fine chemical, preferably of myo-inositol between 12% and 23% or more is conferred.
In case the activity of the Saccharomyces cerevisiae protein YGL065C or its homologs, e.g. a “ALG2 protein precursor” is increased, preferably, in one embodiment the increase of the fine chemical, preferably of starch and/or cellulose between 40% and 47% or more is conferred.
In case the activity of the Saccharomyces cerevisiae protein YGL065C or its homologs, e.g. a “ALG2 protein precursor” is increased, preferably, in one embodiment the increase of the fine chemical, preferably of myo-inositol between 12% and 23% or more and of starch and/or cellulose between 40% and 47% or more is conferred.
In case the activity of the Saccharomyces cerevisiae protein YGR255C or its homologs, e.g. a “putative flavin-dependent monooxygenase, involved in ubiquinone (Coenzyme Q) biosynthesis” is increased advantageously in an organelle such as a plastid or mitochondria, preferably, in one embodiment the increase of the fine chemical, preferably of glucose between 82% and 394% or more is conferred.
In case the activity of the Saccharomyces cerevisiae protein YGR255C or its homologs, e.g. a “putative flavin-dependent monooxygenase, involved in ubiquinone (Coenzyme Q) biosynthesis” is increased advantageously in an organelle such as a plastid or mitochondria, preferably, in one embodiment the increase of the fine chemical, preferably of raffinose between 72% and 151% or more is conferred.
In case the activity of the Saccharomyces cerevisiae protein YGR255C or its homologs, e.g. a “putative flavin-dependent monooxygenase, involved in ubiquinone (Coenzyme Q) biosynthesis” is increased advantageously in an organelle such as a plastid or mitochondria, preferably, in one embodiment the increase of the fine chemical, preferably of glucose between 82% and 394% or more and of raffinose between 72% and 151% or more is conferred.
In case the activity of the Saccharomyces cerevisiae protein YGR262C or its homologs, e.g. a “protein involved in bud-site selection” is increased advantageously in an organelle such as a plastid or mitochondria, preferably, in one embodiment the increase of the fine chemical, preferably of fructose between 58% and 106% or more is conferred.
In case the activity of the Saccharomyces cerevisiae protein YGR262C or its homologs, e.g. a “protein involved in bud-site selection” is increased, preferably, in one embodiment the increase of the fine chemical, preferably of glucose between 65% and 77% or more is conferred.
In case the activity of the Saccharomyces cerevisiae protein YGR262C or its homologs, e.g. a “protein involved in bud-site selection” is increased, preferably, in one embodiment the increase of the fine chemical, preferably of fructose between 58% and 106% or more and of glucose between 65% and 77% or more is conferred.
In case the activity of the Saccharomyces cerevisiae protein YHR204W or its homologs, e.g. a “mannosidase like protein” is increased advantageously in an organelle such as a plastid or mitochondria, preferably, in one embodiment the increase of the fine chemical, preferably of myo-inositol between 30% and 52% or more is conferred.
In case the activity of the Saccharomyces cerevisiae protein YIR020W-A or its homologs, e.g. a “protein of unknown function” is increased advantageously in an organelle such as a plastid or mitochondria, preferably, in one embodiment the increase of the fine chemical, preferably of fructose between 84% and 107% or more is conferred.
In case the activity of the Saccharomyces cerevisiae protein YIR020W-A or its homologs, e.g. a “protein of unknown function” is increased advantageously in an organelle such as a plastid or mitochondria, preferably, in one embodiment the increase of the fine chemical, preferably of glucose between 46% and 87% or more is conferred.
In case the activity of the Saccharomyces cerevisiae protein YIR020W-A or its homologs, e.g. a “protein of unknown function” is increased advantageously in an organelle such as a plastid or mitochondria, preferably, in one embodiment the increase of the fine chemical, preferably of fructose between 84% and 107% or more and of glucose between 46% and 87% or more is conferred.
In case the activity of the Saccharomyces cerevisiae protein YJL139C or its homologs, e.g. a “mannosyltransferase of the KTR1 family, involved in protein N-glycosylation” is increased advantageously in an organelle such as a plastid or mitochondria, preferably, in one embodiment the increase of the fine chemical, preferably of myo-inositol between 27% and 135% or more is conferred.
In case the activity of the Saccharomyces cerevisiae protein YJL139C or its homologs, e.g. a “mannosyltransferase of the KTR1 family, involved in protein N-glycosylation” is increased advantageously in an organelle such as a plastid or mitochondria, preferably, in one embodiment the increase of the fine chemical, preferably of glucose between 64% and 157% or more is conferred.
In case the activity of the Saccharomyces cerevisiae protein YJL139C or its homologs, e.g. a “mannosyltransferase of the KTR1 family, involved in protein N-glycosylation” is increased advantageously in an organelle such as a plastid or mitochondria, preferably, in one embodiment the increase of the fine chemical, preferably of myo-inositol between 27% and 135% or more and of glucose between 64% and 157% or more is conferred.
In case the activity of the Saccharomyces cerevisiae protein YKR043C or its homologs, e.g. a “phosphoglycerate mutase like protein” is increased, preferably, in one embodiment the increase of the fine chemical, preferably of UDP-glucose between 66% and 72% or more is conferred.
In case the activity of the Saccharomyces cerevisiae protein YLL033W or its homologs, e.g. a “uncharacterized protein” is increased advantageously in an organelle such as a plastid or mitochondria, preferably, in one embodiment the increase of the fine chemical, preferably of raffinose between 81% and 82% or more is conferred.
In case the activity of the Saccharomyces cerevisiae protein YLR153C or its homologs, e.g. a “acetyl CoA synthetase” is increased advantageously in an organelle such as a plastid or mitochondria, preferably, in one embodiment the increase of the fine chemical, preferably of glucose between 64% and 306% or more is conferred.
In case the activity of the Saccharomyces cerevisiae protein YLR174W or its homologs, e.g. a “NADP-dependent isocitrate dehydrogenase” is increased advantageously in an organelle such as a plastid or mitochondria, preferably, in one embodiment the increase of the fine chemical, preferably of raffinose between 61% and 86% or more is conferred.
In case the activity of the Saccharomyces cerevisiae protein YLR174W or its homologs, e.g. a “NADP-dependent isocitrate dehydrogenase” is increased advantageously in an organelle such as a plastid or mitochondria, preferably, in one embodiment the increase of the fine chemical, preferably of myo-inositol between 25% and 32% or more is conferred.
In case the activity of the Saccharomyces cerevisiae protein YLR174W or its homologs, e.g. a “NADP-dependent isocitrate dehydrogenase” is increased advantageously in an organelle such as a plastid or mitochondria, preferably, in one embodiment the increase of the fine chemical, preferably of raffinose between 61% and 86% or more and of myo-inositol between 25% and 32% or more is conferred.
In case the activity of the Saccharomyces cerevisiae protein YNL022C or its homologs, e.g. a “uncharacterized protein” is increased advantageously in an organelle such as a plastid or mitochondria, preferably, in one embodiment the increase of the fine chemical, preferably of raffinose between 59% and 62% or more is conferred.
In case the activity of the Saccharomyces cerevisiae protein YNL241C or its homologs, e.g. a “glucose-6-phosphate dehydrogenase” is increased advantageously in an organelle such as a plastid or mitochondria, preferably, in one embodiment the increase of the fine chemical, preferably of glucose between 199% and 430% or more is conferred.
In case the activity of the Saccharomyces cerevisiae protein YNL241C or its homologs, e.g. a “glucose-6-phosphate dehydrogenase” is increased advantageously in an organelle such as a plastid or mitochondria, preferably, in one embodiment the increase of the fine chemical, preferably of fructose between 86% and 364% or more is conferred.
In case the activity of the Saccharomyces cerevisiae protein YNL241C or its homologs, e.g. a “glucose-6-phosphate dehydrogenase” is increased advantageously in an organelle such as a plastid or mitochondria, preferably, in one embodiment the increase of the fine chemical, preferably of of glucose between 199% and 430% or more and of fructose between 86% and 364% or more is conferred.
In case the activity of the Saccharomyces cerevisiae protein YNR012W or its homologs, e.g. a “uridine kinase” is increased advantageously in an organelle such as a plastid or mitochondria, preferably, in one embodiment the increase of the fine chemical, preferably of myo-inositol between 31% and 64% or more is conferred.
In case the activity of the Saccharomyces cerevisiae protein YOR353C or its homologs, e.g. a “protein required for cell morphogenesis and cell separation after mitosis; Sog2p” is increased advantageously in an organelle such as a plastid or mitochondria, preferably, in one embodiment the increase of the fine chemical, preferably of fructose between 78% and 287% or more is conferred.
In case the activity of the Saccharomyces cerevisiae protein YOR353C or its homologs, e.g. a “protein required for cell morphogenesis and cell separation after mitosis; Sog2p” is increased advantageously in an organelle such as a plastid or mitochondria, preferably, in one embodiment the increase of the fine chemical, preferably of glucose between 66% and 141% or more is conferred.
In case the activity of the Saccharomyces cerevisiae protein YOR353C or its homologs, e.g. a “protein required for cell morphogenesis and cell separation after mitosis; Sog2p” is increased advantageously in an organelle such as a plastid or mitochondria, preferably, in one embodiment the increase of the fine chemical, preferably of fructose between 78% and 287% or more and of glucose between 66% and 141% or more is conferred.
In case the activity of the Saccharomyces cerevisiae protein YPL138C or its homologs, e.g. a “compass (complex proteins associated with Set1p) component” is increased advantageously in an organelle such as a plastid or mitochondria, preferably, in one embodiment the increase of the fine chemical, preferably of starch and/or cellulose between 31% and 114% or more is conferred.
In case the activity of the Saccharomyces cerevisiae protein YPR035W or its homologs, e.g. a “glutamine synthetase” is increased advantageously in an organelle such as a plastid or mitochondria, preferably, in one embodiment the increase of the fine chemical, preferably of myo-inositol between 27% and 365% or more is conferred. In case the activity of the Saccharomyces cerevisiae protein YPR035W or its homologs, e.g. a “glutamine synthetase” is increased advantageously in an organelle such as a plastid or mitochondria, preferably, in one embodiment the increase of the fine chemical, preferably of raffinose between 102% and 125% or more is conferred.
In case the activity of the Saccharomyces cerevisiae protein YPR035W or its homologs, e.g. a “glutamine synthetase” is increased advantageously in an organelle such as a plastid or mitochondria, preferably, in one embodiment the increase of the fine chemical, preferably of myo-inositol between 27% and 365% or more and of raffinose between 102% and 125% or more is conferred.

[5331] In case the activity of the Escherichia coli proteins b0146, b0342, b0523, b0598, b0644, b0760, b1046, b1095, b1136, b1399, b1410, b1556, b1704, b1980, b2223, b2240, b2284, b2965, b3156 b3708 or their homologs, are increased advantageously in an organelle such as a plastid or mitochondria, preferably an increase of the fine chemical such as starch and/cellulose, glucose, fructose, myo-inositol, sucrose, raffinose or mixtures thereof in free or bound formis conferred.

In case the activity of the Saccharomyces cerevisiae protein YCR012W, YDR035W, YDR497C, YER063W, YGL065C, YGR255C, YGR262C, YHR204W, YIR020W-A, YJL139C, YKR043C, YLL033W, YLR153C, YLR174W, YNL022C, YNL241C, YNR012W, YOR353C, YPL138C and/or YPR035W or their homologs, are increased advantageously in an organelle such as a plastid or mitochondria, preferably an increase of the fine chemical such as starch and/cellulose, glucose, UDP-glucose, fructose, myo-inositol, sucrose, raffinose or mixtures thereof in free or bound form is conferred.

[5332] for the disclosure of the paragraphs [0061.0.0.19] and [0062.0.0.19] see paragraphs [0061.0.0.0] and [0062.0.0.0] above.

[5333] A protein having an activity conferring an increase in the amount or level of the fine chemical, preferably upon targeting to the plastids preferably has the structure of the polypeptide described herein, in particular of the polypeptides comprising the consensus sequence shown in table IV, application no. 20, column 7 or of the polypeptide as shown in the amino acid sequences as disclosed in table II, application no. 20, columns 5 and 7 or the functional homologues thereof as described herein, or is encoded by the nucleic acid molecule characterized herein or the nucleic acid molecule according to the invention, for example by the nucleic acid molecule as shown in table I, application no. 20, columns 5 and 7 or its herein described functional homologues and has the herein mentioned activity.

[5334] /

[5335] for the disclosure of the paragraphs [0065.0.0.19] and [0066.0.0.19] see paragraphs [0065.0.0.0] and [0066.0.0.0] above.

[5336] In one embodiment, the process of the present invention comprises one or more of the following steps
[5337] a) stabilizing a protein conferring the increased expression of a protein encoded by the nucleic acid molecule of the invention or of the polypeptide of the invention, e.g. of a polypeptide having the activity of a protein as indicated in table II, application no. 20, columns 5 and 7 or its homologs activity having herein-mentioned starch and/cellulose, glucose, UDP-glucose, fructose, myo-inositol, sucrose and/or raffinose increasing activity; and/or
[5338] b) stabilizing a mRNA conferring the increased expression of a protein encoded by the nucleic acid molecule of the invention, which is in the sense of the invention a fusion of a nucleic acid sequence encoding a transit peptide and of a nucleic acid sequence as shown in table I, application no. 20, columns 5 and 7, e.g. a nucleic acid sequence encoding a polypeptide having the activity of a protein as indicated in table II, application no. 20, columns 5 and 7 or its homologs activity or of a mRNA encoding the polypeptide of the present invention having herein-mentioned starch and/cellulose, glucose, UDP-glucose, fructose, myo-inositol, sucrose and/or raffinose increasing activity; and/or
[5339] c) increasing the specific activity of a protein conferring the increased expression of a protein encoded by the nucleic acid molecule of the invention or of the polypeptide of the present invention having herein-mentioned starch and/cellulose, glucose, UDP-glucose, fructose, myo-inositol, sucrose and/or raffinose increasing activity, e.g. of a polypeptide having the activity of a protein as indicated in table II, application no. 20, columns 5 and 7 or its homologs activity, or decreasing the inhibitory regulation of the polypeptide of the invention; and/or
[5340] d) generating or increasing the expression of an endogenous or artificial transcription factor mediating the expression of a protein conferring the increased expression of a protein encoded by the nucleic acid molecule of the invention or of the polypeptide of the invention having herein-mentioned starch and/cellulose, glucose, UDP-glucose, fructose, myo-inositol, sucrose and/or raffinose increasing activity, e.g. of a polypeptide having the activity of a protein as indicated in table II, application no. 20, columns 5 and 7 or its homologs activity; and/or
[5341] e) stimulating activity of a protein conferring the increased expression of a protein encoded by the nucleic acid molecule of the present invention or a polypeptide of the present invention having herein-mentioned starch and/cellulose, glucose, UDP-glucose, fructose, myo-inositol, sucrose and/or raffinose increasing activity, e.g. of a polypeptide having the activity of a protein as indicated in table II, application no. 20, columns 5 and 7 or its homologs activity, by adding one or more exogenous inducing factors to the organisms or parts thereof; and/or
[5342] f) expressing a transgenic gene encoding a protein conferring the increased expression of a polypeptide encoded by the nucleic acid molecule of the present invention or a polypeptide of the present invention, having herein-mentioned starch and/cellulose, glucose, UDP-glucose, fructose, myo-inositol, sucrose and/or raffinose increasing activity, e.g. of a polypeptide having the activity of a protein as indicated in table II, application no. 20, columns 5 and 7 or its homologs activity, and/or
[5343] g) increasing the copy number of a gene conferring the increased expression of a nucleic acid molecule encoding a polypeptide encoded by the nucleic acid molecule of the invention or the polypeptide of the invention having herein-mentioned starch and/cellulose, glucose, UDP-glucose, fructose, myo-inositol, sucrose and/or raffinose increasing activity, e.g. of a polypeptide having the activity of a protein as indicated in table II, application no. 20, columns 5 and 7 or its homologs activity; and/or
[5344] h) increasing the expression of the endogenous gene encoding the polypeptide of the invention, e.g. a polypeptide having the activity of a protein as indicated in table II, application no. 20, columns 5 and 7 or its homologs activity, by adding positive expression or removing negative expression elements, e.g. homologous recombination can be used to either introduce positive regulatory elements like for plants the 35S enhancer into the promoter or to remove repressor elements form regulatory regions. Further gene conversion methods can be used to disrupt repressor elements or to enhance to activity of positive elements. Positive elements can be randomly introduced in plants by T-DNA or transposon mutagenesis and lines can be identified in which the positive elements have be integrated near to a gene of the invention, the expression of which is thereby enhanced; and/or
[5345] i) modulating growth conditions of an organism in such a manner, that the expression or activity of the gene encoding the protein of the invention or the protein itself is enhanced for example microorganisms or plants can be grown for example under a higher temperature regime leading to an enhanced expression of heat shock proteins, which can lead an enhanced fine chemical production; and/or
[5346] j) selecting of organisms with especially high activity of the proteins of the invention from natural or from mutagenized resources and breeding them into the target organisms, eg the elite crops; and/or
[5347] k) directing a protein encoded by the nucleic acid molecule of the invention or of the polypeptide of the present invention having herein-mentioned starch and/cellulose, glucose, UDP-glucose, fructose, myo-inositol, sucrose and/or raffinose increasing activity, e.g. of polypeptide having the activity of a protein as indicated in table II, application no. 20, columns 5 and 7 or its homologs activity, to the plastids by the addition of a plastidial targeting sequence; and/or
[5348] l) generating the expression of a protein encoded by the nucleic acid molecule of the invention or of the polypeptide of the present invention having herein-mentioned starch and/cellulose, glucose, UDP-glucose, fructose, myo-inositol, sucrose and/or raffinose increasing activity, e.g. of a polypeptide having the activity of a protein as indicated in table II, application no. 20, columns 5 and 7 or its homologs activity in plastids by the stable or transient transformation advantageously stable transformation of organelles preferably plastids with an inventive nucleic acid sequence preferably in form of an expression cassette containing said sequence leading to the plastidial expression of the nucleic acids or polypeptides of the invention; and/or
[5349] m) generating the expression of a protein encoded by the nucleic acid molecule of the invention or of the polypeptide of the present invention having herein-mentioned starch and/cellulose, glucose, UDP-glucose, fructose, myo-inositol, sucrose and/or raffinose increasing activity, e.g. of a polypeptide having the activity of a protein as indicated in table II, application no. 20, columns 5 and 7 or its homologs activity in plastids by integration of a nucleic acid of the invention into the plastidal genome under control of preferable a plastidial promoter.

[5350] Preferably, said mRNA is the nucleic acid molecule of the present invention and/or the protein conferring the increased expression of a protein encoded by the nucleic acid molecule of the present invention alone or link to a transit nucleic acid sequence or transit peptide encoding nucleic acid sequence or the polypeptide having the herein mentioned activity, e.g. conferring the increase of the fine chemical after increasing the expression or activity of the encoded polypeptide preferably in organelles such as plastids or having the activity of a polypeptide having an activity as the protein as shown in table II, application no. 20, column 3 or its homologs. Preferably the increase of the fine chemical takes place in plastids.

[5351] for the disclosure of the paragraphs [0069.0.0.19] to [0079.0.0.19] see paragraphs [0069.0.0.0] to [0079.0.0.0] above.

[5352] The activation of an endogenous polypeptide having above-mentioned activity, e.g. having the activity of a protein as shown in table II, application no. 20, column 3 or of the polypeptide of the invention, e.g. conferring the increase of the fine chemical after increase of expression or activity in the cytsol and/or in an organelle like a plastid, preferentially in the plastid, can also be increased by introducing a synthetic transcription factor, which binds close to the coding region of the gene encoding the protein as shown in table II, application no. 20, column 3 and activates its transcription. A chimeric zinc finger protein can be constructed, which comprises a specific DNA-binding domain and an activation domain as e.g. the VP16 domain of Herpes Simplex virus. The specific binding domain can bind to the regulatory region of the gene encoding the protein as shown in table II, application no. 20, column 3. The expression of the chimeric transcription factor in a organism, in particular in a plant, leads to a specific expression of the protein as shown in table II, application no. 20, column 3, see e.g. in WO01/52620, Oriz, Proc. Natl. Acad. Sci. USA, 2002, Vol. 99, 13290 or Guan, Proc. Natl. Acad. Sci. USA, 2002, Vol. 99, 13296.

[5353] for the disclosure of the paragraphs [0081.0.0.19] to [0084.0.0.19] see paragraphs [0081.0.0.0] to [0084.0.0.0] above.

[5354] Owing to the introduction of a gene or a plurality of genes conferring the expression of the nucleic acid molecule of the invention or the nucleic acid molecule used in the method of the invention or the polypeptide of the invention or the polypeptide used in the method of the invention as described below, for example the nucleic acid construct mentioned below into an organism alone or in combination with other genes, it is possible not only to increase the biosynthetic flux towards the end product, but also to increase, modify or create de novo an advantageous, preferably novel metabolites composition in the organism, e.g. starch and/cellulose, glucose, UDP-glucose, fructose, myo-inositol, sucrose or raffinose in free or bound form and mixtures thereof.

[5355] for the disclosure of this paragraph see paragraph [0086.0.0.0] above.

[5356] By influencing the metabolism thus, it is possible to produce, in the process according to the invention, further advantageous compounds. Examples of such compounds are, in addition to starch and/cellulose, glucose, UDP-glucose, fructose, myo-inositol, sucrose and/or raffinose compounds such as other sugars such as galactose, mannose, xylose, maltose or cellobiose, sugar alcohols such as ribitol, amino sugars such as α-D-glucosamine or α-D-N-acetylglucosamine and/or sugar acids such as glucoronic acid, vitamins, amino acids or fatty acids.

[5357] Accordingly, in one embodiment, the process according to the invention relates to a process, which comprises:
[5358] a) providing a non-human organism, preferably a microorganism, a non-human animal, a plant or animal cell, a plant or animal tissue or a plant, more preferably a microorganism, a plant or a plant tissue;
[5359] b) increasing the activity of a protein as shown in table II, application no. 20, column 3 or of a polypeptide being encoded by the nucleic acid molecule of the present invention and described below, e.g. conferring an increase of the fine chemical in the organism, preferably in the microorganism, the non-human animal, the plant or animal cell, the plant or animal tissue or the plant, more preferably a microorganism, a plant or a plant tissue, in the cytsol or in the plastids, preferentially in the plastids,
[5360] c) growing the organism, preferably the microorganism, the non-human animal, the plant or animal cell, the plant or animal tissue or the plant under conditions which permit the production of the fine chemical in the organism, preferably the microorganism, the plant cell, the plant tissue or the plant; and
[5361] d) if desired, recovering, optionally isolating, the free and/or bound the fine chemical and, optionally further free and/or bound amino acids synthesized by the organism, the microorganism, the non-human animal, the plant or animal cell, the plant or animal tissue or the plant.

[5362] The organism, in particular the microorganism, non-human animal, the plant or animal cell, the plant or animal tissue or the plant is advantageously grown in such a way that it is not only possible to recover, if desired isolate the free or bound the fine chemical or the free and bound the fine chemical but as option it is also possible to produce, recover and, if desired isolate, in addition other free or/and bound sugars such as galactose, mannose, xylose, maltose or cellobiose or mixtures thereof.

The organism such as microorganisms or plants or the recovered, and if desired isolated, respective fine chemical can then be processed further directly into foodstuffs or animal feeds or for other applications in nutrition or medicine or cosmetics, for example according to the disclosures made in U.S. Pat. No. 6,669,962 (Starch microcapsules for delivery of active agents); US 20050042737 (Starch process); US 20050054071 (Enzymes for starch processing); US 20050091716 (Novel plants and processes for obtaining them); U.S. Pat. No. 5,096,594 and U.S. Pat. No. 5,482,631 discloses a method of purifying cyclitols;
U.S. Pat. No. 4,997,489 discloses soaking almond hulls in water to obtain a syrup containing fructose, glucose, inositol, and sorbitol; U.S. Pat. No. 5,296,364 discloses a microbial method for producing inositol; U.S. Pat. No. 4,734,402; U.S. Pat. No. 4,788,065; U.S. Pat. No. 6,465,037 and U.S. Pat. No. 6,355,295 relates to soy food ingredient based on carbohydrates, U.S. Pat. No. 6,653,451; US 20040128713: pertains to soybean plants having in their seeds significantly lower contents of raffinose, stachyose and phytic acid and significantly higher contents of sucrose and inorganic phosphate; US 20050008713 discloses compositions of plant carbohydrates for dietary supplements and nutritional support; which are expressly incorporated herein by reference. The fermentation broth, fermentation products, plants or plant products can be treated and processed as described in above mentioned applications or by other methods known to the person skilled in the art and described herein below.
In the method for producing carbohydrates, preferably polysaccharides, more preferably starch and/or cellulose and/or monosaccharides, more preferably fructose, glucose and/or myo-inositol and/or trisaccharides, more preferably raffinose and/or disaccharides, more preferably sucrose and/or glucose, derivatives preferably anhydroglucose and/or UDP-glucose according to the invention, the cultivation step of the genetically modified organisms, also referred to as transgenic organisms hereinbelow, is preferably followed by harvesting said organisms and isolating the respective carbohydrate(s) from said organisms.
The organisms are harvested in a manner known per se and appropriate for the particular organism. Microorganisms such as bacteria, mosses, yeasts and fungi or plant cells which are cultured in liquid media by fermentation may be removed, for example, by centrifugation, decanting or filtration. Plants are grown on solid media in a manner known per se and harvested accordingly.
Carbohydrates, preferably polysaccharides, more preferably starch and/or cellulose and/or monosaccharides, more preferably fructose, glucose and/or myo-inositol and/or trisaccharides, more preferably raffinose and/or disaccharides, more preferably sucrose, derivatives preferably anhydroglucose and/or UDP-glucose are isolated from the harvested biomass in a manner known per se, for example by extraction and, where appropriate, further chemical or physical purification processes such as, for example, chemical and/or enzymatical degradation, precipitation methods, crystallography, thermal separation methods such as rectification methods or physical separation methods such as, for example, chromatography.
Products of these different work-up procedures are carbohydrates, preferably polysaccharides, more preferably starch and/or cellulose and/or monosaccharides, more preferably fructose, glucose and/or myo-inositol and/or trisaccharides, more preferably raffinose and/or disaccharides, more preferably sucrose, derivatives preferably anhydroglucose and/or UDP-glucose comprising compositions, e.g. compostions comprising carbohydrates, preferably polysaccharides, more preferably starch and/or cellulose and/or monosaccharides, more preferably fructose, glucose and/or myo-inositol and/or
trisaccharides, more preferably raffinose and/or disaccharides, more preferably sucrose, derivatives preferably anhydroglucose and/or UDP-glucose which still comprise fermentation broth, plant particles and/or cell components in different amounts, advantageously in the range of from 0 to 99% by weight, preferably below 80% by weight, especially preferably between 50%, 40%, 30%, 20%, 20%, 10%, 5%, 3%, 2%, 1%, 05%, 0.1%, 0.01% and 0% by weight resp.
In one embodiment, preferred plants include, but are not limited to: sugar beet, sugar cane, soybeans, wheat, corn, rice and/or potato (Solanum tuberosum).

[5363] for the disclosure of the paragraphs [0090.0.0.19] to [0097.0.0.19] see paragraphs [0090.0.0.0] to [0097.0.0.0] above.

[5364] With regard to the nucleic acid sequence as depicted a nucleic acid construct which contains a nucleic acid sequence mentioned herein or an organism (=transgenic organism) which is transformed with said nucleic acid sequence or said nucleic acid construct, “transgene” means all those constructs which have been brought about by genetic manipulation methods, preferably in which either
[5365] a) the nucleic acid sequence as shown in table I, application no. 20, columns 5 and 7 or a derivative thereof, or
[5366] b) a genetic regulatory element, for example a promoter, which is functionally linked to the nucleic acid sequence as shown table I, application no. 20, columns 5 and 7 or a derivative thereof, or
[5367] c) (a) and (b)
   is/are not present in its/their natural genetic environment or has/have been modified by means of genetic manipulation methods, it being possible for the modification to be, by way of example, a substitution, addition, deletion, inversion or insertion of one or more nucleotide. “Natural genetic environment” means the natural chromosomal locus in the organism of origin or the presence in a genomic library. In the case of a genomic library, the natural, genetic environment of the nucleic acid sequence is preferably at least partially still preserved. The environment flanks the nucleic acid sequence at least on one side and has a sequence length of at least 50 bp, preferably at least 500 bp, particularly preferably at least 1000 bp, very particularly preferably at least 5000 bp.

[5368] The use of the nucleic acid sequence according to the invention or of the nucleic acid construct according to the invention for the generation of transgenic plants is therefore also subject matter of the invention. As mentioned above the inventive nucleic acid sequence consists advantageously of the nucleic acid sequences as depicted in the sequence protocol and disclosed in table I, application no. 20, columns 5 and 7 joined to a nucleic acid sequence encoding a transit peptide, or a targeting nucleic acid sequence which directs the nucleic acid sequences disclosed in table I, application no. 20, columns 5 and 7 to the organelle preferentially the plastids. Alternatively the inventive nucleic acids sequences consist advantageously of the nucleic acid sequences as depicted in the sequence protocol and disclosed in table I, application no. 20, columns 5 and 7 joined preferably to a nucleic acids sequence mediating the stable integration of nucleic acids into the plastidial genome and optionally sequences mediating the transcription of the sequence in the plastidial compartment. A transient expression is in principal also desirable and possible.

[5369] for the disclosure of this paragraph see paragraph [0100.0.0.0] above.

[5370] In an advantageous embodiment of the invention, the organism takes the form of a plant whose starch and/cellulose, glucose, UDP-glucose, fructose, myo-inositol, sucrose and/or raffinose content is modified advantageously owing to the nucleic acid molecule of the present invention expressed. This is important for plant breeders since, for example, the nutritional value of plants for animals and humans is dependent on the abovementioned carbohydrates and the general amount of saccharides such as starch and/cellulose, glucose, UDP-glucose, fructose, myo-inositol, sucrose and/or raffinose and the general amount of starch and/cellulose, glucose, UDP-glucose, fructose, myo-inositol, sucrose and/or raffinose for example as energy source in food and feed. After the activity of the protein as shown in table II, application no. 20, column 3 has been increased or generated, or after the expression of nucleic acid molecule or polypeptide according to the invention has been generated or increased, the transgenic plant generated thus is grown on or in a nutrient medium or else in the soil and subsequently harvested.

[5371] for the disclosure of the paragraphs [0102.0.0.19] to [0110.0.0.19] see paragraphs [0102.0.0.0] to [0110.0.0.0] above.

[5372] In a preferred embodiment, the fine chemical (starch and/cellulose, glucose, UDP-glucose, fructose, myo-inositol, sucrose and/or raffinose) is produced in accordance with the invention and, if desired, is isolated. The production of further sugars such as such as galactose, mannose, xylose, maltose or cellobiose or mixtures thereof or mixtures of other sugars by the process according to the invention is advantageous. It may be advantageous to increase the pool of free sugars such as starch and/cellulose, glucose, UDP-glucose, fructose, myo-inositol, sucrose and/or raffinose and other sugars as aforementioned in the transgenic organisms by the process according to the invention in order to isolate high amounts of the pure fine chemical.

[5373] In another preferred embodiment of the invention a combination of the increased expression of the nucleic acid sequence or the protein of the invention together with the transformation of a nucleic acid encoding a protein or polypeptide for example another gene encoding a protein of the carbohydrate metabolism such as starch and/cellulose, glucose, UDP-glucose, fructose, myo-inositol, sucrose and/or raffinose biosynthesis, or a compound, which functions as a sink for the desired starch and/cellulose, glucose, UDP-glucose, fructose, myo-inositol, sucrose and/or raffinose in the organism is useful to increase the production of the respective fine chemical.

[5374] In a preferred embodiment, the respective fine chemical is produced in accordance with the invention and, if desired, is isolated. The production of further sugars other than starch and/cellulose, glucose, UDP-glucose, fructose, myo-inositol, sucrose and/or raffinose or compounds for which the respective fine chemicals are a biosynthesis precursor compounds, e.g. organic acids such as pyruvic acid, oxaloacetic acid, citric acid, cis-aconic acid, iso-citric acid, alpha-ketoglutaric acid, succinic acid, fumaric acid or malic acid, amino acids, fatty acids or mixtures thereof and/or other chemical compounds derived from sugars or mixtures with other carbohydrates such as sugars like galactose, mannose, xylose, maltose or cellobiose, in particular of galactose, mannose, xylose, maltose or cellobiose or mixtures thereof, by the process according to the invention is advantageous.

[5375] In the case of the fermentation of microorganisms, the abovementioned carbohydrates, preferably polysaccharides, more preferably starch and/or cellulose and/or monosaccharides, more preferably fructose, glucose and/or myo-inositol and/or trisaccharides, more preferably raffinose and/or disaccharides, more preferably sucrose, and/or glucose derivatives such as UDP-glucose or anhydroglucose may accumulate in the medium and/or the cells. If microorganisms are used in the process according to the invention, the fermentation broth can be processed after the cultivation. Depending on the requirement, all or some of the biomass can be removed from the fermentation broth by separation methods such as, for example, centrifugation, filtration, decanting or a combination of these methods, or else the biomass can be left in the fermentation broth. The fermentation broth can subsequently be reduced, or concentrated, with the aid of known methods such as, for example, rotary evaporator, thin-layer evaporator, falling film evaporator, by reverse osmosis or by nanofiltration. Afterwards advantageously further compounds for formulation can be added such as corn starch or silicates. This concentrated fermentation broth advantageously together with compounds for the formulation can subsequently be processed by lyophilization, spray drying, and spray granulation or by other methods. Preferably the respective fine chemical or the carbohydrates, preferably polysaccharides, more preferably starch and/or cellulose and/or monosaccharides, more preferably fructose, glucose and/or myo-inositol and/or trisaccharides, more preferably raffinose and/or disaccharides, more preferably sucrose, and/or glucose derivatives such as UDP-glucose or anhydroglucose compositions are isolated from the organisms, such as the microorganisms or plants or the culture medium in or on which the organisms have been grown, or from the organism and the culture medium, in the known manner, for example via extraction, distillation, crystallization, chromatography or a combination of these methods. These purification methods can be used alone or in combination with the aforementioned methods such as the separation and/or concentration methods.

[5376] Transgenic plants which comprise the fine chemical such as starch and/cellulose, glucose, UDP-glucose, fructose, myo-inositol, sucrose and/or raffinose synthesized in the process according to the invention can advantageously be marketed directly without there being any need for the fine chemical synthesized to be isolated. Plants for the process according to the invention are listed as meaning intact plants and all plant parts, plant organs or plant parts such as leaf, stem, seeds, root, tubers, anthers, fibers, root hairs, stalks, embryos, calli, cotelydons, petioles, flowers, harvested material, plant tissue, reproductive tissue and cell cultures which are derived from the actual transgenic plant and/or can be used for bringing about the transgenic plant. In this context, the seed comprises all parts of the seed such as the seed coats, epidermal cells, seed cells, endosperm or embryonic tissue.

However, the respective fine chemical produced in the process according to the invention can also be isolated from the organisms, advantageously plants, (in the form of carbohydrate containing aqueous solutions, containing starch and/cellulose, glucose, UDP-glucose, fructose, myo-inositol, sucrose and/or raffinose. The respective fine chemical produced by this process can be obtained by harvesting the organisms, either from the medium in which they grow, or from the field. This can be done via pressing, crushing or extraction of the plant parts. The crushing process must break up the hard nodes of the sugar cane and flatten the stems. In the event sugar beets are used for the process the plant is sliced and the sugar is extracted with hot water. The sugar containing juice is collected and filtered. Afterwards the juice is treated with chemicals to remove impurities. Thereafter the juice is boiled to drive off excess water. The sugar is then extracted by controlled crystallisation. The sugar crystals are removed for example by a centrifuge and the liquid recycled in the crystalliser stages. To increase the efficiency of extraction it is beneficial to clean, to temper and if necessary to hull and to flake the plant material. In the case of microorganisms, the latter are, after harvesting, for example extracted directly without further processing steps or else, after disruption, extracted via various methods with which the skilled worker is familiar. Thereafter, the resulting products can be processed further.
Well-established approaches for the harvesting of cells include filtration, centrifugation and coagulation/flocculation as described herein.

[5377] Carbohydrates, preferably polysaccharides, more preferably starch and/or cellulose or their “analytes” such as anhydroglucose and/or monosaccharides, more preferably fructose, glucose and/or myo-inositol and/or trisaccharides, more preferably raffinose and/or disaccharides, more preferably sucrose can for example be analyzed advantageously via HPLC or GC separation methods and detected by MS oder MSMS methods. The unambiguous detection for the presence of carbohydrates, preferably polysaccharides, more preferably starch and/or cellulose or their analytes such as anhydroglucose and/or monosaccharides, more preferably fructose, glucose and/or myo-inositol and/or trisaccharides, more preferably raffinose and/or disaccharides, more preferably sucrose containing products can be obtained by analyzing recombinant organisms using analytical standard methods: GC, GC-MS, LC, LC-MSMS or TLC, as described on several occasions. The carbohydrates can be analized further in plant extracts by anion-exchange chromatography with pulsed amperometric detection (Cataldi et al., Anal Chem.; 72(16):3902-7, 2000), by enzymatic “BioAnalysis” usind test kits from R-Biopharm and Roche or from Megazyme, Ireland.

[5378] Carbohydrates can for example be detected advantageously via HPLC with reversed phase columns. The unambiguous detection for the presence of carbohydrates products can be obtained by analyzing recombinant organisms using analytical standard methods like HPLC-MS or HPLC-MSMS.

[5379] In a preferred embodiment, the present invention relates to a process for the production of the fine chemical comprising or generating in an organism or a part thereof, preferably in a cell compartment such as a plastid or mitochondria, the expression of at least one nucleic acid molecule comprising a nucleic acid molecule selected from the group consisting of:
[5380] a) nucleic acid molecule encoding, preferably at least the mature form, of the polypeptide shown in table II, application no. 20, columns 5 and 7 or a fragment thereof, which confers an increase in the amount of the fine chemical in an organism or a part thereof;
[5381] b) nucleic acid molecule comprising, preferably at least the mature form, of the nucleic acid molecule shown in table I, application no. 20, columns 5 and 7;
[5382] c) nucleic acid molecule whose sequence can be deduced from a polypeptide sequence encoded by a nucleic acid molecule of (a) or (b) as result of the degeneracy of the genetic code and conferring an increase in the amount of the fine chemical in an organism or a part thereof;
[5383] d) nucleic acid molecule encoding a polypeptide which has at least 50% identity with the amino acid sequence of the polypeptide encoded by the nucleic acid molecule of (a) to (c) and conferring an increase in the amount of the fine chemical in an organism or a part thereof;
[5384] e) nucleic acid molecule which hybridizes with a nucleic acid molecule of (a) to (c) under stringent hybridisation conditions and conferring an increase in the amount of the fine chemical in an organism or a part thereof;
[5385] f) nucleic acid molecule encoding a polypeptide, the polypeptide being derived by substituting, deleting and/or adding one or more amino acids of the amino acid sequence of the polypeptide encoded by the nucleic acid molecules (a) to (d), preferably to (a) to (c) and conferring an increase in the amount of the fine chemical in an organism or a part thereof;
[5386] g) nucleic acid molecule encoding a fragment or an epitope of a polypeptide which is encoded by one of the nucleic acid molecules of (a) to (e), preferably to (a) to (c) and conferring an increase in the amount of the fine chemical in an organism or a part thereof;
[5387] h) nucleic acid molecule comprising a nucleic acid molecule which is obtained by amplifying nucleic acid molecules from a cDNA library or a genomic library using the primers shown in table III, application no. 20, column 7 and conferring an increase in the amount of the fine chemical in an organism or a part thereof;
[5388] i) nucleic acid molecule encoding a polypeptide which is isolated, e.g. from an expression library, with the aid of monoclonal antibodies against a polypeptide encoded by one of the nucleic acid molecules of (a) to (h), preferably to (a) to (c), and conferring an increase in the amount of the fine chemical in an organism or a part thereof;
[5389] j) nucleic acid molecule which encodes a polypeptide comprising the consensus sequence shown in table IV, application no. 20, column 7 and conferring an increase in the amount of the fine chemical in an organism or a part thereof;
[5390] k) nucleic acid molecule comprising one or more of the nucleic acid molecule encoding the amino acid sequence of a polypeptide encoding a domain of the polypeptide shown in table II, application no. 20, columns 5 and 7 and conferring an increase in the amount of the fine chemical in an organism or a part thereof; and
[5391] l) nucleic acid molecule which is obtainable by screening a suitable library under stringent conditions with a probe comprising one of the sequences of the nucleic acid molecule of (a) to (k), preferably to (a) to (c), or with a fragment of at least 15 nt, preferably 20 nt, 30 nt, 50 nt, 100 nt, 200 nt or 500 nt of the nucleic acid molecule characterized in (a) to (k), preferably to (a) to (c), and conferring an increase in the amount of the fine chemical in an organism or a part thereof;
   or which comprises a sequence which is complementary thereto.

[5392] In one embodiment, the nucleic acid molecule used in the process of the invention distinguishes over the sequence indicated in table I A, application no. 20, columns 5 and 7 by one or more nucleotides. In one embodiment, the nucleic acid molecule used in the process of the invention does not consist of the sequence indicated in table I A, application no. 20, columns 5 and 7. In one embodiment, the nucleic acid molecule used in the process of the invention is less than 100%, 99.999%, 99.99%, 99.9% or 99% identical to a sequence indicated in table I A, application no. 20, columns 5 and 7. In another embodiment, the nucleic acid molecule does not encode a polypeptide of a sequence indicated in table II A, application no. 20, columns 5 and 7.

[5393] In one embodiment, the nucleic acid molecule used in the process of the invention distinguishes over the sequence indicated in table I B, application no. 20, columns 5 and 7, by one or more nucleotides. In one embodiment, the nucleic acid molecule used in the process of the invention does not consist of the sequence indicated in table I B, application no. 20, columns 5 and 7. In one embodiment, the nucleic acid molecule used in the process of the invention is less than 100%, 99.999%, 99.99%, 99.9% or 99% identical to a sequence indicated in table I B, application no. 20, columns 5 and 7. In another embodiment, the nucleic acid molecule does not encode a polypeptide of a sequence indicated in table II B, application no. 20, columns 5 and 7.

[5394] In one embodiment, the nucleic acid molecule used in the process distinguishes over the sequence shown in table I, application no. 20, columns 5 and 7 by one or more nucleotides or does not consist of the sequence shown in table I, application no. 20, columns 5 and 7. In one embodiment, the nucleic acid molecule of the present invention is less than 100%, 99.999%, 99.99%, 99.9% or 99% identical to the sequence shown in table I, application no. 20, columns 5 and 7. In another embodiment, the nucleic acid molecule does not encode a polypeptide of the sequence shown in table II, application no. 20, columns 5 and 7.

[5395] for the disclosure of the paragraphs [0118.0.0.19] to [0120.0.0.19] see paragraphs [0118.0.0.0] to [0120.0.0.0] above.

[5396] Nucleic acid molecules with the sequence shown in table I, application no. 20, columns 5 and 7, nucleic acid molecules which are derived from the amino acid sequences shown in table II, application no. 20, columns 5 and 7 or from polypeptides comprising the consensus sequence shown in table IV, application no. 20, column 7, or their derivatives or homologues encoding polypeptides with the enzymatic or biological activity of a protein as shown in table II, application no. 20, column 3 or conferring the fine chemical increase after increasing its expression or activity are advantageously increased in the process according to the invention by expression either in the cytsol or in an organelle such as a plastid or mitochondria or both, preferably in plastids.

[5397] for the disclosure of this paragraph see paragraph [0122.0.0.0] above.

[5398] Nucleic acid molecules, which are advantageous for the process according to the invention and which encode polypeptides with the activity of a protein as shown in table II, application no. 20, column 3 can be determined from generally accessible databases.

[5399] for the disclosure of this paragraph see paragraph [0124.0.0.0] above.

[5400] The nucleic acid molecules used in the process according to the invention take the form of isolated nucleic acid sequences, which encode polypeptides with the activity of the proteins as shown in table II, application no. 20, column 3 and conferring the fine chemical increase by expression either in the cytsol or in an organelle such as a plastid or mitochondria or both, preferably in plastids.

[5401] for the disclosure of the paragraphs [0126.0.0.19] to [0133.0.0.19] see paragraphs [0126.0.0.0] to [0133.0.0.0] above.

[5402] However, it is also possible to use artificial sequences, which differ in one or more bases from the nucleic acid sequences found in organisms, or in one or more amino acid molecules from polypeptide sequences found in organisms, in particular from the polypeptide sequences shown in table II, application no. 20, columns 5 and 7 or the functional homologues thereof as described herein, preferably conferring above-mentioned activity, i.e. conferring the fine chemical increase after increasing its activity, e.g. after increasing the activity of a protein as shown in table II, application no.

[5403] 20, column 3 by for example expression either in the cytsol or in an organelle such as a plastid or mitochondria or both, preferably in plastids.

[5404] for the disclosure of the paragraphs [0135.0.0.19] to [0140.0.0.19] see paragraphs [0135.0.0.0] to [0140.0.0.0] above.

[5405] Synthetic oligonucleotide primers for the amplification, e.g. as shown in table III, application no. 20, column 7, by means of polymerase chain reaction can be generated on the basis of a sequence shown herein, for example the sequence shown in table I, application no. 20, columns 5 and 7 or the sequences derived from table II, application no. 20, columns 5 and 7.

[5406] Moreover, it is possible to identify conserved regions from various organisms by carrying out protein sequence alignments with the polypeptide used in the process of the invention, in particular with sequences of the polypeptide of the invention, from which conserved regions, and in turn, degenerate primers can be derived. Conserved regions are those, which show a very little variation in the amino acid in one particular position of several homologs from different origin. The consensus sequence shown in table IV, application no. 20, column 7 is derived from said alignments.

[5407] Degenerated primers can then be utilized by PCR for the amplification of fragments of novel proteins having above-mentioned activity, e.g. conferring the increase of the fine chemical after increasing the expression or activity or having the activity of a protein as shown in table II, application no. 20, column 3 or further functional homologs of the polypeptide of the invention from other organisms.

[5408] for the disclosure of the paragraphs [0144.0.0.19] to [0151.0.0.19] see paragraphs [0144.0.0.0] to [0151.0.0.0] above.

[5409] Polypeptides having above-mentioned activity, i.e. conferring the fine chemical increase, derived from other organisms, can be encoded by other DNA sequences which hybridize to the sequences shown in table I, application no. 20, columns 5 and 7, preferably of table I B, application no. 20, columns 5 and 7 under relaxed hybridization conditions and which code on expression for peptides having the starch and/cellulose, glucose, UDP-glucose, fructose, myo-inositol, sucrose and/or raffinose increasing activity.

[5410] for the disclosure of the paragraphs [0153.0.0.19] to [0159.0.0.19] see paragraphs [0153.0.0.0] to [0159.0.0.0] above.

[5411] Further, the nucleic acid molecule of the invention comprises a nucleic acid molecule, which is a complement of one of the nucleotide sequences of above mentioned nucleic acid molecules or a portion thereof. A nucleic acid molecule which is complementary to one of the nucleotide sequences shown in table I, application no. 20, columns 5 and 7, preferably shown in table I B, application no. 20, columns 5 and 7 is one which is sufficiently complementary to one of the nucleotide sequences shown in table I, application no. 20, columns 5 and 7, preferably shown in table I B, application no. 20, columns 5 and 7 such that it can hybridize to one of the nucleotide sequences shown in table I, application no. 20, columns 5 and 7, preferably shown in table I B, application no. 20, columns 5 and 7, thereby forming a stable duplex. Preferably, the hybridisation is performed under stringent hybridization conditions. However, a complement of one of the herein disclosed sequences is preferably a sequence complement thereto according to the base pairing of nucleic acid molecules well known to the skilled person. For example, the bases A and G undergo base pairing with the bases T and U or C, resp. and visa versa. Modifications of the bases can influence the base-pairing partner.

[5412] The nucleic acid molecule of the invention comprises a nucleotide sequence which is at least about 30%, 35%, 40% or 45%, preferably at least about 50%, 55%, 60% or 65%, more preferably at least about 70%, 80%, or 90%, and even more preferably at least about 95%, 97%, 98%, 99% or more homologous to a nucleotide sequence shown in table I, application no. 20, columns 5 and 7, preferably shown in table I B, application no. 20, columns 5 and 7, or a portion thereof and preferably has above mentioned activity, in particular having a fine chemical increasing activity after increasing the activity or an activity of a gene product as shown in table II, application no. 20, column 3 by for example expression either in the cytsol or in an organelle such as a plastid or mitochondria or both, preferably in plastids.

[5413] The nucleic acid molecule of the invention comprises a nucleotide sequence which hybridizes, preferably hybridizes under stringent conditions as defined herein, to one of the nucleotide sequences shown in table I, application no. 20, columns 5 and 7, preferably shown in table I B, application no. 20, columns 5 and 7, or a portion thereof and encodes a protein having above-mentioned activity, e.g. conferring of a starch and/cellulose, glucose, UDP-glucose, fructose, myo-inositol, sucrose and/or raffinose increase by for example expression either in the cytsol or in an organelle such as a plastid or mitochondria or both, preferably in plastids, and optionally, the activity of a protein as shown in table II, application no. 20, column 3.

[5414] Moreover, the nucleic acid molecule of the invention can comprise only a portion of the coding region of one of the sequences shown in table I, application no. 20, columns 5 and 7, preferably shown in table I B, application no. 20, columns 5 and 7, for example a fragment which can be used as a probe or primer or a fragment encoding a biologically active portion of the polypeptide of the present invention or of a polypeptide used in the process of the present invention, i.e. having above-mentioned activity, e.g. conferring an increase of the fine chemical if its activity is increased by for example expression either in the cytsol or in an organelle such as a plastid or mitochondria or both, preferably in plastids. The nucleotide sequences determined from the cloning of the present protein-according-to-the-invention-encoding gene allows for the generation of probes and primers designed for use in identifying and/or cloning its homologues in other cell types and organisms. The probe/primer typically comprises substantially purified oligonucleotide. The oligonucleotide typically comprises a region of nucleotide sequence that hybridizes under stringent conditions to at least about 12, 15 preferably about 20 or 25, more preferably about 40, 50 or 75 consecutive nucleotides of a sense strand of one of the sequences set forth, e.g., in table I, application no. 20, columns 5 and 7, an anti-sense sequence of one of the sequences, e.g., set forth in table I, application no. 20, columns 5 and 7, preferably shown in table I B, application no. 20, columns 5 and 7, or naturally occurring mutants thereof. Primers based on a nucleotide of invention can be used in PCR reactions to clone homologues of the polypeptide of the invention or of the polypeptide used in the process of the invention, e.g. as the primers described in the examples of the present invention, e.g. as shown in the examples. A PCR with the primers shown in table Ill, application no. 20, column 7 will result in a fragment of the gene product as shown in table II, column 3.

[5415] for the disclosure of this paragraph see paragraph [0164.0.0.0] above.

[5416] The nucleic acid molecule of the invention encodes a polypeptide or portion thereof which includes an amino acid sequence which is sufficiently homologous to the amino acid sequence shown in table II, application no. 20, columns 5 and 7 such that the protein or portion thereof maintains the ability to participate in the fine chemical production, in particular a starch and/cellulose, glucose, UDP-glucose, fructose, myo-inositol, sucrose and/or raffinose increasing activity as mentioned above or as described in the examples in plants or microorganisms is comprised.

[5417] As used herein, the language “sufficiently homologous” refers to proteins or portions thereof which have amino acid sequences which include a minimum number of identical or equivalent amino acid residues (e.g., an amino acid residue which has a similar side chain as an amino acid residue in one of the sequences of the polypeptide of the present invention) to an amino acid sequence shown in table II, application no. 20, columns 5 and 7 such that the protein or portion thereof is able to participate in the increase of the fine chemical production. For examples having the activity of a protein as shown in table II, column 3 and as described herein.

[5418] In one embodiment, the nucleic acid molecule of the present invention comprises a nucleic acid that encodes a portion of the protein of the present invention. The protein is at least about 30%, 35%, 40%, 45% or 50%, preferably at least about 55%, 60%, 65% or 70%, and more preferably at least about 75%, 80%, 85%, 90%, 91%, 92%, 93% or 94% and most preferably at least about 95%, 97%, 98%, 99% or more homologous to an entire amino acid sequence of table II, application no. 20, columns 5 and 7 and having above-mentioned activity, e.g. conferring preferably the increase of the fine chemical by for example expression either in the cytsol or in an organelle such as a plastid or mitochondria or both, preferably in plastids.

[5419] for the disclosure of the paragraphs [0168.0.0.19] and [0169.0.0.19] see paragraphs [0168.0.0.0] and [0169.0.0.0] above.

[5420] The invention further relates to nucleic acid molecules that differ from one of the nucleotide sequences shown in table I, application no. 20, columns 5 and 7 (and portions thereof) due to degeneracy of the genetic code and thus encode a polypeptide of the present invention, in particular a polypeptide having above mentioned activity, e.g. conferring an increase in the fine chemical in a organism, e.g. as that polypeptides depicted by the sequence shown in table II, application no. 20, columns 5 and 7 or the functional homologues. Advantageously, the nucleic acid molecule of the invention comprises, or in an other embodiment has, a nucleotide sequence encoding a protein comprising, or in an other embodiment having, an amino acid sequence shown in table II, application no. 20, columns 5 and 7 or the functional homologues. In a still further embodiment, the nucleic acid molecule of the invention encodes a full length protein which is substantially homologous to an amino acid sequence shown in table II, application no. 20, columns 5 and 7 or the functional homologues. However, in a preferred embodiment, the nucleic acid molecule of the present invention does not consist of the sequence shown in table I, application no. 20, columns 5 and 7, preferably as indicated in table I A, application no. 20, columns 5 and 7. Preferably the nucleic acid molecule of the invention is a functional homologue or identical to a nucleic acid molecule indicated in table I B, application no. 20, columns 5 and 7.

[5421] for the disclosure of the paragraphs [0171.0.0.19] to [0173.0.0.19] see paragraphs [0171.0.0.0] to [0173.0.0.0] above.

[5422] Accordingly, in another embodiment, a nucleic acid molecule of the invention is at least 15, 20, 25 or 30 nucleotides in length. Preferably, it hybridizes under stringent conditions to a nucleic acid molecule comprising a nucleotide sequence of the nucleic acid molecule of the present invention or used in the process of the present invention, e.g. comprising the sequence shown in table I, application no. 20, columns 5 and 7. The nucleic acid molecule is preferably at least 20, 30, 50, 100, 250 or more nucleotides in length.

[5423] for the disclosure of this paragraph see paragraph [0175.0.0.0] above.

[5424] Preferably, nucleic acid molecule of the invention that hybridizes under stringent conditions to a sequence shown in table I, application no. 20, columns 5 and 7 corresponds to a naturally-occurring nucleic acid molecule of the invention. As used herein, a “naturally-occurring” nucleic acid molecule refers to an RNA or DNA molecule having a nucleotide sequence that occurs in nature (e.g., encodes a natural protein). Preferably, the nucleic acid molecule encodes a natural protein having abovementioned activity, e.g. conferring the fine chemical increase after increasing the expression or activity thereof or the activity of a protein of the invention or used in the process of the invention by for example expression the nucleic acid sequence of the gene product in the cytsol and/or in an organelle such as a plastid or mitochondria, preferably in plastids.

[5425] for the disclosure of this paragraph see paragraph [0177.0.0.0] above.

[5426] For example, nucleotide substitutions leading to amino acid substitutions at “non-essential” amino acid residues can be made in a sequence of the nucleic acid molecule of the invention or used in the process of the invention, e.g. shown in table I, application no. 20, columns 5 and 7.

[5427] for the disclosure of the paragraphs [0179.0.0.19] and [0180.0.0.19] see paragraphs [0179.0.0.0] and [0180.0.0.0] above.

[5428] Accordingly, the invention relates to nucleic acid molecules encoding a polypeptide having above-mentioned activity, e.g. conferring an increase in the fine chemical in an organisms or parts thereof by for example expression either in the cytsol or in an organelle such as a plastid or mitochondria or both, preferably in plastids that contain changes in amino acid residues that are not essential for said activity. Such polypeptides differ in amino acid sequence from a sequence contained in the sequences shown in table II, application no. 20, columns 5 and 7, preferably shown in table II A, application no. 20, columns 5 and 7 yet retain said activity described herein. The nucleic acid molecule can comprise a nucleotide sequence encoding a polypeptide, wherein the polypeptide comprises an amino acid sequence at least about 50% identical to an amino acid sequence shown in table II, application no. 20, columns 5 and 7, preferably shown in table II A, application no. 20, columns 5 and 7 and is capable of participation in the increase of production of the fine chemical after increasing its activity, e.g. its expression by for example expression either in the cytsol or in an organelle such as a plastid or mitochondria or both, preferably in plastids. Preferably, the protein encoded by the nucleic acid molecule is at least about 60% identical to the sequence shown in table II, application no. 20, columns 5 and 7, preferably shown in table II A, application no. 20, columns 5 and 7, more preferably at least about 70% identical to one of the sequences shown in table II, application no. 20, columns 5 and 7, preferably shown in table II A, application no. 20, columns 5 and 7, even more preferably at least about 80%, 90%, 95% homologous to the sequence shown in table II, application no. 20, columns 5 and 7, preferably shown in table II A, application no. 20, columns 5 and 7, and most preferably at least about 96%, 97%, 98%, or 99% identical to the sequence shown in table II, application no. 20, columns 5 and 7, preferably shown in table II A, application no. 20, columns 5 and 7.

[5429] for the disclosure of the paragraphs [0182.0.0.19] to [0188.0.0.19] see paragraphs [0182.0.0.0] to [0188.0.0.0] above.

[5430] Functional equivalents derived from one of the polypeptides as shown in table II, application no. 20, columns 5 and 7, preferably shown in table II B, application no. 20, columns 5 and 7 resp., according to the invention by substitution, insertion or deletion have at least 30%, 35%, 40%, 45% or 50%, preferably at least 55%, 60%, 65% or 70% by preference at least 80%, especially preferably at least 85% or 90%, 91%, 92%, 93% or 94%, very especially preferably at least 95%, 97%, 98% or 99% homology with one of the polypeptides as shown in table II, application no. 20, columns 5 and 7, preferably shown in table II B, application no. 20, columns 5 and 7 resp., according to the invention and are distinguished by essentially the same properties as the polypeptide as shown in table II, application no. 20, columns 5 and 7, preferably shown in table II B, application no. 20, columns 5 and 7.

[5431] Functional equivalents derived from the nucleic acid sequence as shown in table I, application no. 20, columns 5 and 7, preferably shown in table I B, application no. 20, columns 5 and 7 resp., according to the invention by substitution, insertion or deletion have at least 30%, 35%, 40%, 45% or 50%, preferably at least 55%, 60%, 65% or 70% by preference at least 80%, especially preferably at least 85% or 90%, 91%, 92%, 93% or 94%, very especially preferably at least 95%, 97%, 98% or 99% homology with one of the polypeptides as shown in table II, application no. 20, columns 5 and 7, preferably shown in table II B, application no. 20, columns 5 and 7 resp., according to the invention and encode polypeptides having essentially the same properties as the polypeptide as shown in table II, application no. 20, columns 5 and 7, preferably shown in table II B, application no. 20, columns 5 and 7.

[5432] for the disclosure of this paragraph see paragraph [0191.0.0.0] above.

[5433] A nucleic acid molecule encoding an homologous to a protein sequence of table II, application no. 20, columns 5 and 7, preferably shown in table II B, application no. 20, columns 5 and 7 resp., can be created by introducing one or more nucleotide substitutions, additions or deletions into a nucleotide sequence of the nucleic acid molecule of the present invention, in particular of table I, application no. 20, columns 5 and 7, preferably shown in table I B, application no. 20, columns 5 and 7 resp., such that one or more amino acid substitutions, additions or deletions are introduced into the encoded protein. Mutations can be introduced into the encoding sequences of table I, application no. 20, columns 5 and 7, preferably shown in table I B, application no. 20, columns 5 and 7 resp., by standard techniques, such as site-directed mutagenesis and PCR-mediated mutagenesis.

[5434] for the disclosure of the paragraphs [0193.0.0.19] to [0196.0.0.19] see paragraphs [0193.0.0.0] to [0196.0.0.0] above.

[5435] Homologues of the nucleic acid sequences used, with the sequence shown in table I, application no. 20, columns 5 and 7, preferably shown in table I B, application no. 20, columns 5 and 7, comprise also allelic variants with at least approximately 30%, 35%, 40% or 45% homology, by preference at least approximately 50%, 60% or 70%, more preferably at least approximately 90%, 91%, 92%, 93%, 94% or 95% and even more preferably at least approximately 96%, 97%, 98%, 99% or more homology with one of the nucleotide sequences shown or the abovementioned derived nucleic acid sequences or their homologues, derivatives or analogues or parts of these. Allelic variants encompass in particular functional variants which can be obtained by deletion, insertion or substitution of nucleotides from the sequences shown, preferably from table I, application no. 20, columns 5 and 7, preferably shown in table I B, application no. 20, columns 5 and 7, or from the derived nucleic acid sequences, the intention being, however, that the enzyme activity or the biological activity of the resulting proteins synthesized is advantageously retained or increased.

[5436] In one embodiment of the present invention, the nucleic acid molecule of the invention or used in the process of the invention comprises the sequences shown in any of the table I, application no. 20, columns 5 and 7, preferably shown in table I B, application no. 20, columns 5 and 7. It is preferred that the nucleic acid molecule comprises as little as possible other nucleotides not shown in any one of table I, application no. 20, columns 5 and 7, preferably shown in table I B, application no. 20, columns 5 and 7. In one embodiment, the nucleic acid molecule comprises less than 500, 400, 300, 200, 100, 90, 80, 70, 60, 50 or 40 further nucleotides. In a further embodiment, the nucleic acid molecule comprises less than 30, 20 or 10 further nucleotides. In one embodiment, the nucleic acid molecule use in the process of the invention is identical to the sequences shown in table I, application no. 20, columns 5 and 7, preferably shown in table I B, application no. 20, columns 5 and 7.

[5437] Also preferred is that the nucleic acid molecule used in the process of the invention encodes a polypeptide comprising the sequence shown in table II, application no. 20, columns 5 and 7, preferably shown in table II B, application no. 20, columns 5 and 7. In one embodiment, the nucleic acid molecule encodes less than 150, 130, 100, 80, 60, 50, 40 or 30 further amino acids. In a further embodiment, the encoded polypeptide comprises less than 20, 15, 10, 9, 8, 7, 6 or 5 further amino acids. In one embodiment used in the inventive process, the encoded polypeptide is identical to the sequences shown in table II, application no. 20, columns 5 and 7, preferably shown in table II B, application no. 20, columns 5 and 7.

[5438] In one embodiment, the nucleic acid molecule of the invention or used in the process encodes a polypeptide comprising the sequence shown in table II, application no. 20, columns 5 and 7, preferably shown in table II B, application no. 20, columns 5 and 7 comprises less than 100 further nucleotides. In a further embodiment, said nucleic acid molecule comprises less than 30 further nucleotides. In one embodiment, the nucleic acid molecule used in the process is identical to a coding sequence of the sequences shown in table I, application no. 20, columns 5 and 7, preferably shown in table I B, application no. 20, columns 5 and 7.

[5439] Polypeptides (=proteins), which still have the essential biological or enzymatic activity of the polypeptide of the present invention conferring an increase of the fine chemical i.e. whose activity is essentially not reduced, are polypeptides with at least 10% or 20%, by preference 30% or 40%, especially preferably 50% or 60%, very especially preferably 80% or 90 or more of the wild type biological activity or enzyme activity, advantageously, the activity is essentially not reduced in comparison with the activity of a polypeptide shown in table II, application no. 20, columns 5 and 7 expressed under identical conditions.

[5440] Homologues of table I, application no. 20, columns 5 and 7 or of the derived sequences of table II, application no. 20, columns 5 and 7 also mean truncated sequences, cDNA, single-stranded DNA or RNA of the coding and noncoding DNA sequence. Homologues of said sequences are also understood as meaning derivatives, which comprise noncoding regions such as, for example, UTRs, terminators, enhancers or promoter variants. The promoters upstream of the nucleotide sequences stated can be modified by one or more nucleotide substitution(s), insertion(s) and/or deletion(s) without, however, interfering with the functionality or activity either of the promoters, the open reading frame (=ORF) or with the 3′-regulatory region such as terminators or other 3′ regulatory regions, which are far away from the ORF. It is furthermore possible that the activity of the promoters is increased by modification of their sequence, or that they are replaced completely by more active promoters, even promoters from heterologous organisms. Appropriate promoters are known to the person skilled in the art and are mentioned herein below.

[5441] for the disclosure of the paragraphs [0203.0.0.19] to [0215.0.0.19] see paragraphs [0203.0.0.0] to [0215.0.0.0] above.

[5442] Accordingly, in one embodiment, the invention relates to a nucleic acid molecule, which comprises a nucleic acid molecule selected from the group consisting of:
[5443] a) nucleic acid molecule encoding, preferably at least the mature form, of the polypeptide shown in table II, application no. 20, columns 5 and 7, preferably in table II B, application no. 20, columns 5 and 7; or a fragment thereof conferring an increase in the amount of the fine chemical in an organism or a part thereof
[5444] b) nucleic acid molecule comprising, preferably at least the mature form, of the nucleic acid molecule shown in table I, application no. 20, columns 5 and 7, preferably in table I B, application no. 20, columns 5 and 7 or a fragment thereof conferring an increase in the amount of the fine chemical in an organism or a part thereof;
[5445] c) nucleic acid molecule whose sequence can be deduced from a polypeptide sequence encoded by a nucleic acid molecule of (a) or (b) as result of the degeneracy of the genetic code and conferring an increase in the amount of the fine chemical in an organism or a part thereof;
[5446] d) nucleic acid molecule encoding a polypeptide whose sequence has at least 50% identity with the amino acid sequence of the polypeptide encoded by the nucleic acid molecule of (a) to (c) and conferring an increase in the amount of the fine chemical in an organism or a part thereof;
[5447] e) nucleic acid molecule which hybridizes with a nucleic acid molecule of (a) to (c) under stringent hybridisation conditions and conferring an increase in the amount of the fine chemical in an organism or a part thereof;
[5448] f) nucleic acid molecule encoding a polypeptide, the polypeptide being derived by substituting, deleting and/or adding one or more amino acids of the amino acid sequence of the polypeptide encoded by the nucleic acid molecules (a) to (d), preferably to (a) to (c), and conferring an increase in the amount of the fine chemical in an organism or a part thereof;
[5449] g) nucleic acid molecule encoding a fragment or an epitope of a polypeptide which is encoded by one of the nucleic acid molecules of (a) to (e), preferably to (a) to (c) and conferring an increase in the amount of the fine chemical in an organism or a part thereof;
[5450] h) nucleic acid molecule comprising a nucleic acid molecule which is obtained by amplifying a cDNA library or a genomic library using the primers in table Ill, application no. 20, column 7 and conferring an increase in the amount of the fine chemical in an organism or a part thereof;
[5451] i) nucleic acid molecule encoding a polypeptide which is isolated, e.g. from a expression library, with the aid of monoclonal antibodies against a polypeptide encoded by one of the nucleic acid molecules of (a) to (g), preferably to (a) to (c) and conferring an increase in the amount of the fine chemical in an organism or a part thereof;
[5452] j) nucleic acid molecule which encodes a polypeptide comprising the consensus sequence shown in table IV, application no. 20, column 7 and conferring an increase in the amount of the fine chemical in an organism or a part thereof;
[5453] k) nucleic acid molecule encoding the amino acid sequence of a polypeptide encoding a domain of the polypeptide shown in table II, application no. 20, columns 5 and 7 and conferring an increase in the amount of the fine chemical in an organism or a part thereof; and
[5454] l) nucleic acid molecule which is obtainable by screening a suitable nucleic acid library under stringent hybridization conditions with a probe comprising one of the sequences of the nucleic acid molecule of (a) to (k) or with a fragment of at least 15 nt, preferably 20 nt, 30 nt, 50 nt, 100 nt, 200 nt or 500 nt of the nucleic acid molecule characterized in (a) to (h) or of the nucleic acid molecule shown in table I, application no. 20, columns 5 and 7 or a nucleic acid molecule encoding, preferably at least the mature form of, the polypeptide shown in table II, application no. 20, columns 5 and 7, and conferring an increase in the amount of the fine chemical in an organism or a part thereof; or which encompasses a sequence which is complementary thereto;
   whereby, preferably, the nucleic acid molecule according to (a) to (l) distinguishes over the sequence depicted in table I A and/or I B, application no. 20, columns 5 and 7 by one or more nucleotides. In one embodiment, the nucleic acid molecule of the invention does not consist of the sequence shown in table I A and/or I B, application no. 20, columns 5 and 7. In another embodiment, the nucleic acid molecule of the present invention is at least 30% identical and less than 100%, 99.999%, 99.99%, 99.9% or 99% identical to the sequence shown in table I A and/or I B, application no. 20, columns 5 and 7. In a further embodiment the nucleic acid molecule does not encode the polypeptide sequence shown in table II A and/or II B, application no. 20, columns 5 and 7. Accordingly, in one embodiment, the nucleic acid molecule of the present invention encodes in one embodiment a polypeptide which differs at least in one or more amino acids from the polypeptide shown in table II A and/or II B, application no. 20, columns 5 and 7 does not encode a protein of the sequence shown in table II A and/or II B, application no. 20, columns 5 and 7. Accordingly, in one embodiment, the protein encoded by a sequence of a nucleic acid according to (a) to (l) does not consist of the sequence shown in table IA and/or I B, application no. 20, columns 5 and 7. In a further embodiment, the protein of the present invention is at least 30% identical to protein sequence depicted in table II A and/or II B, application no. 20, columns 5 and 7 and less than 100%, preferably less than 99.999%, 99.99% or 99.9%, more preferably less than 99%, 985, 97%, 96% or 95% identical to the sequence shown in table II A and/or II B, application no. 20, columns 5 and 7.

[5455] for the disclosure of the paragraphs [0217.0.0.19] to [0226.0.0.19] see paragraphs [0217.0.0.0] to [0226.0.0.0] above.

[5456] In general, vector systems preferably also comprise further cis-regulatory regions such as promoters and terminators and/or selection markers by means of which suitably transformed organisms can be identified. While vir genes and T-DNA sequences are located on the same vector in the case of cointegrated vector systems, binary systems are based on at least two vectors, one of which bears vir genes, but no T-DNA, while a second one bears T-DNA, but no vir gene. Owing to this fact, the last-mentioned vectors are relatively small, easy to manipulate and capable of replication in E. coli and in Agrobacterium. These binary vectors include vectors from the series pBIB-HYG, pPZP, pBecks, pGreen. Those which are preferably used in accordance with the invention are Bin19, pB1101, pBinAR, pGPTV and pCAMBIA. An overview of binary vectors and their use is given by Hellens et al, Trends in Plant Science (2000) 5, 446-451. The vectors are preferably modified in such a manner, that they already contain the nucleic acid coding for the transitpeptide and that the nucleic acids of the invention, preferentially the nucleic acid sequences encoding the polypeptides shown in table II, application no. 20, columns 5 and 7 can be cloned 3″ prime to the transitpeptide encoding sequence, leading to a functional preprotein, which is directed to the plastids and which means that the mature protein fulfills its biological activity.

[5457] for the disclosure of the paragraphs [0228.0.0.19] to [0239.0.0.19] see paragraphs [0228.0.0.0] to [0239.0.0.0] above.

[5458] The abovementioned nucleic acid molecules can be cloned into the nucleic acid constructs or vectors according to the invention in combination together with further genes, or else different genes are introduced by transforming several nucleic acid constructs or vectors (including plasmids) into a host cell, advantageously into a plant cell or a microorganisms.

In addition to the sequence mentioned in Table I, application no. 20, columns 5 and 7 or its derivatives, it is advantageous additionally to express and/or mutate further genes in the organisms. Especially advantageously, additionally at least one further gene of the starch and/cellulose, glucose, UDP-glucose, fructose, myo-inositol, sucrose and/or raffinose biosynthetic pathway is expressed in the organisms such as plants or microorganisms. It is also possible that the regulation of the natural genes has been modified advantageously so that the gene and/or its gene product is no longer subject to the regulatory mechanisms which exist in the organisms. This leads to an increased synthesis of the respective desired fine chemical since, for example, feedback regulations no longer exist to the same extent or not at all. In addition it might be advantageously to combine the sequences shown in Table I, application no. 20, columns 5 and 7 with genes which generally support or enhances to growth or yield of the target organism, for example genes which lead to faster growth rate of microorganisms or genes which produces stress-, pathogen, or herbicide resistant plants.

[5459] In a further embodiment of the process of the invention, therefore, organisms are grown, in which there is simultaneous direct or indirect overexpression of at least one nucleic acid or one of the genes which code for proteins involved in the carbohydrate metabolism, in particular in synthesis of starch and/cellulose, glucose, UDP-glucose, fructose, myo-inositol, sucrose and/or raffinose. Indirect overexpression might be brought about by the manipulation of the regulation of the endogenous gene, for example through promoter mutations or the expression of natural or artificial transcriptional regulators.

[5460] Further advantageous nucleic acid sequences which can be expressed in combination with the sequences used in the process and/or the abovementioned biosynthesis genes are the sequences encoding further genes of the carbohydrate metabolism such as genes for glucose phosphate isomerase, triose phosphate isomerase, phosphoglycerate mutase, pyruvate kinase, fructokinase etc. It is also possible that the regulation of the natural genes has been modified advantageously so that the gene and/or its gene product is no longer subject to the regulatory mechanisms which exist in the organisms. This leads to an increased synthesis of the carbohydrates, preferably starch and/cellulose, glucose, UDP-glucose, fructose, myo-inositol, sucrose and/or raffinose, as desired since, for example, feedback regulations no longer exist to the same extent or not at all.

[5461] In a further advantageous embodiment of the process of the invention, the organisms used in the process are those in which advantageously simultaneously a starch and/cellulose, glucose, UDP-glucose, fructose, myo-inositol, sucrose and/or raffinose degrading protein is attenuated, in particular by reducing the rate of expression of the corresponding gene, or by inactivating the gene for example the mutagenesis and/or selection. In another advantageous embodiment the synthesis of competitive pathways which rely on the same precoursers are down regulated or interrupted.

[5462] The respective fine chemical produced can be isolated from the organism by methods with which the skilled worker are familiar, for example via extraction, salt precipitation, and/or different chromatography methods. The process according to the invention can be conducted batchwise, semibatchwise or continuously. The fine chemical and other carbohydrates produced by this process can be obtained by harvesting the organisms, either from the crop in which they grow, or from the field. This can be done via for example pressing or extraction of the plant parts.

[5463] Preferrably, the compound is a composition comprising the essentially pure starch and/cellulose, glucose, UDP-glucose, fructose, myo-inositol, sucrose and/or raffinose or a recovered or isolated starch and/cellulose, glucose, UDP-glucose, fructose, myo-inositol, sucrose and/or raffinose.

[5464] for the disclosure of the paragraphs [0243.0.0.19] to [0264.0.0.19] see paragraphs [0243.0.0.0] to [0264.0.0.0] above.

[5465] Other preferred sequences for use in operable linkage in gene expression constructs are targeting sequences, which are required for targeting the gene product into specific cell compartments (for a review, see Kermode, Crit. Rev. Plant Sci. 15, 4 (1996) 285-423 and references cited therein), for example into the vacuole, the nucleus, all types of plastids, such as amyloplasts, chloroplasts, chromoplasts, the extracellular space, the mitochondria, the endoplasmic reticulum, elaioplasts, peroxisomes, glycosomes, and other compartments of cells or extracellular preferred are sequences, which are involved in targeting to plastids as mentioned above. Sequences, which must be mentioned in this context are, in particular, the signal-peptide- or transit-peptide-encoding sequences which are known per se. For example, plastid-transit-peptide-encoding sequences enable the targeting of the expression product into the plastids of a plant cell. Targeting sequences are also known for eukaryotic and to a lower extent for prokaryotic organisms and can advantageously be operable linked with the nucleic acid molecule of the present invention as shown in table I, application no. 20, columns 5 and 7 and described herein to achieve an expression in one of said compartments or extracellular.

[5466] for the disclosure of the paragraphs [0266.0.0.19] to [0287.0.0.19] see paragraphs [0266.0.0.0] to [0287.0.0.0] above.

[5467] Accordingly, one embodiment of the invention relates to a vector where the nucleic acid molecule according to the invention is linked operably to regulatory sequences which permit the expression in a prokaryotic or eukaryotic or in a prokaryotic and eukaryotic host. A further preferred embodiment of the invention relates to a vector in which a nucleic acid sequence encoding one of the polypeptides shown in table II, application no. 20, columns 5 and 7 or their homologs is functionally linked to a plastidial targeting sequence. A further preferred embodiment of the invention relates to a vector in which a nucleic acid sequence encoding one of the polypeptides shown in table II, application no. 20, columns 5 and 7 or their homologs is functionally linked to a regulatory sequences which permit the expression in plastids.

[5468] for the disclosure of the paragraphs [0289.0.0.19] to [0296.0.0.19] see paragraphs [0289.0.0.0] to [0296.0.0.0] above.

[5469] Moreover, native polypeptide conferring the increase of the fine chemical in an organism or part thereof can be isolated from cells (e.g., endothelial cells), for example using the antibody of the present invention as described below, in particular, an anti-b0146, anti-b0342, anti-b0523, anti-b0598, anti-b0644, anti-b0760, anti-b1046, anti-b1095, anti-b1136, anti-b1399, anti-b1410, anti-b1556, anti-b1704, anti-b1980, anti-b2223, anti-b2240, anti-b2284, anti-b2965, anti-b3156, anti-b3708, anti-YCR012W, anti-YDR035W, anti-YDR497C, anti-YER063W, anti-YGL065C, anti-YGR255C, anti-YGR262C, anti-YHR204W, anti-YIR020W-A, anti-YJL139C, anti-YKR043C, anti-YLL033W, anti-YLR153C, anti-YLR174W, anti-YNL022C, anti-YNL241C, anti-YNR012W, anti-YOR353C, anti-YPL138C and/or anti-YPR035W protein antibody or an antibody against polypeptides as shown in table II, application no. 20, columns 5 and 7, which can be produced by standard techniques utilizing the polypeptide of the present invention or fragment thereof, i.e., the polypeptide of this invention. Preferred are monoclonal antibodies.

[5470] for the disclosure of this paragraph see paragraph [0298.0.0.0] above.

[5471] In one embodiment, the present invention relates to a polypeptide having the sequence shown in table II, application no. 20, columns 5 and 7 or as coded by the nucleic acid molecule shown in table I, application no. 20, columns 5 and 7 or functional homologues thereof.

[5472] In one advantageous embodiment, in the method of the present invention the activity of a polypeptide is increased comprising or consisting of the consensus sequence shown in table IV, application no. 20, columns 7 and in one another embodiment, the present invention relates to a polypeptide comprising or consisting of the consensus sequence shown in table IV, application no. 20, column 7 whereby 20 or less, preferably 15 or 10, preferably 9, 8, 7, or 6, more preferred 5 or 4, even more preferred 3, even more preferred 2, even more preferred 1, most preferred 0 of the amino acids positions indicated can be replaced by any amino acid.

[5473] for the disclosure of the paragraphs [0301.0.0.19] to [0304.0.0.19] see paragraphs [0301.0.0.0] to [0304.0.0.0] above.

[5474] In one advantageous embodiment, the method of the present invention comprises the increasing of a polypeptide comprising or consisting of plant or microorganism specific consensus sequences.

In one embodiment, said polypeptide of the invention distinguishes over the sequence shown in table II A and/or II B, application no. 20, columns 5 and 7 by one or more amino acids. In one embodiment, polypeptide distinguishes form the sequence shown in table II A and/or II B, application no. 20, columns 5 and 7 by more than 5, 6, 7, 8 or 9 amino acids, preferably by more than 10, 15, 20, 25 or 30 amino acids, even more preferred are more than 40, 50, or 60 amino acids and, preferably, the sequence of the polypeptide of the invention distinguishes from the sequence shown in table II A and/or II B, application no. 20, columns 5 and 7 by not more than 80% or 70% of the amino acids, preferably not more than 60% or 50%, more preferred not more than 40% or 30%, even more preferred not more than 20% or 10%. In an other embodiment, said polypeptide of the invention does not consist of the sequence shown in table II A and/or II B, application no. 20, columns 5 and 7.

[5475] for the disclosure of this paragraph see paragraph [0306.0.0.0] above.

[5476] In one embodiment, the invention relates to polypeptide conferring an increase in the fine chemical in an organism or part being encoded by the nucleic acid molecule of the invention or used in the process of the invention and having a sequence which distinguishes from the sequence as shown in table II A and/or II B, application no. 20, columns 5 and 7 by one or more amino acids. In another embodiment, said polypeptide of the invention does not consist of the sequence shown in table II A and/or II B, application no. 20, columns 5 and 7. In a further embodiment, said polypeptide of the present invention is less than 100%, 99.999%, 99.99%, 99.9% or 99% identical. In one embodiment, said polypeptide does not consist of the sequence encoded by the nucleic acid molecules shown in table I A and/or I B, application no. 20, columns 5 and 7.

[5477] In one embodiment, the present invention relates to a polypeptide having the activity of the protein as shown in table II A and/or II B, application no. 20, column 3, which distinguishes over the sequence depicted in table II A and/or II B, application no. 20, columns 5 and 7 by one or more amino acids, preferably by more than 5, 6, 7, 8 or 9 amino acids, preferably by more than 10, 15, 20, 25 or 30 amino acids, even more preferred are more than 40, 50, or 60 amino acids but even more preferred by less than 70% of the amino acids, more preferred by less than 50%, even more preferred my less than 30% or 25%, more preferred are 20% or 15%, even more preferred are less than 10%. In a further preferred embodiment the polypeptide of the invention takes the form of a preprotein consisting of a plastidial transitpeptide joint to a polypeptide having the activity of the protein as shown in table II A and/or II B, column 3, from which the transitpeptide is preferably cleaved off upon transport of the preprotein into the organelle for example into the plastid or mitochondria.

[5478] for the disclosure of the paragraphs [0309.0.0.19] to [0311.0.0.19] see paragraphs [0309.0.0.0] to [0311.0.0.0] above.

[5479] A polypeptide of the invention can participate in the process of the present invention. The polypeptide or a portion thereof comprises preferably an amino acid sequence, which is sufficiently homologous to an amino acid sequence shown in table II, application no. 20, columns 5 and 7.

[5480] Further, the polypeptide can have an amino acid sequence which is encoded by a nucleotide sequence which hybridizes, preferably hybridizes under stringent conditions as described above, to a nucleotide sequence of the nucleic acid molecule of the present invention. Accordingly, the polypeptide has an amino acid sequence which is encoded by a nucleotide sequence that is at least about 35%, 40%, 45%, 50%, 55%, 60%, 65% or 70%, preferably at least about 75%, 80%, 85% or 90, and more preferably at least about 91%, 92%, 93%, 94% or 95%, and even more preferably at least about 96%, 97%, 98%, 99% or more homologous to one of the amino acid sequences as shown in table II A and/or II B, application no. 20, columns 5 and 7. The preferred polypeptide of the present invention preferably possesses at least one of the activities according to the invention and described herein. A preferred polypeptide of the present invention includes an amino acid sequence encoded by a nucleotide sequence which hybridizes, preferably hybridizes under stringent conditions, to a nucleotide sequence of table I A and/or I B, application no. 20, columns 5 and 7 or which is homologous thereto, as defined above.

[5481] Accordingly the polypeptide of the present invention can vary from the sequences shown in table II A and/or II B, application no. 20, columns 5 and 7 in amino acid sequence due to natural variation or mutagenesis, as described in detail herein. Accordingly, the polypeptide comprise an amino acid sequence which is at least about 35%, 40%, 45%, 50%, 55%, 60%, 65% or 70%, preferably at least about 75%, 80%, 85% or 90, and more preferably at least about 91%, 92%, 93%, 94% or 95%, and most preferably at least about 96%, 97%, 98%, 99% or more homologous to an entire amino acid sequence shown in table II A and/or II B, application no. 20, columns 5 and 7.

[5482] for the disclosure of this paragraph see paragraph [0315.0.0.0] above.

[5483] Biologically active portions of an polypeptide of the present invention include peptides comprising amino acid sequences derived from the amino acid sequence of the polypeptide of the present invention or used in the process of the present invention, e.g., the amino acid sequence shown in table II, application no. 20, columns 5 and 7 or the amino acid sequence of a protein homologous thereto, which include fewer amino acids than a full length polypeptide of the present invention or used in the process of the present invention or the full length protein which is homologous to an polypeptide of the present invention or used in the process of the present invention depicted herein, and exhibit at least one activity of polypeptide of the present invention or used in the process of the present invention.

[5484] for the disclosure of this paragraph see paragraph [0317.0.0.0] above.

[5485] Manipulation of the nucleic acid molecule of the invention may result in the production of a protein having differences from the wild-type protein as shown in table II, application no. 20, column 3. Differences shall mean at least one amino acid different from the sequences as shown in table II, application no. 20, column 3, preferably at least 2, 3, 4, 5, 6, 7, 8, 9 or 10 amino acids, more preferably at least 15, 20, 25, 30, 35, 40, 45 or 50 amino acids different from the sequences as shown in table II, application no. 20, column 3. These proteins may be improved in efficiency or activity, may be present in greater numbers in the cell than is usual, or may be decreased in efficiency or activity in relation to the wild type protein.

[5486] Any mutagenesis strategies for the polypeptide of the present invention or the polypeptide used in the process of the present invention to result in increasing said activity are not meant to be limiting; variations on these strategies will be readily apparent to one skilled in the art. Using such strategies, and incorporating the mechanisms disclosed herein, the nucleic acid molecule and polypeptide of the invention may be utilized to generate plants or parts thereof, expressing wildtype proteins or mutated proteins of the proteins as shown in table II, application no. 20, column 3. The nucleic acid molecules and polypeptide molecules of the invention are expressed such that the yield, production, and/or efficiency of production of a desired compound is improved.

[5487] for the disclosure of the paragraphs [0320.0.0.19] to [0322.0.0.19] see paragraphs [0320.0.0.0] to [0322.0.0.0] above.

[5488] In one embodiment, a protein (=polypeptide) as shown in table II, application no. 20, column 3 refers to a polypeptide having an amino acid sequence corresponding to the polypeptide of the invention or used in the process of the invention, whereas a “non-inventive protein or polypeptide” or “other polypeptide” refers to a polypeptide having an amino acid sequence corresponding to a protein which is not substantially homologous to a polypeptide of the invention, preferably which is not substantially homologous to a polypeptide or protein as shown in table II, application no. 20, column 3, e.g., a protein which does not confer the activity described herein and which is derived from the same or a different organism.

[5489] for the disclosure of the paragraphs [0324.0.0.19] to [0329.0.0.19] see paragraphs [0324.0.0.0] to [0329.0.0.0] above.

[5490] In an especially preferred embodiment, the polypeptide according to the invention furthermore also does not have the sequences of those proteins, which are encoded by the sequences shown in table II, application no. 20, columns 5 and 7.

[5491] for the disclosure of the paragraphs [0331.0.0.19] to [0346.0.0.19] see paragraphs [0331.0.0.0] to [0346.0.0.0] above.

[5492] Accordingly the present invention relates to any cell transgenic for any nucleic acid characterized as part of the invention, e.g. conferring the increase of the fine chemical in a cell or an organism or a part thereof, e.g. the nucleic acid molecule of the invention, the nucleic acid construct of the invention, the antisense molecule of the invention, the vector of the invention or a nucleic acid molecule encoding the polypeptide of the invention, e.g. encoding a polypeptide having an activity as the protein as shown in table II, application no. 20, column 3. Due to the above mentioned activity the fine chemical content in a cell or an organism is increased. For example, due to modulation or manipulation, the cellular activity is increased preferably in organelles such as plastids or mitochondria, e.g. due to an increased expression or specific activity or specific targeting of the subject matters of the invention in a cell or an organism or a part thereof especially in organelles such as plastids or mitochondria. Transgenic for a polypeptide having a protein or activity means herein that due to modulation or manipulation of the genome, the activity of protein as shown in table II, application no. 20, column 3 or a protein as shown in table II, application no. 20, column 3-like activity is increased in the cell or organism or part thereof especially in organelles such as plastids or mitochondria. Examples are described above in context with the process of the invention.

[5493] for the disclosure of this paragraph see paragraph [0348.0.0.0] above.

[5494] A naturally occurring expression cassette—for example the naturally occurring combination of the promoter of the gene encoding a protein as shown in table II, application no. 20, column 3 with the corresponding encoding gene—becomes a transgenic expression cassette when it is modified by non-natural, synthetic “artificial” methods such as, for example, mutagenization. Such methods have been described (U.S. Pat. No. 5,565,350; WO 00/15815; also see above).

[5495] for the disclosure of the paragraphs [0350.0.0.19] to [0358.0.0.19] see paragraphs [0350.0.0.0] to [0358.0.0.0] above.

[5496] Transgenic plants comprising starch and/cellulose, glucose, UDP-glucose, fructose, myo-inositol, sucrose and/or raffinose or mixtures thereof synthesized in the process according to the invention can be marketed directly without isolation of the compounds synthesized. In the process according to the invention, plants are understood as meaning all plant parts, plant organs such as leaf, stalk, root, tubers or seeds or propagation material or harvested material or the intact plant. In this context, the seed encompasses all parts of the seed such as the seed coats, epidermal cells, seed cells, endosperm or embryonic tissue. The starch and/cellulose, glucose, UDP-glucose, fructose, myo-inositol, sucrose and/or raffinose produced in the process according to the invention may, however, also be isolated from the plant in the form of their free starch and/cellulose, glucose, UDP-glucose, fructose, myo-inositol, sucrose and/or raffinose produced by this process can be isolated by harvesting the plants either from the culture in which they grow or from the field. This can be done for example via expressing, grinding and/or extraction of the plant parts, preferably the plant leaves, plant fruits, flowers and the like.

The invention furthermore relates to the use of the transgenic plants according to the invention and of the cells, cell cultures, parts—such as, for example, roots, leaves, flowers and the like as mentioned above in the case of transgenic plant organisms—derived from them, and to transgenic propagation material such as seeds or fruits and the like as mentioned above, for the production of foodstuffs or feeding stuffs, cosmetics, pharmaceuticals or fine chemicals.

[5497] for the disclosure of the paragraphs [0360.0.0.19] to [0362.0.0.19] see paragraphs [0360.0.0.0] to [0362.0.0.0] above.

[5498] In this manner, more than 50% by weight, advantageously more than 60% by weight, preferably more than 70% by weight, especially preferably more than 80% by weight, very especially preferably more than 90% by weight, of the starch and/cellulose, glucose, UDP-glucose, fructose, myo-inositol, sucrose and/or raffinose produced in the process can be isolated. The resulting fine chemical can, if appropriate, subsequently be further purified, if desired mixed with other active ingredients such as other xanthophylls, fatty acids, vitamins, amino acids, carbohydrates, antibiotics and the like, and, if appropriate, formulated.

[5499] In one embodiment, starch and/cellulose, glucose, UDP-glucose, fructose, myo-inositol, sucrose and/or raffinose is the fine chemical.

[5500] The starch and/cellulose, glucose, UDP-glucose, fructose, myo-inositol, sucrose and/or raffinose, in particular the respective fine chemicals obtained in the process are suitable as starting material for the synthesis of further products of value. For example, they can be used in combination with each other or alone for the production of pharmaceuticals, health products, foodstuffs, animal feeds, nutrients or cosmetics. Accordingly, the present invention relates a method for the production of pharmaceuticals, health products, food stuff, animal feeds, nutrients or cosmetics comprising the steps of the process according to the invention, including the isolation of the starch and/cellulose, glucose, UDP-glucose, fructose, myo-inositol, sucrose and/or raffinose containing, in particular starch and/cellulose, glucose, UDP-glucose, fructose, myo-inositol, sucrose and/or raffinose containing composition produced or the respective fine chemical produced if desired and formulating the product with a pharmaceutical acceptable carrier or formulating the product in a form acceptable for an application in agriculture. A further embodiment according to the invention is the use of the starch and/cellulose, glucose, UDP-glucose, fructose, myo-inositol, sucrose and/or raffinose produced in the process or of the transgenic organisms in animal feeds, foodstuffs, medicines, food supplements, cosmetics or pharmaceuticals.

[5501] for the disclosure of the paragraphs [0366.0.0.19] to [0369.0.0.19] see paragraphs [0366.0.0.0] to [0369.0.0.0] above.

[5502] The fermentation broths obtained in this way, containing in particular starch and/cellulose, glucose, UDP-glucose, fructose, myo-inositol, sucrose and/or raffinose in mixtures with other organic acids, amino acids, polypeptides or polysaccarides, normally have a dry matter content of from 1 to 70% by weight, preferably 7.5 to 25% by weight. Sugar-limited fermentation is additionally advantageous, e.g. at the end, for example over at least 30% of the fermentation time. This means that the concentration of utilizable sugar in the fermentation medium is kept at, or reduced to, 0 to 10 g/l, preferably to 0 to 3 g/l during this time. The fermentation broth is then processed further. Depending on requirements, the biomass can be removed or isolated entirely or partly by separation methods, such as, for example, centrifugation, filtration, decantation, coagulation/flocculation or a combination of these methods, from the fermentation broth or left completely in it.

The fermentation broth can then be thickened or concentrated by known methods, such as, for example, with the aid of a rotary evaporator, thin-film evaporator, falling film evaporator, by reverse osmosis or by nanofiltration. This concentrated fermentation broth can then be worked up by freeze-drying, spray drying, spray granulation or by other processes.

[5503] Accordingly, it is possible to purify the starch and/cellulose, glucose, UDP-glucose, fructose, myo-inositol, sucrose and/or raffinose, in particular the starch and/cellulose, glucose, UDP-glucose, fructose, myo-inositol, sucrose and/or raffinose produced according to the invention further. For this purpose, the product-containing composition, e.g. a total or partial extraction fraction using organic solvents, is subjected for example to separation via e.g. an open column chromatography or HPLC in which case the desired product or the impurities are retained wholly or partly on the chromatography resin. These chromatography steps can be repeated if necessary, using the same or different chromatography resins. The skilled worker is familiar with the choice of suitable chromatography resins and their most effective use.

[5504] for the disclosure of the paragraphs [0372.0.0.19] to [0376.0.0.19], [0376.1.0.19] and [0377.0.0.19] see paragraphs [0372.0.0.0] to [0376.0.0.0], [0376.1.0.0] and [0377.0.0.0] above.

[5505] In one embodiment, the present invention relates to a method for the identification of a gene product conferring an increase in the fine chemical production in a cell, comprising the following steps:
[5506] (a) contacting e.g. hybridising, the nucleic acid molecules of a sample, e.g. cells, tissues, plants or microorganisms or a nucleic acid library, which can contain a candidate gene encoding a gene product conferring an increase in the fine chemical after expression, with the nucleic acid molecule of the present invention;
[5507] (b) identifying the nucleic acid molecules, which hybridize under relaxed stringent conditions with the nucleic acid molecule of the present invention in particular to the nucleic acid molecule sequence shown in table I, application no. 20, columns 5 and 7, preferably in table I B, application no. 20, columns 5 and 7, and, optionally, isolating the full length cDNA clone or complete genomic clone;
[5508] (c) introducing the candidate nucleic acid molecules in host cells, preferably in a plant cell or a microorganism, appropriate for producing the fine chemical;
[5509] (d) expressing the identified nucleic acid molecules in the host cells;
[5510] (e) assaying the fine chemical level in the host cells; and
[5511] (f) identifying the nucleic acid molecule and its gene product which expression confers an increase in the fine chemical level in the host cell after expression compared to the wild type.

[5512] for the disclosure of the paragraphs [0379.0.0.19] to [0383.0.0.19] see paragraphs [0379.0.0.0] to [0383.0.0.0] above.

[5513] The screen for a gene product or an agonist conferring an increase in the fine chemical production can be performed by growth of an organism for example a microorganism in the presence of growth reducing amounts of an inhibitor of the synthesis of the fine chemical. Better growth, eg higher dividing rate or high dry mass in comparison to the control under such conditions would identify a gene or gene product or an agonist conferring an increase in fine chemical production.

One can think to screen for increased fine chemical production by for example resistance to drugs blocking fine chemical synthesis and looking whether this effect is dependent on the proteins as shown in table II, application no. 20, column 3, eg comparing near identical organisms with low and high activity of the proteins as shown in table II, application no. 20, column 3.

[5514] for the disclosure of the paragraphs [0385.0.0.19] to [0404.0.0.19] see paragraphs [0385.0.0.0] to [0404.0.0.0] above.

[5515] Accordingly, the nucleic acid of the invention, or the nucleic acid molecule identified with the method of the present invention or the complement sequences thereof, the polypeptide of the invention, the nucleic acid construct of the invention, the organisms, the host cell, the microorganisms, the plant, plant tissue, plant cell, or the part thereof the invention, the vector of the invention, the agonist identified with the method of the invention, the nucleic acid molecule identified with the method of the present invention, can be used for the production of the fine chemical or of the fine chemical and one or more other, carbohydrates, in particular carbohydrates such as cellobiose, mannose, trehalose, etc.

Accordingly, the nucleic acid of the invention, or the nucleic acid molecule identified with the method of the present invention or the complement sequences thereof, the polypeptide of the invention, the nucleic acid construct of the invention, the organisms, the host cell, the microorganisms, the plant, plant tissue, plant cell, or the part thereof of the invention, the vector of the invention, the agonist identified with the method of the invention, the antibody of the present invention, can be used for the reduction of the fine chemical in an organism or part thereof, e.g. in a cell.

[5516] for the disclosure of the paragraphs [0406.0.0.19] to [0435.0.0.19] see paragraphs [0406.0.0.0] to [0435.0.0.0] above.

[5517] Production of Starch and/Cellulose, Glucose, UDP-Glucose, Fructose, Myo-Inositol, Sucrose and/or Raffinose in Chlamydomonas reinhardtii

The starch and/cellulose, glucose, UDP-glucose, fructose, myo-inositol, sucrose and/or raffinose production can be analysed as mentioned herein.
The proteins and nucleic acids can be analysed as mentioned below.
In addition a production in other organisms such as plants or microorganisms such as yeast, Mortierella alpina, Corynebacterium glutamicum or Escherichia coli is possible.

[5518] for the disclosure of the paragraphs [0437.0.0.19] and [0438.0.0.19] see paragraphs [0437.0.0.0] and [0438.0.0.0] above.

### Example 9

### Analysis of the Effect of the Nucleic Acid Molecule on the Production of Starch and/Cellulose, Glucose, UDP-Glucose, Fructose, Myo-Inositol, Sucrose and/or Raffinose

[5519] The effect of the genetic modification of plants or algae on the production of a desired compound (such as starch and/cellulose, glucose, UDP-glucose, fructose, myo-inositol, sucrose and/or raffinose) can be determined by growing the modified plant under suitable conditions (such as those described above) and analyzing the medium and/or the cellular components for the elevated production of desired product (i.e. of starch and/cellulose, glucose, UDP-glucose, fructose, myo-inositol, sucrose and/or raffinose). These analytical techniques are known to the skilled worker and comprise spectroscopy, thin-layer chromatography, various types of staining methods, enzymatic and microbiological methods and analytical chromatography such as high-performance liquid chromatography (see, for example, Ullman, Encyclopedia of Industrial Chemistry, Vol. A2, p. 89-90 and p. 443-613, VCH: Weinheim (1985); Fallon, A., et al., (1987) “Applications of HPLC in Biochemistry” in: Laboratory Techniques in Biochemistry and Molecular Biology, Vol. 17; Rehm et al. (1993) Biotechnology, Vol. 3,

[5520] Chapter III: “Product recovery and purification”, p. 469-714, VCH: Weinheim; Belter, P.A., et al. (1988) Bioseparations: downstream processing for Biotechnology, John Wiley and Sons; Kennedy, J. F., and Cabral, J. M. S. (1992) Recovery processes for biological Materials, John Wiley and Sons; Shaeiwitz, J. A., and Henry, J. D. (1988) Biochemical Separations, in: Ullmann's Encyclopedia of Industrial Chemistry, Vol. B3; Chapter 11, p. 1-27, VCH: Weinheim; and Dechow, F. J. (1989) Separation and purification techniques in biotechnology, Noyes Publications) or the methods mentioned above.

[5521] for the disclosure of this paragraph see [0441.0.0.0] above.

[5522] Purification of and Determination of the Starch and/Cellulose, Glucose, UDP-Glucose, Fructose, Myo-Inositol, Sucrose and/or Raffinose Content:

[5523] Abbreviations: GC-MS, gas liquid chromatography/mass spectrometry; TLC, thin-layer chromatography.

The unambiguous detection for the presence of carbohydrates, preferably polysaccharides, more preferably starch and/or cellulose and/or monosaccharides, more preferably fructose, glucose and/or myo-inositol and/or trisaccharides, more preferably raffinose and/or disaccharides, more preferably sucrose, glucose derivatives such as UDP-glucose or anhydroglucose can be obtained by analyzing recombinant organisms using analytical standard methods: GC, GC-MS, LC, LC-MSMS or TLC, as described in: Advances on Lipid Methodology, Fourth Edition: Christie, Oily Press, Dundee, 119-169; 1998, Gaschromatographie-Massenspektrometrie-Verfahren [Gas chromatography/mass spectrometric methods], Lipide 33:343-353). The total carbohydrate produced in the organism for example in yeasts used in the inventive process can be analysed for example according to the following procedure:
The material such as yeasts, E. coli or plants to be analyzed can be disrupted by sonication, grinding in a glass mill, liquid nitrogen and grinding or via other applicable methods.
Plant material is initially homogenized mechanically by comminuting in a pestle and mortar to make it more amenable to extraction.

[5524] A typical sample pretreatment consists of an extraction using solvents such as acetone or alcohols as ethanol, methanol, or ethers, preferably ethanol, and chromatography. E.g.:

For the identification of carbohydrates the extracts should be further cleaned up by sequentially filtering through for example a Sep-Pak Plus C18 cartridge (Waters, Milford, Mass.) and a 0.22 μm membrane filter. The eluent can is injected onto an HPLC. For the detection of carbohydrates an aminopropyl-bonded phase column with a mobile phase consisting of an isocratic acetonitrile and water solution (75:25) is useful.
It is advantageously to dissolve dried sugar standards in 60% ethanol and to spike said standard solutions into the samples for the analysis to monitor recovery. The carbohydrate concentrations can be calculated based on peak area measurements.
For HPLC analysis, a Hewlett Packard 1100 HPLC, complete with a quaternary pump, vacuum degassing system, six-way injection valve, temperature regulated autosampier, column oven and Photodiode Array detector can be used [Agilent Technologies available through Ultra Scientific Inc., 250 Smith Street, North Kingstown, R.I.]. Injections were 20 μl.

[5525] for the disclosure of the paragraphs [0446.0.0.19] to [0496.0.0.19] see paragraphs [0446.0.0.0] to [0496.0.0.0] above.

[5526] As an alternative, the carbohydrates, preferably polysaccharides, more preferably starch and/or cellulose and/or monosaccharides, more preferably fructose, glucose and/or myo-inositol and/or trisaccharides, more preferably raffinose and/or disaccharides, more preferably sucrose can be detected advantageously as for example described by Sonnebald et al., (Nat Biotechnol. 1997 August; 15(8):794-7),or Panikulangara et al., Plant Physiol. 2004 October; 136(2):3148-58.
[5527] The results of the different plant analyses can be seen from the table, which follows:

TABLE VI

| ORF | Metabolite | Analyte | Method | Min | Max |
|---|---|---|---|---|---|
| b0146 | Starch/cellulose | Anhydroglucose | GC | 1.39 | 1.73 |
| b0342 | Starch/cellulose | Anhydroglucose | GC | 1.34 | 1.69 |
| b0523 | Starch/cellulose | Anhydroglucose | GC | 1.49 | 1.78 |
| b0598 | Glucose | Glucose | GC | 1.58 | 2.04 |
| b0644 | Starch/cellulose | Anhydroglucose | GC | 1.37 | 1.66 |
| b0760 | Glucose | Glucose | GC | 1.97 | 4.52 |
| b1046 | Starch/cellulose | Anhydroglucose | GC | 1.31 | 1.82 |
| b1095 | Fructose | Fructose | GC | 2.13 | 5.78 |
| b1095 | myo-Inositol | myo-Inositol | GC | 1.92 | 3.19 |
| b1095 | Glucose | Glucose | GC | 1.72 | 4.58 |
| b1136 | Starch/cellulose | Anhydroglucose | GC | 1.31 | 1.72 |
| b1399 | myo-Inositol | myo-Inositol | GC | 1.27 | 2.08 |
| b1410 | Glucose | Glucose | GC | 1.57 | 4.77 |
| b1410 | myo-Inositol | myo-Inositol | GC | 1.34 | 1.49 |
| b1410 | Fructose | Fructose | GC | 1.87 | 5.27 |
| b1556 | Sucrose | Sucrose | GC | 1.31 | 1.37 |
| b1556 | myo-Inositol | myo-Inositol | GC | 1.25 | 3.07 |
| b1556 | Raffinose | Raffinose | GC | 1.85 | 4.09 |
| b1704 | Starch/cellulose | Anhydroglucose | GC | 1.24 | 2.01 |
| b1980 | Raffinose | Raffinose | LC | 1.67 | 2.01 |
| b2223 | myo-Inositol | myo-Inositol | GC | 1.26 | 4.32 |
| b2223 | Raffinose | Raffinose | LC | 1.72 | 6.17 |
| b2223 | Glucose | Glucose | GC | 1.60 | 6.20 |
| b2284 | Starch/cellulose | Anhydroglucose | GC | 1.66 | 1.68 |
| b2240 | Starch/cellulose | Anhydroglucose | GC | 1.31 | 1.90 |
| b2965 | Sucrose | Sucrose | GC | 1.30 | 4.29 |
| b3156 | Fructose | Fructose | GC | 2.14 | 2.97 |
| b3708 | Raffinose | Raffinose | LC | 1.61 | 3.49 |
| YCR012W | Raffinose | Raffinose | LC | 1.57 | 3.81 |
| YDR035W | Raffinose | Raffinose | LC | 1.71 | 5.40 |
| YDR497C | Fructose | Fructose | GC | 2.06 | 6.27 |
| YDR497C | myo-Inositol | myo-Inositol | GC | 1.26 | 1.29 |
| YER063W | Fructose | Fructose | GC | 1.68 | 1.80 |
| YGL065C | myo-Inositol | myo-Inositol | GC | 1.12 | 1.23 |
| YGL065C | Starch/cellulose | Anhydroglucose | GC | 1.40 | 1.47 |
| YGR255C | Glucose | Glucose | GC | 1.82 | 4.94 |
| YGR255C | Raffinose | Raffinose | LC | 1.72 | 2.51 |
| YGR262C | Fructose | Fructose | GC | 1.58 | 2.06 |
| YGR262C | Glucose | Glucose | GC | 1.65 | 1.77 |
| YHR204W | myo-Inositol | myo-Inositol | GC | 1.30 | 1.52 |
| YIR020W-A | Fructose | Fructose | GC | 1.84 | 2.07 |
| YIR020W-A | Glucose | Glucose | GC | 1.46 | 1.87 |
| YJL139C | myo-Inositol | myo-Inositol | GC | 1.27 | 2.35 |
| YJL139C | Glucose | Glucose | GC | 1.64 | 2.57 |
| YKR043C | UDPGlucose | UDPGlucose | LC | 1.66 | 1.72 |
| YLL033W | Raffinose | Raffinose | LC | 1.81 | 1.82 |
| YLR153C | Glucose | Glucose | GC | 1.64 | 4.06 |
| YLR174W | Raffinose | Raffinose | LC | 1.61 | 1.86 |
| YLR174W | myo-Inositol | myo-Inositol | GC | 1.25 | 1.32 |
| YNL022C | Raffinose | Raffinose | LC | 1.59 | 1.62 |
| YNL241C | Glucose | Glucose | GC | 2.99 | 5.30 |
| YNL241C | Fructose | Fructose | GC | 1.86 | 4.64 |
| YNR012W | myo-Inositol | myo-Inositol | GC | 1.31 | 1.64 |
| YOR353C | Fructose | Fructose | GC | 1.78 | 3.87 |
| YOR353C | Glucose | Glucose | GC | 1.66 | 2.41 |
| YPL138C | Starch/cellulose | Anhydroglucose | GC | 1.31 | 2.14 |
| YPR035W | myo-Inositol | myo-Inositol | GC | 1.27 | 4.65 |
| YPR035W | Raffinose | Raffinose | LC | 2.02 | 2.25 |

[5528] for the disclosure of the paragraphs [0499.0.0.19] and [0500.0.0.19] see paragraphs [0499.0.0.0] and [0500.0.0.0] above.

### Example 15a

### Engineering Ryegrass Plants by Over-Expressing b0146 from Escherichia coli or Homologs of b0146 from Other Organisms

[5529] for the disclosure of the paragraphs [0502.0.0.19] to [0508.0.0.19] see paragraphs [0502.0.0.0] to [0508.0.0.0] above.

### Example 15b

### Engineering Soybean Plants by Over-Expressing b0146 from Escherichia coli or Homologs of b0146 from Other Organisms

[5530] for the disclosure of the paragraphs [0510.0.0.19] to [0513.0.0.19] see paragraphs [0510.0.0.0] to [0513.0.0.0] above.

### Example 15c

### Engineering Corn Plants by Over-Expressing b0146 from Escherichia coli or Homologs of b0146 from Other Organisms

[5531] for the disclosure of the paragraphs [0515.0.0.19] to [0540.0.0.19] see paragraphs [0515.0.0.0] to [0540.0.0.0] above.

### Example 15d

### Engineering Wheat Plants by Over-Expressing b0146 from Escherichia coli or Homologs of b0146 from Other Organisms

[5532] for the disclosure of the paragraphs [0542.0.0.19] to [0544.0.0.19] see paragraphs [0542.0.0.0] to [0544.0.0.0] above.

### Example 15e

### Engineering Rapeseed/Canola Plants by Over-Expressing b0146 from Escherichia coli or Homologs of b0146 from Other Organisms

[5533] for the disclosure of the paragraphs [0546.0.0.19] to [0549.0.0.19] see paragraphs [0544.0.0.0] to [0549.0.0.0] above.

### Example 15f

### Engineering Alfalfa Plants by Over-Expressing b0146 from Escherichia coli or Homologs of b0146 from Other Organisms

[5534] for the disclosure of the paragraphs [0551.0.0.19] to [0554.0.0.19] see paragraphs [0551.0.0.0] to [0554.0.0.0] above.

### Example 16

### Metabolite Profiling Info from Zea mays

[5535] Zea mays plants were engineered as described in Example 15c.
Metabolic results were either obtained from regenerated primary transformants (T0) or from the following progeny generation (T1) in comparison to appropriate control plants. The results are shown in table VII

TABLE VII

| ORF_NAME | Metabolite | MIN | MAX |
|---|---|---|---|
| YGR255C | Raffinose | 2.32 | 3.59 |
| YGR255C | Glucose | 1.86 | 5.59 |
| YKR043C | UDP-Glucose | 2.01 | 3.59 |
| YNL241C | Glucose | 1.66 | 2.27 |
| YNR012W | myo-Inositol | 1.76 | 6.87 |

Table VII shows the increase in raffinose, glucose, UDP-glucose and myo-inositol in genetically modified corn plants expressing the Saccharomyces cerevisiae nucleic acid sequences YGR255C, YKR043C, YNL241C and YNR012W.
In one embodiment, in case the activity of the Saccharomyces cerevisiae protein YGR255C or its homologs, e.g. a “Putative flavin-dependent monooxygenase, involved in ubiquinone (Coenzyme Q) biosynthesis”, is increased in corn plants, preferably, an increase of the fine chemical raffinose between 132% and 259% is conferred.
In one embodiment, in case the activity of the Saccharomyces cerevisiae protein YGR255C or its homologs, e.g. a “Putative flavin-dependent monooxygenase, involved in ubiquinone (Coenzyme Q) biosynthesis”, is increased in corn plants, preferably, an increase of the fine chemical glucose between 86% and 459% is conferred.
In one embodiment, in case the activity of the Saccharomyces cerevisiae protein YGR255C or its homologs, e.g. a “Putative flavin-dependent monooxygenase, involved in ubiquinone (Coenzyme Q) biosynthesis”, is increased in corn plants, preferably, an increase of the fine chemicals raffinose between 132% and 259% or more and of glucose between 86% and 459% or more is conferred.
In one embodiment, in case the activity of the Saccharomyces cerevisiae protein YKR043C or its homologs, e.g. a “phosphoglycerate mutase like protein”, is increased in corn plants, preferably, an increase of the fine chemical UDP-glucose between 101% and 259% is conferred.
In one embodiment, in case the activity of the Saccharomyces cerevisiae protein YNL241C or its homologs, e.g. a “glucose-6-phosphate dehydrogenase”, is increased in corn plants, preferably, an increase of the fine chemical glucose between 66% and 127% is conferred.
In one embodiment, in case the activity of the Saccharomyces cerevisiae protein YNR012W or its homologs, e.g. a “uridine kinase”, is increased in corn plants, preferably, an increase of the fine chemical myo-inositol between 76% and 587% is conferred.

[5536] for the disclosure of this paragraph see [0554.2.0.0] above.

[5537] for the disclosure of this paragraph see [0555.0.0.0] above.

[5538] for the disclosure of this paragraph see [0001.0.0.0].

[5539] Plants produce very long chain fatty acids such as behenic acid (C22:0), lignoceric acid (C24:0), cerotic acid (C26:0) and/or melissic acid (C30:0).

[5540] Very long-chain fatty acids (VLCFAs) are synthesized by a membrane-bound fatty acid elongation complex (elongase, FAE) using acyl-CoA substrates. The first reaction of elongation involves condensation of malonyl-CoA with a long chain substrate producing a β-ketoacyl-CoA. Subsequent reactions are reduction of 13-hydroxyacyl-CoA, dehydration to an enoyl-CoA, followed by a second reduction to form the elongated acyl-CoA. The β-ketoacyl-CoA synthase (KCS) catalyzing the condensation reaction plays a key role in determining the chain length of fatty acid products found in seed oils and is the rate-limiting enzyme for seed VLCFA production (Lassner et al., Plant Cell, 8(1996), 281-292).

The elongation process can be repeated to yield members that are 20, 22, and 24 carbons long. Although such very long chain fatty acids are minor components of the lipid membranes of the body, they undoubtedly perform valuable functions, apparently helping to stabilize membranes, especially those in peripheral nerve cells.

[5541] Behenic acid (22:0) (docosanoic acid) is a component of rapeseed oil (up to 2%) and peanut oil (1-5%).

Behenic acid is used to give hair conditioners and moisturizers their smoothing properties.
Lignoceric acid (24:0) (tetracosanoic acid) is a component of rapeseed oil (up to 1%) and peanut oil (1-3%).
Cerotic acid (26:0) (hexacosanoic acid) is a component of beeswax.
Echinacea angustifolia extracts are sold as natural health products comprising the very long chain fatty acid cerotic acid.
Cerotic acid is used in cosmetics as a constituent in hairstyling products.

[5542] Melissic acid (C30:0) (triacontanoic acid) is a component of beeswax.

Beeswax (cera alba) is obtained from the product excreted by certain glands of the honeybee from which the honeycomb is made. It is freed of solid impurities by melting and centrifugation (cera flava). Finally, it is bleached completely white (cera alba). Beeswax consists of 10-15 percent paraffin carbohydrates, 35-37 percent esters of C16 to C36 fatty acids and about 15 percent cerotic acid, melissic acid and their homologues. Beeswax is used as a thickener and a humectant in the manufacture of ointments, creams, lipsticks and other cosmetics and skincare products as an emulsifier, emollient, moisturizer and film former.
Beeswax is also used for the production of candles.
Wax is a general term used to refer to the mixture of long-chain apolar lipids forming a protective coating (cutin in the cuticle) on plant leaves and fruits but also in animals (wax of honeybee, cuticular lipids of insects, spermaceti of the sperm whale, skin lipids, uropygial glands of birds, depot fat of planktonic crustacea), algae, fungi and bacteria.
Many of the waxes found in nature have commercial uses in the lubricant, food and cosmetic industry. Jojoba oil has long been suggested as a putative resource of wax, since this desert shrub is unusual in its capacity to produce waxes rather than triacylglycerols (TAG) as seed storage lipids. These waxes are esters of very-long-chain-fatty acids and fatty alcohols (Miwa, 1971, J Am Oil Chem Soc 48, 259-264). As the production cost for jojoba wax, which is primarily used for cosmetic applications, is high, there is a need to engineer crop plants to produce high level of wax esters in its seed oil.

[5543] Plant aerial surfaces are covered by epicuticular waxes, complex mixtures of very long (C₂₀-C₃₄) fatty acids, alkanes, aldehydes, ketones and esters. In addition to repelling atmospheric water they prevent dessication and are therefore an important determinant of drought resistance (Riederer and Schreiber, 2001, J. Exp. Bot 52, 2023-2032). Beside abiotic stress resistance the wax layer is part of the plant defense against biotic stressor, especially insects as for example described by Marcell and Beattie, 2002, Mol Plant Microbe Interact. 15(12), 1236-44. Furthermore they provide stability to pollen grains, thus influencing fertility and productivity.

[5544] Very-long-chain fatty acids (VLCFAs), consisting of more than 18 carbon atoms like behenic acid, lignoceric acid, cerotic acid and melissic acid, are essential components for the vitality of higher plants. The key enzyme of VLCFA biosynthesis, the extraplastidary fatty acid elongase, is shown for to be the primary target site of chloroacetamide herbicides. With an analysis of the fatty acid composition and the metabolism of 14C-labelled precursors (sterate, malonate, acetate), the reduction of VLCFAs was determined in vivo. The inhibition of the recombinant protein substantiates the first and rate-limiting step of VLCFA biosynthesis, the condensation of acyl-CoA with malonyl-CoA to β-ketoacyl-CoA, to be the primary target site of chloroacetamides (I50=10-100 nM). The concentration of VLCFAs within the untreated cell is low, the very-long-chain compounds are found mainly in plasma membrane lipids and epicuticular waxes. A shift of fatty acids towards shorter chain length or even the complete depletion of very-long-chain components is the consequence of the inhibition of VLCFA biosynthesis. Especially the loss of plasma membrane VLCFAs is involved in phytotoxic effects of chloroacetamides such as the inhibition of membrane biogenesis and mitosis (Matthes, B., http://www.ub.unikonstanz.de/kops/volltexte/2001/661/).

[5545] Increased wax production in transgenic plants has for example been reported by Broun et al., 2004, Proc Natl. Acad. Sci, 101, 4706-4711. The authors overexpressed the transcriptional activator WIN1 in Arabidopsis, leading to increased wax load on arial organs. As this resulted in a complex change in the wax profile and the transgenic overexpressors had characteristic alterations in growth and development (Broun et al., 2004, Proc Natl. Acad. Sci, 101, 4706-4711) there is still a need for a more controlled increased production of defined VLCFAs.

[5546] Very long chain fatty alcohols obtained from plant waxes and beeswax have also been reported to lower plasma cholesterol in humans and existing data support the hypothesis that VLCFA exert regulatory roles in cholesterol metabolism in the peroxisome and also alter LDL uptake and metabolism (discussed in Hargrove et al., 2004, Exp Biol Med (Maywood), 229(3): 215-26).

Due to these interesting physiological roles and the nutritional, cosmetic and agrobiotechnological potential of behenic acid (C22:0), lignoceric acid (C24:0), cerotic acid (C26:0) and melissic acid (C30:0) there is a need to identify the genes of enzymes and other proteins involved in behenic acid, lignoceric acid, cerotic acid or melissic acid metabolism, and to generate mutants or transgenic plant lines with which to modify the behenic acid, lignoceric acid, cerotic acid or melissic acid content in plants.

[5547] One way to increase the productive capacity of biosynthesis is to apply recombinant DNA technology. Thus, it would be desirable to produce behenic acid, lignoceric acid, cerotic acid or melissic acid in plants. That type of production permits control over quality, quantity and selection of the most suitable and efficient producer organisms. The latter is especially important for commercial production economics and therefore availability to consumers. In addition it is desirable to produce behenic acid, lignoceric acid, cerotic acid or melissic acid in plants in order to increase plant productivity and resistance against biotic and abiotic stress as discussed before.

Therefore improving the productivity of said fatty acids and improving the quality of cosmetics, pharmaceuticals, foodstuffs and animal feeds, in particular of nutrition supplements, is an important task of the different industries.

[5548] To ensure a high productivity of said fatty acids in plants or microorganism, it is necessary to manipulate the natural biosynthesis of said fatty acids in said organisms.

Thus, it would be advantageous if an algae, plant or other microorganism were available which produce large amounts behenic acid, lignoceric acid, cerotic acid or melissic acid. The invention discussed hereinafter relates in some embodiments to such transformed prokaryotic or eukaryotic microorganisms.
It would also be advantageous if plants were available whose roots, leaves, stem, fruits or flowers produced large amounts of behenic acid, lignoceric acid, cerotic acid or melissic acid. The invention discussed hereinafter relates in some embodiments to such transformed plants.

[5549] Accordingly, there is still a great demand for new and more suitable genes which encode enzymes or other regulators which participate in the biosynthesis of said fatty acids and make it possible to produce said fatty acids specifically on an industrial scale without that unwanted byproducts are formed. In the selection of genes for biosynthesis two characteristics above all are particularly important. On the one hand, there is as ever a need for improved processes for obtaining the highest possible contents of said fatty acids on the other hand as less as possible byproducts should be produced in the production process.

Therefore improving the quality of foodstuffs and animal feeds is an important task of the food-and-feed industry. This is necessary since, for example behenic acid, lignoceric acid, cerotic acid or melissic acid, as mentioned above, which occur in plants and some microorganisms are limited with regard to the supply of mammals. Especially advantageous for the quality of foodstuffs and animal feeds is as balanced as possible a specific behenic acid, lignoceric acid, cerotic acid or melissic acid profile in the diet since an excess of behenic acid, lignoceric acid, cerotic acid or melissic acid above a specific concentration in the food has a positive effect. A further increase in quality is only possible via addition of further behenic acid, lignoceric acid, cerotic acid or melissic acid, which are limiting.
To ensure a high quality of foods and animal feeds, it is therefore necessary to add behenic acid, lignoceric acid, cerotic acid or melissic acid in a balanced manner to suit the organism.

[5550] for the disclosure of this paragraph see [0013.0.0.0] above.

[5551] Accordingly, in a first embodiment, the invention relates to a process for the production of a fine chemical, whereby the fine chemical is cerotic acid, lignoceric acid and/or melissic acid in free or bound form for example bound to lipids, oils or fatty acids. Accordingly, in the present invention, the term “the fine chemical” as used herein relates to “cerotic acid, lignoceric acid and/or melissic acid in free or bound form”. Further, the term “the fine chemicals” as used herein also relates to fine chemicals comprising cerotic acid, lignoceric acid and/or melissic acid in free or bound form.

[5552] In one embodiment, the term “cerotic acid, lignoceric acid and/or melissic acid in free or bound form”, “the fine chemical” or “the respective fine chemical” means at least one chemical compound selected from the group consisting of cerotic acid, lignoceric acid, behenic acid or melissic acid or mixtures thereof in free or bound form. Throughout the specification the term “the fine chemical” or “the respective fine chemical” means a compound selected from the group cerotic acid lignoceric acid or melissic acid or mixtures thereof in free form or bound to other compounds such as protein(s) such as enzyme(s), peptide(s), polypeptide(s), membranes or part thereof, or lipids, oils, waxes or fatty acids or mixtures thereof or in compositions with lipids.

In one embodiment, the term “the fine chemical” and the term “the respective fine chemical” mean at least one chemical compound with an activity of the abovementioned fine chemical.
In one embodiment, the term “the fine chemical” and the term “the respective fine chemical” mean at least one chemical compound with an activity of the above mentioned fine chemical

[5553] Accordingly, the present invention relates to a process for the production of cerotic acid, lignoceric acid and/or melissic acid, which comprises
[5554] (a) increasing or generating the activity of a protein as shown in table II, application no. 21, column 3 encoded by the nucleic acid sequences as shown in table I, application no. 21, column 5, in an organelle of a microorganism or plant, or
[5555] (b) increasing or generating the activity of a protein as shown in table II, application no. 21, column 3 encoded by the nucleic acid sequences as shown in table I, application no. 21, column 5 in the plastid of a microorganism or plant, or in one or more parts thereof; and
[5556] (c) growing the organism under conditions which permit the production of the fine chemical, thus, cerotic acid, lignoceric acid and/or melissic acid or fine chemicals comprising cerotic acid, lignoceric acid and/or melissic acid, are produced in said organism or in the culture medium surrounding the organism.

[5557] Accordingly, the term “the fine chemical” means “cerotic acid lignoceric acid and/or melissic acid” in relation to all sequences listed in table I, application no. 21, columns 5 and 7 or homologs thereof. Accordingly, the term “the fine chemical” can mean “cerotic acid lignoceric acid and/or melissic acid”, owing to circumstances and the context. Preferably the term “the fine chemical” means “cerotic acid lignoceric acid and/or melissic acid”. In order to illustrate that the meaning of the term “the respective fine chemical” means “cerotic acid lignoceric acid and/or melissic acid in free or bound form” owing to the sequences listed in the context the term “the respective fine chemical” is also used.

[5558] In another embodiment the present invention is related to a process for the production of cerotic acid, lignoceric acid and/or melissic acid, which comprises
[5559] (a) increasing or generating the activity of a protein as shown in table II, application no. 21, column 3 encoded by the nucleic acid sequences as shown in table I, application no. 21, column 5, in an organelle of a non-human organism, or
[5560] (b) increasing or generating the activity of a protein as shown in table II, application no. 21, column 3 encoded by the nucleic acid sequences as shown in table I, application no. 21, column 5, which are joined to a nucleic acid sequence encoding a transit peptide in a non-human organism, or in one or more parts thereof; or
[5561] (c) increasing or generating the activity of a protein as shown in table II, application no. 21, column 3 encoded by the nucleic acid sequences as shown in table I, application no. 21, column 5, which are joined to a nucleic acid sequence encoding chloroplast localization sequence, in a non-human organism, or in one or more parts thereof, and
[5562] (d) growing the organism under conditions which permit the production of cerotic acid, lignoceric acid and/or melissic acid in said organism.

[5563] In another embodiment, the present invention relates to a process for the production of cerotic acid, lignoceric acid and/or melissic acid, which comprises
[5564] (a) increasing or generating the activity of a protein as shown in table II, application no. 21, column 3 encoded by the nucleic acid sequences as shown in table I, application no. 21, column 5, in an organelle of a microorganism or plant through the transformation of the organelle, or
[5565] (b) increasing or generating the activity of a protein as shown in table II, application no. 21, column 3 encoded by the nucleic acid sequences as shown in table I, application no. 21, column 5 in the plastid of a microorganism or plant, or in one or more parts thereof through the transformation of the plastids; and
[5566] (c) growing the organism under conditions which permit the production of the fine chemical, thus, cerotic acid, lignoceric acid and/or melissic acid or fine chemicals comprising cerotic acid, lignoceric acid and/or melissic acid in said organism or in the culture medium surrounding the organism.

[5567] Advantageously the activity of the protein as shown in table II, application no. 21, column 3 encoded by the nucleic acid sequences as shown in table I, application no. 21, column 5 is increased or generated in the abovementioned process in the plastid of a microorganism or plant.

[5568] for the disclosure of the paragraphs [0019.0.0.20] to [0024.0.0.19] see paragraphs [0019.0.0.0] and [0024.0.0.0] above.

[5569] Even more preferred nucleic acid sequences are encoding transit peptides as disclosed by von Heijne et al. [Plant Molecular Biology Reporter, Vol. 9 (2), 1991: 104-126], which are hereby incorporated by reference. Table V shows some examples of the transit peptide sequences disclosed by von Heijne et al. According to the disclosure of the invention especially in the examples the skilled worker is able to link other nucleic acid sequences disclosed by von Heijne et al. to the nucleic acid sequences shown in table I, application no. 21, columns 5 and 7. Most preferred nucleic acid sequences encoding transit peptides are derived from the genus Spinacia such as chloroplast 30S ribosomal protein PSrp-1, root acyl carrier protein II, acyl carrier protein, ATP synthase: γ subunit, ATP synthase: δ subunit, cytochrom f, ferredoxin I, ferredoxin NADP oxidoreductase (=FNR), nitrite reductase, phosphoribulokinase, plastocyanin or carbonic anhydrase. The skilled worker will recognize that various other nucleic acid sequences encoding transit peptides can easily isolated from plastid-localized proteins, which are expressed from nuclear genes as precursors and are then targeted to plastids. Such transit peptides encoding sequences can be used for the construction of other expression constructs. The transit peptides advantageously used in the inventive process and which are part of the inventive nucleic acid sequences and proteins are typically 20 to 120 amino acids, preferably 25 to 110, 30 to 100 or 35 to 90 amino acids, more preferably 40 to 85 amino acids and most preferably 45 to 80 amino acids in length and functions post-translationally to direct the protein to the plastid preferably to the chloroplast. The nucleic acid sequences encoding such transit peptides are localized upstream of nucleic acid sequence encoding the mature protein. For the correct molecular joining of the transit peptide encoding nucleic acid and the nucleic acid encoding the protein to be targeted it is sometimes necessary to introduce additional base pairs at the joining position, which forms restriction enzyme recognition sequences useful for the molecular joining of the different nucleic acid molecules. This procedure might lead to very few additional amino acids at the N-terminal of the mature imported protein, which usually and preferably do not interfere with the protein function. In any case, the additional base pairs at the joining position which forms restriction enzyme recognition sequences have to be chosen with care, in order to avoid the formation of stop codons or codons which encode amino acids with a strong influence on protein folding, like e.g. proline. It is preferred that such additional codons encode small n.d. structural flexible amino acids such as glycine or alanine.

[5570] As mentioned above the nucleic acid sequences coding for the proteins as shown in table II, application no. 21, column 3 and its homologs as disclosed in table I, application no. 21, columns 5 and 7 are joined to a nucleic acid sequence encoding a transit peptide, This nucleic acid sequence encoding a transit peptide ensures transport of the protein to the plastid. The nucleic acid sequence of the gene to be expressed and the nucleic acid sequence encoding the transit peptide are operably linked. Therefore the transit peptide is fused in frame to the nucleic acid sequence coding for proteins as shown in table II, application no. 21, column 3 and its homologs as disclosed in table I, application no. 21, columns 5 and 7.

[5571] for the disclosure of the paragraphs [0027.0.0.20] to [0029.0.0.19] see paragraphs [0027.0.0.0] and [0029.0.0.0] above.

[5572] Alternatively, nucleic acid sequences coding for the transit peptides may be chemically synthesized either in part or wholly according to structure of transit peptide sequences disclosed in the prior art. Said natural or chemically synthesized sequences can be directly linked to the sequences encoding the mature protein or via a linker nucleic acid sequence, which may be typically less than 500 base pairs, preferably less than 450, 400, 350, 300, 250 or 200 base pairs, more preferably less than 150, 100, 90, 80, 70, 60, 50, 40 or 30 base pairs and most preferably less than 25, 20, 15, 12, 9, 6 or 3 base pairs in length and are in frame to the coding sequence. Furthermore favorable nucleic acid sequences encoding transit peptides may comprise sequences derived from more than one biological and/or chemical source and may include a nucleic acid sequence derived from the amino-terminal region of the mature protein, which in its native state is linked to the transit peptide. In a preferred embodiment of the invention said amino-terminal region of the mature protein is typically less than 150 amino acids, preferably less than 140, 130, 120, 110, 100 or 90 amino acids, more preferably less than 80, 70, 60, 50, 40, 35, 30, 25 or 20 amino acids and most preferably less than 19, 18, 17, 16, 15, 14, 13, 12, 11 or 10 amino acids in length. But even shorter or longer stretches are also possible. In addition target sequences, which facilitate the transport of proteins to other cell compartments such as the vacuole, endoplasmic reticulum, Golgi complex, glyoxysomes, peroxisomes or mitochondria may be also part of the inventive nucleic acid sequence. The proteins translated from said inventive nucleic acid sequences are a kind of fusion proteins that means the nucleic acid sequences encoding the transit peptide for example the ones shown in table V, preferably the last one of the table are joint to the nucleic acid sequences shown in table I, application no. 21, columns 5 and 7. The person skilled in the art is able to join said sequences in a functional manner. Advantageously the transit peptide part is cleaved off from the protein part shown in table II, application no. 21., columns 5 and 7 during the transport preferably into the plastids. All products of the cleavage of the preferred transit peptide shown in the last line of table V have preferably the N-terminal amino acid sequences QIA CSS or QIA EFQLTT in front of the start methionine of the protein mentioned in table II, application no. 21, columns 5 and 7. Other short amino acid sequences of an range of 1 to 20 amino acids preferable 2 to 15 amino acids, more preferable 3 to 10 amino acids most preferably 4 to 8 amino acids are also possible in front of the start methionine of the protein mentioned in table II, application no. 21, columns 5 and 7. In case of the amino acid sequence QIA CSS the three amino acids in front of the start methionine are stemming from the LIC (=ligatation independent cloning) cassette. Said short amino acid sequence is preferred in the case of the expression of E. coli genes. In case of the amino acid sequence QIA EFQLTT the six amino acids in front of the start methionine are stemming from the LIC cassette. Said short amino acid sequence is preferred in the case of the expression of S. cerevisiae genes. The skilled worker knows that other short sequences are also useful in the expression of the genes mentioned in table I, application no. 21, columns 5 and 7. Furthermore the skilled worker is aware of the fact that there is not a need for such short sequences in the expression of the genes.

[5573] Table V: Examples of transit peptides disclosed by von Heijne et al. for the disclosure of Table V see paragraph [0030.2.0.0] above.

[5574] Alternatively to the targeting of the sequences shown in table II, application no. 21, columns 5 and 7 preferably of sequences in general encoded in the nucleus with the aid of the targeting sequences mentioned for example in table V alone or in combination with other targeting sequences preferably into the plastids, the nucleic acids of the invention can directly introduced into the plastidal genome. Therefore in a preferred embodiment the nucleic acid sequences shown in table I, application no. 21, columns 5 and 7 are directly introduced and expressed in plastids.

The term “introduced” in the context of this specification shall mean the insertion of a nucleic acid sequence into the organism by means of a “transfection”, “transduction” or preferably by “transformation”.
A plastid, such as a chloroplast, has been “transformed” by an exogenous (preferably foreign) nucleic acid sequence if nucleic acid sequence has been introduced into the plastid that means that this sequence has crossed the membrane or the membranes of the plastid. The foreign DNA may be integrated (covalently linked) into plastid DNA making up the genome of the plastid, or it may remain unintegrated (e.g., by including a chloroplast origin of replication). “Stably” integrated DNA sequences are those, which are inherited through plastid replication, thereby transferring new plastids, with the features of the integrated DNA sequence to the progeny.

[5575] for the disclosure of the paragraphs [0030.2.0.20] and [0030.3.0.20] see paragraphs [0030.2.0.0] and [0030.3.0.0] above.

[5576] For the inventive process it is of great advantage that by transforming the plastids the intraspecies specific transgene flow is blocked, because a lot of species such as corn, cotton and rice have a strict maternal inheritance of plastids. By placing the genes specified in table I, application no. 21, columns 5 and 7 or active fragments thereof in the plastids of plants, these genes will not be present in the pollen of said plants.

A further preferred embodiment of the invention relates to the use of so called “chloroplast localization sequences”, in which a first RNA sequence or molecule is capable of transporting or “chaperoning” a second RNA sequence, such as a RNA sequence transcribed from the sequences depicted in table I, application no. 21, columns 5 and 7 or a sequence encoding a protein, as depicted in table II, application no. 21, columns 5 and 7, from an external environment inside a cell or outside a plastid into a chloroplast. In one embodiment the chloroplast localization signal is substantially similar or complementary to a complete or intact viroid sequence. The chloroplast localization signal may be encoded by a DNA sequence, which is transcribed into the chloroplast localization RNA. The term “viroid” refers to a naturally occurring single stranded RNA molecule (Flores, C R Acad Sci III. 2001 October; 324(10): 943-52). Viroids usually contain about 200-500 nucleotides and generally exist as circular molecules. Examples of viroids that contain chloroplast localization signals include but are not limited to ASBVd, PLMVd, CChMVd and ELVd. The viroid sequence or a functional part of it can be fused to the sequences depicted in table I, application no. 21, columns 5 and 7 or a sequence encoding a protein, as depicted in table II, application no. 21, columns 5 and 7 in such a manner that the viroid sequence transports a sequence transcribed from a sequence as depicted in table I, application no. 21, columns 5 and 7 or a sequence encoding a protein as depicted in table II, application no. 21, columns 5 and 7 into the chloroplasts. A preferred embodiment uses a modified ASBVd (Navarro et al., Virology. 2000 Mar. 1; 268(1): 218-25).
In a further specific embodiment the protein to be expressed in the plastids such as the proteins depicted in table II, application no. 21, columns 5 and 7 are encoded by different nucleic acids. Such a method is disclosed in WO 2004/040973, which shall be incorporated by reference. WO 2004/040973 teaches a method, which relates to the translocation of an RNA corresponding to a gene or gene fragment into the chloroplast by means of a chloroplast localization sequence. The genes, which should be expressed in the plant or plants cells, are split into nucleic acid fragments, which are introduced into different compartments in the plant e.g. the nucleus, the plastids and/or mitochondria. Additionally plant cells are described in which the chloroplast contains a ribozyme fused at one end to an RNA encoding a fragment of a protein used in the inventive process such that the ribozyme can trans-splice the translocated fusion RNA to the RNA encoding the gene fragment to form and as the case may be reunite the nucleic acid fragments to an intact mRNA encoding a functional protein for example as disclosed in table II, application no. 21, columns 5 and 7.

[5577] In a preferred embodiment of the invention the nucleic acid sequences as shown in table I, application no. 21, columns 5 and 7 used in the inventive process are transformed into plastids, which are metabolical active. Those plastids should preferably maintain at a high copy number in the plant or plant tissue of interest, most preferably the chloroplasts found in green plant tissues, such as leaves or cotyledons or in seeds.

[5578] For a good expression in the plastids the nucleic acid sequences as shown in table I, application no. 21, columns 5 and 7 are introduced into an expression cassette using a preferably a promoter and terminator, which are active in plastids preferably a chloroplast promoter. Examples of such promoters include the psbA promoter from the gene from spinach or pea, the rbcL promoter, and the atpB promoter from corn.

[5579] for the disclosure of the paragraphs [0031.0.0.20] and [0032.0.0.20] see paragraphs [0031.0.0.0] and [0032.0.0.0] above.

[5580] Advantageously the process for the production of the fine chemical leads to an enhanced production of the fine chemical. The terms “enhanced” or “increase” mean at least a 10%, 20%, 30%, 40% or 50%, preferably at least 60%, 70%, 80%, 90% or 100%, more preferably 150%, 200%, 300%, 400% or 500% higher production of the fine chemical in comparison to the reference as defined below, e.g. that means in comparison to an organism without the aforementioned modification of the activity of a protein as shown in table II, application no. 21, column 3. Preferably the modification of the activity of a protein as shown in table II, application no. 21, column 3 or their combination can be achieved by joining the protein to a transit peptide.

[5581] Surprisingly it was found, that the transgenic expression of the Saccharomyces cerevisiae protein as shown in table II, application no. 21, column 3 in plastids of a plant such as Arabidopsis thaliana for example through the linkage to at least one targeting sequence for example as mentioned in table V conferred an increase in the fine chemical content of the transformed plants.

[5582] for the disclosure of this paragraph see paragraph [0035.0.0.0] above.

[5583] The sequence of b1228 (Accession number A64870) from Escherichia coli has been published in Blattner et al., Science 277 (5331), 1453-1474 (1997), and its activity is being defined as an “unknown protein”. Accordingly, in one embodiment, the process of the present invention comprises the use of an “unknown protein” or its homolog, e.g. as shown herein, for the production of the fine chemical, meaning of cerotic acid, in particular for increasing the amount of cerotic acid in free or bound form in an organism or a part thereof, as mentioned. In one embodiment, in the process of the present invention the activity of a b1228 protein is increased or generated, e.g. from Escherichia coli or a homolog thereof, preferably linked at least to one transit peptide as mentioned for example in table V.

In another embodiment, in the process of the present invention the activity of a b1228 protein is increased or generated in a subcellular compartment of the organism or organism cell such as in an organelle like a plastid or mitochondria.
The sequence of b2207 (Accession number E64990) from Escherichia coli has been published in Blattner et al., Science 277 (5331), 1453-1474 (1997), and its activity is being defined as “periplasmic nitrate reductase assembly protein”. Accordingly, in one embodiment, the process of the present invention comprises the use of a “periplasmic nitrate reductase assembly protein” or its homolog, e.g. as shown herein, for the production of the fine chemical, meaning of cerotic acid, in particular for increasing the amount of cerotic acid in free or bound form in an organism or a part thereof, as mentioned. In one embodiment, in the process of the present invention the activity of a b2207 protein is increased or generated, e.g. from Escherichia coli or a homolog thereof, preferably linked at least to one transit peptide as mentioned for example in table V.
In another embodiment, in the process of the present invention the activity of a b2207 protein is increased or generated in a subcellular compartment of the organism or organism cell such as in an organelle like a plastid or mitochondria.
The sequence of b2965 (Accession number NP_{—}417440) from Escherichia coli has been published in Blattner et al., Science 277 (5331), 1453-1474 (1997), and its activity is being defined as “ornithine decarboxylase”. Accordingly, in one embodiment, the process of the present invention comprises the use of a “ornithine decarboxylase” or its homolog, e.g. as shown herein, for the production of the fine chemical, meaning of cerotic acid, in particular for increasing the amount of cerotic acid in free or bound form in an organism or a part thereof, as mentioned. In one embodiment, in the process of the present invention the activity of a b2965 protein is increased or generated, e.g. from Escherichia coli or a homolog thereof, preferably linked at least to one transit peptide as mentioned for example in table V.
In another embodiment, in the process of the present invention the activity of a b2965 protein is increased or generated in a subcellular compartment of the organism or organism cell such as in an organelle like a plastid or mitochondria.
The sequence of b3568 (Accession number S47789) from Escherichia coli has been published in Blattner et al., Science 277 (5331), 1453-1474 (1997), and its activity is being defined as “xylose transport permease protein xylH”. Accordingly, in one embodiment, the process of the present invention comprises the use of a “xylose transport permease protein xylH” or its homolog, e.g. as shown herein, for the production of the fine chemical, meaning of lignoceric acid, in particular for increasing the amount of lignoceric acid in free or bound form in an organism or a part thereof, as mentioned. In one embodiment, in the process of the present invention the activity of a b3568 protein is increased or generated, e.g. from Escherichia coli or a homolog thereof, preferably linked at least to one transit peptide as mentioned for example in table V.
In another embodiment, in the process of the present invention the activity of a b3568 protein is increased or generated in a subcellular compartment of the organism or organism cell such as in an organelle like a plastid or mitochondria.
The sequence of YDR035W (Accession number NP_{—}010320) from Saccharomyces cerevisiae has been published in Goffeau et al., Science 274 (5287), 546-547, 1996 and Jacq et al., Nature 387 (6632 Suppl), 75-78 (1997), and its activity is being defined as a “3-deoxy-D-arabino-heptulosonate-7-phosphate (DAHP) synthase”. Accordingly, in one embodiment, the process of the present invention comprises the use of a “3-deoxy-D-arabino-heptulosonate-7-phosphate synthase” or its homolog, e.g. as shown herein, for the production of the fine chemical, meaning of lignoceric acid, in particular for increasing the amount of lignoceric acid in free or bound form in an organism or a part thereof, as mentioned. In one embodiment, in the process of the present invention the activity of a YDR035W protein is increased or generated, e.g. from Saccharomyces cerevisiae or a homolog thereof, preferably linked at least to one transit peptide as mentioned for example in table V.
The sequence of YDR035W (Accession number NP_{—}010320) from Saccharomyces cerevisiae has been published in Goffeau et al., Science 274 (5287), 546-547, 1996 and Jacq et al., Nature 387 (6632 Suppl), 75-78 (1997), and its activity is being defined as a “3-deoxy-D-arabino-heptulosonate-7-phosphate (DAHP) synthase”. Accordingly, in one embodiment, the process of the present invention comprises the use of a “3-deoxy-D-arabino-heptulosonate-7-phosphate synthase” or its homolog, e.g. as shown herein, for the production of the fine chemical, meaning of melissic acid, in particular for increasing the amount of milissic acid in free or bound form in an organism or a part thereof, as mentioned. In one embodiment, in the process of the present invention the activity of a YDR035W protein is increased or generated, e.g. from Saccharomyces cerevisiae or a homolog thereof, preferably linked at least to one transit peptide as mentioned for example in table V.
The sequence of YDR035W (Accession number NP_{—}010320) from Saccharomyces cerevisiae has been published in Goffeau et al., Science 274 (5287), 546-547, 1996 and Jacq et al., Nature 387 (6632 Suppl), 75-78 (1997), and its activity is being defined as a “3-deoxy-D-arabino-heptulosonate-7-phosphate (DAHP) synthase”. Accordingly, in one embodiment, the process of the present invention comprises the use of a “3-deoxy-D-arabino-heptulosonate-7-phosphate synthase” or its homolog, e.g. as shown herein, for the production of the fine chemical, meaning of lignoceric acid and milissic acid, in particular for increasing the amount of lignoceric acid and milissic in free or bound form in an organism or a part thereof, as mentioned. In one embodiment, in the process of the present invention the activity of a YDR035W protein is increased or generated, e.g. from Saccharomyces cerevisiae or a homolog thereof, preferably linked at least to one transit peptide as mentioned for example in table V.
In another embodiment, in the process of the present invention the activity of an YDR035W protein is increased or generated in a subcellular compartment of the organism or organism cell such as in an organelle like a plastid or mitochondria.
The sequence of YLR153C (Accession number NP_{—}013254) from Saccharomyces cerevisiae has been published in Johnston et al., Nature 387 (6632 Suppl), 87-90 (1997) and Goffeau et al., Science 274 (5287), 546-547, 1996, and its activity is being defined as a “acetyl CoA synthetase”. Accordingly, in one embodiment, the process of the present invention comprises the use of a “acetyl CoA synthetase” or its homolog, e.g. as shown herein, for the production of the fine chemical, meaning of lignoceric acid in free or bound form, in particular for increasing the amount of lignoceric acid in free or bound form in an organism or a part thereof, as mentioned. In one embodiment, in the process of the present invention the activity of a YLR153C protein is increased or generated, e.g. from Saccharomyces cerevisiae or a homolog thereof, preferably linked at least to one transit peptide as mentioned for example in table V.
In another embodiment, in the process of the present invention the activity of an YLR153C protein is increased or generated in a subcellular compartment of the organism or organism cell such as in an organelle like a plastid or mitochondria.

[5584] In one embodiment, the homolog of the b1228, b2207, b2965 or b3568 is a homolog having said activity and being derived from bacteria. In one embodiment, the homolog of the b1228, b2207, b2965 or b3568 is a homolog having said activity and being derived from Proteobacteria. In one embodiment, the homolog of the b1228, b2207, b2965 or b3568 is a homolog having said activity and being derived from Gammaproteobacteria. In one embodiment, the homolog of the b1228, b2207, b2965 or b3568 is a homolog having said activity and being derived from Enterobacteriales. In one embodiment, the homolog of the b1228, b2207, b2965 or b3568 is a homolog having said activity and being derived from Enterobacteriaceae. In one embodiment, the homolog of the b1228, b2207, b2965 or b3568 is a homolog having said activity and being derived from Escherichia, preferably from Escherichia coli.

In one embodiment, the homolog of the YDR035W or YLR153C is a homolog having said activity and being derived from an eukaryotic. In one embodiment, the homolog of the YDR035W or YLR153C is a homolog having said activity and being derived from Fungi. In one embodiment, the homolog of the YDR035W or YLR153C is a homolog having said activity and being derived from Ascomyceta. In one embodiment, the homolog of the YDR035W or YLR153C is a homolog having said activity and being derived from Saccharomycotina. In one embodiment, the homolog of the YDR035W or YLR153C is a homolog having said activity and being derived from Saccharomycetes. In one embodiment, the homolog of the YDR035W or YLR153C is a homolog having said activity and being derived from Saccharomycetales. In one embodiment, the homolog of the YDR035W or YLR153C is a homolog having said activity and being derived from Saccharomycetaceae. In one embodiment, the homolog of the YDR035W or YLR153C is a homolog having said activity and being derived from Saccharomycetes.

[5585] for the disclosure of this paragraph see paragraph [0038.0.0.0] above.

[5586] In accordance with the invention, a protein or polypeptide has the “activity of an protein as shown in table II, application no. 21, column 3” if its de novo activity, or its increased expression directly or indirectly leads to an increased in the fine chemical level in the organism or a part thereof, preferably in a cell of said organism, more preferably in an organelle such as a plastid or mitochondria of said organism and the protein has the above mentioned activities of a protein as shown in table II, application no. 21, column 3, preferably in the event the nucleic acid sequences encoding said proteins is functionally joined to the nucleic acid sequence of a transit peptide. Throughout the specification the activity or preferably the biological activity of such a protein or polypeptide or an nucleic acid molecule or sequence encoding such protein or polypeptide is identical or similar if it still has the biological or enzymatic activity of a protein as shown in table II, application no. 21, column 3, or which has at least 10% of the original enzymatic activity, preferably 20%, particularly preferably 30%, most particularly preferably 40% in comparison to a protein as shown in table II, application no. 21, column 3 of Saccharomyces cerevisiae.

[5587] for the disclosure of the paragraphs [0040.0.0.20] to [0047.0.0.20] see paragraphs [0040.0.0.0] to [0047.0.0.0] above.

[5588] Preferably, the reference, control or wild type differs form the subject of the present invention only in the cellular activity, preferably of the plastidial activity of the polypeptide of the invention, e.g. as result of an increase in the level of the nucleic acid molecule of the present invention or an increase of the specific activity of the polypeptide of the invention, e.g. by or in the expression level or activity of an protein having the activity of a protein as shown in table II, application no. 21, column 3 its biochemical or genetical causes and the increased amount of the fine chemical.

[5589] for the disclosure of the paragraphs [0049.0.0.20] to [0051.0.0.20] see paragraphs [0049.0.0.0] to [0051.0.0.0] above.

[5590] For example, the molecule number or the specific activity of the polypeptide or the nucleic acid molecule may be increased. Larger amounts of the fine chemical can be produced if the polypeptide or the nucleic acid of the invention is expressed de novo in an organism lacking the activity of said protein, preferably the nucleic acid molecules as mentioned in table I, application no. 21, columns 5 and 7 alone or preferably in combination with a transit peptide for example as mentioned in table V or in another embodiment by introducing said nucleic acid molecules into an organelle such as an plastid or mitochondria in the transgenic organism. However, it is also possible to modify the expression of the gene which is naturally present in the organisms, for example by integrating a nucleic acid sequence, encoding a plastidic targeting sequence in front (5 prime) of the coding sequence, leading to a functional preprotein, which is directed for example to the plastids.

[5591] for the disclosure of the paragraphs [0053.0.0.20] to [0058.0.0.20] see paragraphs [0053.0.0.0] to [0058.0.0.0] above.

[5592] In case the activity of the Escherichia coli protein b1228 or its homologs, e.g. a “unknown protein” is increased advantageously in an organelle such as a plastid or mitochondria, preferably, in one embodiment an increase of the fine chemical, preferably of cerotic acid in free or bound form between 43% and 137% or more is conferred.

In case the activity of the Escherichia coli protein b2207 or its homologs, e.g. a “periplasmic nitrate reductase assembly protein” is increased advantageously in an organelle such as a plastid or mitochondria, preferably, in one embodiment an increase of the fine chemical, preferably of cerotic acid in free or bound form between 41% and 55% or more is conferred.
In case the activity of the Escherichia coli protein b2965 or its homologs, e.g. a “ornithine decarboxylase” is increased advantageously in an organelle such as a plastid or mitochondria, preferably, in one embodiment an increase of the fine chemical, preferably of cerotic acid in free or bound form between 55% and 191% or more is conferred.
In case the activity of the Escherichia coli protein b3568 or its homologs, e.g. a “xylose transport permease protein xylH” is increased advantageously in an organelle such as a plastid or mitochondria, preferably, in one embodiment an increase of the fine chemical, preferably of lignoceric acid in free or bound form between 31% and 134% or more is conferred.
In case the activity of the Saccharomyces cerevisiae protein YDR035W or its homologs, e.g. a “3-deoxy-D-arabino-heptulosonate 7-phosphate (DAHP) synthase” is increased advantageously in an organelle such as a plastid or mitochondria, preferably, in one embodiment an increase of the fine chemical, preferably of lignoceric acid in free or bound form between 87% and 101% or more is conferred.
In case the activity of the Saccharomyces cerevisiae protein YDR035W or its homologs, e.g. a “3-deoxy-D-arabino-heptulosonate 7-phosphate (DAHP) synthase” is increased advantageously in an organelle such as a plastid or mitochondria, preferably, in one embodiment an increase of the fine chemical, preferably of mellissic acid in free or bound form between 30% and 75% or more is conferred.
In case the activity of the Saccharomyces cerevisiae protein YDR035W or its homologs, e.g. a “3-deoxy-D-arabino-heptulosonate 7-phosphate (DAHP) synthase” is increased advantageously in an organelle such as a plastid or mitochondria, preferably, in one embodiment an increase of the fine chemical, preferably of lignoceric acid in free or bound form between 53% and 126% or more is conferred.
In case the activity of the Saccharomyces cerevisiae protein YDR035W or its homologs, e.g. a “3-deoxy-D-arabino-heptulosonate 7-phosphate (DAHP) synthase” is increased advantageously in an organelle such as a plastid or mitochondria, preferably, in one embodiment an increase of the fine chemical, preferably of melissic acid in free or bound form between 30% and 75% or more and of lignoceric acid in free or bound form between 53% and 126% or more is conferred.
In case the activity of the Saccharomyces cerevisiae protein YLR153C or its homologs, e.g. a “acetyl CoA synthetase” is increased advantageously in an organelle such as a plastid or mitochondria, preferably, in one embodiment an increase of the fine chemical, preferably of lignoceric acid in free or bound form between 44% and 53% or more is conferred.

[5593] In case the activity of the Escherichia coli proteins b1228, b2207, b2965 b3568 or their homologs, are increased advantageously in an organelle such as a plastid or mitochondria, preferably an increase of the fine chemical such as cerotic acid, lignoceric acid or melissic acid or mixtures thereof in free or bound form is conferred.

In case the activity of the Saccharomyces cerevisiae protein YDR035W and/or YLR153C or their homologs, are increased advantageously in an organelle such as a plastid or mitochondria, preferably an increase of the fine chemical such as cerotic acid, lignoceric acid or melissic acid or mixtures thereof in free or bound form is conferred.

[5594] for the disclosure of the paragraphs [0061.0.0.20] and [0062.0.0.20] see paragraphs [0061.0.0.0] and [0062.0.0.0] above.

[5595] A protein having an activity conferring an increase in the amount or level of the fine chemical, preferably upon targeting to the plastids preferably has the structure of the polypeptide described herein, in particular of the polypeptides comprising the consensus sequence shown in table IV, application no. 21, column 7 or of the polypeptide as shown in the amino acid sequences as disclosed in table II, application no. 21, columns 5 and 7 or the functional homologues thereof as described herein, or is encoded by the nucleic acid molecule characterized herein or the nucleic acid molecule according to the invention, for example by the nucleic acid molecule as shown in table I, application no. 21, columns 5 and 7 or its herein described functional homologues and has the herein mentioned activity.

[5596] /

[5597] for the disclosure of the paragraphs [0065.0.0.20] and [0066.0.0.20] see paragraphs [0065.0.0.0] and [0066.0.0.0] above.

[5598] In one embodiment, the process of the present invention comprises one or more of the following steps
[5599] a) stabilizing a protein conferring the increased expression of a protein encoded by the nucleic acid molecule of the invention or of the polypeptide of the invention, e.g. of a polypeptide having the activity of a protein as indicated in table II, application no. 21, columns 5 and 7 or its homologs activity having herein-mentioned cerotic acid, lignoceric acid and/or melissic acid increasing activity; and/or
[5600] b) stabilizing a mRNA conferring the increased expression of a protein encoded by the nucleic acid molecule of the invention, which is in the sense of the invention a fusion of a nucleic acid sequence encoding a transit peptide and of a nucleic acid sequence as shown in table I, application no. 21, columns 5 and 7, e.g. a nucleic acid sequence encoding a polypeptide having the activity of a protein as indicated in table II, application no. 21, columns 5 and 7 or its homologs activity or of a mRNA encoding the polypeptide of the present invention having herein-mentioned cerotic acid, lignoceric acid and/or melissic acid increasing activity; and/or
[5601] c) increasing the specific activity of a protein conferring the increased expression of a protein encoded by the nucleic acid molecule of the invention or of the polypeptide of the present invention having herein-mentioned cerotic acid, lignoceric acid and/or melissic acid increasing activity, e.g. of a polypeptide having the activity of a protein as indicated in table II, application no. 21, columns 5 and 7 or its homologs activity, or decreasing the inhibitory regulation of the polypeptide of the invention; and/or
[5602] d) generating or increasing the expression of an endogenous or artificial transcription factor mediating the expression of a protein conferring the increased expression of a protein encoded by the nucleic acid molecule of the invention or of the polypeptide of the invention having herein-mentioned cerotic acid, lignoceric acid and/or melissic acid increasing activity, e.g. of a polypeptide having the activity of a protein as indicated in table II, application no. 21, columns 5 and 7 or its homologs activity; and/or
[5603] e) stimulating activity of a protein conferring the increased expression of a protein encoded by the nucleic acid molecule of the present invention or a polypeptide of the present invention having herein-mentioned cerotic acid, lignoceric acid and/or melissic acid increasing activity, e.g. of a polypeptide having the activity of a protein as indicated in table II, application no. 21, columns 5 and 7 or its homologs activity, by adding one or more exogenous inducing factors to the organisms or parts thereof; and/or
[5604] f) expressing a transgenic gene encoding a protein conferring the increased expression of a polypeptide encoded by the nucleic acid molecule of the present invention or a polypeptide of the present invention, having herein-mentioned cerotic acid, lignoceric acid and/or melissic acid increasing activity, e.g. of a polypeptide having the activity of a protein as indicated in table II, application no. 21, columns 5 and 7 or its homologs activity, and/or
[5605] g) increasing the copy number of a gene conferring the increased expression of a nucleic acid molecule encoding a polypeptide encoded by the nucleic acid molecule of the invention or the polypeptide of the invention having herein-mentioned cerotic acid, lignoceric acid and/or melissic acid increasing activity, e.g. of a polypeptide having the activity of a protein as indicated in table II, application no. 21, columns 5 and 7 or its homologs activity; and/or
[5606] h) increasing the expression of the endogenous gene encoding the polypeptide of the invention, e.g. a polypeptide having the activity of a protein as indicated in table II, application no. 21, columns 5 and 7 or its homologs activity, by adding positive expression or removing negative expression elements, e.g. homologous recombination can be used to either introduce positive regulatory elements like for plants the 35S enhancer into the promoter or to remove repressor elements form regulatory regions. Further gene conversion methods can be used to disrupt repressor elements or to enhance to activity of positive elements. Positive elements can be randomly introduced in plants by T-DNA or transposon mutagenesis and lines can be identified in which the positive elements have be integrated near to a gene of the invention, the expression of which is thereby enhanced; and/or
[5607] i) modulating growth conditions of an organism in such a manner, that the expression or activity of the gene encoding the protein of the invention or the protein itself is enhanced for example microorganisms or plants can be grown for example under a higher temperature regime leading to an enhanced expression of heat shock proteins, which can lead an enhanced fine chemical production; and/or
[5608] j) selecting of organisms with especially high activity of the proteins of the invention from natural or from mutagenized resources and breeding them into the target organisms, eg the elite crops; and/or
[5609] k) directing a protein encoded by the nucleic acid molecule of the invention or of the polypeptide of the present invention having herein-mentioned cerotic acid, lignoceric acid and/or melissic acid increasing activity, e.g. of polypeptide having the activity of a protein as indicated in table II, application no. 21, columns 5 and 7 or its homologs activity, to the plastids by the addition of a plastidial targeting sequence; and/or
[5610] l) generating the expression of a protein encoded by the nucleic acid molecule of the invention or of the polypeptide of the present invention having herein-mentioned cerotic acid, lignoceric acid and/or melissic acid increasing activity, e.g. of a polypeptide having the activity of a protein as indicated in table II, application no. 21, columns 5 and 7 or its homologs activity in plastids by the stable or transient transformation advantageously stable transformation of organelles preferably plastids with an inventive nucleic acid sequence preferably in form of an expression cassette containing said sequence leading to the plastidial expression of the nucleic acids or polypeptides of the invention; and/or
[5611] m) generating the expression of a protein encoded by the nucleic acid molecule of the invention or of the polypeptide of the present invention having herein-mentioned cerotic acid, lignoceric acid and/or melissic acid increasing activity, e.g. of a polypeptide having the activity of a protein as indicated in table II, application no. 21, columns 5 and 7 or its homologs activity in plastids by integration of a nucleic acid of the invention into the plastidal genome under control of preferable a plastidial promoter.

[5612] Preferably, said mRNA is the nucleic acid molecule of the present invention and/or the protein conferring the increased expression of a protein encoded by the nucleic acid molecule of the present invention alone or link to a transit nucleic acid sequence or transit peptide encoding nucleic acid sequence or the polypeptide having the herein mentioned activity, e.g. conferring the increase of the fine chemical after increasing the expression or activity of the encoded polypeptide preferably in organelles such as plastids or having the activity of a polypeptide having an activity as the protein as shown in table II, application no. 21, column 3 or its homologs. Preferably the increase of the fine chemical takes place in plastids.

[5613] for the disclosure of the paragraphs [0069.0.0.20] to [0079.0.0.19] see paragraphs [0069.0.0.0] to [0079.0.0.0] above.

[5614] The activation of an endogenous polypeptide having above-mentioned activity, e.g. having the activity of a protein as shown in table II, application no. 21, column 3 or of the polypeptide of the invention, e.g. conferring the increase of the fine chemical after increase of expression or activity in the cytsol and/or in an organelle like a plastid, preferentially in the plastid, can also be increased by introducing a synthetic transcription factor, which binds close to the coding region of the gene encoding the protein as shown in table II, application no. 21, column 3 and activates its transcription. A chimeric zinc finger protein can be constructed, which comprises a specific DNA-binding domain and an activation domain as e.g. the VP16 domain of Herpes Simplex virus. The specific binding domain can bind to the regulatory region of the gene encoding the protein as shown in table II, application no. 21, column 3. The expression of the chimeric transcription factor in a organism, in particular in a plant, leads to a specific expression of the protein as shown in table II, application no. 21, column 3, see e.g. in WO01/52620, Oriz, Proc. Natl. Acad. Sci. USA, 2002, Vol. 99, 13290 or Guan, Proc. Natl. Acad. Sci. USA, 2002, Vol. 99, 13296.

[5615] for the disclosure of the paragraphs [0081.0.0.20] to [0084.0.0.19] see paragraphs [0081.0.0.0] to [0084.0.0.0] above.

[5616] Owing to the introduction of a gene or a plurality of genes conferring the expression of the nucleic acid molecule of the invention or the nucleic acid molecule used in the method of the invention or the polypeptide of the invention or the polypeptide used in the method of the invention as described below, for example the nucleic acid construct mentioned below into an organism alone or in combination with other genes, it is possible not only to increase the biosynthetic flux towards the end product, but also to increase, modify or create de novo an advantageous, preferably novel metabolites composition in the organism, e.g. cerotic acid, lignoceric acid and/or melissic acid and mixtures thereof.

[5617] for the disclosure of this paragraph see paragraph [0086.0.0.0] above.

[5618] By influencing the metabolism thus, it is possible to produce, in the process according to the invention, further advantageous compounds. Examples of such compounds are, in addition to cerotic acid, lignoceric acid and/or melissic acid compounds such as other fatty acid such as palmitic acid, oleic acid, linoleic acid, linolenic acid, vitamins, amino acids or fatty acids.

[5619] Accordingly, in one embodiment, the process according to the invention relates to a process, which comprises:
[5620] a) providing a non-human organism, preferably a microorganism, a non-human animal, a plant or animal cell, a plant or animal tissue or a plant, more preferably a microorganism, a plant or a plant tissue;
[5621] b) increasing the activity of a protein as shown in table II, application no. 21, column 3 or of a polypeptide being encoded by the nucleic acid molecule of the present invention and described below, e.g. conferring an increase of the fine chemical in the organism, preferably in the microorganism, the non-human animal, the plant or animal cell, the plant or animal tissue or the plant, more preferably a microorganism, a plant or a plant tissue, in the cytsol or in the plastids, preferentially in the plastids,
[5622] c) growing the organism, preferably the microorganism, the non-human animal, the plant or animal cell, the plant or animal tissue or the plant under conditions which permit the production of the fine chemical in the organism, preferably the microorganism, the plant cell, the plant tissue or the plant; and
[5623] d) if desired, recovering, optionally isolating, the free and/or bound the fine chemical and, optionally further free and/or bound amino acids synthesized by the organism, the microorganism, the non-human animal, the plant or animal cell, the plant or animal tissue or the plant.

[5624] The organism, in particular the microorganism, non-human animal, the plant or animal cell, the plant or animal tissue or the plant is advantageously grown in such a way that it is not only possible to recover, if desired isolate the free or bound the fine chemical or the free and bound the fine chemical but as option it is also possible to produce, recover and, if desired isolate, other free or/and bound fatty acids such as as myristic acid, palmitic acid, stearic acid, arachidic acid, oleic acid, linoleic acid, linolenic acid or erucic acid or mixtures thereof.

[5625] for the disclosure of the paragraphs [0090.0.0.20] to [0097.0.0.19] see paragraphs [0090.0.0.0] to [0097.0.0.0] above.

[5626] With regard to the nucleic acid sequence as depicted a nucleic acid construct which contains a nucleic acid sequence mentioned herein or an organism (=transgenic organism) which is transformed with said nucleic acid sequence or said nucleic acid construct, “transgene” means all those constructs which have been brought about by genetic manipulation methods, preferably in which either
[5627] a) the nucleic acid sequence as shown in table I, application no. 21, columns 5 and 7 or a derivative thereof, or
[5628] b) a genetic regulatory element, for example a promoter, which is functionally linked to the nucleic acid sequence as shown table I, application no. 21, columns 5 and 7 or a derivative thereof, or
[5629] c) (a) and (b)
   is/are not present in its/their natural genetic environment or has/have been modified by means of genetic manipulation methods, it being possible for the modification to be, by way of example, a substitution, addition, deletion, inversion or insertion of one or more nucleotide. “Natural genetic environment” means the natural chromosomal locus in the organism of origin or the presence in a genomic library. In the case of a genomic library, the natural, genetic environment of the nucleic acid sequence is preferably at least partially still preserved. The environment flanks the nucleic acid sequence at least on one side and has a sequence length of at least 50 bp, preferably at least 500 bp, particularly preferably at least 1000 bp, very particularly preferably at least 5000 bp.

[5630] The use of the nucleic acid sequence according to the invention or of the nucleic acid construct according to the invention for the generation of transgenic plants is therefore also subject matter of the invention. As mentioned above the inventive nucleic acid sequence consists advantageously of the nucleic acid sequences as depicted in the sequence protocol and disclosed in table I, application no. 21, columns 5 and 7 joined to a nucleic acid sequence encoding a transit peptide, or a targeting nucleic acid sequence which directs the nucleic acid sequences disclosed in table I, application no. 21, columns 5 and 7 to the organelle preferentially the plastids. Alternatively the inventive nucleic acids sequences consist advantageously of the nucleic acid sequences as depicted in the sequence protocol and disclosed in table I, application no. 21, columns 5 and 7 joined preferably to a nucleic acids sequence mediating the stable integration of nucleic acids into the plastidial genome and optionally sequences mediating the transcription of the sequence in the plastidial compartment. A transient expression is in principal also desirable and possible.

[5631] for the disclosure of this paragraph see paragraph [0100.0.0.0] above.

[5632] In an advantageous embodiment of the invention, the organism takes the form of a plant whose cerotic acid, lignoceric acid and/or melissic acid content is modified advantageously owing to the nucleic acid molecule of the present invention expressed. This is important for plant breeders since, for example, the nutritional value of plants for animals is dependent on the abovementioned cerotic acid, lignoceric acid and/or melissic acid and the general amount of cerotic acid, lignoceric acid and/or melissic acid in feed. After the activity of the protein as shown in table II, application no. 21, column 3 has been increased or generated, or after the expression of nucleic acid molecule or polypeptide according to the invention has been generated or increased, the transgenic plant generated thus is grown on or in a nutrient medium or else in the soil and subsequently harvested.

[5633] for the disclosure of the paragraphs [0102.0.0.20] to [0110.0.0.20] see paragraphs [0102.0.0.0] to [0110.0.0.0] above.

[5634] In a preferred embodiment, the fine chemical (cerotic acid, lignoceric acid and/or melissic acid) is produced in accordance with the invention and, if desired, is isolated. The production of further fatty acids such as myrisitic acid, palmitic acid, stearic acid, arachidic acid, oleic acid, linoleic acid, linolenic acid or erucic acid and mixtures thereof or mixtures of other fatty acids by the process according to the invention is advantageous. It may be advantageous to increase the pool of free fatty acids such as cerotic acid, lignoceric acid and/or melissic acid and other as aforementioned in the transgenic organisms by the process according to the invention in order to isolate high amounts of the pure fine chemical.

[5635] In another preferred embodiment of the invention a combination of the increased expression of the nucleic acid sequence or the protein of the invention together with the transformation of a nucleic acid encoding a protein or polypeptide for example another gene of the cerotic acid, lignoceric acid and/or melissic acid biosynthesis, or a compound, which functions as a sink for the desired cerotic acid, lignoceric acid and/or melissic acid in the organism is useful to increase the production of the respective fine chemical.

[5636] In a preferred embodiment, the respective fine chemical is produced in accordance with the invention and, if desired, is isolated. The production of further fatty acids other than cerotic acid, lignoceric acid and/or melissic acid or compounds for which the respective fine chemical is a biosynthesis precursor compounds, e.g. shorter fatty acids such as acetic acid, amino acids, or mixtures thereof or mixtures of other fatty acids, in particular of cerotic acid, lignoceric acid and/or melissic acid, by the process according to the invention is advantageous.

[5637] In the case of the fermentation of microorganisms, the abovementioned desired fine chemical may accumulate in the medium and/or the cells. If microorganisms are used in the process according to the invention, the fermentation broth can be processed after the cultivation. Depending on the requirement, all or some of the biomass can be removed from the fermentation broth by separation methods such as, for example, centrifugation, filtration, decanting or a combination of these methods, or else the biomass can be left in the fermentation broth. The fermentation broth can subsequently be reduced, or concentrated, with the aid of known methods such as, for example, rotary evaporator, thin-layer evaporator, falling film evaporator, by reverse osmosis or by nanofiltration. Afterwards advantageously further compounds for formulation can be added such as corn starch or silicates. This concentrated fermentation broth advantageously together with compounds for the formulation can subsequently be processed by lyophilization, spray drying, and spray granulation or by other methods. Preferably the respective fine chemical comprising compositions are isolated from the organisms, such as the microorganisms or plants or the culture medium in or on which the organisms have been grown, or from the organism and the culture medium, in the known manner, for example via extraction, distillation, crystallization, chromatography or a combination of these methods. These purification methods can be used alone or in combination with the aforementioned methods such as the separation and/or concentration methods.

[5638] Transgenic plants which comprise the fine chemical such as cerotic acid, lignoceric acid and/or melissic acid synthesized in the process according to the invention can advantageously be marketed directly without there being any need for the fine chemical synthesized to be isolated. Plants for the process according to the invention are listed as meaning intact plants and all plant parts, plant organs or plant parts such as leaf, stem, seeds, root, tubers, anthers, fibers, root hairs, stalks, embryos, calli, cotelydons, petioles, flowers, harvested material, plant tissue, reproductive tissue and cell cultures which are derived from the actual transgenic plant and/or can be used for bringing about the transgenic plant. In this context, the seed comprises all parts of the seed such as the seed coats, epidermal cells, seed cells, endosperm or embryonic tissue.

However, the respective fine chemical produced in the process according to the invention can also be isolated from the organisms, advantageously plants, (in the form of their organic extracts, e.g. alcohol, or other organic solvents or water containing extract and/or free cerotic acid, lignoceric acid and/or melissic acid or other extracts. The respective fine chemical produced by this process can be obtained by harvesting the organisms, either from the medium in which they grow, or from the field. This can be done via pressing or extraction of the plant parts. To increase the efficiency of extraction it is beneficial to clean, to temper and if necessary to hull and to flake the plant material. To allow for greater ease of disruption of the plant parts, specifically the seeds, they can previously be comminuted, steamed or roasted. Seeds, which have been pretreated in this manner can subsequently be pressed or extracted with solvents such as organic solvents like warm hexane or water or mixtures of organic solvents. The solvent is subsequently removed. In the case of microorganisms, the latter are, after harvesting, for example extracted directly without further processing steps or else, after disruption, extracted via various methods with which the skilled worker is familiar. Thereafter, the resulting products can be processed further, i.e. degummed and/or refined. In this process, substances such as the plant mucilages and suspended matter can be first removed. What is known as desliming can be affected enzymatically or, for example, chemico-physically by addition of acid such as phosphoric acid.
Because cerotic acid, lignoceric acid and/or melissic acid in microorganisms are localized intracellular, their recovery essentially comes down to the isolation of the biomass. Well-established approaches for the harvesting of cells include filtration, centrifugation and coagulation/flocculation as described herein. Of the residual hydrocarbon, adsorbed on the cells, has to be removed. Solvent extraction or treatment with surfactants have been suggested for this purpose.
Well-established approaches for the harvesting of cells include filtration, centrifugation and coagulation/flocculation as described herein. Of the residual hydrocarbon, adsorbed on the cells, has to be removed. Solvent extraction or treatment with surfactants have been suggested for this purpose. However, it can be advantageous to avoid this treatment as it can result in cells devoid of most carotenoids.

[5639] The identity and purity of the compound(s) isolated can be determined by prior-art techniques. They encompass high-performance liquid chromatography (HPLC), gas chromatography (GC), spectroscopic methods, mass spectrometry (MS), staining methods, thin-layer chromatography, NIRS, enzyme assays or microbiological assays. These analytical methods are compiled in: Patek et al. (1994) Appl. Environ. Microbiol. 60:133-140; Malakhova et al. (1996) Biotekhnologiya 11 27-32; and Schmidt et al. (1998) Bioprocess Engineer. 19:67-70. Ulmann's Encyclopedia of Industrial Chemistry (1996) Bd. A27, VCH Weinheim, pp. 89-90, pp. 521-540, pp. 540-547, pp. 559-566, 575-581 and pp. 581-587; Michal, G (1999) Biochemical Pathways: An Atlas of Biochemistry and Molecular Biology, John Wiley and Sons; Fallon, A. et al. (1987) Applications of HPLC in Biochemistry in: Laboratory Techniques in Biochemistry and Molecular Biology, vol. 17.

[5640] Cerotic acid, lignoceric acid and/or melissic acid can for example be analyzed advantageously via HPLC, LC or GC separation and MS (masspectrometry) detection methods. The unambiguous detection for the presence of behenic acid, lignoceric acid, cerotic acid or melissic acid containing products can be obtained by analyzing recombinant organisms using analytical standard methods: LC, LC-MS, MS or TLC). The material to be analyzed can be disrupted by sonication, grinding in a glass mill, liquid nitrogen and grinding, cooking, or via other applicable methods.

[5641] In a preferred embodiment, the present invention relates to a process for the production of the fine chemical comprising or generating in an organism or a part thereof, preferably in a cell compartment such as a plastid or mitochondria, the expression of at least one nucleic acid molecule comprising a nucleic acid molecule selected from the group consisting of:
[5642] a) nucleic acid molecule encoding, preferably at least the mature form, of the polypeptide shown in table II, application no. 21, columns 5 and 7 or a fragment thereof, which confers an increase in the amount of the fine chemical in an organism or a part thereof;
[5643] b) nucleic acid molecule comprising, preferably at least the mature form, of the nucleic acid molecule shown in table I, application no. 21, columns 5 and 7;
[5644] c) nucleic acid molecule whose sequence can be deduced from a polypeptide sequence encoded by a nucleic acid molecule of (a) or (b) as result of the degeneracy of the genetic code and conferring an increase in the amount of the fine chemical in an organism or a part thereof;
[5645] d) nucleic acid molecule encoding a polypeptide which has at least 50% identity with the amino acid sequence of the polypeptide encoded by the nucleic acid molecule of (a) to (c) and conferring an increase in the amount of the fine chemical in an organism or a part thereof;
[5646] e) nucleic acid molecule which hybridizes with a nucleic acid molecule of (a) to (c) under stringent hybridisation conditions and conferring an increase in the amount of the fine chemical in an organism or a part thereof;
[5647] f) nucleic acid molecule encoding a polypeptide, the polypeptide being derived by substituting, deleting and/or adding one or more amino acids of the amino acid sequence of the polypeptide encoded by the nucleic acid molecules (a) to (d), preferably to (a) to (c) and conferring an increase in the amount of the fine chemical in an organism or a part thereof;
[5648] g) nucleic acid molecule encoding a fragment or an epitope of a polypeptide which is encoded by one of the nucleic acid molecules of (a) to (e), preferably to (a) to (c) and conferring an increase in the amount of the fine chemical in an organism or a part thereof;
[5649] h) nucleic acid molecule comprising a nucleic acid molecule which is obtained by amplifying nucleic acid molecules from a cDNA library or a genomic library using the primers shown in table III, application no. 21, column 7 and conferring an increase in the amount of the fine chemical in an organism or a part thereof;
[5650] i) nucleic acid molecule encoding a polypeptide which is isolated, e.g. from an expression library, with the aid of monoclonal antibodies against a polypeptide encoded by one of the nucleic acid molecules of (a) to (h), preferably to (a) to (c), and conferring an increase in the amount of the fine chemical in an organism or a part thereof;
[5651] j) nucleic acid molecule which encodes a polypeptide comprising the consensus sequence shown in table IV, application no. 21, column 7 and conferring an increase in the amount of the fine chemical in an organism or a part thereof;
[5652] k) nucleic acid molecule comprising one or more of the nucleic acid molecule encoding the amino acid sequence of a polypeptide encoding a domain of the polypeptide shown in table II, application no. 21, columns 5 and 7 and conferring an increase in the amount of the fine chemical in an organism or a part thereof; and
[5653] l) nucleic acid molecule which is obtainable by screening a suitable library under stringent conditions with a probe comprising one of the sequences of the nucleic acid molecule of (a) to (k), preferably to (a) to (c), or with a fragment of at least 15 nt, preferably 20 nt, 30 nt, 50 nt, 100 nt, 200 nt or 500 nt of the nucleic acid molecule characterized in (a) to (k), preferably to (a) to (c), and conferring an increase in the amount of the fine chemical in an organism or a part thereof;
   or which comprises a sequence which is complementary thereto.

[5654] In one embodiment, the nucleic acid molecule used in the process of the invention distinguishes over the sequence indicated in table I A, application no. 21, columns 5 and 7 by one or more nucleotides. In one embodiment, the nucleic acid molecule used in the process of the invention does not consist of the sequence indicated in table I A, application no. 21, columns 5 and 7. In one embodiment, the nucleic acid molecule used in the process of the invention is less than 100%, 99.999%, 99.99%, 99.9% or 99% identical to a sequence indicated in table I A, application no. 21, columns 5 and 7. In another embodiment, the nucleic acid molecule does not encode a polypeptide of a sequence indicated in table II A, application no. 21, columns 5 and 7.

[5655] In one embodiment, the nucleic acid molecule used in the process of the invention distinguishes over the sequence indicated in table I B, application no. 21, columns 5 and 7, by one or more nucleotides. In one embodiment, the nucleic acid molecule used in the process of the invention does not consist of the sequence indicated in table I B, application no. 21, columns 5 and 7. In one embodiment, the nucleic acid molecule used in the process of the invention is less than 100%, 99.999%, 99.99%, 99.9% or 99% identical to a sequence indicated in table I B, application no. 21, columns 5 and 7. In another embodiment, the nucleic acid molecule does not encode a polypeptide of a sequence indicated in table II B, application no. 21, columns 5 and 7.

[5656] In one embodiment, the nucleic acid molecule used in the process distinguishes over the sequence shown in table I, application no. 21, columns 5 and 7 by one or more nucleotides or does not consist of the sequence shown in table I, application no. 21, columns 5 and 7. In one embodiment, the nucleic acid molecule of the present invention is less than 100%, 99.999%, 99.99%, 99.9% or 99% identical to the sequence shown in table I, application no. 21, columns 5 and 7. In another embodiment, the nucleic acid molecule does not encode a polypeptide of the sequence shown in table II, application no. 21, columns 5 and 7.

[5657] for the disclosure of the paragraphs [0118.0.0.20] to [0120.0.0.20] see paragraphs [0118.0.0.0] to [0120.0.0.0] above.

[5658] Nucleic acid molecules with the sequence shown in table I, application no. 21, columns 5 and 7, nucleic acid molecules which are derived from the amino acid sequences shown in table II, application no. 21, columns 5 and 7 or from polypeptides comprising the consensus sequence shown in table IV, application no. 21, column 7, or their derivatives or homologues encoding polypeptides with the enzymatic or biological activity of a protein as shown in table II, application no. 21, column 3 or conferring the fine chemical increase after increasing its expression or activity are advantageously increased in the process according to the invention by expression either in the cytsol or in an organelle such as a plastid or mitochondria or both, preferably in plastids.

[5659] for the disclosure of this paragraph see paragraph [0122.0.0.0] above.

[5660] Nucleic acid molecules, which are advantageous for the process according to the invention and which encode polypeptides with the activity of a protein as shown in table II, application no. 21, column 3 can be determined from generally accessible databases.

[5661] for the disclosure of this paragraph see paragraph [0124.0.0.0] above.

[5662] The nucleic acid molecules used in the process according to the invention take the form of isolated nucleic acid sequences, which encode polypeptides with the activity of the proteins as shown in table II, application no. 21, column 3 and conferring the fine chemical increase by expression either in the cytsol or in an organelle such as a plastid or mitochondria or both, preferably in plastids.

[5663] for the disclosure of the paragraphs [0126.0.0.20] to [0133.0.0.20] see paragraphs [0126.0.0.0] to [0133.0.0.0] above.

[5664] However, it is also possible to use artificial sequences, which differ in one or more bases from the nucleic acid sequences found in organisms, or in one or more amino acid molecules from polypeptide sequences found in organisms, in particular from the polypeptide sequences shown in table II, application no. 21, columns 5 and 7 or the functional homologues thereof as described herein, preferably conferring above-mentioned activity, i.e. conferring the fine chemical increase after increasing its activity, e.g. after increasing the activity of a protein as shown in table II, application no. 21, column 3 by for example expression either in the cytsol or in an organelle such as a plastid or mitochondria or both, preferably in plastids.

[5665] for the disclosure of the paragraphs [0135.0.0.20] to [0140.0.0.20] see paragraphs [0135.0.0.0] to [0140.0.0.0] above.

[5666] Synthetic oligonucleotide primers for the amplification, e.g. as shown in table III, application no. 21, column 7, by means of polymerase chain reaction can be generated on the basis of a sequence shown herein, for example the sequence shown in table I, application no. 21, columns 5 and 7 or the sequences derived from table II, application no. 21, columns 5 and 7.

[5667] Moreover, it is possible to identify conserved regions from various organisms by carrying out protein sequence alignments with the polypeptide used in the process of the invention, in particular with sequences of the polypeptide of the invention, from which conserved regions, and in turn, degenerate primers can be derived. Conserved regions are those, which show a very little variation in the amino acid in one particular position of several homologs from different origin. The consensus sequence shown in table IV, application no. 21, column 7 is derived from said alignments.

[5668] Degenerated primers can then be utilized by PCR for the amplification of fragments of novel proteins having above-mentioned activity, e.g. conferring the increase of the fine chemical after increasing the expression or activity or having the activity of a protein as shown in table II, application no. 21, column 3 or further functional homologs of the polypeptide of the invention from other organisms.

[5669] for the disclosure of the paragraphs [0144.0.0.20] to [0151.0.0.20] see paragraphs [0144.0.0.0] to [0151.0.0.0] above.

[5670] Polypeptides having above-mentioned activity, i.e. conferring the fine chemical increase, derived from other organisms, can be encoded by other DNA sequences which hybridize to the sequences shown in table I, application no. 21, columns 5 and 7, preferably of table I B, application no. 21, columns 5 and 7 under relaxed hybridization conditions and which code on expression for peptides having the cerotic acid, lignoceric acid and/or melissic acid increasing activity.

[5671] for the disclosure of the paragraphs [0153.0.0.20] to [0159.0.0.20] see paragraphs [0153.0.0.0] to [0159.0.0.0] above.

[5672] Further, the nucleic acid molecule of the invention comprises a nucleic acid molecule, which is a complement of one of the nucleotide sequences of above mentioned nucleic acid molecules or a portion thereof. A nucleic acid molecule which is complementary to one of the nucleotide sequences shown in table I, application no. 21, columns 5 and 7, preferably shown in table I B, application no. 21, columns 5 and 7 is one which is sufficiently complementary to one of the nucleotide sequences shown in table I, application no. 21, columns 5 and 7, preferably shown in table I B, application no. 21, columns 5 and 7 such that it can hybridize to one of the nucleotide sequences shown in table I, application no. 21, columns 5 and 7, preferably shown in table I B, application no. 21, columns 5 and 7, thereby forming a stable duplex. Preferably, the hybridisation is performed under stringent hybridization conditions. However, a complement of one of the herein disclosed sequences is preferably a sequence complement thereto according to the base pairing of nucleic acid molecules well known to the skilled person. For example, the bases A and G undergo base pairing with the bases T and U or C, resp. and visa versa. Modifications of the bases can influence the base-pairing partner.

[5673] The nucleic acid molecule of the invention comprises a nucleotide sequence which is at least about 30%, 35%, 40% or 45%, preferably at least about 50%, 55%, 60% or 65%, more preferably at least about 70%, 80%, or 90%, and even more preferably at least about 95%, 97%, 98%, 99% or more homologous to a nucleotide sequence shown in table I, application no. 21, columns 5 and 7, preferably shown in table I B, application no. 21, columns 5 and 7, or a portion thereof and preferably has above mentioned activity, in particular having a fine chemical increasing activity after increasing the activity or an activity of a gene product as shown in table II, application no. 21, column 3 by for example expression either in the cytsol or in an organelle such as a plastid or mitochondria or both, preferably in plastids.

[5674] The nucleic acid molecule of the invention comprises a nucleotide sequence which hybridizes, preferably hybridizes under stringent conditions as defined herein, to one of the nucleotide sequences shown in table I, application no. 21, columns 5 and 7, preferably shown in table I B, application no. 21, columns 5 and 7, or a portion thereof and encodes a protein having above-mentioned activity, e.g. conferring of a cerotic acid, lignoceric acid and/or melissic acid increase by for example expression either in the cytsol or in an organelle such as a plastid or mitochondria or both, preferably in plastids, and optionally, the activity of a protein as shown in table II, application no. 21, column 3.

[5675] Moreover, the nucleic acid molecule of the invention can comprise only a portion of the coding region of one of the sequences shown in table I, application no. 21, columns 5 and 7, preferably shown in table I B, application no. 21, columns 5 and 7, for example a fragment which can be used as a probe or primer or a fragment encoding a biologically active portion of the polypeptide of the present invention or of a polypeptide used in the process of the present invention, i.e. having above-mentioned activity, e.g. conferring an increase of the fine chemical if its activity is increased by for example expression either in the cytsol or in an organelle such as a plastid or mitochondria or both, preferably in plastids. The nucleotide sequences determined from the cloning of the present protein-according-to-the-invention-encoding gene allows for the generation of probes and primers designed for use in identifying and/or cloning its homologues in other cell types and organisms. The probe/primer typically comprises substantially purified oligonucleotide. The oligonucleotide typically comprises a region of nucleotide sequence that hybridizes under stringent conditions to at least about 12, 15 preferably about 20 or 25, more preferably about 40, 50 or 75 consecutive nucleotides of a sense strand of one of the sequences set forth, e.g., in table I, application no. 21, columns 5 and 7, an anti-sense sequence of one of the sequences, e.g., set forth in table I, application no. 21, columns 5 and 7, preferably shown in table I B, application no. 21, columns 5 and 7, or naturally occurring mutants thereof. Primers based on a nucleotide of invention can be used in PCR reactions to clone homologues of the polypeptide of the invention or of the polypeptide used in the process of the invention, e.g. as the primers described in the examples of the present invention, e.g. as shown in the examples. A PCR with the primers shown in table III, application no. 21, column 7 will result in a fragment of the gene product as shown in table II, column 3.

[5676] for the disclosure of this paragraph see paragraph [0164.0.0.0] above.

[5677] The nucleic acid molecule of the invention encodes a polypeptide or portion thereof which includes an amino acid sequence which is sufficiently homologous to the amino acid sequence shown in table II, application no. 21, columns 5 and 7 such that the protein or portion thereof maintains the ability to participate in the fine chemical production, in particular a cerotic acid, lignoceric acid and/or melissic acid increasing activity as mentioned above or as described in the examples in plants or microorganisms is comprised.

[5678] As used herein, the language “sufficiently homologous” refers to proteins or portions thereof which have amino acid sequences which include a minimum number of identical or equivalent amino acid residues (e.g., an amino acid residue which has a similar side chain as an amino acid residue in one of the sequences of the polypeptide of the present invention) to an amino acid sequence shown in table II, application no. 21, columns 5 and 7 such that the protein or portion thereof is able to participate in the increase of the fine chemical production. For examples having the activity of a protein as shown in table II, column 3 and as described herein.

[5679] In one embodiment, the nucleic acid molecule of the present invention comprises a nucleic acid that encodes a portion of the protein of the present invention. The protein is at least about 30%, 35%, 40%, 45% or 50%, preferably at least about 55%, 60%, 65% or 70%, and more preferably at least about 75%, 80%, 85%, 90%, 91%, 92%, 93% or 94% and most preferably at least about 95%, 97%, 98%, 99% or more homologous to an entire amino acid sequence of table II, application no. 21, columns 5 and 7 and having above-mentioned activity, e.g. conferring preferably the increase of the fine chemical by for example expression either in the cytsol or in an organelle such as a plastid or mitochondria or both, preferably in plastids.

[5680] for the disclosure of the paragraphs [0168.0.0.20] and [0169.0.0.20] see paragraphs [0168.0.0.0] and [0169.0.0.0] above.

[5681] The invention further relates to nucleic acid molecules that differ from one of the nucleotide sequences shown in table I, application no. 21, columns 5 and 7 (and portions thereof) due to degeneracy of the genetic code and thus encode a polypeptide of the present invention, in particular a polypeptide having above mentioned activity, e.g. conferring an increase in the fine chemical in a organism, e.g. as that polypeptides depicted by the sequence shown in table II, application no. 21, columns 5 and 7 or the functional homologues. Advantageously, the nucleic acid molecule of the invention comprises, or in an other embodiment has, a nucleotide sequence encoding a protein comprising, or in an other embodiment having, an amino acid sequence shown in table II, application no. 21, columns 5 and 7 or the functional homologues. In a still further embodiment, the nucleic acid molecule of the invention encodes a full length protein which is substantially homologous to an amino acid sequence shown in table II, application no. 21, columns 5 and 7 or the functional homologues. However, in a preferred embodiment, the nucleic acid molecule of the present invention does not consist of the sequence shown in table I, application no. 21, columns 5 and 7, preferably as indicated in table I A, application no. 21, columns 5 and 7. Preferably the nucleic acid molecule of the invention is a functional homologue or identical to a nucleic acid molecule indicated in table I B, application no. 21, columns 5 and 7.

[5682] for the disclosure of the paragraphs [0171.0.0.20] to [0173.0.0.20] see paragraphs [0171.0.0.0] to [0173.0.0.0] above.

[5683] Accordingly, in another embodiment, a nucleic acid molecule of the invention is at least 15, 20, 25 or 30 nucleotides in length. Preferably, it hybridizes under stringent conditions to a nucleic acid molecule comprising a nucleotide sequence of the nucleic acid molecule of the present invention or used in the process of the present invention, e.g. comprising the sequence shown in table I, application no. 21, columns 5 and 7. The nucleic acid molecule is preferably at least 20, 30, 50, 100, 250 or more nucleotides in length.

[5684] for the disclosure of this paragraph see paragraph [0175.0.0.0] above.

[5685] Preferably, nucleic acid molecule of the invention that hybridizes under stringent conditions to a sequence shown in table I, application no. 21, columns 5 and 7 corresponds to a naturally-occurring nucleic acid molecule of the invention. As used herein, a “naturally-occurring” nucleic acid molecule refers to an RNA or DNA molecule having a nucleotide sequence that occurs in nature (e.g., encodes a natural protein). Preferably, the nucleic acid molecule encodes a natural protein having abovementioned activity, e.g. conferring the fine chemical increase after increasing the expression or activity thereof or the activity of a protein of the invention or used in the process of the invention by for example expression the nucleic acid sequence of the gene product in the cytsol and/or in an organelle such as a plastid or mitochondria, preferably in plastids.

[5686] for the disclosure of this paragraph see paragraph [0177.0.0.0] above.

[5687] For example, nucleotide substitutions leading to amino acid substitutions at “non-essential” amino acid residues can be made in a sequence of the nucleic acid molecule of the invention or used in the process of the invention, e.g. shown in table I, application no. 21, columns 5 and 7.

[5688] for the disclosure of the paragraphs [0179.0.0.20] and [0180.0.0.20] see paragraphs [0179.0.0.0] and [0180.0.0.0] above.

[5689] Accordingly, the invention relates to nucleic acid molecules encoding a polypeptide having above-mentioned activity, e.g. conferring an increase in the fine chemical in an organisms or parts thereof by for example expression either in the cytsol or in an organelle such as a plastid or mitochondria or both, preferably in plastids that contain changes in amino acid residues that are not essential for said activity. Such polypeptides differ in amino acid sequence from a sequence contained in the sequences shown in table II, application no. 21, columns 5 and 7, preferably shown in table II A, application no. 21, columns 5 and 7 yet retain said activity described herein. The nucleic acid molecule can comprise a nucleotide sequence encoding a polypeptide, wherein the polypeptide comprises an amino acid sequence at least about 50% identical to an amino acid sequence shown in table II, application no. 21, columns 5 and 7, preferably shown in table II A, application no. 21, columns 5 and 7 and is capable of participation in the increase of production of the fine chemical after increasing its activity, e.g. its expression by for example expression either in the cytsol or in an organelle such as a plastid or mitochondria or both, preferably in plastids. Preferably, the protein encoded by the nucleic acid molecule is at least about 60% identical to the sequence shown in table II, application no. 21, columns 5 and 7, preferably shown in table II A, application no. 21, columns 5 and 7, more preferably at least about 70% identical to one of the sequences shown in table II, application no. 21, columns 5 and 7, preferably shown in table II A, application no. 21, columns 5 and 7, even more preferably at least about 80%, 90%, 95% homologous to the sequence shown in table II, application no. 21, columns 5 and 7, preferably shown in table II A, application no. 21, columns 5 and 7, and most preferably at least about 96%, 97%, 98%, or 99% identical to the sequence shown in table II, application no. 21, columns 5 and 7, preferably shown in table II A, application no. 21, columns 5 and 7.

[5690] for the disclosure of the paragraphs [0182.0.0.20] to [0188.0.0.20] see paragraphs [0182.0.0.0] to [0188.0.0.0] above.

[5691] Functional equivalents derived from one of the polypeptides as shown in table II, application no. 21, columns 5 and 7, preferably shown in table II B, application no. 21, columns 5 and 7 resp., according to the invention by substitution, insertion or deletion have at least 30%, 35%, 40%, 45% or 50%, preferably at least 55%, 60%, 65% or 70% by preference at least 80%, especially preferably at least 85% or 90%, 91%, 92%, 93% or 94%, very especially preferably at least 95%, 97%, 98% or 99% homology with one of the polypeptides as shown in table II, application no. 21, columns 5 and 7, preferably shown in table II B, application no. 21, columns 5 and 7 resp., according to the invention and are distinguished by essentially the same properties as the polypeptide as shown in table II, application no. 21, columns 5 and 7, preferably shown in table II B, application no. 21, columns 5 and 7.

[5692] Functional equivalents derived from the nucleic acid sequence as shown in table I, application no. 21, columns 5 and 7, preferably shown in table I B, application no. 21, columns 5 and 7 resp., according to the invention by substitution, insertion or deletion have at least 30%, 35%, 40%, 45% or 50%, preferably at least 55%, 60%, 65% or 70% by preference at least 80%, especially preferably at least 85% or 90%, 91%, 92%, 93% or 94%, very especially preferably at least 95%, 97%, 98% or 99% homology with one of the polypeptides as shown in table II, application no. 21, columns 5 and 7, preferably shown in table II B, application no. 21, columns 5 and 7 resp., according to the invention and encode polypeptides having essentially the same properties as the polypeptide as shown in table II, application no. 21, columns 5 and 7, preferably shown in table II B, application no. 21, columns 5 and 7.

[5693] for the disclosure of this paragraph see paragraph [0191.0.0.0] above.

[5694] A nucleic acid molecule encoding an homologous to a protein sequence of table II, application no. 21, columns 5 and 7, preferably shown in table II B, application no. 21, columns 5 and 7 resp., can be created by introducing one or more nucleotide substitutions, additions or deletions into a nucleotide sequence of the nucleic acid molecule of the present invention, in particular of table I, application no. 21, columns 5 and 7, preferably shown in table I B, application no. 21, columns 5 and 7 resp., such that one or more amino acid substitutions, additions or deletions are introduced into the encoded protein. Mutations can be introduced into the encoding sequences of table I, application no. 21, columns 5 and 7, preferably shown in table I B, application no. 21, columns 5 and 7 resp., by standard techniques, such as site-directed mutagenesis and PCR-mediated mutagenesis.

[5695] for the disclosure of the paragraphs [0193.0.0.20] to [0196.0.0.20] see paragraphs [0193.0.0.0] to [0196.0.0.0] above.

[5696] Homologues of the nucleic acid sequences used, with the sequence shown in table I, application no. 21, columns 5 and 7, preferably shown in table I B, application no. 21, columns 5 and 7, comprise also allelic variants with at least approximately 30%, 35%, 40% or 45% homology, by preference at least approximately 50%, 60% or 70%, more preferably at least approximately 90%, 91%, 92%, 93%, 94% or 95% and even more preferably at least approximately 96%, 97%, 98%, 99% or more homology with one of the nucleotide sequences shown or the abovementioned derived nucleic acid sequences or their homologues, derivatives or analogues or parts of these. Allelic variants encompass in particular functional variants which can be obtained by deletion, insertion or substitution of nucleotides from the sequences shown, preferably from table I, application no. 21, columns 5 and 7, preferably shown in table I B, application no. 21, columns 5 and 7, or from the derived nucleic acid sequences, the intention being, however, that the enzyme activity or the biological activity of the resulting proteins synthesized is advantageously retained or increased.

[5697] In one embodiment of the present invention, the nucleic acid molecule of the invention or used in the process of the invention comprises the sequences shown in any of the table I, application no. 21, columns 5 and 7, preferably shown in table I B, application no. 21, columns 5 and 7. It is preferred that the nucleic acid molecule comprises as little as possible other nucleotides not shown in any one of table I, application no. 21, columns 5 and 7, preferably shown in table I B, application no. 21, columns 5 and 7. In one embodiment, the nucleic acid molecule comprises less than 500, 400, 300, 200, 100, 90, 80, 70, 60, 50 or 40 further nucleotides. In a further embodiment, the nucleic acid molecule comprises less than 30, 20 or 10 further nucleotides. In one embodiment, the nucleic acid molecule use in the process of the invention is identical to the sequences shown in table I, application no. 21, columns 5 and 7, preferably shown in table I B, application no. 21, columns 5 and 7.

[5698] Also preferred is that the nucleic acid molecule used in the process of the invention encodes a polypeptide comprising the sequence shown in table II, application no. 21, columns 5 and 7, preferably shown in table II B, application no. 21, columns 5 and 7. In one embodiment, the nucleic acid molecule encodes less than 150, 130, 100, 80, 60, 50, 40 or 30 further amino acids. In a further embodiment, the encoded polypeptide comprises less than 20, 15, 10, 9, 8, 7, 6 or 5 further amino acids. In one embodiment used in the inventive process, the encoded polypeptide is identical to the sequences shown in table II, application no. 21, columns 5 and 7, preferably shown in table II B, application no. 21, columns 5 and 7.

[5699] In one embodiment, the nucleic acid molecule of the invention or used in the process encodes a polypeptide comprising the sequence shown in table II, application no. 21, columns 5 and 7, preferably shown in table II B, application no. 21, columns 5 and 7 comprises less than 100 further nucleotides. In a further embodiment, said nucleic acid molecule comprises less than 30 further nucleotides. In one embodiment, the nucleic acid molecule used in the process is identical to a coding sequence of the sequences shown in table I, application no. 21, columns 5 and 7, preferably shown in table I B, application no. 21, columns 5 and 7.

[5700] Polypeptides (=proteins), which still have the essential biological or enzymatic activity of the polypeptide of the present invention conferring an increase of the fine chemical i.e. whose activity is essentially not reduced, are polypeptides with at least 10% or 20%, by preference 30% or 40%, especially preferably 50% or 60%, very especially preferably 80% or 90 or more of the wild type biological activity or enzyme activity, advantageously, the activity is essentially not reduced in comparison with the activity of a polypeptide shown in table II, application no. 21, columns 5 and 7 expressed under identical conditions.

[5701] Homologues of table I, application no. 21, columns 5 and 7 or of the derived sequences of table II, application no. 21, columns 5 and 7 also mean truncated sequences, cDNA, single-stranded DNA or RNA of the coding and noncoding DNA sequence. Homologues of said sequences are also understood as meaning derivatives, which comprise noncoding regions such as, for example, UTRs, terminators, enhancers or promoter variants. The promoters upstream of the nucleotide sequences stated can be modified by one or more nucleotide substitution(s), insertion(s) and/or deletion(s) without, however, interfering with the functionality or activity either of the promoters, the open reading frame (=ORF) or with the 3′-regulatory region such as terminators or other 3′ regulatory regions, which are far away from the ORF. It is furthermore possible that the activity of the promoters is increased by modification of their sequence, or that they are replaced completely by more active promoters, even promoters from heterologous organisms. Appropriate promoters are known to the person skilled in the art and are mentioned herein below.

[5702] for the disclosure of the paragraphs [0203.0.0.20] to [0215.0.0.20] see paragraphs [0203.0.0.0] to [0215.0.0.0] above.

[5703] Accordingly, in one embodiment, the invention relates to a nucleic acid molecule, which comprises a nucleic acid molecule selected from the group consisting of:
[5704] a) nucleic acid molecule encoding, preferably at least the mature form, of the polypeptide shown in table II, application no. 21, columns 5 and 7, preferably in table II B, application no. 21, columns 5 and 7; or a fragment thereof conferring an increase in the amount of the fine chemical in an organism or a part thereof
[5705] b) nucleic acid molecule comprising, preferably at least the mature form, of the nucleic acid molecule shown in table I, application no. 21, columns 5 and 7, preferably in table I B, application no. 21, columns 5 and 7 or a fragment thereof conferring an increase in the amount of the fine chemical in an organism or a part thereof;
[5706] c) nucleic acid molecule whose sequence can be deduced from a polypeptide sequence encoded by a nucleic acid molecule of (a) or (b) as result of the degeneracy of the genetic code and conferring an increase in the amount of the fine chemical in an organism or a part thereof;
[5707] d) nucleic acid molecule encoding a polypeptide whose sequence has at least 50% identity with the amino acid sequence of the polypeptide encoded by the nucleic acid molecule of (a) to (c) and conferring an increase in the amount of the fine chemical in an organism or a part thereof;
[5708] e) nucleic acid molecule which hybridizes with a nucleic acid molecule of (a) to (c) under stringent hybridisation conditions and conferring an increase in the amount of the fine chemical in an organism or a part thereof;
[5709] f) nucleic acid molecule encoding a polypeptide, the polypeptide being derived by substituting, deleting and/or adding one or more amino acids of the amino acid sequence of the polypeptide encoded by the nucleic acid molecules (a) to (d), preferably to (a) to (c), and conferring an increase in the amount of the fine chemical in an organism or a part thereof;
[5710] g) nucleic acid molecule encoding a fragment or an epitope of a polypeptide which is encoded by one of the nucleic acid molecules of (a) to (e), preferably to (a) to (c) and conferring an increase in the amount of the fine chemical in an organism or a part thereof;
[5711] h) nucleic acid molecule comprising a nucleic acid molecule which is obtained by amplifying a cDNA library or a genomic library using the primers in table III, application no. 21, column 7 and conferring an increase in the amount of the fine chemical in an organism or a part thereof;
[5712] i) nucleic acid molecule encoding a polypeptide which is isolated, e.g. from a expression library, with the aid of monoclonal antibodies against a polypeptide encoded by one of the nucleic acid molecules of (a) to (g), preferably to (a) to (c) and conferring an increase in the amount of the fine chemical in an organism or a part thereof;
[5713] j) nucleic acid molecule which encodes a polypeptide comprising the consensus sequence shown in table IV, application no. 21, column 7 and conferring an increase in the amount of the fine chemical in an organism or a part thereof;
[5714] k) nucleic acid molecule encoding the amino acid sequence of a polypeptide encoding a domain of the polypeptide shown in table II, application no. 21, columns 5 and 7 and conferring an increase in the amount of the fine chemical in an organism or a part thereof; and
[5715] l) nucleic acid molecule which is obtainable by screening a suitable nucleic acid library under stringent hybridization conditions with a probe comprising one of the sequences of the nucleic acid molecule of (a) to (k) or with a fragment of at least 15 nt, preferably 20 nt, 30 nt, 50 nt, 100 nt, 200 nt or 500 nt of the nucleic acid molecule characterized in (a) to (h) or of the nucleic acid molecule shown in table I, application no. 21, columns 5 and 7 or a nucleic acid molecule encoding, preferably at least the mature form of, the polypeptide shown in table II, application no. 21, columns 5 and 7, and conferring an increase in the amount of the fine chemical in an organism or a part thereof; or which encompasses a sequence which is complementary thereto;
   whereby, preferably, the nucleic acid molecule according to (a) to (l) distinguishes over the sequence depicted in table I A and/or I B, application no. 21, columns 5 and 7 by one or more nucleotides. In one embodiment, the nucleic acid molecule of the invention does not consist of the sequence shown in table IA and/or I B, application no. 21, columns 5 and 7. In another embodiment, the nucleic acid molecule of the present invention is at least 30% identical and less than 100%, 99.999%, 99.99%, 99.9% or 99% identical to the sequence shown in table IA and/or I B, application no. 21, columns 5 and 7. In a further embodiment the nucleic acid molecule does not encode the polypeptide sequence shown in table II A and/or II B, application no. 21, columns 5 and 7. Accordingly, in one embodiment, the nucleic acid molecule of the present invention encodes in one embodiment a polypeptide which differs at least in one or more amino acids from the polypeptide shown in table II A and/or II B, application no. 21, columns 5 and 7 does not encode a protein of the sequence shown in table II A and/or II B, application no. 21, columns 5 and 7. Accordingly, in one embodiment, the protein encoded by a sequence of a nucleic acid according to (a) to (l) does not consist of the sequence shown in table IA and/or I B, application no. 21, columns 5 and 7. In a further embodiment, the protein of the present invention is at least 30% identical to protein sequence depicted in table II A and/or II B, application no. 21, columns 5 and 7 and less than 100%, preferably less than 99.999%, 99.99% or 99.9%, more preferably less than 99%, 985, 97%, 96% or 95% identical to the sequence shown in table II A and/or II B, application no. 21, columns 5 and 7.

[5716] for the disclosure of the paragraphs [0217.0.0.20] to [0226.0.0.20] see paragraphs [0217.0.0.0] to [0226.0.0.0] above.

[5717] In general, vector systems preferably also comprise further cis-regulatory regions such as promoters and terminators and/or selection markers by means of which suitably transformed organisms can be identified. While vir genes and T-DNA sequences are located on the same vector in the case of cointegrated vector systems, binary systems are based on at least two vectors, one of which bears vir genes, but no T-DNA, while a second one bears T-DNA, but no vir gene. Owing to this fact, the last-mentioned vectors are relatively small, easy to manipulate and capable of replication in E. coli and in Agrobacterium. These binary vectors include vectors from the series pBIB-HYG, pPZP, pBecks, pGreen. Those which are preferably used in accordance with the invention are Bin19, pBI101, pBinAR, pGPTV and pCAMBIA. An overview of binary vectors and their use is given by Hellens et al, Trends in Plant Science (2000) 5, 446-451. The vectors are preferably modified in such a manner, that they already contain the nucleic acid coding for the transitpeptide and that the nucleic acids of the invention, preferentially the nucleic acid sequences encoding the polypeptides shown in table II, application no. 21, columns 5 and 7 can be cloned 3″ prime to the transitpeptide encoding sequence, leading to a functional preprotein, which is directed to the plastids and which means that the mature protein fulfills its biological activity.

[5718] for the disclosure of the paragraphs [0228.0.0.20] to [0239.0.0.20] see paragraphs [0228.0.0.0] to [0239.0.0.0] above.

[5719] The abovementioned nucleic acid molecules can be cloned into the nucleic acid constructs or vectors according to the invention in combination together with further genes, or else different genes are introduced by transforming several nucleic acid constructs or vectors (including plasmids) into a host cell, advantageously into a plant cell or a microorganisms.

In addition to the sequence mentioned in Table I, application no. 21, columns 5 and 7 or its derivatives, it is advantageous additionally to express and/or mutate further genes in the organisms. Especially advantageously, additionally at least one further gene of the fatty acid biosynthetic pathway is expressed in the organisms such as plants or microorganisms. Advantageously additional genes for the synthesis of cerotic acid, lignoceric acid and/or melissic acid are used. It is also possible that the regulation of the natural genes has been modified advantageously so that the gene and/or its gene product is no longer subject to the regulatory mechanisms which exist in the organisms. This leads to an increased synthesis of the respective desired fine chemical since, for example, feedback regulations no longer exist to the same extent or not at all. In addition it might be advantageously to combine the sequences shown in Table I, application no. 21, columns 5 and 7 with genes which generally support or enhances to growth or yield of the target organism, for example genes which lead to faster growth rate of microorganisms or genes which produces stress-, pathogen, or herbicide resistant plants.

[5720] In a further embodiment of the process of the invention, therefore, organisms are grown, in which there is simultaneous direct or indirect overexpression of at least one nucleic acid or one of the genes which code for proteins involved in the fatty acid metabolism, in particular in synthesis of cerotic acid, lignoceric acid and/or melissic acid. Indirect overexpression might be brought about by the manipulation of the regulation of the endogenous gene, for example through promoter mutations or the expression of natural or artificial transcriptional regulators.

[5721] Further advantageous nucleic acid sequences which can be expressed in combination with the sequences used in the process and/or the abovementioned biosynthesis genes are the sequences encoding further genes of the acetyl-CoA or malonyl-CoA metabolic pathway or a polypeptide having a very long chain fatty acid acyl (VLCFA) CoA synthase activity. It is also possible that the regulation of the natural genes has been modified advantageously so that the gene and/or its gene product is no longer subject to the regulatory mechanisms which exist in the organisms. This leads to an increased synthesis of fatty acids, fatty acids precursor or fatty acids metabolites, preferably cerotic acid, lignoceric acid and/or melissic acid, as desired since, for example, feedback regulations no longer exist to the same extent or not at all.

[5722] In a further advantageous embodiment of the process of the invention, the organisms used in the process are those in which advantageously simultaneously a cerotic acid, lignoceric acid and/or melissic acid degrading protein is attenuated, in particular by reducing the rate of expression of the corresponding gene, or by inactivating the gene for example the mutagenesis and/or selection. In another advantageous embodiment the synthesis of competitive pathways which rely on the same precoursers are down regulated or interrupted.

[5723] The respective fine chemical produced can be isolated from the organism by methods with which the skilled worker are familiar, for example via extraction, salt precipitation, and/or different chromatography methods. The process according to the invention can be conducted batchwise, semibatchwise or continuously. The fine chemical and other fatty acids produced by this process can be obtained by harvesting the organisms, either from the crop in which they grow, or from the field. This can be done via for example pressing or extraction of the plant parts.

[5724] Preferrably, the compound is a composition comprising the essentially pure cerotic acid, lignoceric acid and/or melissic acid or a recovered or isolated cerotic acid, lignoceric acid and/or melissic acid.

[5725] for the disclosure of the paragraphs [0243.0.0.20] to [0264.0.0.20] see paragraphs [0243.0.0.0] to [0264.0.0.0] above.

[5726] Other preferred sequences for use in operable linkage in gene expression constructs are targeting sequences, which are required for targeting the gene product into specific cell compartments (for a review, see Kermode, Crit. Rev. Plant Sci. 15, 4 (1996) 285-423 and references cited therein), for example into the vacuole, the nucleus, all types of plastids, such as amyloplasts, chloroplasts, chromoplasts, the extracellular space, the mitochondria, the endoplasmic reticulum, elaioplasts, peroxisomes, glycosomes, and other compartments of cells or extracellular preferred are sequences, which are involved in targeting to plastids as mentioned above. Sequences, which must be mentioned in this context are, in particular, the signal-peptide- or transit-peptide-encoding sequences which are known per se. For example, plastid-transit-peptide-encoding sequences enable the targeting of the expression product into the plastids of a plant cell. Targeting sequences are also known for eukaryotic and to a lower extent for prokaryotic organisms and can advantageously be operable linked with the nucleic acid molecule of the present invention as shown in table I, application no. 21, columns 5 and 7 and described herein to achieve an expression in one of said compartments or extracellular.

[5727] for the disclosure of the paragraphs [0266.0.0.20] to [0287.0.0.20] see paragraphs [0266.0.0.0] to [0287.0.0.0] above.

[5728] Accordingly, one embodiment of the invention relates to a vector where the nucleic acid molecule according to the invention is linked operably to regulatory sequences which permit the expression in a prokaryotic or eukaryotic or in a prokaryotic and eukaryotic host. A further preferred embodiment of the invention relates to a vector in which a nucleic acid sequence encoding one of the polypeptides shown in table II, application no. 21, columns 5 and 7 or their homologs is functionally linked to a plastidial targeting sequence. A further preferred embodiment of the invention relates to a vector in which a nucleic acid sequence encoding one of the polypeptides shown in table II, application no. 21, columns 5 and 7 or their homologs is functionally linked to a regulatory sequences which permit the expression in plastids.

[5729] for the disclosure of the paragraphs [0289.0.0.20] to [0296.0.0.20] see paragraphs [0289.0.0.0] to [0296.0.0.0] above.

[5730] Moreover, native polypeptide conferring the increase of the fine chemical in an organism or part thereof can be isolated from cells (e.g., endothelial cells), for example using the antibody of the present invention as described below, in particular, an anti-b1228, anti-b2207, anti-b2965, anti-b3568, anti-YDR035W and/or anti-YLR153C protein antibody or an antibody against polypeptides as shown in table II, application no. 21, columns 5 and 7, which can be produced by standard techniques utilizing the polypeptide of the present invention or fragment thereof, i.e., the polypeptide of this invention. Preferred are monoclonal antibodies.

[5731] for the disclosure of this paragraph see paragraph [0298.0.0.0] above.

[5732] In one embodiment, the present invention relates to a polypeptide having the sequence shown in table II, application no. 21, columns 5 and 7 or as coded by the nucleic acid molecule shown in table I, application no. 21, columns 5 and 7 or functional homologues thereof.

[5733] In one advantageous embodiment, in the method of the present invention the activity of a polypeptide is increased comprising or consisting of the consensus sequence shown in table IV, application no. 21, columns 7 and in one another embodiment, the present invention relates to a polypeptide comprising or consisting of the consensus sequence shown in table IV, application no. 21, column 7 whereby 20 or less, preferably 15 or 10, preferably 9, 8, 7, or 6, more preferred 5 or 4, even more preferred 3, even more preferred 2, even more preferred 1, most preferred 0 of the amino acids positions indicated can be replaced by any amino acid.

[5734] for the disclosure of the paragraphs [0301.0.0.20] to [0304.0.0.20] see paragraphs [0301.0.0.0] to [0304.0.0.0] above.

[5735] In one advantageous embodiment, the method of the present invention comprises the increasing of a polypeptide comprising or consisting of plant or microorganism specific consensus sequences.

In one embodiment, said polypeptide of the invention distinguishes over the sequence shown in table II A and/or II B, application no. 21, columns 5 and 7 by one or more amino acids. In one embodiment, polypeptide distinguishes form the sequence shown in table II A and/or II B, application no. 21, columns 5 and 7 by more than 5, 6, 7, 8 or 9 amino acids, preferably by more than 10, 15, 20, 25 or 30 amino acids, even more preferred are more than 40, 50, or 60 amino acids and, preferably, the sequence of the polypeptide of the invention distinguishes from the sequence shown in table II A and/or II B, application no. 21, columns 5 and 7 by not more than 80% or 70% of the amino acids, preferably not more than 60% or 50%, more preferred not more than 40% or 30%, even more preferred not more than 20% or 10%. In an other embodiment, said polypeptide of the invention does not consist of the sequence shown in table II A and/or II B, application no. 21, columns 5 and 7.

[5736] for the disclosure of this paragraph see paragraph [0306.0.0.0] above.

[5737] In one embodiment, the invention relates to polypeptide conferring an increase in the fine chemical in an organism or part being encoded by the nucleic acid molecule of the invention or used in the process of invention and having a sequence which distinguishes from the sequence as shown in table II A and/or II B, application no. 21, columns 5 and 7 by one or more amino acids. In another embodiment, said polypeptide of the invention does not consist of the sequence shown in table II A and/or II B, application no. 21, columns 5 and 7. In a further embodiment, said polypeptide of the present invention is less than 100%, 99.999%, 99.99%, 99.9% or 99% identical. In one embodiment, said polypeptide does not consist of the sequence encoded by the nucleic acid molecules shown in table I A and/or I B, application no. 21, columns 5 and 7.

[5738] In one embodiment, the present invention relates to a polypeptide having the activity of the protein as shown in table II A and/or II B, application no. 21, column 3, which distinguishes over the sequence depicted in table II A and/or II B, application no. 21, columns 5 and 7 by one or more amino acids, preferably by more than 5, 6, 7, 8 or 9 amino acids, preferably by more than 10, 15, 20, 25 or 30 amino acids, even more preferred are more than 40, 50, or 60 amino acids but even more preferred by less than 70% of the amino acids, more preferred by less than 50%, even more preferred my less than 30% or 25%, more preferred are 20% or 15%, even more preferred are less than 10%. In a further preferred embodiment the polypeptide of the invention takes the form of a preprotein consisting of a plastidial transitpeptide joint to a polypeptide having the activity of the protein as shown in table II A and/or II B, column 3, from which the transitpeptide is preferably cleaved off upon transport of the preprotein into the organelle for example into the plastid or mitochondria.

[5739] for the disclosure of the paragraphs [0309.0.0.20] to [0311.0.0.20] see paragraphs [0309.0.0.0] to [0311.0.0.0] above.

[5740] A polypeptide of the invention can participate in the process of the present invention. The polypeptide or a portion thereof comprises preferably an amino acid sequence, which is sufficiently homologous to an amino acid sequence shown in table II, application no. 21, columns 5 and 7.

[5741] Further, the polypeptide can have an amino acid sequence which is encoded by a nucleotide sequence which hybridizes, preferably hybridizes under stringent conditions as described above, to a nucleotide sequence of the nucleic acid molecule of the present invention. Accordingly, the polypeptide has an amino acid sequence which is encoded by a nucleotide sequence that is at least about 35%, 40%, 45%, 50%, 55%, 60%, 65% or 70%, preferably at least about 75%, 80%, 85% or 90, and more preferably at least about 91%, 92%, 93%, 94% or 95%, and even more preferably at least about 96%, 97%, 98%, 99% or more homologous to one of the amino acid sequences as shown in table II A and/or II B, application no. 21, columns 5 and 7. The preferred polypeptide of the present invention preferably possesses at least one of the activities according to the invention and described herein. A preferred polypeptide of the present invention includes an amino acid sequence encoded by a nucleotide sequence which hybridizes, preferably hybridizes under stringent conditions, to a nucleotide sequence of table I A and/or I B, application no. 21, columns 5 and 7 or which is homologous thereto, as defined above.

[5742] Accordingly the polypeptide of the present invention can vary from the sequences shown in table II A and/or II B, application no. 21, columns 5 and 7 in amino acid sequence due to natural variation or mutagenesis, as described in detail herein. Accordingly, the polypeptide comprise an amino acid sequence which is at least about 35%, 40%, 45%, 50%, 55%, 60%, 65% or 70%, preferably at least about 75%, 80%, 85% or 90, and more preferably at least about 91%, 92%, 93%, 94% or 95%, and most preferably at least about 96%, 97%, 98%, 99% or more homologous to an entire amino acid sequence shown in table II A and/or II B, application no. 21, columns 5 and 7.

[5743] for the disclosure of this paragraph see paragraph [0315.0.0.0] above.

[5744] Biologically active portions of an polypeptide of the present invention include peptides comprising amino acid sequences derived from the amino acid sequence of the polypeptide of the present invention or used in the process of the present invention, e.g., the amino acid sequence shown in table II, application no. 21, columns 5 and 7 or the amino acid sequence of a protein homologous thereto, which include fewer amino acids than a full length polypeptide of the present invention or used in the process of the present invention or the full length protein which is homologous to an polypeptide of the present invention or used in the process of the present invention depicted herein, and exhibit at least one activity of polypeptide of the present invention or used in the process of the present invention.

[5745] for the disclosure of this paragraph see paragraph [0317.0.0.0] above.

[5746] Manipulation of the nucleic acid molecule of the invention may result in the production of a protein having differences from the wild-type protein as shown in table II, application no. 21, column 3. Differences shall mean at least one amino acid different from the sequences as shown in table II, application no. 21, column 3, preferably at least 2, 3, 4, 5, 6, 7, 8, 9 or 10 amino acids, more preferably at least 15, 20, 25, 30, 35, 40, 45 or 50 amino acids different from the sequences as shown in table II, application no. 21, column 3. These proteins may be improved in efficiency or activity, may be present in greater numbers in the cell than is usual, or may be decreased in efficiency or activity in relation to the wild type protein.

[5747] Any mutagenesis strategies for the polypeptide of the present invention or the polypeptide used in the process of the present invention to result in increasing said activity are not meant to be limiting; variations on these strategies will be readily apparent to one skilled in the art. Using such strategies, and incorporating the mechanisms disclosed herein, the nucleic acid molecule and polypeptide of the invention may be utilized to generate plants or parts thereof, expressing wildtype proteins or mutated proteins of the proteins as shown in table II, application no. 21, column 3. The nucleic acid molecules and polypeptide molecules of the invention are expressed such that the yield, production, and/or efficiency of production of a desired compound is improved.

[5748] for the disclosure of the paragraphs [0320.0.0.20] to [0322.0.0.20] see paragraphs [0320.0.0.0] to [0322.0.0.0] above.

[5749] In one embodiment, a protein (=polypeptide) as shown in table II, application no. 21, column 3 refers to a polypeptide having an amino acid sequence corresponding to the polypeptide of the invention or used in the process of the invention, whereas a “non-inventive protein or polypeptide” or “other polypeptide” refers to a polypeptide having an amino acid sequence corresponding to a protein which is not substantially homologous to a polypeptide of the invention, preferably which is not substantially homologous to a polypeptide or protein as shown in table II, application no. 21, column 3, e.g., a protein which does not confer the activity described herein and which is derived from the same or a different organism.

[5750] for the disclosure of the paragraphs [0324.0.0.20] to [0329.0.0.20] see paragraphs [0324.0.0.0] to [0329.0.0.0] above.

[5751] In an especially preferred embodiment, the polypeptide according to the invention furthermore also does not have the sequences of those proteins, which are encoded by the sequences shown in table II, application no. 21, columns 5 and 7.

[5752] for the disclosure of the paragraphs [0331.0.0.20] to [0346.0.0.20] see paragraphs [0331.0.0.0] to [0346.0.0.0] above.

[5753] Accordingly the present invention relates to any cell transgenic for any nucleic acid characterized as part of the invention, e.g. conferring the increase of the fine chemical in a cell or an organism or a part thereof, e.g. the nucleic acid molecule of the invention, the nucleic acid construct of the invention, the antisense molecule of the invention, the vector of the invention or a nucleic acid molecule encoding the polypeptide of the invention, e.g. encoding a polypeptide having an activity as the protein as shown in table II, application no. 21, column 3. Due to the above mentioned activity the fine chemical content in a cell or an organism is increased. For example, due to modulation or manipulation, the cellular activity is increased preferably in organelles such as plastids or mitochondria, e.g. due to an increased expression or specific activity or specific targeting of the subject matters of the invention in a cell or an organism or a part thereof especially in organelles such as plastids or mitochondria. Transgenic for a polypeptide having a protein or activity means herein that due to modulation or manipulation of the genome, the activity of protein as shown in table II, application no. 21, column 3 or a protein as shown in table II, application no. 21, column 3-like activity is increased in the cell or organism or part thereof especially in organelles such as plastids or mitochondria. Examples are described above in context with the process of the invention.

[5754] for the disclosure of this paragraph see paragraph [0348.0.0.0] above.

[5755] A naturally occurring expression cassette—for example the naturally occurring combination of the promoter of the gene encoding a protein as shown in table II, application no. 21, column 3 with the corresponding encoding gene—becomes a transgenic expression cassette when it is modified by non-natural, synthetic “artificial” methods such as, for example, mutagenization. Such methods have been described (U.S. Pat. No. 5,565,350; WO 00/15815; also see above).

[5756] for the disclosure of the paragraphs [0350.0.0.20] to [0358.0.0.20] see paragraphs [0350.0.0.0] to [0358.0.0.0] above.

[5757] Transgenic plants comprising cerotic acid, lignoceric acid and/or melissic acid or mixtures thereof synthesized in the process according to the invention can be marketed directly without isolation of the compounds synthesized. In the process according to the invention, plants are understood as meaning all plant parts, plant organs such as leaf, stalk, root, tubers or seeds or propagation material or harvested material or the intact plant. In this context, the seed encompasses all parts of the seed such as the seed coats, epidermal cells, seed cells, endosperm or embryonic tissue. The cerotic acid, lignoceric acid and/or melissic acid produced in the process according to the invention may, however, also be isolated from the plant in the form of their free cerotic acid, lignoceric acid and/or melissic acid produced by this process can be isolated by harvesting the plants either from the culture in which they grow or from the field. This can be done for example via expressing, grinding and/or extraction of the plant parts, preferably the plant leaves, plant fruits, flowers and the like.

The invention furthermore relates to the use of the transgenic plants according to the invention and of the cells, cell cultures, parts—such as, for example, roots, leaves, flowers and the like as mentioned above in the case of transgenic plant organisms—derived from them, and to transgenic propagation material such as seeds or fruits and the like as mentioned above, for the production of foodstuffs or feeding stuffs, cosmetics, pharmaceuticals or fine chemicals.

[5758] for the disclosure of the paragraphs [0360.0.0.20] to [0362.0.0.20] see paragraphs [0360.0.0.0] to [0362.0.0.0] above.

[5759] In this manner, more than 50% by weight, advantageously more than 60% by weight, preferably more than 70% by weight, especially preferably more than 80% by weight, very especially preferably more than 90% by weight, of the cerotic acid, lignoceric acid and/or melissic acid produced in the process can be isolated. The resulting fine chemical can, if appropriate, subsequently be further purified, if desired mixed with other active ingredients such as other xanthophylls, fatty acids, vitamins, amino acids, carbohydrates, antibiotics and the like, and, if appropriate, formulated.

[5760] In one embodiment, cerotic acid, lignoceric acid and/or melissic acid is the fine chemical.

[5761] The cerotic acid, lignoceric acid and/or melissic acid, in particular the respective fine chemicals obtained in the process are suitable as starting material for the synthesis of further products of value. For example, they can be used in combination with each other or alone for the production of pharmaceuticals, health products, foodstuffs, animal feeds, nutrients or cosmetics. Accordingly, the present invention relates a method for the production of pharmaceuticals, health products, food stuff, animal feeds, nutrients or cosmetics comprising the steps of the process according to the invention, including the isolation of the cerotic acid, lignoceric acid and/or melissic acid containing, in particular cerotic acid, lignoceric acid and/or melissic acid containing composition produced or the respective fine chemical produced if desired and formulating the product with a pharmaceutical acceptable carrier or formulating the product in a form acceptable for an application in agriculture. A further embodiment according to the invention is the use of the cerotic acid, lignoceric acid and/or melissic acid produced in the process or of the transgenic organisms in animal feeds, foodstuffs, medicines, food supplements, cosmetics or pharmaceuticals.

[5762] for the disclosure of the paragraphs [0366.0.0.20] to [0369.0.0.20] see paragraphs [0366.0.0.0] to [0369.0.0.0] above.

[5763] The fermentation broths obtained in this way, containing in particular cerotic acid, lignoceric acid and/or melissic acid in mixtures with other organic acids, amino acids, polypeptides or polysaccarides, normally have a dry matter content of from 1 to 70% by weight, preferably 7.5 to 25% by weight. Sugar-limited fermentation is additionally advantageous, e.g. at the end, for example over at least 30% of the fermentation time. This means that the concentration of utilizable sugar in the fermentation medium is kept at, or reduced to, 0 to 10 g/l, preferably to 0 to 3 g/l during this time. The fermentation broth is then processed further. Depending on requirements, the biomass can be removed or isolated entirely or partly by separation methods, such as, for example, centrifugation, filtration, decantation, coagulation/flocculation or a combination of these methods, from the fermentation broth or left completely in it.

The fermentation broth can then be thickened or concentrated by known methods, such as, for example, with the aid of a rotary evaporator, thin-film evaporator, falling film evaporator, by reverse osmosis or by nanofiltration. This concentrated fermentation broth can then be worked up by freeze-drying, spray drying, spray granulation or by other processes.

[5764] Accordingly, it is possible to purify the cerotic acid, lignoceric acid and/or melissic acid, in particular the cerotic acid, lignoceric acid and/or melissic acid produced according to the invention further. For this purpose, the product-containing composition, e.g. a total or partial extraction fraction using organic solvents, is subjected for example to separation via e.g. an open column chromatography or HPLC in which case the desired product or the impurities are retained wholly or partly on the chromatography resin. These chromatography steps can be repeated if necessary, using the same or different chromatography resins. The skilled worker is familiar with the choice of suitable chromatography resins and their most effective use.

[5765] for the disclosure of the paragraphs [0372.0.0.20] to [0376.0.0.20], [0376.1.0.20] and [0377.0.0.20] see paragraphs [0372.0.0.0] to [0376.0.0.0], [0376.1.0.0] and [0377.0.0.0] above.

[5766] In one embodiment, the present invention relates to a method for the identification of a gene product conferring an increase in the fine chemical production in a cell, comprising the following steps:
[5767] (a) contacting e.g. hybridising, the nucleic acid molecules of a sample, e.g. cells, tissues, plants or microorganisms or a nucleic acid library, which can contain a candidate gene encoding a gene product conferring an increase in the fine chemical after expression, with the nucleic acid molecule of the present invention;
[5768] (b) identifying the nucleic acid molecules, which hybridize under relaxed stringent conditions with the nucleic acid molecule of the present invention in particular to the nucleic acid molecule sequence shown in table I, application no. 21, columns 5 and 7, preferably in table I B, application no. 21, columns 5 and 7, and, optionally, isolating the full length cDNA clone or complete genomic clone;
[5769] (c) introducing the candidate nucleic acid molecules in host cells, preferably in a plant cell or a microorganism, appropriate for producing the fine chemical;
[5770] (d) expressing the identified nucleic acid molecules in the host cells;
[5771] (e) assaying the fine chemical level in the host cells; and
[5772] (f) identifying the nucleic acid molecule and its gene product which expression confers an increase in the fine chemical level in the host cell after expression compared to the wild type.

[5773] for the disclosure of the paragraphs [0379.0.0.20] to [0383.0.0.20] see paragraphs [0379.0.0.0] to [0383.0.0.0] above.

[5774] The screen for a gene product or an agonist conferring an increase in the fine chemical production can be performed by growth of an organism for example a microorganism in the presence of growth reducing amounts of an inhibitor of the synthesis of the fine chemical. Better growth, eg higher dividing rate or high dry mass in comparison to the control under such conditions would identify a gene or gene product or an agonist conferring an increase in fine chemical production. One can think to screen for increased fine chemical production by for example resistance to drugs blocking fine chemical synthesis and looking whether this effect is dependent on the proteins as shown in table II, application no. 21, column 3, eg comparing near identical organisms with low and high activity of the proteins as shown in table II, application no. 21, column 3.

[5775] for the disclosure of the paragraphs [0385.0.0.20] to [0404.0.0.20] see paragraphs [0385.0.0.0] to [0404.0.0.0] above.

[5776] Accordingly, the nucleic acid of the invention, or the nucleic acid molecule identified with the method of the present invention or the complement sequences thereof, the polypeptide of the invention, the nucleic acid construct of the invention, the organisms, the host cell, the microorganisms, the plant, plant tissue, plant cell, or the part thereof the invention, the vector of the invention, the agonist identified with the method of the invention, the nucleic acid molecule identified with the method of the present invention, can be used for the production of the fine chemical or of the fine chemical and one or more other fatty acids, in particular fatty acids such as myrisitic acid, palmitic acid, stearic acid, arachidic acid, oleic acid, linoleic acid, linolenic acid or erucic acid.

Accordingly, the nucleic acid of the invention, or the nucleic acid molecule identified with the method of the present invention or the complement sequences thereof, the polypeptide of the invention, the nucleic acid construct of the invention, the organisms, the host cell, the microorganisms, the plant, plant tissue, plant cell, or the part thereof of the invention, the vector of the invention, the agonist identified with the method of the invention, the antibody of the present invention, can be used for the reduction of the fine chemical in an organism or part thereof, e.g. in a cell.

[5777] for the disclosure of the paragraphs [0406.0.0.20] to [0435.0.0.20] see paragraphs [0406.0.0.0] to [0435.0.0.0] above.

[5778] Production of Cerotic Acid, Lignoceric Acid and/or Melissic Acid in Chlamydomonas reinhardtii

The cerotic acid, lignoceric acid and/or melissic acid production can be analysed as mentioned herein.
The proteins and nucleic acids can be analysed as mentioned below.
In addition a production in other organisms such as plants or microorganisms such as yeast, Mortierella alpina, Corynebacterium glutamicum or Escherichia coli is possible.

[5779] for the disclosure of the paragraphs [0437.0.0.20] and [0438.0.0.20] see paragraphs [0437.0.0.0] and [0438.0.0.0] above.

### Example 9

### Analysis of the Effect of the Nucleic Acid Molecule on the Production of Cerotic Acid, Lignoceric Acid and/or Melissic Acid

[5780] The effect of the genetic modification of plants or algae on the production of a desired compound (such as cerotic acid, lignoceric acid and/or melissic acid) can be determined by growing the modified plant under suitable conditions (such as those described above) and analyzing the medium and/or the cellular components for the elevated production of desired product (i.e. of cerotic acid, lignoceric acid and/or melissic acid). These analytical techniques are known to the skilled worker and comprise spectroscopy, thin-layer chromatography, various types of staining methods, enzymatic and microbiological methods and analytical chromatography such as high-performance liquid chromatography (see, for example, Ullman, Encyclopedia of Industrial Chemistry, Vol. A2, p. 89-90 and p. 443-613, VCH: Weinheim (1985); Fallon, A., et al., (1987) “Applications of HPLC in Biochemistry” in: Laboratory Techniques in Biochemistry and Molecular Biology, Vol. 17; Rehm et al. (1993) Biotechnology, Vol. 3, Chapter III: “Product recovery and purification”, p. 469-714, VCH: Weinheim; Belter, P.A., et al. (1988) Bioseparations: downstream processing for Biotechnology, John Wiley and Sons; Kennedy, J. F., and Cabral, J. M. S. (1992) Recovery processes for biological Materials, John Wiley and Sons; Shaeiwitz, J. A., and Henry, J. D. (1988) Biochemical Separations, in: Ullmann's Encyclopedia of Industrial Chemistry, Vol. B3; Chapter 11, p. 1-27, VCH: Weinheim; and Dechow, F. J. (1989) Separation and purification techniques in biotechnology, Noyes Publications) or the methods mentioned above.

[5781] for the disclosure of this paragraph see [0441.0.0.0] above.

[5782] Purification of and Determination of the Cerotic Acid, Lignoceric Acid and/or Melissic Acid Content:

[5783] Abbreviations: GC-MS, gas liquid chromatography/mass spectrometry; TLC, thin-layer chromatography.

The unambiguous detection for the presence of xanthophylls can be obtained by analyzing recombinant organisms using analytical standard methods: LC, LC-MSMS or TLC, as described The total cerotic acid, lignoceric acid and/or melissic acid produced in the organism for example in algae used in the inventive process can be analysed for example according to the following procedure:
The material such as algae or plants to be analyzed can be disrupted by sonication, grinding in a glass mill, liquid nitrogen and grinding or via other applicable methods. Plant material is initially homogenized mechanically by comminuting in a pestle and mortar to make it more amenable to extraction.

[5784] A typical sample pretreatment consists of a total lipid extraction using such polar organic solvents as acetone or alcohols as methanol, or ethers, saponification, partition between phases, separation of non-polar epiphase from more polar hypophasic derivatives and chromatography. E.g.:

For analysis, solvent delivery and aliquot removal can be accomplished with a robotic system comprising a single injector valve Gilson 232XL and a 402 2S1V diluter [Gilson, Inc. USA, 3000 W. Beltline Highway, Middleton, Wis.]. For saponification, 3 ml of 50% potassium hydroxide hydro-ethanolic solution (4 water:1 ethanol) can be added to each vial, followed by the addition of 3 ml of octanol. The saponification treatment can be conducted at room temperature with vials maintained on an IKA HS 501 horizontal shaker [Labworld-online, Inc., Wilmington, N.C.] for fifteen hours at 250 movements/minute, followed by a stationary phase of approximately one hour.
Following saponification, the supernatant can be diluted with 0.10 ml of methanol. The addition of methanol can be conducted under pressure to ensure sample homogeneity. Using a 0.25 ml syringe, a 0.1 ml aliquot can be removed and transferred to HPLC vials for analysis.
For HPLC analysis, a Hewlett Packard 1100 HPLC, complete with a quaternary pump, vacuum degassing system, six-way injection valve, temperature regulated autosampler, column oven and Photodiode Array detector can be used [Agilent Technologies available through Ultra Scientific Inc., 250 Smith Street, North Kingstown, R.I.]. The column can be a Waters YMC30, 5-micron, 4.6×250 mm with a guard column of the same material [Waters, 34 Maple Street, Milford, Mass.]. The solvents for the mobile phase can be 81 methanol: 4 water: 15 tetrahydrofuran (THF) stabilized with 0.2% BHT (2,6-di-tert-butyl-4-methylphenol). Injections were 20 μl. Separation can be isocratic at 30° C. with a flow rate of 1.7 ml/minute. The peak responses can be measured by absorbance at 447 nm.

[5785] One example is the analysis of the fatty acids. The unambiguous detection for the presence of the fatty acid products can be obtained by analyzing recombinant organisms using analytical standard methods, especially HPLC with UV or electrochemical detection as for example described in The Journal of Lipid Research, Vol. 39, 2099-2105, 1998.

Plant material is initially homogenized mechanically by comminuting in a pestle and mortar to make it more amenable to extraction.

[5786] for the disclosure of the paragraphs [0446.0.0.20] to [0496.0.0.20] see paragraphs [0446.0.0.0] to [0496.0.0.0] above.

[5787] Usually acetone or hexane is used for the extraction of the fatty acids and further purification is achieved either by column chromatography with a suitable resin.

If necessary, these chromatography steps may be repeated, using identical or other chromatography resins. The skilled worker is familiar with the selection of suitable chromatography resin and the most effective use for a particular molecule to be purified.
In addition depending on the produced fine chemical purification is also possible with crystallization or distillation. Both methods are well known to a person skilled in the art.
[5788] The results of the different plant analyses can be seen from the table, which follows:

TABLE VI

| ORF | Metabolite | Method | Min | Max |
|---|---|---|---|---|
| b1228 | Cerotic acid | GC | 1.43 | 2.37 |
| | (C26:0) | | | |
| b2207 | Cerotic acid | GC | 1.41 | 1.55 |
| | (C26:0) | | | |
| b2965 | Cerotic acid | GC | 1.55 | 2.91 |
| | (C26:0) | | | |
| b3568 | Lignoceric acid | GC | 1.31 | 2.34 |
| | (C24:0) | | | |
| YDR035W | Lignoceric acid | GC | 1.53 | 2.26 |
| | (C24:0) | | | |
| YDR035W | Melissic Acid | GC | 1.30 | 1.75 |
| | (C30:0) | | | |
| YLR153C | Lignoceric acid | GC | 1.44 | 1.53 |
| | (C24:0) | | | |

[5789] for the disclosure of the paragraphs [0499.0.0.20] and [0500.0.0.20] see paragraphs [0499.0.0.0] and [0500.0.0.0] above.

### Example 15a

### Engineering Ryegrass Plants by Over-Expressing b1228 from Escherichia coli or Homologs of b1228 from Other Organisms

[5790] for the disclosure of the paragraphs [0502.0.0.20] to [0508.0.0.20] see paragraphs [0502.0.0.0] to [0508.0.0.0] above.

### Example 15b

### Engineering Soybean Plants by Over-Expressing b1228 from Escherichia coli or Homologs of b1228 from Other Organisms

[5791] for the disclosure of the paragraphs [0510.0.0.20] to [0513.0.0.20] see paragraphs [0510.0.0.0] to [0513.0.0.0] above.

### Example 15c

### Engineering Corn Plants by Over-Expressing b1228 from Escherichia coli or Homologs of b1228 from Other Organisms

[5792] for the disclosure of the paragraphs [0515.0.0.20] to [0540.0.0.20] see paragraphs [0515.0.0.0] to [0540.0.0.0] above.

### Example 15d

### Engineering Wheat Plants by Over-Expressing b1228 from Escherichia coli or Homologs of b1228 from Other Organisms

[5793] for the disclosure of the paragraphs [0542.0.0.20] to [0544.0.0.20] see paragraphs [0542.0.0.0] to [0544.0.0.0] above.

### Example 15e

### Engineering Rapeseed/Canola Plants by Over-Expressing b1228 from Escherichia coli or Homologs of b1228 from Other Organisms

[5794] for the disclosure of the paragraphs [0546.0.0.20] to [0549.0.0.20] see paragraphs [0544.0.0.0] to [0549.0.0.0] above.

### Example 15f

### Engineering Alfalfa Plants by Over-Expressing b1228 from Escherichia coli or Homologs of b1228 from Other Organisms

[5795] for the disclosure of the paragraphs [0551.0.0.20] to [0554.0.0.20] see paragraphs [0551.0.0.0] to [0554.0.0.0] above.

### Example 16

### Metabolite Profiling Info from Zea mays

[5796] Zea mays plants were engineered as described in Example 15c.
Metabolic results were either obtained from regenerated primary transformants (T0) or from the following progeny generation (T1) in comparison to appropriate control plants. The results are shown in table VII

TABLE VII

| ORF_NAME | Metabolite | MIN | MAX |
|---|---|---|---|
| YDR035W | Lignoceric acid | 1.27 | 1.76 |
| | (C24:0) | | |

Table VII shows the increase in lignoceric acid in genetically modified corn plants expressing the Saccharomyces cerevisiae nucleic acid sequence YDR035W.
In one embodiment, in case the activity of the Saccharomyces cerevisiae YDR035W or its homologs, e.g. a “3-deoxy-D-arabino-heptulosonate 7-phosphate (DAHP) synthase”, is increased in corn plants, preferably, an increase of the fine chemical lignoceric acid between 27% and 76% or more is conferred.

[5797] for the disclosure of this paragraph see [0554.2.0.0] above.

[5798] for the disclosure of this paragraph see [0555.0.0.0] above.

[5799] for the disclosure of this paragraph see [0001.0.0.0].

[5800] Plants produce glycerol and glycerol-3-phosphate. Importantly lipids derived from glycerol are the major components of eukaryotic cells. In terms of dry weight they account for anywhere between 10% and 90% of the total mass of the cell. Triglycerol are the major source of store energy in eucaryotic organisms.

Glycerol-3-phosphate can be synthesized via two different routes in plants. In one route, it is formed from dihydroxyacetone phosphate (DHAP), an intermediate of glycolysis, by the sequential action of triosephosphate isomerase, glyceraldehyde-phosphate phosphatase, glyeraldehyde reductase and glycerol kinase. The last enzyme of this pathway has been suggested as the rate-limiting step of this route for glycerol-3-phosphate synthesis. In an second pathway glycerol-3-phosphate dehydrogenase (NAD(+)-G-3-P oxidoreductase, EC 1.1.1.8) (GPDH) catalyses the reduction of dihydroxyacetone phosphate (DHAP) to form glycerol-3-phosphate (G-3-P). Based on enzymatic studies is has been suggested that this enzyme activity is probably the primary source of glycerol-3-phosphate at least in Brassica campestris seeds (Sharma et al., 2001, Plant Sci 160, 603-610).

[5801] In plants, at least two types of GPDH, a cytoplasmatic and a plastidial exist, which also differ in their reducing cosubstrate. The cytsolic GPDH uses NADH as the cosubstrate. The mitochondrial FAD-dependent glycerol-3-phosphate dehydrogenase (FAD-GPDH) of Arabidopsis forms a G-3-P shuttle, as previously established in other eukaryotic organisms, and links cytosolic G-3-P metabolism to carbon source utilization and energy metabolism in plants—also see Shen, W. et al., FEBS Lett. 2003 Feb. 11; 536(1-3): 92-6.

Glycerol-insensitive Arabidopsis mutants: gill seedlings lack glycerol kinase, accumulate glycerol and are more resistant to abiotic stress, see Eastmond P. J., □ HYPERLINK “http://www.ingentaconnect.com/content/bsc/tpj” \o “The Plant Journal” □The Plant Journal□, 2004, 37(4), 617-625. These data show that glycerol kinase is required for glycerol catabolism in Arabidopsis and that the accumulation of glycerol can enhance resistance to a variety of abiotic stresses associated with dehydration.

[5802] The major storage lipids (or oils) of seeds occur in the form of triacylglycerols (TAG), or three fatty acids linked to glycerol by ester bonds. Triacylglycerol synthesis involves diverse cellular compartments, including the cytoplasm, the mitochondria, the plastids, and the endoplasmic reticulum (ER). Glycerol-3-phosphate enters the ER for the final step in triacylglycerol synthesis. The newly formed triacylglycerols accumulate between the two layers of the double membrane of the ER, forming an oil body surrounded by a single (or half) unit membrane.

[5803] Glycerol-3-phosphate acyltransferase (GPAT) is one of the most important enzymes in TAG biosynthesis, since it initiates TAG synthesis by catalyzing the acylation of the Sn-1 position of Sn-glycerol-3-phosphate, producing Sn-1-acylglycerol-3-phosphate. Lyso-phosphatidic acid (LPA) is then acetylated by LPA acyltransferases to produce phosphatidic acid (PA). Then diacylglycerol (DAG) is released through the dephosphorylation of PA by PA phosphohydrolase. Finally DAG becomes acylated by the activity of the DAG acyltransferase. In a second pathway phosphatidylcholine (PC) is formed and its acyl residues are disaturated further. The choline phosphate residue is then liberated by hydrolysis and the corresponding DAG acylated. This second pathway operates frequently in the synthesis of highly unsaturated TAG (Heldt 1997, Plant biochemistry and molecular biology. Oxford University Press, New York).

Additionally at present, many researches have proved that the GPAT is related to plant chilling-resistance, see Liu, Ji-Mei et al., Plant Physiol. 120(1999): 934.
Glycerol-3-phosphate is a primary substrate for triacylglycerol synthesis. Vigeolas and Geigenberger (Planta 219(2004): 827-835) have shown that injection of developing seeds with glycerol leads to increased glycerol-3-phosphate levels. These increased levels of glycerol-3-phosphate were accompanied by an increase in the flux of sucrose into total lipids and triacylglycerol providing evidence that the prevailing levels of glycerol-3-phosphate co-limit triacylglycerol production in developing seeds.
The direct acylation of glycerol by a glycerol: acyl-CoA acyltransferase to form monoacyl-glycerol and, subsequently, diacylglycerol and triacylglycerol has been shown in myoblast and hepatocytes (Lee, D. P. et al. J. Lipid res. 42 (2001): 1979-1986). This direct acylation became more prominent when the glycerol-3-phosphate pathway was attenuated or when glycerol levels become elevated.

[5804] Glycerol is used together with water and alcohol (ethyl alcohol) in glycerinated water/alcohol plant extracts and phytoaromatic compounds. These products are used as food supplements, providing concentrates of the minerals, trace elements, active ingredients (alkaloids, polyphenols, pigments, etc.) and aromatic substances to be found in plants. Glycerin acts as a carrier for plant extracts. It is found in the end product (the fresh plant extract) in concentrations of up to 24% or 25%.

Raw glycerol is a by-product of the transesterification process of rape oil to rape methyl ester (RME) and used edible oil to used edible methyl ester (AME), both better known as Biodiesel.
Glycerol world production is estimated to be around 750.000 t/year. Around 90% is manufactured on the basis of natural oils and fats.

[5805] The green alga Dunaliella, for example, recently has been established in mass culture as a commercial source for glycerol. Dunaliella withstands extreme salinities while maintaining a low intracellular salt concentration. Osmotic adjustment is achieved by intracellular accumulation of glycerol to a level counterbalancing the external osmoticum.

The osmoregulatory isoform of dihydroxyacetone phosphate (DHAP) reductase (Osm-DHAPR) is an enzyme unique to Dunaliella tertiolecta and is the osmoregulatory isoform involved in the synthesis of free glycerol for osmoregulation in extreme environments, such as high salinity, see Ghoshal, D., et al., Protein Expression and Purification, 2002, 24, (3), 404-411.
A unsolved problem in plant biochemistry is the understanding of metabolic regulation of glycerol-3-phosphate synthesis and its use in modifying glyceride metabolism or glycerol production. Practically it will have significance for rationally genetically engineering of plants for increased synthesis of triacylglycerols or for other value added products, and for introducing the glycerol synthesis capability into plants of economic importance for an elevated environmental stress tolerance—see: Durba, G. et al., J. Plant Biochemistry & Biotechnology 10(2001),113-120.

[5806] One way to increase the productive capacity of biosynthesis is to apply recombinant DNA technology. Thus, it would be desirable to produce glycerol and/or glycerol-3-phosphate in plants. That type of production permits control over quality, quantity and selection of the most suitable and efficient producer organisms. The latter is especially important for commercial production economics and therefore availability to consumers. In addition it is desirable to produce glycerol and/or glycerol-3-phosphate in plants in order to increase plant productivity and resistance against biotic and abiotic stress as discussed before.

[5807] Thus, it would be advantageous if an algae, plant or other microorganism were available which produce large amounts of glycerol and/or glycerol-3-phosphate. The invention discussed hereinafter relates in some embodiments to such transformed prokaryotic or eukaryotic microorganisms.

It would also be advantageous if plants were available whose roots, leaves, stem, fruits or flowers produced large amounts of glycerol and/or glycerol-3-phosphate. The invention discussed hereinafter relates in some embodiments to such transformed plants.
Furthermore it would be advantageous if plants were available whose seed produced larger amounts of total lipids. The invention discussed hereinafter relates in some embodiments to such transformed plants.

[5808] One way to increase the productive capacity of biosynthesis is to apply recombinant DNA technology. Thus, it would be desirable to produce glycerol and/or glycerol-3-phosphate in plants. That type of production permits control over quality, quantity and selection of the most suitable and efficient producer organisms. The latter is especially important for commercial production economics and therefore availability to consumers. In addition it is desirable to produce glycerol and/or glycerol-3-phosphate in plants in order to increase plant productivity and resistance against biotic and abiotic stress as discussed before.

Therefore improving the productivity of said glycerol and/or glycerol-3-phosphate and improving the quality of cosmetics, pharmaceuticals, foodstuffs and animal feeds, in particular of nutrition supplements, is an important task of the different industries.

[5809] To ensure a high productivity of glycerol and/or glycerol-3-phosphate in plants or microorganism, it is necessary to manipulate the natural biosynthesis of glycerol and/or glycerol-3-phosphate in said organisms.

Thus, it would be advantageous if an algae, plant or other microorganism were available which produce large amounts glycerol and/or glycerol-3-phosphate. The invention discussed hereinafter relates in some embodiments to such transformed prokaryotic or eukaryotic microorganisms.
It would also be advantageous if plants were available whose roots, leaves, stem, fruits or flowers produced large amounts of glycerol and/or glycerol-3-phosphate. The invention discussed hereinafter relates in some embodiments to such transformed plants.

[5810] Accordingly, there is still a great demand for new and more suitable genes which encode enzymes or other regulators which participate in the biosynthesis of glycerol and/or glycerol-3-phosphate and make it possible to produce glycerol and/or glycerol-3-phosphate specifically on an industrial scale without that unwanted byproducts are formed. In the selection of genes for biosynthesis two characteristics above all are particularly important. On the one hand, there is as ever a need for improved processes for obtaining the highest possible contents of glycerol and/or glycerol-3-phosphate on the other hand as less as possible byproducts should be produced in the production process.

Furthermore there is still a great demand for new and more suitable genes, which encode enzymes or other proteins, which participate in the biosynthesis of total lipids and make it possible to produce them specifically on an industrial scale without unwanted byproducts forming. In the selection of genes for biosynthesis two characteristics above all are particularly important. On the one hand, there is as ever a need for improved processes for obtaining the highest possible contents of total lipids and especially of glycerol and/or glycerol-3-phosphate; on the other hand as less as possible byproducts should be produced in the production process.
Glycerol or glycerol-3-phosphate is biosynthetic precursor for the biosynthesis of monoacylglycerols, diacylglycerols, triacylglycerols, phosphatidylglycerols and other glycerolipids (e.g. glycosylglycerides, diphosphatidylglycerols, phosphonolipids, phosphatidylcholines, phosphatidylethanolamines, phosphatidylinositols, phytoglycolipids).
Therefore the analysis of the glycerol content in cells, tissues or plant parts like seeds and leaves after total lipid extraction and lipid hydrolysis directly correlates with the analysis of the total lipid content. For example if the overexpression of a gene participating in the biosynthesis of triacylglycerols in the seed results in an increase in total lipid content in the seed or leaf this seed will also show an increased glycerol content after total lipid extraction and hydrolysis of the lipids.
Therefore the method as described below which leads to an increase in glycerol in the lipid fraction after cleavage of the ester functions for example with a mixture of methanol and hydrochloric acid clearly represents a method for an increased production of triacylglycerol or total lipids.

[5811] for the disclosure of this paragraph see [0013.0.0.0] above.

[5812] Accordingly, in a first embodiment, the invention relates to a process for the production of a fine chemical, whereby the fine chemical is glycerol and/or glycerol-3-phosphate in free or bound form for example bound to lipids, oils or fatty acids. Accordingly, in the present invention, the term “the fine chemical” as used herein relates to “glycerol and/or glycerol-3-phosphate in free or bound form”. Further, the term “the fine chemicals” as used herein also relates to fine chemicals comprising glycerol and/or glycerol-3-phosphate in free or bound form.

[5813] In one embodiment, the term “glycerol and/or glycerol-3-phosphate in free or bound form”, “the fine chemical” or “the respective fine chemical” means at least one chemical compound selected from the group consisting of glycerol and/or glycerol-3-phosphate, its salts, ester, thioester or mixtures thereof in free or bound form. Throughout the specification the term “the fine chemical” or “the respective fine chemical” means a compound selected from the group glycerol and/or glycerol-3-phosphate, its salts, ester, thioester or mixtures thereof in free form or bound to other compounds such as protein(s) such as enzyme(s), peptide(s), polypeptide(s), membranes or part thereof, or lipids, oils, waxes or fatty acids or mixtures thereof or in compositions with lipids or carbohydrates such as sugars or sugarpolymers, like glucosides or polyols like myo-inositol or mixtures thereof. In one embodiment, the term “the fine chemical” and the term “the respective fine chemical” mean at least one chemical compound with an activity of the abovementioned fine chemical.

In one embodiment, the term “the fine chemical” means monoacylglycerols, diacylglycerols, triacylglycerols, phosphatidylglycerols and/or other glycerolipids (e.g. but not limited to glycosylglycerides, diphosphatidylglycerols, phosphonolipids, phosphatidylcholines, phosphatidylethanolamines, phosphatidylinositols or phytoglycolipids) and is hereinafter referred to as “total lipids”.

[5814] Accordingly, the present invention relates to a process for the production of glycerol and/or glycerol-3-phosphate, which comprises
[5815] (a) increasing or generating the activity of a protein as shown in table II, application no. 22, column 3 encoded by the nucleic acid sequences as shown in table I, application no. 22, column 5, in an organelle of a microorganism or plant, or
[5816] (b) increasing or generating the activity of a protein as shown in table II, application no. 22, column 3 encoded by the nucleic acid sequences as shown in table I, application no. 22, column 5 in the plastid of a microorganism or plant, or in one or more parts thereof; and
[5817] (c) growing the organism under conditions which permit the production of the fine chemical, thus, glycerol and/or glycerol-3-phosphate or fine chemicals comprising glycerol and/or glycerol-3-phosphate, are produced in said organism or in the culture medium surrounding the organism.

[5818] Accordingly, the term “the fine chemical” means “glycerol and/or glycerol-3-phosphate, its salts, ester, thioester or mixtures thereof in free or bound form” in relation to all sequences listed in table I, application no. 22, columns 3 and 7 or homologs thereof. Accordingly, the term “the fine chemical” can mean “glycerol and/or glycerol-3-phosphate in free or bound form”, owing to circumstances and the context. Preferably the term “the fine chemical” means “glycerol and/or glycerol-3-phosphate”. In order to illustrate that the meaning of the term “the respective fine chemical” means “glycerol and/or glycerol-3-phosphate in free or bound form” owing to the sequences listed in the context the term “the respective fine chemical” is also used.

[5819] In another embodiment the present invention is related to a process for the production of glycerol and/or glycerol-3-phosphate, which comprises
[5820] (a) increasing or generating the activity of a protein as shown in table II, application no. 22, column 3 encoded by the nucleic acid sequences as shown in table I, application no. 22, column 5, in an organelle of a non-human organism, or
[5821] (b) increasing or generating the activity of a protein as shown in table II, application no. 22, column 3 encoded by the nucleic acid sequences as shown in table I, application no. 22, column 5, which are joined to a nucleic acid sequence encoding a transit peptide in a non-human organism, or in one or more parts thereof; or
[5822] (c) increasing or generating the activity of a protein as shown in table II, application no. 22, column 3 encoded by the nucleic acid sequences as shown in table I, application no. 22, column 5, which are joined to a nucleic acid sequence encoding chloroplast localization sequence, in a non-human organism, or in one or more parts thereof, and
[5823] (d) growing the organism under conditions which permit the production of glycerol and/or glycerol-3-phosphate in said organism.

[5824] In another embodiment, the present invention relates to a process for the production of glycerol and/or glycerol-3-phosphate, which comprises
[5825] (a) increasing or generating the activity of a protein as shown in table II, application no. 22, column 3 encoded by the nucleic acid sequences as shown in table I, application no. 22, column 5, in an organelle of a microorganism or plant through the transformation of the organelle, or
[5826] (b) increasing or generating the activity of a protein as shown in table II, application no. 22, column 3 encoded by the nucleic acid sequences as shown in table I, application no. 22, column 5 in the plastid of a microorganism or plant, or in one or more parts thereof through the transformation of the plastids; and
[5827] (c) growing the organism under conditions which permit the production of the fine chemical, thus, glycerol and/or glycerol-3-phosphate or fine chemicals comprising glycerol and/or glycerol-3-phosphate in said organism or in the culture medium surrounding the organism.

[5828] Advantageously the activity of the protein as shown in table II, application no. 22, column 3 encoded by the nucleic acid sequences as shown in table I, application no. 22, column 5 is increased or generated in the abovementioned process in the plastid of a microorganism or plant.

[5829] for the disclosure of the paragraphs [0019.0.0.21] to [0024.0.0.21] see paragraphs [0019.0.0.0] and [0024.0.0.0] above.

[5830] Even more preferred nucleic acid sequences are encoding transit peptides as disclosed by von Heijne et al. [Plant Molecular Biology Reporter, Vol. 9 (2), 1991: 104-126], which are hereby incorporated by reference. Table V shows some examples of the transit peptide sequences disclosed by von Heijne et al. According to the disclosure of the invention especially in the examples the skilled worker is able to link other nucleic acid sequences disclosed by von Heijne et al. to the nucleic acid sequences shown in table I, application no. 22, columns 5 and 7. Most preferred nucleic acid sequences encoding transit peptides are derived from the genus Spinacia such as chloroplast 30S ribosomal protein PSrp-1, root acyl carrier protein II, acyl carrier protein, ATP synthase: γ subunit, ATP synthase: δ subunit, cytochrom f, ferredoxin I, ferredoxin NADP oxidoreductase (=FNR), nitrite reductase, phosphoribulokinase, plastocyanin or carbonic anhydrase. The skilled worker will recognize that various other nucleic acid sequences encoding transit peptides can easily isolated from plastid-localized proteins, which are expressed from nuclear genes as precursors and are then targeted to plastids. Such transit peptides encoding sequences can be used for the construction of other expression constructs. The transit peptides advantageously used in the inventive process and which are part of the inventive nucleic acid sequences and proteins are typically 20 to 120 amino acids, preferably 25 to 110, 30 to 100 or 35 to 90 amino acids, more preferably 40 to 85 amino acids and most preferably 45 to 80 amino acids in length and functions post-translationally to direct the protein to the plastid preferably to the chloroplast. The nucleic acid sequences encoding such transit peptides are localized upstream of nucleic acid sequence encoding the mature protein. For the correct molecular joining of the transit peptide encoding nucleic acid and the nucleic acid encoding the protein to be targeted it is sometimes necessary to introduce additional base pairs at the joining position, which forms restriction enzyme recognition sequences useful for the molecular joining of the different nucleic acid molecules. This procedure might lead to very few additional amino acids at the N-terminal of the mature imported protein, which usually and preferably do not interfere with the protein function. In any case, the additional base pairs at the joining position which forms restriction enzyme recognition sequences have to be chosen with care, in order to avoid the formation of stop codons or codons which encode amino acids with a strong influence on protein folding, like e.g. proline. It is preferred that such additional codons encode small n.d. structural flexible amino acids such as glycine or alanine.

[5831] As mentioned above the nucleic acid sequences coding for the proteins as shown in table II, application no. 22, column 3 and its homologs as disclosed in table I, application no. 22, columns 5 and 7 are joined to a nucleic acid sequence encoding a transit peptide, This nucleic acid sequence encoding a transit peptide ensures transport of the protein to the plastid. The nucleic acid sequence of the gene to be expressed and the nucleic acid sequence encoding the transit peptide are operably linked. Therefore the transit peptide is fused in frame to the nucleic acid sequence coding for proteins as shown in table II, application no. 22, column 3 and its homologs as disclosed in table I, application no. 22, columns 5 and 7.

[5832] for the disclosure of the paragraphs [0027.0.0.21] to [0029.0.0.21] see paragraphs [0027.0.0.0] and [0029.0.0.0] above.

[5833] Alternatively, nucleic acid sequences coding for the transit peptides may be chemically synthesized either in part or wholly according to structure of transit peptide sequences disclosed in the prior art. Said natural or chemically synthesized sequences can be directly linked to the sequences encoding the mature protein or via a linker nucleic acid sequence, which may be typically less than 500 base pairs, preferably less than 450, 400, 350, 300, 250 or 200 base pairs, more preferably less than 150, 100, 90, 80, 70, 60, 50, 40 or 30 base pairs and most preferably less than 25, 20, 15, 12, 9, 6 or 3 base pairs in length and are in frame to the coding sequence. Furthermore favorable nucleic acid sequences encoding transit peptides may comprise sequences derived from more than one biological and/or chemical source and may include a nucleic acid sequence derived from the amino-terminal region of the mature protein, which in its native state is linked to the transit peptide. In a preferred embodiment of the invention said amino-terminal region of the mature protein is typically less than 150 amino acids, preferably less than 140, 130, 120, 110, 100 or 90 amino acids, more preferably less than 80, 70, 60, 50, 40, 35, 30, 25 or 20 amino acids and most preferably less than 19, 18, 17, 16, 15, 14, 13, 12, 11 or 10 amino acids in length. But even shorter or longer stretches are also possible. In addition target sequences, which facilitate the transport of proteins to other cell compartments such as the vacuole, endoplasmic reticulum, Golgi complex, glyoxysomes, peroxisomes or mitochondria may be also part of the inventive nucleic acid sequence. The proteins translated from said inventive nucleic acid sequences are a kind of fusion proteins that means the nucleic acid sequences encoding the transit peptide for example the ones shown in table V, preferably the last one of the table are joint to the nucleic acid sequences shown in table I, application no. 22, columns 5 and 7. The person skilled in the art is able to join said sequences in a functional manner. Advantageously the transit peptide part is cleaved off from the protein part shown in table II, application no. 22, columns 5 and 7 during the transport preferably into the plastids. All products of the cleavage of the preferred transit peptide shown in the last line of table V have preferably the N-terminal amino acid sequences QIA CSS or QIA EFQLTT in front of the start methionine of the protein mentioned in table II, application no. 22, columns 5 and 7. Other short amino acid sequences of an range of 1 to 20 amino acids preferable 2 to 15 amino acids, more preferable 3 to 10 amino acids most preferably 4 to 8 amino acids are also possible in front of the start methionine of the protein mentioned in table II, application no. 22, columns 5 and 7. In case of the amino acid sequence QIA CSS the three amino acids in front of the start methionine are stemming from the LIC (=ligatation independent cloning) cassette. Said short amino acid sequence is preferred in the case of the expression of E. coli genes. In case of the amino acid sequence QIA EFQLTT the six amino acids in front of the start methionine are stemming from the LIC cassette. Said short amino acid sequence is preferred in the case of the expression of S. cerevisiae genes. The skilled worker knows that other short sequences are also useful in the expression of the genes mentioned in table I, application no. 22, columns 5 and 7. Furthermore the skilled worker is aware of the fact that there is not a need for such short sequences in the expression of the genes.

[5834] Table V: Examples of transit peptides disclosed by von Heijne et al. for the disclosure of Table V see paragraph [0030.2.0.0] above.

[5835] Alternatively to the targeting of the sequences shown in table II, application no. 22, columns 5 and 7 preferably of sequences in general encoded in the nucleus with the aid of the targeting sequences mentioned for example in table V alone or in combination with other targeting sequences preferably into the plastids, the nucleic acids of the invention can directly introduced into the plastidal genome. Therefore in a preferred embodiment the nucleic acid sequences shown in table I, application no. 22, columns 5 and 7 are directly introduced and expressed in plastids.

The term “introduced” in the context of this specification shall mean the insertion of a nucleic acid sequence into the organism by means of a “transfection”, “transduction” or preferably by “transformation”.
A plastid, such as a chloroplast, has been “transformed” by an exogenous (preferably foreign) nucleic acid sequence if nucleic acid sequence has been introduced into the plastid that means that this sequence has crossed the membrane or the membranes of the plastid. The foreign DNA may be integrated (covalently linked) into plastid DNA making up the genome of the plastid, or it may remain unintegrated (e.g., by including a chloroplast origin of replication). “Stably” integrated DNA sequences are those, which are inherited through plastid replication, thereby transferring new plastids, with the features of the integrated DNA sequence to the progeny.

[5836] for the disclosure of the paragraphs [0030.2.0.21] and [0030.3.0.21] see paragraphs [0030.2.0.0] and [0030.3.0.0] above.

[5837] For the inventive process it is of great advantage that by transforming the plastids the intraspecies specific transgene flow is blocked, because a lot of species such as corn, cotton and rice have a strict maternal inheritance of plastids. By placing the genes specified in table I, application no. 22, columns 5 and 7 or active fragments thereof in the plastids of plants, these genes will not be present in the pollen of said plants.

A further preferred embodiment of the invention relates to the use of so called “chloroplast localization sequences”, in which a first RNA sequence or molecule is capable of transporting or “chaperoning” a second RNA sequence, such as a RNA sequence transcribed from the sequences depicted in table I, application no. 22, columns 5 and 7 or a sequence encoding a protein, as depicted in table II, application no. 22, columns 5 and 7, from an external environment inside a cell or outside a plastid into a chloroplast. In one embodiment the chloroplast localization signal is substantially similar or complementary to a complete or intact viroid sequence. The chloroplast localization signal may be encoded by a DNA sequence, which is transcribed into the chloroplast localization RNA. The term “viroid” refers to a naturally occurring single stranded RNA molecule (Flores, C R Acad Sci III. 2001 October; 324(10): 943-52). Viroids usually contain about 200-500 nucleotides and generally exist as circular molecules. Examples of viroids that contain chloroplast localization signals include but are not limited to ASBVd, PLMVd, CChMVd and ELVd. The viroid sequence or a functional part of it can be fused to the sequences depicted in table I, application no. 22, columns 5 and 7 or a sequence encoding a protein, as depicted in table II, application no. 22, columns 5 and 7 in such a manner that the viroid sequence transports a sequence transcribed from a sequence as depicted in table I, application no. 22, columns 5 and 7 or a sequence encoding a protein as depicted in table II, application no. 22, columns 5 and 7 into the chloroplasts. A preferred embodiment uses a modified ASBVd (Navarro et al., Virology. 2000 Mar. 1; 268(1): 218-25).
In a further specific embodiment the protein to be expressed in the plastids such as the proteins depicted in table II, application no. 22, columns 5 and 7 are encoded by different nucleic acids. Such a method is disclosed in WO 2004/040973, which shall be incorporated by reference. WO 2004/040973 teaches a method, which relates to the translocation of an RNA corresponding to a gene or gene fragment into the chloroplast by means of a chloroplast localization sequence. The genes, which should be expressed in the plant or plants cells, are split into nucleic acid fragments, which are introduced into different compartments in the plant e.g. the nucleus, the plastids and/or mitochondria. Additionally plant cells are described in which the chloroplast contains a ribozyme fused at one end to an RNA encoding a fragment of a protein used in the inventive process such that the ribozyme can trans-splice the translocated fusion RNA to the RNA encoding the gene fragment to form and as the case may be reunite the nucleic acid fragments to an intact mRNA encoding a functional protein for example as disclosed in table II, application no. 22, columns 5 and 7.

[5838] In a preferred embodiment of the invention the nucleic acid sequences as shown in table I, application no. 22, columns 5 and 7 used in the inventive process are transformed into plastids, which are metabolical active. Those plastids should preferably maintain at a high copy number in the plant or plant tissue of interest, most preferably the chloroplasts found in green plant tissues, such as leaves or cotyledons or in seeds.

[5839] For a good expression in the plastids the nucleic acid sequences as shown in table I, application no. 22, columns 5 and 7 are introduced into an expression cassette using a preferably a promoter and terminator, which are active in plastids preferably a chloroplast promoter. Examples of such promoters include the psbA promoter from the gene from spinach or pea, the rbcL promoter, and the atpB promoter from corn.

[5840] for the disclosure of the paragraphs [0031.0.0.21] and [0032.0.0.21] see paragraphs [0031.0.0.0] and [0032.0.0.0] above.

[5841] Advantageously the process for the production of the fine chemical leads to an enhanced production of the fine chemical. The terms “enhanced” or “increase” mean at least a 10%, 20%, 30%, 40% or 50%, preferably at least 60%, 70%, 80%, 90% or 100%, more preferably 150%, 200%, 300%, 400% or 500% higher production of the fine chemical in comparison to the reference as defined below, e.g. that means in comparison to an organism without the aforementioned modification of the activity of a protein as shown in table II, application no. 22, column 3. Preferably the modification of the activity of a protein as shown in table II, application no. 22, column 3 or their combination can be achieved by joining the protein to a transit peptide.

[5842] Surprisingly it was found, that the transgenic expression of the Saccharomyces cerevisiae protein as shown in table II, application no. 22, column 3 in plastids of a plant such as Arabidopsis thaliana for example through the linkage to at least one targeting sequence for example as mentioned in table V conferred an increase in the fine chemical content of the transformed plants.

[5843] for the disclosure of this paragraph see paragraph [0035.0.0.0] above.

[5844] The sequence of b0342 (Accession number XXECTG) from Escherichia coli has been published in Blattner et al., Science 277 (5331), 1453-1474 (1997), and its activity is being defined as “thiogalactoside acetyltransferase”. Accordingly, in one embodiment, the process of the present invention comprises the use of a “thiogalactoside acetyltransferase” or its homolog, e.g. as shown herein, for the production of the fine chemical, meaning of glycerol and/or glycerol-3-phosphate, in particular for increasing the amount of glycerol and/or glycerol-3-phosphate in free or bound form in an organism or a part thereof, as mentioned. In one embodiment, in the process of the present invention the activity of a b0342 protein is increased or generated, e.g. from Escherichia coli or a homolog thereof, preferably linked at least to one transit peptide as mentioned for example in table V.

In another embodiment, in the process of the present invention the activity of a b0342 protein is increased or generated in a subcellular compartment of the organism or organism cell such as in an organelle like a plastid or mitochondria.
The sequence of b1021 (Accession number C64844) from Escherichia coli has been published in Blattner et al., Science 277 (5331), 1453-1474 (1997), and its activity is being defined as “proberly membrane protein ycdP”. Accordingly, in one embodiment, the process of the present invention comprises the use of a “proberly membrane protein ycdP” or its homolog, e.g. as shown herein, for the production of the fine chemical, meaning of glycerol and/or glycerol-3-phosphate, in particular for increasing the amount of glycerol and/or glycerol-3-phosphate in free or bound form in an organism or a part thereof, as mentioned. In one embodiment, in the process of the present invention the activity of a b1021 protein is increased or generated, e.g. from Escherichia coli or a homolog thereof, preferably linked at least to one transit peptide as mentioned for example in table V.
In another embodiment, in the process of the present invention the activity of a b1021 protein is increased or generated in a subcellular compartment of the organism or organism cell such as in an organelle like a plastid or mitochondria.
The sequence of b2022 (Accession number NP_{—}416526) from Escherichia coli has been published in Blattner et al., Science 277 (5331), 1453-1474 (1997), and its activity is being defined as “bifunctional histidinol-phosphatase/imidazoleglycerol-phosphate dehydratase”. Accordingly, in one embodiment, the process of the present invention comprises the use of a “bifunctional histidinol-phosphatase/imidazoleglycerol-phosphate dehydratase” or its homolog, e.g. as shown herein, for the production of the fine chemical, meaning of glycerol and/or glycerol-3-phosphate, in particular for increasing the amount of glycerol and/or glycerol-3-phosphate in free or bound form in an organism or a part thereof, as mentioned. In one embodiment, in the process of the present invention the activity of a b2022 protein is increased or generated, e.g. from Escherichia coli or a homolog thereof, preferably linked at least to one transit peptide as mentioned for example in table V.
In another embodiment, in the process of the present invention the activity of a b2022 protein is increased or generated in a subcellular compartment of the organism or organism cell such as in an organelle like a plastid or mitochondria.
The sequence of b2818 (Accession number NP_{—}417295) from Escherichia coli has been published in Blattner et al., Science 277 (5331), 1453-1474 (1997), and its activity is being defined as “N-acetylglutamate synthase (amino acid N-acetyltransferase)”. Accordingly, in one embodiment, the process of the present invention comprises the use of a “N-acetylglutamate synthase (amino acid N-acetyltransferase)” or its homolog, e.g. as shown herein, for the production of the fine chemical, meaning of glycerol and/or glycerol-3-phosphate, in particular for increasing the amount of glycerol and/or glycerol-3-phosphate in free or bound form in an organism or a part thereof, as mentioned. In one embodiment, in the process of the present invention the activity of a b2818 protein is increased or generated, e.g. from Escherichia coli or a homolog thereof, preferably linked at least to one transit peptide as mentioned for example in table V.
In another embodiment, in the process of the present invention the activity of a b2818 protein is increased or generated in a subcellular compartment of the organism or organism cell such as in an organelle like a plastid or mitochondria.
The sequence of b3429 (Accession number NP_{—}417887) from Escherichia coli has been published in Blattner et al., Science 277 (5331), 1453-1474 (1997), and its activity is being defined as “glycogen synthase (starch synthase)”. Accordingly, in one embodiment, the process of the present invention comprises the use of a “glycogen synthase (starch synthase)” or its homolog, e.g. as shown herein, for the production of the fine chemical, meaning of glycerol and/or glycerol-3-phosphate, in particular for increasing the amount of glycerol and/or glycerol-3-phosphate in free or bound form in an organism or a part thereof, as mentioned. In one embodiment, in the process of the present invention the activity of a b3429 protein is increased or generated, e.g. from Escherichia coli or a homolog thereof, preferably linked at least to one transit peptide as mentioned for example in table V.
In another embodiment, in the process of the present invention the activity of a b3429 protein is increased or generated in a subcellular compartment of the organism or organism cell such as in an organelle like a plastid or mitochondria.
The sequence of b3614 (Accession number S47835) from Escherichia coli has been published in Blattner et al., Science 277 (5331), 1453-1474 (1997), and its activity is being defined as “hypothetical 30.7K protein (secb-tdh intergenic region)”. Accordingly, in one embodiment, the process of the present invention comprises the use of a “hypothetical 30.7K protein (secb-tdh intergenic region)” or its homolog, e.g. as shown herein, for the production of the fine chemical, meaning of glycerol and/or glycerol-3-phosphate, in particular for increasing the amount of glycerol and/or glycerol-3-phosphate in free or bound form in an organism or a part thereof, as mentioned. In one embodiment, in the process of the present invention the activity of a b3614 protein is increased or generated, e.g. from Escherichia coli or a homolog thereof, preferably linked at least to one transit peptide as mentioned for example in table V.
In another embodiment, in the process of the present invention the activity of a b3614 protein is increased or generated in a subcellular compartment of the organism or organism cell such as in an organelle like a plastid or mitochondria.
The sequence of b3708 (Accession number WZEC) from Escherichia coli has been published in Blattner et al., Science 277 (5331), 1453-1474 (1997), and its activity is being defined as “tryptophan deaminase, PLP-dependent”. Accordingly, in one embodiment, the process of the present invention comprises the use of a “tryptophan deaminase, PLP-dependent” or its homolog, e.g. as shown herein, for the production of the fine chemical, meaning of glycerol and/or glycerol-3-phosphate, in particular for increasing the amount of glycerol and/or glycerol-3-phosphate in free or bound form in an organism or a part thereof, as mentioned. In one embodiment, in the process of the present invention the activity of a b3708 protein is increased or generated, e.g. from Escherichia coli or a homolog thereof, preferably linked at least to one transit peptide as mentioned for example in table V.
In another embodiment, in the process of the present invention the activity of a b3708 protein is increased or generated in a subcellular compartment of the organism or organism cell such as in an organelle like a plastid or mitochondria.
The sequence of b4055 (Accession number S54790) from Escherichia coli has been published in Blattner et al., Science 277 (5331), 1453-1474 (1997), and its activity is being defined as “acid phosphatase”. Accordingly, in one embodiment, the process of the present invention comprises the use of a “acid phosphatase” or its homolog, e.g. as shown herein, for the production of the fine chemical, meaning of glycerol and/or glycerol-3-phosphate, in particular for increasing the amount of glycerol and/or glycerol-3-phosphate in free or bound form in an organism or a part thereof, as mentioned. In one embodiment, in the process of the present invention the activity of a b4055 protein is increased or generated, e.g. from Escherichia coli or a homolog thereof, preferably linked at least to one transit peptide as mentioned for example in table V.
In another embodiment, in the process of the present invention the activity of a b4055 protein is increased or generated in a subcellular compartment of the organism or organism cell such as in an organelle like a plastid or mitochondria.
The sequence of YDR035W (Accession number NP_{—}010320) from Saccharomyces cerevisiae has been published in Goffeau et al., Science 274 (5287), 546-547, 1996 and Jacq et al., Nature 387 (6632 Suppl), 75-78 (1997), and its activity is being defined as a “3-deoxy-D-arabino-heptulosonate-7-phosphate (DAHP) synthase”. Accordingly, in one embodiment, the process of the present invention comprises the use of a “3-deoxy-D-arabino-heptulosonate-7-phosphate synthase” or its homolog, e.g. as shown herein, for the production of the fine chemical, meaning of glycerol and/or glycerol-3-phosphate, in particular for increasing the amount of glycerol and/or glycerol-3-phosphate in free or bound form in an organism or a part thereof, as mentioned. In one embodiment, in the process of the present invention the activity of a YDR035W protein is increased or generated, e.g. from Saccharomyces cerevisiae or a homolog thereof, preferably linked at least to one transit peptide as mentioned for example in table V.
In another embodiment, in the process of the present invention the activity of an YDR035W protein is increased or generated in a subcellular compartment of the organism or organism cell such as in an organelle like a plastid or mitochondria.

[5845] In one embodiment, the homolog of the b0342, b1021, b2022, b2818, b3429, b3429, b3614, b3708 or b4055 is a homolog having said activity and being derived from bacteria. In one embodiment, the homolog of the b0342, b1021, b2022, b2818, b3429, b3429, b3614, b3708 or b4055 is a homolog having said activity and being derived from Proteobacteria. In one embodiment, the homolog of the b0342, b1021, b2022, b2818, b3429, b3429, b3614, b3708 or b4055 is a homolog having said activity and being derived from Gammaproteobacteria. In one embodiment, the homolog of the b0342, b1021, b2022, b2818, b3429, b3429, b3614, b3708 or b4055 is a homolog having said activity and being derived from Enterobacteriales. In one embodiment, the homolog of the b0342, b1021, b2022, b2818, b3429, b3429, b3614, b3708 or b4055 is a homolog having said activity and being derived from Enterobacteriaceae. In one embodiment, the homolog of the b0342, b1021, b2022, b2818, b3429, b3429, b3614, b3708 or b4055 is a homolog having said activity and being derived from Escherichia, preferably from Escherichia coli.

[5846] In one embodiment, the homolog of the YDR035W is a homolog having said activity and being derived from an eukaryotic. In one embodiment, the homolog of the YDR035W is a homolog having said activity and being derived from Fungi. In one embodiment, the homolog of the YDR035W is a homolog having said activity and being derived from Ascomyceta. In one embodiment, the homolog of the YDR035W is a homolog having said activity and being derived from Saccharomycotina. In one embodiment, the homolog of the YDR035W is a homolog having said activity and being derived from Saccharomycetes. In one embodiment, the homolog of the YDR035W is a homolog having said activity and being derived from Saccharomycetales. In one embodiment, the homolog of the YDR035W is a homolog having said activity and being derived from Saccharomycetaceae. In one embodiment, the homolog of the YDR035W is a homolog having said activity and being derived from Saccharomycetes.

[5847] for the disclosure of this paragraph see paragraph [0038.0.0.0] above.

[5848] In accordance with the invention, a protein or polypeptide has the “activity of an protein as shown in table II, application no. 22, column 3” if its de novo activity, or its increased expression directly or indirectly leads to an increased in the fine chemical level in the organism or a part thereof, preferably in a cell of said organism, more preferably in an organelle such as a plastid or mitochondria of said organism and the protein has the above mentioned activities of a protein as shown in table II, application no. 22, column 3, preferably in the event the nucleic acid sequences encoding said proteins is functionally joined to the nucleic acid sequence of a transit peptide. Throughout the specification the activity or preferably the biological activity of such a protein or polypeptide or an nucleic acid molecule or sequence encoding such protein or polypeptide is identical or similar if it still has the biological or enzymatic activity of a protein as shown in table II, application no. 22, column 3, or which has at least 10% of the original enzymatic activity, preferably 20%, particularly preferably 30%, most particularly preferably 40% in comparison to a protein as shown in table II, application no. 22, column 3 of Saccharomyces cerevisiae.

[5849] for the disclosure of the paragraphs [0040.0.0.21] to [0047.0.0.21] see paragraphs [0040.0.0.0] to [0047.0.0.0] above.

[5850] Preferably, the reference, control or wild type differs form the subject of the present invention only in the cellular activity, preferably of the plastidial activity of the polypeptide of the invention, e.g. as result of an increase in the level of the nucleic acid molecule of the present invention or an increase of the specific activity of the polypeptide of the invention, e.g. by or in the expression level or activity of an protein having the activity of a protein as shown in table II, application no. 22, column 3 its biochemical or genetical causes and the increased amount of the fine chemical.

[5851] for the disclosure of the paragraphs [0049.0.0.21] to [0051.0.0.21] see paragraphs [0049.0.0.0] to [0051.0.0.0] above.

[5852] For example, the molecule number or the specific activity of the polypeptide or the nucleic acid molecule may be increased. Larger amounts of the fine chemical can be produced if the polypeptide or the nucleic acid of the invention is expressed de novo in an organism lacking the activity of said protein, preferably the nucleic acid molecules as mentioned in table I, application no. 22, columns 5 and 7 alone or preferably in combination with a transit peptide for example as mentioned in table V or in another embodiment by introducing said nucleic acid molecules into an organelle such as an plastid or mitochondria in the transgenic organism. However, it is also possible to modify the expression of the gene which is naturally present in the organisms, for example by integrating a nucleic acid sequence, encoding a plastidic targeting sequence in front (5 prime) of the coding sequence, leading to a functional preprotein, which is directed for example to the plastids.

[5853] for the disclosure of the paragraphs [0053.0.0.21] to [0058.0.0.21] see paragraphs [0053.0.0.0] to [0058.0.0.0] above.

In case the activity of the Escherichia coli protein b0342 or its homologs, e.g. a “thiogalactoside acetyltransferase” is increased advantageously in an organelle such as a plastid or mitochondria, preferably, in one embodiment an increase of the fine chemical, preferably of glycerol-3-phosphate in free or bound form, preferably in the lipid fraction, between 19% and 71% or more is conferred.
In case the activity of the Escherichia coli protein b1021 or its homologs, e.g. a “membrane protein ycdP” is increased advantageously in an organelle such as a plastid or mitochondria, preferably, in one embodiment an increase of the fine chemical, preferably of glycerol in free or bound form, preferably in the lipid fraction, between 47% and 89% or more is conferred.
In case the activity of the Escherichia coli protein b2022 or its homologs, e.g. a “bifunctional histidinol-phosphatase/imidazoleglycerol-phosphate dehydratase” is increased advantageously in an organelle such as a plastid or mitochondria, preferably, in one embodiment an increase of the fine chemical, preferably of glycerol in free or bound form, preferably in the lipid fraction, between 24% and 66% or more is conferred.
In case the activity of the Escherichia coli protein b2818 or its homologs, e.g. a “N-acetylglutamate synthase (amino acid N-acetyltransferase)” is increased advantageously in an organelle such as a plastid or mitochondria, preferably, in one embodiment an increase of the fine chemical, preferably of glycerol in free or bound form, preferably in the lipid fraction, between 17% and 29% or more is conferred.
In case the activity of the Escherichia coli protein b3429 or its homologs, e.g. a “glycogen synthase (starch synthase)” is increased advantageously in an organelle such as a plastid or mitochondria, preferably, in one embodiment an increase of the fine chemical, preferably of glycerol in free or bound form in the lipid fraction between 18% and 98% or more or glycerol in free or bound form in the polar fraction between 87% and 189% is conferred.
In case the activity of the Escherichia coli protein b3614 or its homologs, e.g. a “hypothetical 30.7K protein (secb-tdh intergenic region)” is increased advantageously in an organelle such as a plastid or mitochondria, preferably, in one embodiment an increase of the fine chemical, preferably of glycerol-3-phosphate in free or bound form, preferably in the lipid fraction, between 19% and 46% or more is conferred.
In case the activity of the Escherichia coli protein b3708 or its homologs, e.g. a “tryptophan deaminase, PLP-dependent” is increased advantageously in an organelle such as a plastid or mitochondria, preferably, in one embodiment an increase of the fine chemical, preferably of glycerol in free or bound form, preferably in the lipid fraction, between 19% and 39% or more is conferred.
In case the activity of the Escherichia coli protein b4055 or its homologs, e.g. a “acid phosphatase” is increased advantageously in an organelle such as a plastid or mitochondria, preferably, in one embodiment an increase of the fine chemical, preferably of glycerol in free or bound form, preferably in the lipid fraction, between 17% and 32% or more is conferred.
In case the activity of the Saccharomyces cerevisiae protein YDR035W or its homologs, e.g. a “3-deoxy-D-arabino-heptulosonate 7-phosphate (DAHP) synthase” is increased advantageously in an organelle such as a plastid or mitochondria, preferably, in one embodiment an increase of the fine chemical, preferably of glycerol in free or bound form, preferably in the lipid fraction, between 20% and 31% or more is conferred.

[5854] In case the activity of the Escherichia coli proteins b0342, b1021, b2022, b2818, b3429, b3429, b3614, b3708 and/or b4055 or their homologs, are increased advantageously in an organelle such as a plastid or mitochondria, preferably an increase of the fine chemical such as glycerol and/or glycerol-3-phosphate or mixtures thereof in free or bound form is conferred.

In case the activity of the Saccharomyces cerevisiae protein YDR035W or their homologs, are increased advantageously in an organelle such as a plastid or mitochondria, preferably an increase of the fine chemical such as glycerol and/or glycerol-3-phosphate or mixtures thereof in free or bound form is conferred.

[5855] for the disclosure of the paragraphs [0061.0.0.21] and [0062.0.0.21] see paragraphs [0061.0.0.0] and [0062.0.0.0] above.

[5856] A protein having an activity conferring an increase in the amount or level of the fine chemical, preferably upon targeting to the plastids preferably has the structure of the polypeptide described herein, in particular of the polypeptides comprising the consensus sequence shown in table IV, application no. 22, column 7 or of the polypeptide as shown in the amino acid sequences as disclosed in table II, application no. 22, columns 5 and 7 or the functional homologues thereof as described herein, or is encoded by the nucleic acid molecule characterized herein or the nucleic acid molecule according to the invention, for example by the nucleic acid molecule as shown in table I, application no. 22, columns 5 and 7 or its herein described functional homologues and has the herein mentioned activity.

[5857] /

[5858] for the disclosure of the paragraphs [0065.0.0.21] and [0066.0.0.21] see paragraphs [0065.0.0.0] and [0066.0.0.0] above.

[5859] In one embodiment, the process of the present invention comprises one or more of the following steps
[5860] a) stabilizing a protein conferring the increased expression of a protein encoded by the nucleic acid molecule of the invention or of the polypeptide of the invention, e.g. of a polypeptide having the activity of a protein as indicated in table II, application no. 22, columns 5 and 7 or its homologs activity having herein-mentioned glycerol and/or glycerol-3-phosphate increasing activity; and/or
[5861] b) stabilizing a mRNA conferring the increased expression of a protein encoded by the nucleic acid molecule of the invention, which is in the sense of the invention a fusion of a nucleic acid sequence encoding a transit peptide and of a nucleic acid sequence as shown in table I, application no. 22, columns 5 and 7, e.g. a nucleic acid sequence encoding a polypeptide having the activity of a protein as indicated in table II, application no. 22, columns 5 and 7 or its homologs activity or of a mRNA encoding the polypeptide of the present invention having herein-mentioned glycerol and/or glycerol-3-phosphate increasing activity; and/or
[5862] c) increasing the specific activity of a protein conferring the increased expression of a protein encoded by the nucleic acid molecule of the invention or of the polypeptide of the present invention having herein-mentioned glycerol and/or glycerol-3-phosphate increasing activity, e.g. of a polypeptide having the activity of a protein as indicated in table II, application no. 22, columns 5 and 7 or its homologs activity, or decreasing the inhibitory regulation of the polypeptide of the invention; and/or
[5863] d) generating or increasing the expression of an endogenous or artificial transcription factor mediating the expression of a protein conferring the increased expression of a protein encoded by the nucleic acid molecule of the invention or of the polypeptide of the invention having herein-mentioned glycerol and/or glycerol-3-phosphate increasing activity, e.g. of a polypeptide having the activity of a protein as indicated in table II, application no. 22, columns 5 and 7 or its homologs activity; and/or
[5864] e) stimulating activity of a protein conferring the increased expression of a protein encoded by the nucleic acid molecule of the present invention or a polypeptide of the present invention having herein-mentioned glycerol and/or glycerol-3-phosphate increasing activity, e.g. of a polypeptide having the activity of a protein as indicated in table II, application no. 22, columns 5 and 7 or its homologs activity, by adding one or more exogenous inducing factors to the organisms or parts thereof; and/or
[5865] f) expressing a transgenic gene encoding a protein conferring the increased expression of a polypeptide encoded by the nucleic acid molecule of the present invention or a polypeptide of the present invention, having herein-mentioned glycerol and/or glycerol-3-phosphate increasing activity, e.g. of a polypeptide having the activity of a protein as indicated in table II, application no. 22, columns 5 and 7 or its homologs activity, and/or
[5866] g) increasing the copy number of a gene conferring the increased expression of a nucleic acid molecule encoding a polypeptide encoded by the nucleic acid molecule of the invention or the polypeptide of the invention having herein-mentioned glycerol and/or glycerol-3-phosphate increasing activity, e.g. of a polypeptide having the activity of a protein as indicated in table II, application no. 22, columns 5 and 7 or its homologs activity; and/or
[5867] h) increasing the expression of the endogenous gene encoding the polypeptide of the invention, e.g. a polypeptide having the activity of a protein as indicated in table II, application no. 22, columns 5 and 7 or its homologs activity, by adding positive expression or removing negative expression elements, e.g. homologous recombination can be used to either introduce positive regulatory elements like for plants the 35S enhancer into the promoter or to remove repressor elements form regulatory regions. Further gene conversion methods can be used to disrupt repressor elements or to enhance to activity of positive elements. Positive elements can be randomly introduced in plants by T-DNA or transposon mutagenesis and lines can be identified in which the positive elements have be integrated near to a gene of the invention, the expression of which is thereby enhanced; and/or
[5868] i) modulating growth conditions of an organism in such a manner, that the expression or activity of the gene encoding the protein of the invention or the protein itself is enhanced for example microorganisms or plants can be grown for example under a higher temperature regime leading to an enhanced expression of heat shock proteins, which can lead an enhanced fine chemical production; and/or
[5869] j) selecting of organisms with especially high activity of the proteins of the invention from natural or from mutagenized resources and breeding them into the target organisms, eg the elite crops; and/or
[5870] k) directing a protein encoded by the nucleic acid molecule of the invention or of the polypeptide of the present invention having herein-mentioned glycerol and/or glycerol-3-phosphate increasing activity, e.g. of polypeptide having the activity of a protein as indicated in table II, application no. 22, columns 5 and 7 or its homologs activity, to the plastids by the addition of a plastidial targeting sequence; and/or
[5871] l) generating the expression of a protein encoded by the nucleic acid molecule of the invention or of the polypeptide of the present invention having herein-mentioned glycerol and/or glycerol-3-phosphate increasing activity, e.g. of a polypeptide having the activity of a protein as indicated in table II, application no. 22, columns 5 and 7 or its homologs activity in plastids by the stable or transient transformation advantageously stable transformation of organelles preferably plastids with an inventive nucleic acid sequence preferably in form of an expression cassette containing said sequence leading to the plastidial expression of the nucleic acids or polypeptides of the invention; and/or
[5872] m) generating the expression of a protein encoded by the nucleic acid molecule of the invention or of the polypeptide of the present invention having herein-mentioned glycerol and/or glycerol-3-phosphate increasing activity, e.g. of a polypeptide having the activity of a protein as indicated in table II, application no. 22, columns 5 and 7 or its homologs activity in plastids by integration of a nucleic acid of the invention into the plastidal genome under control of preferable a plastidial promoter.

[5873] Preferably, said mRNA is the nucleic acid molecule of the present invention and/or the protein conferring the increased expression of a protein encoded by the nucleic acid molecule of the present invention alone or link to a transit nucleic acid sequence or transit peptide encoding nucleic acid sequence or the polypeptide having the herein mentioned activity, e.g. conferring the increase of the fine chemical after increasing the expression or activity of the encoded polypeptide preferably in organelles such as plastids or having the activity of a polypeptide having an activity as the protein as shown in table II, application no. 22, column 3 or its homologs. Preferably the increase of the fine chemical takes place in plastids.

[5874] for the disclosure of the paragraphs [0069.0.0.21] to [0079.0.0.21] see paragraphs [0069.0.0.0] to [0079.0.0.0] above.

[5875] The activation of an endogenous polypeptide having above-mentioned activity, e.g. having the activity of a protein as shown in table II, application no. 22, column 3 or of the polypeptide of the invention, e.g. conferring the increase of the fine chemical after increase of expression or activity in the cytsol and/or in an organelle like a plastid, preferentially in the plastid, can also be increased by introducing a synthetic transcription factor, which binds close to the coding region of the gene encoding the protein as shown in table II, application no. 22, column 3 and activates its transcription. A chimeric zinc finger protein can be constructed, which comprises a specific DNA-binding domain and an activation domain as e.g. the VP16 domain of Herpes Simplex virus. The specific binding domain can bind to the regulatory region of the gene encoding the protein as shown in table II, application no. 22, column 3. The expression of the chimeric transcription factor in a organism, in particular in a plant, leads to a specific expression of the protein as shown in table II, application no. 22, column 3, see e.g. in WO01/52620, Oriz, Proc. Natl. Acad. Sci. USA, 2002, Vol. 99, 13290 or Guan, Proc. Natl. Acad. Sci. USA, 2002, Vol. 99, 13296.

[5876] for the disclosure of the paragraphs [0081.0.0.21] to [0084.0.0.20] see paragraphs [0081.0.0.0] to [0084.0.0.0] above.

[5877] Owing to the introduction of a gene or a plurality of genes conferring the expression of the nucleic acid molecule of the invention or the nucleic acid molecule used in the method of the invention or the polypeptide of the invention or the polypeptide used in the method of the invention as described below, for example the nucleic acid construct mentioned below into an organism alone or in combination with other genes, it is possible not only to increase the biosynthetic flux towards the end product, but also to increase, modify or create de novo an advantageous, preferably novel metabolites composition in the organism, e.g. glycerol and/or glycerol-3-phosphate and mixtures thereof.

[5878] for the disclosure of this paragraph see paragraph [0086.0.0.0] above.

[5879] By influencing the metabolism thus, it is possible to produce, in the process according to the invention, further advantageous compounds. Examples of such compounds are, in addition to glycerol and/or glycerol-3-phosphate compounds such as other polyols such as xylitol or sorbitol, fatty acid such as palmitic acid, oleic acid, linoleic acid, linolenic acid, vitamins, amino acids or carbohydrates.

[5880] Accordingly, in one embodiment, the process according to the invention relates to a process, which comprises:
[5881] a) providing a non-human organism, preferably a microorganism, a non-human animal, a plant or animal cell, a plant or animal tissue or a plant, more preferably a microorganism, a plant or a plant tissue;
[5882] b) increasing the activity of a protein as shown in table II, application no. 22, column 3 or of a polypeptide being encoded by the nucleic acid molecule of the present invention and described below, e.g. conferring an increase of the fine chemical in the organism, preferably in the microorganism, the non-human animal, the plant or animal cell, the plant or animal tissue or the plant, more preferably a microorganism, a plant or a plant tissue, in the cytsol or in the plastids, preferentially in the plastids,
[5883] c) growing the organism, preferably the microorganism, the non-human animal, the plant or animal cell, the plant or animal tissue or the plant under conditions which permit the production of the fine chemical in the organism, preferably the microorganism, the plant cell, the plant tissue or the plant; and
[5884] d) if desired, recovering, optionally isolating, the free and/or bound the fine chemical and, optionally further free and/or bound amino acids synthesized by the organism, the microorganism, the non-human animal, the plant or animal cell, the plant or animal tissue or the plant.

[5885] The organism, in particular the microorganism, non-human animal, the plant or animal cell, the plant or animal tissue or the plant is advantageously grown in such a way that it is not only possible to recover, if desired isolate the free or bound the fine chemical or the free and bound the fine chemical but as option it is also possible to produce, recover and, if desired isolate in addition, other free or/and bound polyols such as xylitol or sorbitol or lipids or mixtures thereof.

[5886] for the disclosure of the paragraphs [0090.0.0.21] to [0097.0.0.20] see paragraphs [0090.0.0.0] to [0097.0.0.0] above.

[5887] With regard to the nucleic acid sequence as depicted a nucleic acid construct which contains a nucleic acid sequence mentioned herein or an organism (=transgenic organism) which is transformed with said nucleic acid sequence or said nucleic acid construct, “transgene” means all those constructs which have been brought about by genetic manipulation methods, preferably in which either
[5888] a) the nucleic acid sequence as shown in table I, application no. 22, columns 5 and 7 or a derivative thereof, or
[5889] b) a genetic regulatory element, for example a promoter, which is functionally linked to the nucleic acid sequence as shown table I, application no. 22, columns 5 and 7 or a derivative thereof, or
[5890] c) (a) and (b)
   is/are not present in its/their natural genetic environment or has/have been modified by means of genetic manipulation methods, it being possible for the modification to be, by way of example, a substitution, addition, deletion, inversion or insertion of one or more nucleotide. “Natural genetic environment” means the natural chromosomal locus in the organism of origin or the presence in a genomic library. In the case of a genomic library, the natural, genetic environment of the nucleic acid sequence is preferably at least partially still preserved. The environment flanks the nucleic acid sequence at least on one side and has a sequence length of at least 50 bp, preferably at least 500 bp, particularly preferably at least 1000 bp, very particularly preferably at least 5000 bp.

[5891] The use of the nucleic acid sequence according to the invention or of the nucleic acid construct according to the invention for the generation of transgenic plants is therefore also subject matter of the invention. As mentioned above the inventive nucleic acid sequence consists advantageously of the nucleic acid sequences as depicted in the sequence protocol and disclosed in table I, application no. 22, columns 5 and 7 joined to a nucleic acid sequence encoding a transit peptide, or a targeting nucleic acid sequence which directs the nucleic acid sequences disclosed in table I, application no. 22, columns 5 and 7 to the organelle preferentially the plastids. Alternatively the inventive nucleic acids sequences consist advantageously of the nucleic acid sequences as depicted in the sequence protocol and disclosed in table I, application no. 22, columns 5 and 7 joined preferably to a nucleic acids sequence mediating the stable integration of nucleic acids into the plastidial genome and optionally sequences mediating the transcription of the sequence in the plastidial compartment. A transient expression is in principal also desirable and possible.

[5892] for the disclosure of this paragraph see paragraph [0100.0.0.0] above.

[5893] In an advantageous embodiment of the invention, the organism takes the form of a plant whose glycerol and/or glycerol-3-phosphate content is modified advantageously owing to the nucleic acid molecule of the present invention expressed. This is important for plant breeders since, for example, the nutritional value of plants for animals is dependent on the abovementioned glycerol and/or glycerol-3-phosphate and the general amount of glycerol and/or glycerol-3-phosphate in feed. After the activity of the protein as shown in table II, application no. 22, column 3 has been increased or generated, or after the expression of nucleic acid molecule or polypeptide according to the invention has been generated or increased, the transgenic plant generated thus is grown on or in a nutrient medium or else in the soil and subsequently harvested.

[5894] for the disclosure of the paragraphs [0102.0.0.21] to [0110.0.0.21] see paragraphs [0102.0.0.0] to [0110.0.0.0] above.

[5895] In a preferred embodiment, the fine chemical (glycerol and/or glycerol-3-phosphate) is produced in accordance with the invention and, if desired, is isolated. The production of further polyols such as xylitol or sorbitol or lipids such as glycolipids, proteolipids, glycerolester and mixtures thereof or mixtures. It may be advantageous to increase the pool of free glycerol and/or glycerol-3-phosphate and other as aforementioned in the transgenic organisms by the process according to the invention in order to isolate high amounts of the pure fine chemical.

[5896] In another preferred embodiment of the invention a combination of the increased expression of the nucleic acid sequence or the protein of the invention together with the transformation of a nucleic acid encoding a protein or polypeptide for example another gene of the glycerol and/or glycerol-3-phosphate biosynthesis, or a compound, which functions as a sink for the desired glycerol and/or glycerol-3-phosphate in the organism is useful to increase the production of the respective fine chemical.

[5897] In a preferred embodiment, the respective fine chemical is produced in accordance with the invention and, if desired, is isolated. The production of further polyols other than glycerol and/or glycerol-3-phosphate or compounds for which the respective fine chemical is a biosynthesis precursor compounds, e.g. fatty acid ester, or mixtures thereof or mixtures of other polyols with the fine chemical, in particular of glycerol and/or glycerol-3-phosphate, by the process according to the invention is advantageous.

[5898] In the case of the fermentation of microorganisms, the abovementioned desired fine chemical may accumulate in the medium and/or the cells. If microorganisms are used in the process according to the invention, the fermentation broth can be processed after the cultivation. Depending on the requirement, all or some of the biomass can be removed from the fermentation broth by separation methods such as, for example, centrifugation, filtration, decanting or a combination of these methods, or else the biomass can be left in the fermentation broth. The fermentation broth can subsequently be reduced, or concentrated, with the aid of known methods such as, for example, rotary evaporator, thin-layer evaporator, falling film evaporator, by reverse osmosis or by nanofiltration. Afterwards advantageously further compounds for formulation can be added such as corn starch or silicates. This concentrated fermentation broth advantageously together with compounds for the formulation can subsequently be processed by lyophilization, spray drying, and spray granulation or by other methods. Preferably the respective fine chemical comprising compositions are isolated from the organisms, such as the microorganisms or plants or the culture medium in or on which the organisms have been grown, or from the organism and the culture medium, in the known manner, for example via extraction, distillation, crystallization, chromatography or a combination of these methods. These purification methods can be used alone or in combination with the aforementioned methods such as the separation and/or concentration methods.

[5899] Transgenic plants which comprise the fine chemical such as glycerol and/or glycerol-3-phosphate synthesized in the process according to the invention can advantageously be marketed directly without there being any need for the fine chemical synthesized to be isolated. Plants for the process according to the invention are listed as meaning intact plants and all plant parts, plant organs or plant parts such as leaf, stem, seeds, root, tubers, anthers, fibers, root hairs, stalks, embryos, calli, cotelydons, petioles, flowers, harvested material, plant tissue, reproductive tissue and cell cultures which are derived from the actual transgenic plant and/or can be used for bringing about the transgenic plant. In this context, the seed comprises all parts of the seed such as the seed coats, epidermal cells, seed cells, endosperm or embryonic tissue. However, the respective fine chemical produced in the process according to the invention can also be isolated from the organisms, advantageously plants, (in the form of their organic extracts, e.g. alcohol, or other organic solvents or water containing extract and/or free glycerol and/or glycerol-3-phosphate or other extracts. The respective fine chemical produced by this process can be obtained by harvesting the organisms, either from the medium in which they grow, or from the field. This can be done via pressing or extraction of the plant parts. To increase the efficiency of extraction it is beneficial to clean, to temper and if necessary to hull and to flake the plant material. To allow for greater ease of disruption of the plant parts, specifically the seeds, they can previously be comminuted, steamed or roasted. Seeds, which have been pretreated in this manner can subsequently be pressed or extracted with solvents such as organic solvents like warm hexane or water or mixtures of organic solvents. The solvent is subsequently removed. In the case of microorganisms, the latter are, after harvesting, for example extracted directly without further processing steps or else, after disruption, extracted via various methods with which the skilled worker is familiar. Thereafter, the resulting products can be processed further, i.e. degummed and/or refined. In this process, substances such as the plant mucilages and suspended matter can be first removed. What is known as desliming can be affected enzymatically or, for example, chemico-physically by addition of acid such as phosphoric acid. The fine chemical can than be isolated as free compound by for example alkaline or acid hydrolysis.

Because glycerol and/or glycerol-3-phosphate in microorganisms are localized intracellular, their recovery essentially comes down to the isolation of the biomass. Well-established approaches for the harvesting of cells include filtration, centrifugation and coagulation/flocculation as described herein. Of the residual hydrocarbon, adsorbed on the cells, has to be removed. Solvent extraction or treatment with surfactants have been suggested for this purpose.
Well-established approaches for the harvesting of cells include filtration, centrifugation and coagulation/flocculation as described herein. Of the residual hydrocarbon, adsorbed on the cells, has to be removed. Solvent extraction or treatment with surfactants have been suggested for this purpose.

[5900] The identity and purity of the compound(s) isolated can be determined by prior-art techniques. They encompass high-performance liquid chromatography (HPLC), gas chromatography (GC), spectroscopic methods, mass spectrometry (MS), staining methods, thin-layer chromatography, NIRS, enzyme assays or microbiological assays. These analytical methods are compiled in: Patek et al. (1994) Appl. Environ. Microbiol. 60:133-140; Malakhova et al. (1996) Biotekhnologiya 11 27-32; and Schmidt et al. (1998) Bioprocess Engineer. 19:67-70. Ulmann's Encyclopedia of Industrial Chemistry (1996) Bd. A27, VCH Weinheim, pp. 89-90, pp. 521-540, pp. 540-547, pp. 559-566, 575-581 and pp. 581-587; Michal, G (1999) Biochemical Pathways: An Atlas of Biochemistry and Molecular Biology, John Wiley and Sons; Fallon, A. et al. (1987) Applications of HPLC in Biochemistry in: Laboratory Techniques in Biochemistry and Molecular Biology, vol. 17.

[5901] Glycerol and/or glycerol-3-phosphate can for example be analyzed advantageously via HPLC, LC or GC separation and MS (masspectrometry) detection methods. The unambiguous detection for the presence of glycerol and/or glycerol-3-phosphate containing products can be obtained by analyzing recombinant organisms using analytical standard methods: GC; GC-MS, LC, LC-MS, MS or TLC). The material to be analyzed can be disrupted by sonication, grinding in a glass mill, liquid nitrogen and grinding, cooking, or via other applicable methods.

[5902] In a preferred embodiment, the present invention relates to a process for the production of the fine chemical comprising or generating in an organism or a part thereof, preferably in a cell compartment such as a plastid or mitochondria, the expression of at least one nucleic acid molecule comprising a nucleic acid molecule selected from the group consisting of:
[5903] a) nucleic acid molecule encoding, preferably at least the mature form, of the polypeptide shown in table II, application no. 22, columns 5 and 7 or a fragment thereof, which confers an increase in the amount of the fine chemical in an organism or a part thereof;
[5904] b) nucleic acid molecule comprising, preferably at least the mature form, of the nucleic acid molecule shown in table I, application no. 22, columns 5 and 7;
[5905] c) nucleic acid molecule whose sequence can be deduced from a polypeptide sequence encoded by a nucleic acid molecule of (a) or (b) as result of the degeneracy of the genetic code and conferring an increase in the amount of the fine chemical in an organism or a part thereof;
[5906] d) nucleic acid molecule encoding a polypeptide which has at least 50% identity with the amino acid sequence of the polypeptide encoded by the nucleic acid molecule of (a) to (c) and conferring an increase in the amount of the fine chemical in an organism or a part thereof;
[5907] e) nucleic acid molecule which hybridizes with a nucleic acid molecule of (a) to (c) under stringent hybridisation conditions and conferring an increase in the amount of the fine chemical in an organism or a part thereof;
[5908] f) nucleic acid molecule encoding a polypeptide, the polypeptide being derived by substituting, deleting and/or adding one or more amino acids of the amino acid sequence of the polypeptide encoded by the nucleic acid molecules (a) to (d), preferably to (a) to (c) and conferring an increase in the amount of the fine chemical in an organism or a part thereof;
[5909] g) nucleic acid molecule encoding a fragment or an epitope of a polypeptide which is encoded by one of the nucleic acid molecules of (a) to (e), preferably to (a) to (c) and conferring an increase in the amount of the fine chemical in an organism or a part thereof;
[5910] h) nucleic acid molecule comprising a nucleic acid molecule which is obtained by amplifying nucleic acid molecules from a cDNA library or a genomic library using the primers shown in table III, application no. 22, column 7 and conferring an increase in the amount of the fine chemical in an organism or a part thereof;
[5911] i) nucleic acid molecule encoding a polypeptide which is isolated, e.g. from an expression library, with the aid of monoclonal antibodies against a polypeptide encoded by one of the nucleic acid molecules of (a) to (h), preferably to (a) to (c), and conferring an increase in the amount of the fine chemical in an organism or a part thereof;
[5912] j) nucleic acid molecule which encodes a polypeptide comprising the consensus sequence shown in table IV, application no. 22, column 7 and conferring an increase in the amount of the fine chemical in an organism or a part thereof;
[5913] k) nucleic acid molecule comprising one or more of the nucleic acid molecule encoding the amino acid sequence of a polypeptide encoding a domain of the polypeptide shown in table II, application no. 22, columns 5 and 7 and conferring an increase in the amount of the fine chemical in an organism or a part thereof; and
[5914] l) nucleic acid molecule which is obtainable by screening a suitable library under stringent conditions with a probe comprising one of the sequences of the nucleic acid molecule of (a) to (k), preferably to (a) to (c), or with a fragment of at least 15 nt, preferably 20 nt, 30 nt, 50 nt, 100 nt, 200 nt or 500 nt of the nucleic acid molecule characterized in (a) to (k), preferably to (a) to (c), and conferring an increase in the amount of the fine chemical in an organism or a part thereof;
   or which comprises a sequence which is complementary thereto.

[5915] In one embodiment, the nucleic acid molecule used in the process of the invention distinguishes over the sequence indicated in table I A, application no. 22, columns 5 and 7 by one or more nucleotides. In one embodiment, the nucleic acid molecule used in the process of the invention does not consist of the sequence indicated in table I A, application no. 22, columns 5 and 7. In one embodiment, the nucleic acid molecule used in the process of the invention is less than 100%, 99.999%, 99.99%, 99.9% or 99% identical to a sequence indicated in table I A, application no.

[5916] 22, columns 5 and 7. In another embodiment, the nucleic acid molecule does not encode a polypeptide of a sequence indicated in table II A, application no. 22, columns 5 and 7.

[5917] In one embodiment, the nucleic acid molecule used in the process of the invention distinguishes over the sequence indicated in table I B, application no. 22, columns 5 and 7, by one or more nucleotides. In one embodiment, the nucleic acid molecule used in the process of the invention does not consist of the sequence indicated in table I B, application no. 22, columns 5 and 7. In one embodiment, the nucleic acid molecule used in the process of the invention is less than 100%, 99.999%, 99.99%, 99.9% or 99% identical to a sequence indicated in table I B, application no. 22, columns 5 and 7. In another embodiment, the nucleic acid molecule does not encode a polypeptide of a sequence indicated in table II B, application no. 22, columns 5 and 7.

[5918] In one embodiment, the nucleic acid molecule used in the process distinguishes over the sequence shown in table I, application no. 22, columns 5 and 7 by one or more nucleotides or does not consist of the sequence shown in table I, application no. 22, columns 5 and 7. In one embodiment, the nucleic acid molecule of the present invention is less than 100%, 99.999%, 99.99%, 99.9% or 99% identical to the sequence shown in table I, application no. 22, columns 5 and 7. In another embodiment, the nucleic acid molecule does not encode a polypeptide of the sequence shown in table II, application no. 22, columns 5 and 7.

[5919] for the disclosure of the paragraphs [0118.0.0.21] to [0120.0.0.21] see paragraphs [0118.0.0.0] to [0120.0.0.0] above.

[5920] Nucleic acid molecules with the sequence shown in table I, application no. 22, columns 5 and 7, nucleic acid molecules which are derived from the amino acid sequences shown in table II, application no. 22, columns 5 and 7 or from polypeptides comprising the consensus sequence shown in table IV, application no. 22, column 7, or their derivatives or homologues encoding polypeptides with the enzymatic or biological activity of a protein as shown in table II, application no. 22, column 3 or conferring the fine chemical increase after increasing its expression or activity are advantageously increased in the process according to the invention by expression either in the cytsol or in an organelle such as a plastid or mitochondria or both, preferably in plastids.

[5921] for the disclosure of this paragraph see paragraph [0122.0.0.0] above.

[5922] Nucleic acid molecules, which are advantageous for the process according to the invention and which encode polypeptides with the activity of a protein as shown in table II, application no. 22, column 3 can be determined from generally accessible databases.

[5923] for the disclosure of this paragraph see paragraph [0124.0.0.0] above.

[5924] The nucleic acid molecules used in the process according to the invention take the form of isolated nucleic acid sequences, which encode polypeptides with the activity of the proteins as shown in table II, application no. 22, column 3 and conferring the fine chemical increase by expression either in the cytsol or in an organelle such as a plastid or mitochondria or both, preferably in plastids.

[5925] for the disclosure of the paragraphs [0126.0.0.21] to [0133.0.0.21] see paragraphs [0126.0.0.0] to [0133.0.0.0] above.

[5926] However, it is also possible to use artificial sequences, which differ in one or more bases from the nucleic acid sequences found in organisms, or in one or more amino acid molecules from polypeptide sequences found in organisms, in particular from the polypeptide sequences shown in table II, application no. 22, columns 5 and 7 or the functional homologues thereof as described herein, preferably conferring above-mentioned activity, i.e. conferring the fine chemical increase after increasing its activity, e.g. after increasing the activity of a protein as shown in table II, application no. 22, column 3 by for example expression either in the cytsol or in an organelle such as a plastid or mitochondria or both, preferably in plastids.

[5927] for the disclosure of the paragraphs [0135.0.0.21] to [0140.0.0.21] see paragraphs [0135.0.0.0] to [0140.0.0.0] above.

[5928] Synthetic oligonucleotide primers for the amplification, e.g. as shown in table III, application no. 22, column 7, by means of polymerase chain reaction can be generated on the basis of a sequence shown herein, for example the sequence shown in table I, application no. 22, columns 5 and 7 or the sequences derived from table II, application no. 22, columns 5 and 7.

[5929] Moreover, it is possible to identify conserved regions from various organisms by carrying out protein sequence alignments with the polypeptide used in the process of the invention, in particular with sequences of the polypeptide of the invention, from which conserved regions, and in turn, degenerate primers can be derived. Conserved regions are those, which show a very little variation in the amino acid in one particular position of several homologs from different origin. The consensus sequence shown in table IV, application no. 22, column 7 is derived from said alignments.

[5930] Degenerated primers can then be utilized by PCR for the amplification of fragments of novel proteins having above-mentioned activity, e.g. conferring the increase of the fine chemical after increasing the expression or activity or having the activity of a protein as shown in table II, application no. 22, column 3 or further functional homologs of the polypeptide of the invention from other organisms.

[5931] for the disclosure of the paragraphs [0144.0.0.21] to [0151.0.0.21] see paragraphs [0144.0.0.0] to [0151.0.0.0] above.

[5932] Polypeptides having above-mentioned activity, i.e. conferring the fine chemical increase, derived from other organisms, can be encoded by other DNA sequences which hybridize to the sequences shown in table I, application no. 22, columns 5 and 7, preferably of table I B, application no. 22, columns 5 and 7 under relaxed hybridization conditions and which code on expression for peptides having the glycerol and/or glycerol-3-phosphate increasing activity.

[5933] for the disclosure of the paragraphs [0153.0.0.21] to [0159.0.0.21] see paragraphs [0153.0.0.0] to [0159.0.0.0] above.

[5934] Further, the nucleic acid molecule of the invention comprises a nucleic acid molecule, which is a complement of one of the nucleotide sequences of above mentioned nucleic acid molecules or a portion thereof. A nucleic acid molecule which is complementary to one of the nucleotide sequences shown in table I, application no. 22, columns 5 and 7, preferably shown in table I B, application no. 22, columns 5 and 7 is one which is sufficiently complementary to one of the nucleotide sequences shown in table I, application no. 22, columns 5 and 7, preferably shown in table I B, application no. 22, columns 5 and 7 such that it can hybridize to one of the nucleotide sequences shown in table I, application no. 22, columns 5 and 7, preferably shown in table I B, application no. 22, columns 5 and 7, thereby forming a stable duplex. Preferably, the hybridisation is performed under stringent hybridization conditions. However, a complement of one of the herein disclosed sequences is preferably a sequence complement thereto according to the base pairing of nucleic acid molecules well known to the skilled person. For example, the bases A and G undergo base pairing with the bases T and U or C, resp. and visa versa. Modifications of the bases can influence the base-pairing partner.

[5935] The nucleic acid molecule of the invention comprises a nucleotide sequence which is at least about 30%, 35%, 40% or 45%, preferably at least about 50%, 55%, 60% or 65%, more preferably at least about 70%, 80%, or 90%, and even more preferably at least about 95%, 97%, 98%, 99% or more homologous to a nucleotide sequence shown in table I, application no. 22, columns 5 and 7, preferably shown in table I B, application no. 22, columns 5 and 7, or a portion thereof and preferably has above mentioned activity, in particular having a fine chemical increasing activity after increasing the activity or an activity of a gene product as shown in table II, application no. 22, column 3 by for example expression either in the cytsol or in an organelle such as a plastid or mitochondria or both, Preferably in plastids.

[5936] The nucleic acid molecule of the invention comprises a nucleotide sequence which hybridizes, preferably hybridizes under stringent conditions as defined herein, to one of the nucleotide sequences shown in table I, application no. 22, columns 5 and 7, preferably shown in table I B, application no. 22, columns 5 and 7, or a portion thereof and encodes a protein having above-mentioned activity, e.g. conferring of a glycerol and/or glycerol-3-phosphate increase by for example expression either in the cytsol or in an organelle such as a plastid or mitochondria or both, preferably in plastids, and optionally, the activity of a protein as shown in table II, application no. 22, column 3.

[5937] Moreover, the nucleic acid molecule of the invention can comprise only a portion of the coding region of one of the sequences shown in table I, application no. 22, columns 5 and 7, preferably shown in table I B, application no. 22, columns 5 and 7, for example a fragment which can be used as a probe or primer or a fragment encoding a biologically active portion of the polypeptide of the present invention or of a polypeptide used in the process of the present invention, i.e. having above-mentioned activity, e.g. conferring an increase of the fine chemical if its activity is increased by for example expression either in the cytsol or in an organelle such as a plastid or mitochondria or both, preferably in plastids. The nucleotide sequences determined from the cloning of the present protein-according-to-the-invention-encoding gene allows for the generation of probes and primers designed for use in identifying and/or cloning its homologues in other cell types and organisms. The probe/primer typically comprises substantially purified oligonucleotide. The oligonucleotide typically comprises a region of nucleotide sequence that hybridizes under stringent conditions to at least about 12, 15 preferably about 20 or 25, more preferably about 40, 50 or 75 consecutive nucleotides of a sense strand of one of the sequences set forth, e.g., in table I, application no. 22, columns 5 and 7, an anti-sense sequence of one of the sequences, e.g., set forth in table I, application no. 22, columns 5 and 7, preferably shown in table I B, application no. 22, columns 5 and 7, or naturally occurring mutants thereof. Primers based on a nucleotide of invention can be used in PCR reactions to clone homologues of the polypeptide of the invention or of the polypeptide used in the process of the invention, e.g. as the primers described in the examples of the present invention, e.g. as shown in the examples. A PCR with the primers shown in table Ill, application no. 22, column 7 will result in a fragment of the gene product as shown in table II, column 3.

[5938] for the disclosure of this paragraph see paragraph [0164.0.0.0] above.

[5939] The nucleic acid molecule of the invention encodes a polypeptide or portion thereof which includes an amino acid sequence which is sufficiently homologous to the amino acid sequence shown in table II, application no. 22, columns 5 and 7 such that the protein or portion thereof maintains the ability to participate in the fine chemical production, in particular a glycerol and/or glycerol-3-phosphate increasing activity as mentioned above or as described in the examples in plants or microorganisms is comprised.

[5940] As used herein, the language “sufficiently homologous” refers to proteins or portions thereof which have amino acid sequences which include a minimum number of identical or equivalent amino acid residues (e.g., an amino acid residue which has a similar side chain as an amino acid residue in one of the sequences of the polypeptide of the present invention) to an amino acid sequence shown in table II, application no. 22, columns 5 and 7 such that the protein or portion thereof is able to participate in the increase of the fine chemical production. For examples having the activity of a protein as shown in table II, column 3 and as described herein.

[5941] In one embodiment, the nucleic acid molecule of the present invention comprises a nucleic acid that encodes a portion of the protein of the present invention. The protein is at least about 30%, 35%, 40%, 45% or 50%, preferably at least about 55%, 60%, 65% or 70%, and more preferably at least about 75%, 80%, 85%, 90%, 91%, 92%, 93% or 94% and most preferably at least about 95%, 97%, 98%, 99% or more homologous to an entire amino acid sequence of table II, application no. 22, columns 5 and 7 and having above-mentioned activity, e.g. conferring preferably the increase of the fine chemical by for example expression either in the cytsol or in an organelle such as a plastid or mitochondria or both, preferably in plastids.

[5942] for the disclosure of the paragraphs [0168.0.0.21] and [0169.0.0.21] see paragraphs [0168.0.0.0] and [0169.0.0.0] above.

[5943] The invention further relates to nucleic acid molecules that differ from one of the nucleotide sequences shown in table I, application no. 22, columns 5 and 7 (and portions thereof) due to degeneracy of the genetic code and thus encode a polypeptide of the present invention, in particular a polypeptide having above mentioned activity, e.g. conferring an increase in the fine chemical in a organism, e.g. as that polypeptides depicted by the sequence shown in table II, application no. 22, columns 5 and 7 or the functional homologues. Advantageously, the nucleic acid molecule of the invention comprises, or in an other embodiment has, a nucleotide sequence encoding a protein comprising, or in an other embodiment having, an amino acid sequence shown in table II, application no. 22, columns 5 and 7 or the functional homologues. In a still further embodiment, the nucleic acid molecule of the invention encodes a full length protein which is substantially homologous to an amino acid sequence shown in table II, application no. 22, columns 5 and 7 or the functional homologues. However, in a preferred embodiment, the nucleic acid molecule of the present invention does not consist of the sequence shown in table I, application no. 22, columns 5 and 7, preferably as indicated in table I A, application no. 22, columns 5 and 7. Preferably the nucleic acid molecule of the invention is a functional homologue or identical to a nucleic acid molecule indicated in table I B, application no. 22, columns 5 and 7.

[5944] for the disclosure of the paragraphs [0171.0.0.21] to [0173.0.0.21] see paragraphs [0171.0.0.0] to [0173.0.0.0] above.

[5945] Accordingly, in another embodiment, a nucleic acid molecule of the invention is at least 15, 20, 25 or 30 nucleotides in length. Preferably, it hybridizes under stringent conditions to a nucleic acid molecule comprising a nucleotide sequence of the nucleic acid molecule of the present invention or used in the process of the present invention, e.g. comprising the sequence shown in table I, application no. 22, columns 5 and 7. The nucleic acid molecule is preferably at least 20, 30, 50, 100, 250 or more nucleotides in length.

[5946] for the disclosure of this paragraph see paragraph [0175.0.0.0] above.

[5947] Preferably, nucleic acid molecule of the invention that hybridizes under stringent conditions to a sequence shown in table I, application no. 22, columns 5 and 7 corresponds to a naturally-occurring nucleic acid molecule of the invention. As used herein, a “naturally-occurring” nucleic acid molecule refers to an RNA or DNA molecule having a nucleotide sequence that occurs in nature (e.g., encodes a natural protein). Preferably, the nucleic acid molecule encodes a natural protein having abovementioned activity, e.g. conferring the fine chemical increase after increasing the expression or activity thereof or the activity of a protein of the invention or used in the process of the invention by for example expression the nucleic acid sequence of the gene product in the cytsol and/or in an organelle such as a plastid or mitochondria, preferably in plastids.

[5948] for the disclosure of this paragraph see paragraph [0177.0.0.0] above.

[5949] For example, nucleotide substitutions leading to amino acid substitutions at “non-essential” amino acid residues can be made in a sequence of the nucleic acid molecule of the invention or used in the process of the invention, e.g. shown in table I, application no. 22, columns 5 and 7.

[5950] for the disclosure of the paragraphs [0179.0.0.21] and [0180.0.0.21] see paragraphs [0179.0.0.0] and [0180.0.0.0] above.

[5951] Accordingly, the invention relates to nucleic acid molecules encoding a polypeptide having above-mentioned activity, e.g. conferring an increase in the fine chemical in an organisms or parts thereof by for example expression either in the cytsol or in an organelle such as a plastid or mitochondria or both, preferably in plastids that contain changes in amino acid residues that are not essential for said activity. Such polypeptides differ in amino acid sequence from a sequence contained in the sequences shown in table II, application no. 22, columns 5 and 7, preferably shown in table II A, application no. 22, columns 5 and 7 yet retain said activity described herein. The nucleic acid molecule can comprise a nucleotide sequence encoding a polypeptide, wherein the polypeptide comprises an amino acid sequence at least about 50% identical to an amino acid sequence shown in table II, application no. 22, columns 5 and 7, preferably shown in table II A, application no. 22, columns 5 and 7 and is capable of participation in the increase of production of the fine chemical after increasing its activity, e.g. its expression by for example expression either in the cytsol or in an organelle such as a plastid or mitochondria or both, preferably in plastids. Preferably, the protein encoded by the nucleic acid molecule is at least about 60% identical to the sequence shown in table II, application no. 22, columns 5 and 7, preferably shown in table II A, application no. 22, columns 5 and 7, more preferably at least about 70% identical to one of the sequences shown in table II, application no. 22, columns 5 and 7, preferably shown in table II A, application no. 22, columns 5 and 7, even more preferably at least about 80%, 90%, 95% homologous to the sequence shown in table II, application no. 22, columns 5 and 7, preferably shown in table II A, application no. 22, columns 5 and 7, and most preferably at least about 96%, 97%, 98%, or 99% identical to the sequence shown in table II, application no. 22, columns 5 and 7, preferably shown in table II A, application no. 22, columns 5 and 7.

[5952] for the disclosure of the paragraphs [0182.0.0.21] to [0188.0.0.21] see paragraphs [0182.0.0.0] to [0188.0.0.0] above.

[5953] Functional equivalents derived from one of the polypeptides as shown in table II, application no. 22, columns 5 and 7, preferably shown in table II B, application no. 22, columns 5 and 7 resp., according to the invention by substitution, insertion or deletion have at least 30%, 35%, 40%, 45% or 50%, preferably at least 55%, 60%, 65% or 70% by preference at least 80%, especially preferably at least 85% or 90%, 91%, 92%, 93% or 94%, very especially preferably at least 95%, 97%, 98% or 99% homology with one of the polypeptides as shown in table II, application no. 22, columns 5 and 7, preferably shown in table II B, application no. 22, columns 5 and 7 resp., according to the invention and are distinguished by essentially the same properties as the polypeptide as shown in table II, application no. 22, columns 5 and 7, preferably shown in table II B, application no. 22, columns 5 and 7.

[5954] Functional equivalents derived from the nucleic acid sequence as shown in table I, application no. 22, columns 5 and 7, preferably shown in table I B, application no. 22, columns 5 and 7 resp., according to the invention by substitution, insertion or deletion have at least 30%, 35%, 40%, 45% or 50%, preferably at least 55%, 60%, 65% or 70% by preference at least 80%, especially preferably at least 85% or 90%, 91%, 92%, 93% or 94%, very especially preferably at least 95%, 97%, 98% or 99% homology with one of the polypeptides as shown in table II, application no. 22, columns 5 and 7, preferably shown in table II B, application no. 22, columns 5 and 7 resp., according to the invention and encode polypeptides having essentially the same properties as the polypeptide as shown in table II, application no. 22, columns 5 and 7, preferably shown in table II B, application no. 22, columns 5 and 7.

[5955] for the disclosure of this paragraph see paragraph [0191.0.0.0] above.

[5956] A nucleic acid molecule encoding an homologous to a protein sequence of table II, application no. 22, columns 5 and 7, preferably shown in table II B, application no. 22, columns 5 and 7 resp., can be created by introducing one or more nucleotide substitutions, additions or deletions into a nucleotide sequence of the nucleic acid molecule of the present invention, in particular of table I, application no. 22, columns 5 and 7, preferably shown in table I B, application no. 22, columns 5 and 7 resp., such that one or more amino acid substitutions, additions or deletions are introduced into the encoded protein. Mutations can be introduced into the encoding sequences of table I, application no. 22, columns 5 and 7, preferably shown in table I B, application no. 22, columns 5 and 7 resp., by standard techniques, such as site-directed mutagenesis and PCR-mediated mutagenesis.

[5957] for the disclosure of the paragraphs [0193.0.0.21] to [0196.0.0.21] see paragraphs [0193.0.0.0] to [0196.0.0.0] above.

[5958] Homologues of the nucleic acid sequences used, with the sequence shown in table I, application no. 22, columns 5 and 7, preferably shown in table I B, application no. 22, columns 5 and 7, comprise also allelic variants with at least approximately 30%, 35%, 40% or 45% homology, by preference at least approximately 50%, 60% or 70%, more preferably at least approximately 90%, 91%, 92%, 93%, 94% or 95% and even more preferably at least approximately 96%, 97%, 98%, 99% or more homology with one of the nucleotide sequences shown or the abovementioned derived nucleic acid sequences or their homologues, derivatives or analogues or parts of these. Allelic variants encompass in particular functional variants which can be obtained by deletion, insertion or substitution of nucleotides from the sequences shown, preferably from table I, application no. 22, columns 5 and 7, preferably shown in table I B, application no. 22, columns 5 and 7, or from the derived nucleic acid sequences, the intention being, however, that the enzyme activity or the biological activity of the resulting proteins synthesized is advantageously retained or increased.

[5959] In one embodiment of the present invention, the nucleic acid molecule of the invention or used in the process of the invention comprises the sequences shown in any of the table I, application no. 22, columns 5 and 7, preferably shown in table I B, application no. 22, columns 5 and 7. It is preferred that the nucleic acid molecule comprises as little as possible other nucleotides not shown in any one of table I, application no. 22, columns 5 and 7, preferably shown in table I B, application no. 22, columns 5 and 7. In one embodiment, the nucleic acid molecule comprises less than 500, 400, 300, 200, 100, 90, 80, 70, 60, 50 or 40 further nucleotides. In a further embodiment, the nucleic acid molecule comprises less than 30, 20 or 10 further nucleotides. In one embodiment, the nucleic acid molecule use in the process of the invention is identical to the sequences shown in table I, application no. 22, columns 5 and 7, preferably shown in table I B, application no. 22, columns 5 and 7.

[5960] Also preferred is that the nucleic acid molecule used in the process of the invention encodes a polypeptide comprising the sequence shown in table II, application no. 22, columns 5 and 7, preferably shown in table II B, application no. 22, columns 5 and 7. In one embodiment, the nucleic acid molecule encodes less than 150, 130, 100, 80, 60, 50, 40 or 30 further amino acids. In a further embodiment, the encoded polypeptide comprises less than 20, 15, 10, 9, 8, 7, 6 or 5 further amino acids. In one embodiment used in the inventive process, the encoded polypeptide is identical to the sequences shown in table II, application no. 22, columns 5 and 7, preferably shown in table II B, application no. 22, columns 5 and 7.

[5961] In one embodiment, the nucleic acid molecule of the invention or used in the process encodes a polypeptide comprising the sequence shown in table II, application no. 22, columns 5 and 7, preferably shown in table II B, application no. 22, columns 5 and 7 comprises less than 100 further nucleotides. In a further embodiment, said nucleic acid molecule comprises less than 30 further nucleotides. In one embodiment, the nucleic acid molecule used in the process is identical to a coding sequence of the sequences shown in table I, application no. 22, columns 5 and 7, preferably shown in table I B, application no. 22, columns 5 and 7.

[5962] Polypeptides (=proteins), which still have the essential biological or enzymatic activity of the polypeptide of the present invention conferring an increase of the fine chemical i.e. whose activity is essentially not reduced, are polypeptides with at least 10% or 20%, by preference 30% or 40%, especially preferably 50% or 60%, very especially preferably 80% or 90 or more of the wild type biological activity or enzyme activity, advantageously, the activity is essentially not reduced in comparison with the activity of a polypeptide shown in table II, application no. 22, columns 5 and 7 expressed under identical conditions.

[5963] Homologues of table I, application no. 22, columns 5 and 7 or of the derived sequences of table II, application no. 22, columns 5 and 7 also mean truncated sequences, cDNA, single-stranded DNA or RNA of the coding and noncoding DNA sequence. Homologues of said sequences are also understood as meaning derivatives, which comprise noncoding regions such as, for example, UTRs, terminators, enhancers or promoter variants. The promoters upstream of the nucleotide sequences stated can be modified by one or more nucleotide substitution(s), insertion(s) and/or deletion(s) without, however, interfering with the functionality or activity either of the promoters, the open reading frame (=ORF) or with the 3′-regulatory region such as terminators or other 3′ regulatory regions, which are far away from the ORF. It is furthermore possible that the activity of the promoters is increased by modification of their sequence, or that they are replaced completely by more active promoters, even promoters from heterologous organisms. Appropriate promoters are known to the person skilled in the art and are mentioned herein below.

[5964] for the disclosure of the paragraphs [0203.0.0.21] to [0215.0.0.21] see paragraphs [0203.0.0.0] to [0215.0.0.0] above.

[5965] Accordingly, in one embodiment, the invention relates to a nucleic acid molecule, which comprises a nucleic acid molecule selected from the group consisting of:
[5966] a) nucleic acid molecule encoding, preferably at least the mature form, of the polypeptide shown in table II, application no. 22, columns 5 and 7, preferably in table II B, application no. 22, columns 5 and 7; or a fragment thereof conferring an increase in the amount of the fine chemical in an organism or a part thereof
[5967] b) nucleic acid molecule comprising, preferably at least the mature form, of the nucleic acid molecule shown in table I, application no. 22, columns 5 and 7, preferably in table I B, application no. 22, columns 5 and 7 or a fragment thereof conferring an increase in the amount of the fine chemical in an organism or a part thereof;
[5968] c) nucleic acid molecule whose sequence can be deduced from a polypeptide sequence encoded by a nucleic acid molecule of (a) or (b) as result of the degeneracy of the genetic code and conferring an increase in the amount of the fine chemical in an organism or a part thereof;
[5969] d) nucleic acid molecule encoding a polypeptide whose sequence has at least 50% identity with the amino acid sequence of the polypeptide encoded by the nucleic acid molecule of (a) to (c) and conferring an increase in the amount of the fine chemical in an organism or a part thereof;
[5970] e) nucleic acid molecule which hybridizes with a nucleic acid molecule of (a) to (c) under stringent hybridisation conditions and conferring an increase in the amount of the fine chemical in an organism or a part thereof;
[5971] f) nucleic acid molecule encoding a polypeptide, the polypeptide being derived by substituting, deleting and/or adding one or more amino acids of the amino acid sequence of the polypeptide encoded by the nucleic acid molecules (a) to (d), preferably to (a) to (c), and conferring an increase in the amount of the fine chemical in an organism or a part thereof;
[5972] g) nucleic acid molecule encoding a fragment or an epitope of a polypeptide which is encoded by one of the nucleic acid molecules of (a) to (e), preferably to (a) to (c) and conferring an increase in the amount of the fine chemical in an organism or a part thereof;
[5973] h) nucleic acid molecule comprising a nucleic acid molecule which is obtained by amplifying a cDNA library or a genomic library using the primers in table III, application no. 22, column 7 and conferring an increase in the amount of the fine chemical in an organism or a part thereof;
[5974] i) nucleic acid molecule encoding a polypeptide which is isolated, e.g. from a expression library, with the aid of monoclonal antibodies against a polypeptide encoded by one of the nucleic acid molecules of (a) to (g), preferably to (a) to (c) and conferring an increase in the amount of the fine chemical in an organism or a part thereof;
[5975] j) nucleic acid molecule which encodes a polypeptide comprising the consensus sequence shown in table IV, application no. 22, column 7 and conferring an increase in the amount of the fine chemical in an organism or a part thereof;
[5976] k) nucleic acid molecule encoding the amino acid sequence of a polypeptide encoding a domain of the polypeptide shown in table II, application no. 22, columns 5 and 7 and conferring an increase in the amount of the fine chemical in an organism or a part thereof; and
[5977] l) nucleic acid molecule which is obtainable by screening a suitable nucleic acid library under stringent hybridization conditions with a probe comprising one of the sequences of the nucleic acid molecule of (a) to (k) or with a fragment of at least 15 nt, preferably 20 nt, 30 nt, 50 nt, 100 nt, 200 nt or 500 nt of the nucleic acid molecule characterized in (a) to (h) or of the nucleic acid molecule shown in table I, application no. 22, columns 5 and 7 or a nucleic acid molecule encoding, preferably at least the mature form of, the polypeptide shown in table II, application no. 22, columns 5 and 7, and conferring an increase in the amount of the fine chemical in an organism or a part thereof; or which encompasses a sequence which is complementary thereto;
   whereby, preferably, the nucleic acid molecule according to (a) to (l) distinguishes over the sequence depicted in table I A and/or I B, application no. 22, columns 5 and 7 by one or more nucleotides. In one embodiment, the nucleic acid molecule of the invention does not consist of the sequence shown in table I A and/or I B, application no. 22, columns 5 and 7. In another embodiment, the nucleic acid molecule of the present invention is at least 30% identical and less than 100%, 99.999%, 99.99%, 99.9% or 99% identical to the sequence shown in table I A and/or I B, application no. 22, columns 5 and 7. In a further embodiment the nucleic acid molecule does not encode the polypeptide sequence shown in table II A and/or II B, application no. 22, columns 5 and 7. Accordingly, in one embodiment, the nucleic acid molecule of the present invention encodes in one embodiment a polypeptide which differs at least in one or more amino acids from the polypeptide shown in table II A and/or II B, application no. 22, columns 5 and 7 does not encode a protein of the sequence shown in table II A and/or II B, application no. 22, columns 5 and 7. Accordingly, in one embodiment, the protein encoded by a sequence of a nucleic acid according to (a) to (l) does not consist of the sequence shown in table I A and/or I B, application no. 22, columns 5 and 7. In a further embodiment, the protein of the present invention is at least 30% identical to protein sequence depicted in table II A and/or II B, application no. 22, columns 5 and 7 and less than 100%, preferably less than 99.999%, 99.99% or 99.9%, more preferably less than 99%, 985, 97%, 96% or 95% identical to the sequence shown in table II A and/or II B, application no. 22, columns 5 and 7.

[5978] for the disclosure of the paragraphs [0217.0.0.21] to [0226.0.0.21] see paragraphs [0217.0.0.0] to [0226.0.0.0] above.

[5979] In general, vector systems preferably also comprise further cis-regulatory regions such as promoters and terminators and/or selection markers by means of which suitably transformed organisms can be identified. While vir genes and T-DNA sequences are located on the same vector in the case of cointegrated vector systems, binary systems are based on at least two vectors, one of which bears vir genes, but no T-DNA, while a second one bears T-DNA, but no vir gene. Owing to this fact, the last-mentioned vectors are relatively small, easy to manipulate and capable of replication in E. coli and in Agrobacterium. These binary vectors include vectors from the series pBIB-HYG, pPZP, pBecks, pGreen. Those which are preferably used in accordance with the invention are Bin19, pBI101, pBinAR, pGPTV and pCAMBIA. An overview of binary vectors and their use is given by Hellens et al, Trends in Plant Science (2000) 5, 446-451. The vectors are preferably modified in such a manner, that they already contain the nucleic acid coding for the transitpeptide and that the nucleic acids of the invention, preferentially the nucleic acid sequences encoding the polypeptides shown in table II, application no. 22, columns 5 and 7 can be cloned 3″ prime to the transitpeptide encoding sequence, leading to a functional preprotein, which is directed to the plastids and which means that the mature protein fulfills its biological activity.

[5980] for the disclosure of the paragraphs [0228.0.0.21] to [0239.0.0.21] see paragraphs [0228.0.0.0] to [0239.0.0.0] above.

[5981] The abovementioned nucleic acid molecules can be cloned into the nucleic acid constructs or vectors according to the invention in combination together with further genes, or else different genes are introduced by transforming several nucleic acid constructs or vectors (including plasmids) into a host cell, advantageously into a plant cell or a microorganisms.

In addition to the sequence mentioned in Table I, application no. 22, columns 5 and 7 or its derivatives, it is advantageous additionally to express and/or mutate further genes in the organisms. Especially advantageously, additionally at least one further gene of the glycerol biosynthetic pathway is expressed in the organisms such as plants or microorganisms. Advantageously additional genes for the synthesis of glycerol and/or glycerol-3-phosphate are used. It is also possible that the regulation of the natural genes has been modified advantageously so that the gene and/or its gene product is no longer subject to the regulatory mechanisms which exist in the organisms. This leads to an increased synthesis of the respective desired fine chemical since, for example, feedback regulations no longer exist to the same extent or not at all. In addition it might be advantageously to combine the sequences shown in Table I, application no. 22, columns 5 and 7 with genes which generally support or enhances to growth or yield of the target organism, for example genes which lead to faster growth rate of microorganisms or genes which produces stress-, pathogen, or herbicide resistant plants.

[5982] In a further embodiment of the process of the invention, therefore, organisms are grown, in which there is simultaneous direct or indirect overexpression of at least one nucleic acid or one of the genes which code for proteins involved in the fatty acid metabolism, in particular in synthesis of glycerol and/or glycerol-3-phosphate. Indirect overexpression might be brought about by the manipulation of the regulation of the endogenous gene, for example through promoter mutations or the expression of natural or artificial transcriptional regulators.

[5983] Further advantageous nucleic acid sequences which can be expressed in combination with the sequences used in the process and/or the abovementioned biosynthesis genes are the sequences encoding further genes of the glycerol biosynthesis chain such as hexokinase, glucose-3-P-dehydrogenase, phosphofructokinase, aldolase, glycerol-3-P-dehydrogenase etc. It is also possible that the regulation of the natural genes has been modified advantageously so that the gene and/or its gene product is no longer subject to the regulatory mechanisms which exist in the organisms. This leads to an increased synthesis of glycerol and/or glycerol-3-phosphate precursors or glycerol and/or glycerol-3-phosphate, as desired since, for example, feedback regulations no longer exist to the same extent or not at all.

[5984] In a further advantageous embodiment of the process of the invention, the organisms used in the process are those in which advantageously simultaneously a glycerol and/or glycerol-3-phosphate degrading protein is attenuated, in particular by reducing the rate of expression of the corresponding gene, or by inactivating the gene for example the mutagenesis and/or selection. In another advantageous embodiment the synthesis of competitive pathways which rely on the same precoursers are down regulated or interrupted.

[5985] The respective fine chemical produced can be isolated from the organism by methods with which the skilled worker are familiar, for example via extraction, salt precipitation, and/or different chromatography methods. The process according to the invention can be conducted batchwise, semibatchwise or continuously. The fine chemical and other polyols produced by this process can be obtained by harvesting the organisms, either from the crop in which they grow, or from the field. This can be done via for example pressing or extraction of the plant parts.

[5986] Preferrably, the compound is a composition comprising the essentially pure glycerol and/or glycerol-3-phosphate or a recovered or isolated glycerol and/or glycerol-3-phosphate.

[5987] for the disclosure of the paragraphs [0243.0.0.21] to [0264.0.0.21] see paragraphs [0243.0.0.0] to [0264.0.0.0] above.

[5988] Other preferred sequences for use in operable linkage in gene expression constructs are targeting sequences, which are required for targeting the gene product into specific cell compartments (for a review, see Kermode, Crit. Rev. Plant Sci. 15, 4 (1996) 285-423 and references cited therein), for example into the vacuole, the nucleus, all types of plastids, such as amyloplasts, chloroplasts, chromoplasts, the extracellular space, the mitochondria, the endoplasmic reticulum, elaioplasts, peroxisomes, glycosomes, and other compartments of cells or extracellular preferred are sequences, which are involved in targeting to plastids as mentioned above. Sequences, which must be mentioned in this context are, in particular, the signal-peptide- or transit-peptide-encoding sequences which are known per se. For example, plastid-transit-peptide-encoding sequences enable the targeting of the expression product into the plastids of a plant cell. Targeting sequences are also known for eukaryotic and to a lower extent for prokaryotic organisms and can advantageously be operable linked with the nucleic acid molecule of the present invention as shown in table I, application no. 22, columns 5 and 7 and described herein to achieve an expression in one of said compartments or extracellular.

[5989] for the disclosure of the paragraphs [0266.0.0.21] to [0287.0.0.21] see paragraphs [0266.0.0.0] to [0287.0.0.0] above.

[5990] Accordingly, one embodiment of the invention relates to a vector where the nucleic acid molecule according to the invention is linked operably to regulatory sequences which permit the expression in a prokaryotic or eukaryotic or in a prokaryotic and eukaryotic host. A further preferred embodiment of the invention relates to a vector in which a nucleic acid sequence encoding one of the polypeptides shown in table II, application no. 22, columns 5 and 7 or their homologs is functionally linked to a plastidial targeting sequence. A further preferred embodiment of the invention relates to a vector in which a nucleic acid sequence encoding one of the polypeptides shown in table II, application no. 22, columns 5 and 7 or their homologs is functionally linked to a regulatory sequences which permit the expression in plastids.

[5991] for the disclosure of the paragraphs [0289.0.0.21] to [0296.0.0.21] see paragraphs [0289.0.0.0] to [0296.0.0.0] above.

[5992] Moreover, native polypeptide conferring the increase of the fine chemical in an organism or part thereof can be isolated from cells (e.g., endothelial cells), for example using the antibody of the present invention as described below, in particular, an anti-b0342, anti-b1021, anti-b2022, anti-b2818, anti-b3429, anti-b3429, anti-b3614, anti-b3708, anti-b4055 and/or anti-YDR035W protein antibody or an antibody against polypeptides as shown in table II, application no. 22, columns 5 and 7, which can be produced by standard techniques utilizing the polypeptide of the present invention or fragment thereof, i.e., the polypeptide of this invention. Preferred are monoclonal antibodies.

[5993] for the disclosure of this paragraph see paragraph [0298.0.0.0] above.

[5994] In one embodiment, the present invention relates to a polypeptide having the sequence shown in table II, application no. 22, columns 5 and 7 or as coded by the nucleic acid molecule shown in table I, application no. 22, columns 5 and 7 or functional homologues thereof.

[5995] In one advantageous embodiment, in the method of the present invention the activity of a polypeptide is increased comprising or consisting of the consensus sequence shown in table IV, application no. 22, columns 7 and in one another embodiment, the present invention relates to a polypeptide comprising or consisting of the consensus sequence shown in table IV, application no. 22, column 7 whereby 20 or less, preferably 15 or 10, preferably 9, 8, 7, or 6, more preferred 5 or 4, even more preferred 3, even more preferred 2, even more preferred 1, most preferred 0 of the amino acids positions indicated can be replaced by any amino acid.

[5996] for the disclosure of the paragraphs [0301.0.0.21] to [0304.0.0.21] see paragraphs [0301.0.0.0] to [0304.0.0.0] above.

[5997] In one advantageous embodiment, the method of the present invention comprises the increasing of a polypeptide comprising or consisting of plant or microorganism specific consensus sequences.

In one embodiment, said polypeptide of the invention distinguishes over the sequence shown in table II A and/or II B, application no. 22, columns 5 and 7 by one or more amino acids. In one embodiment, polypeptide distinguishes form the sequence shown in table II A and/or II B, application no. 22, columns 5 and 7 by more than 5, 6, 7, 8 or 9 amino acids, preferably by more than 10, 15, 20, 25 or 30 amino acids, even more preferred are more than 40, 50, or 60 amino acids and, preferably, the sequence of the polypeptide of the invention distinguishes from the sequence shown in table II A and/or II B, application no. 22, columns 5 and 7 by not more than 80% or 70% of the amino acids, preferably not more than 60% or 50%, more preferred not more than 40% or 30%, even more preferred not more than 20% or 10%. In an other embodiment, said polypeptide of the invention does not consist of the sequence shown in table II A and/or II B, application no. 22, columns 5 and 7.

[5998] for the disclosure of this paragraph see paragraph [0306.0.0.0] above.

[5999] In one embodiment, the invention relates to polypeptide conferring an increase in the fine chemical in an organism or part being encoded by the nucleic acid molecule of the invention or used in the process of the invention and having a sequence which distinguishes from the sequence as shown in table II A and/or II B, application no. 22, columns 5 and 7 by one or more amino acids. In another embodiment, said polypeptide of the invention does not consist of the sequence shown in table II A and/or II B, application no. 22, columns 5 and 7. In a further embodiment, said polypeptide of the present invention is less than 100%, 99.999%, 99.99%, 99.9% or 99% identical. In one embodiment, said polypeptide does not consist of the sequence encoded by the nucleic acid molecules shown in table I A and/or I B, application no. 22, columns 5 and 7.

[6000] In one embodiment, the present invention relates to a polypeptide having the activity of the protein as shown in table II A and/or II B, application no. 22, column 3, which distinguishes over the sequence depicted in table II A and/or II B, application no. 22, columns 5 and 7 by one or more amino acids, preferably by more than 5, 6, 7, 8 or 9 amino acids, preferably by more than 10, 15, 20, 25 or 30 amino acids, even more preferred are more than 40, 50, or 60 amino acids but even more preferred by less than 70% of the amino acids, more preferred by less than 50%, even more preferred my less than 30% or 25%, more preferred are 20% or 15%, even more preferred are less than 10%. In a further preferred embodiment the polypeptide of the invention takes the form of a preprotein consisting of a plastidial transitpeptide joint to a polypeptide having the activity of the protein as shown in table II A and/or II B, column 3, from which the transitpeptide is preferably cleaved off upon transport of the preprotein into the organelle for example into the plastid or mitochondria.

[6001] for the disclosure of the paragraphs [0309.0.0.21] to [0311.0.0.21] see paragraphs [0309.0.0.0] to [0311.0.0.0] above.

[6002] A polypeptide of the invention can participate in the process of the present invention. The polypeptide or a portion thereof comprises preferably an amino acid sequence, which is sufficiently homologous to an amino acid sequence shown in table II, application no. 22, columns 5 and 7.

[6003] Further, the polypeptide can have an amino acid sequence which is encoded by a nucleotide sequence which hybridizes, preferably hybridizes under stringent conditions as described above, to a nucleotide sequence of the nucleic acid molecule of the present invention. Accordingly, the polypeptide has an amino acid sequence which is encoded by a nucleotide sequence that is at least about 35%, 40%, 45%, 50%, 55%, 60%, 65% or 70%, preferably at least about 75%, 80%, 85% or 90, and more preferably at least about 91%, 92%, 93%, 94% or 95%, and even more preferably at least about 96%, 97%, 98%, 99% or more homologous to one of the amino acid sequences as shown in table II A and/or II B, application no. 22, columns 5 and 7. The preferred polypeptide of the present invention preferably possesses at least one of the activities according to the invention and described herein. A preferred polypeptide of the present invention includes an amino acid sequence encoded by a nucleotide sequence which hybridizes, preferably hybridizes under stringent conditions, to a nucleotide sequence of table I A and/or I B, application no. 22, columns 5 and 7 or which is homologous thereto, as defined above.

[6004] Accordingly the polypeptide of the present invention can vary from the sequences shown in table II A and/or II B, application no. 22, columns 5 and 7 in amino acid sequence due to natural variation or mutagenesis, as described in detail herein. Accordingly, the polypeptide comprise an amino acid sequence which is at least about 35%, 40%, 45%, 50%, 55%, 60%, 65% or 70%, preferably at least about 75%, 80%, 85% or 90, and more preferably at least about 91%, 92%, 93%, 94% or 95%, and most preferably at least about 96%, 97%, 98%, 99% or more homologous to an entire amino acid sequence shown in table II A and/or II B, application no. 22, columns 5 and 7.

[6005] for the disclosure of this paragraph see paragraph [0315.0.0.0] above.

[6006] Biologically active portions of an polypeptide of the present invention include peptides comprising amino acid sequences derived from the amino acid sequence of the polypeptide of the present invention or used in the process of the present invention, e.g., the amino acid sequence shown in table II, application no. 22, columns 5 and 7 or the amino acid sequence of a protein homologous thereto, which include fewer amino acids than a full length polypeptide of the present invention or used in the process of the present invention or the full length protein which is homologous to an polypeptide of the present invention or used in the process of the present invention depicted herein, and exhibit at least one activity of polypeptide of the present invention or used in the process of the present invention.

[6007] for the disclosure of this paragraph see paragraph [0317.0.0.0] above.

[6008] Manipulation of the nucleic acid molecule of the invention may result in the production of a protein having differences from the wild-type protein as shown in table II, application no. 22, column 3. Differences shall mean at least one amino acid different from the sequences as shown in table II, application no. 22, column 3, preferably at least 2, 3, 4, 5, 6, 7, 8, 9 or 10 amino acids, more preferably at least 15, 20, 25, 30, 35, 40, 45 or 50 amino acids different from the sequences as shown in table II, application no. 22, column 3. These proteins may be improved in efficiency or activity, may be present in greater numbers in the cell than is usual, or may be decreased in efficiency or activity in relation to the wild type protein.

[6009] Any mutagenesis strategies for the polypeptide of the present invention or the polypeptide used in the process of the present invention to result in increasing said activity are not meant to be limiting; variations on these strategies will be readily apparent to one skilled in the art. Using such strategies, and incorporating the mechanisms disclosed herein, the nucleic acid molecule and polypeptide of the invention may be utilized to generate plants or parts thereof, expressing wildtype proteins or mutated proteins of the proteins as shown in table II, application no. 22, column 3. The nucleic acid molecules and polypeptide molecules of the invention are expressed such that the yield, production, and/or efficiency of production of a desired compound is improved.

[6010] for the disclosure of the paragraphs [0320.0.0.21] to [0322.0.0.21] see paragraphs [0320.0.0.0] to [0322.0.0.0] above.

[6011] In one embodiment, a protein (=polypeptide) as shown in table II, application no. 22, column 3 refers to a polypeptide having an amino acid sequence corresponding to the polypeptide of the invention or used in the process of the invention, whereas a “non-inventive protein or polypeptide” or “other polypeptide” refers to a polypeptide having an amino acid sequence corresponding to a protein which is not substantially homologous to a polypeptide of the invention, preferably which is not substantially homologous to a polypeptide or protein as shown in table II, application no. 22, column 3, e.g., a protein which does not confer the activity described herein and which is derived from the same or a different organism.

[6012] for the disclosure of the paragraphs [0324.0.0.21] to [0329.0.0.21] see paragraphs [0324.0.0.0] to [0329.0.0.0] above.

[6013] In an especially preferred embodiment, the polypeptide according to the invention furthermore also does not have the sequences of those proteins, which are encoded by the sequences shown in table II, application no. 22, columns 5 and 7.

[6014] for the disclosure of the paragraphs [0331.0.0.21] to [0346.0.0.21] see paragraphs [0331.0.0.0] to [0346.0.0.0] above.

[6015] Accordingly the present invention relates to any cell transgenic for any nucleic acid characterized as part of the invention, e.g. conferring the increase of the fine chemical in a cell or an organism or a part thereof, e.g. the nucleic acid molecule of the invention, the nucleic acid construct of the invention, the antisense molecule of the invention, the vector of the invention or a nucleic acid molecule encoding the polypeptide of the invention, e.g. encoding a polypeptide having an activity as the protein as shown in table II, application no. 22, column 3. Due to the above mentioned activity the fine chemical content in a cell or an organism is increased. For example, due to modulation or manipulation, the cellular activity is increased preferably in organelles such as plastids or mitochondria, e.g. due to an increased expression or specific activity or specific targeting of the subject matters of the invention in a cell or an organism or a part thereof especially in organelles such as plastids or mitochondria. Transgenic for a polypeptide having a protein or activity means herein that due to modulation or manipulation of the genome, the activity of protein as shown in table II, application no. 22, column 3 or a protein as shown in table II, application no. 22, column 3-like activity is increased in the cell or organism or part thereof especially in organelles such as plastids or mitochondria. Examples are described above in context with the process of the invention.

[6016] for the disclosure of this paragraph see paragraph [0348.0.0.0] above.

[6017] A naturally occurring expression cassette—for example the naturally occurring combination of the promoter of the gene encoding a protein as shown in table II, application no. 22, column 3 with the corresponding encoding gene—becomes a transgenic expression cassette when it is modified by non-natural, synthetic “artificial” methods such as, for example, mutagenization. Such methods have been described (U.S. Pat. No. 5,565,350; WO 00/15815; also see above).

[6018] for the disclosure of the paragraphs [0350.0.0.21] to [0358.0.0.21] see paragraphs [0350.0.0.0] to [0358.0.0.0] above.

[6019] Transgenic plants comprising glycerol and/or glycerol-3-phosphate or mixtures thereof synthesized in the process according to the invention can be marketed directly without isolation of the compounds synthesized. In the process according to the invention, plants are understood as meaning all plant parts, plant organs such as leaf, stalk, root, tubers or seeds or propagation material or harvested material or the intact plant. In this context, the seed encompasses all parts of the seed such as the seed coats, epidermal cells, seed cells, endosperm or embryonic tissue. The glycerol and/or glycerol-3-phosphate produced in the process according to the invention may, however, also be isolated from the plant in the form of their free glycerol and/or glycerol-3-phosphate produced by this process can be isolated by harvesting the plants either from the culture in which they grow or from the field. This can be done for example via expressing, grinding and/or extraction of the plant parts, preferably the plant leaves, plant fruits, flowers and the like.

The invention furthermore relates to the use of the transgenic plants according to the invention and of the cells, cell cultures, parts—such as, for example, roots, leaves, flowers and the like as mentioned above in the case of transgenic plant organisms—derived from them, and to transgenic propagation material such as seeds or fruits and the like as mentioned above, for the production of foodstuffs or feeding stuffs, cosmetics, pharmaceuticals or fine chemicals.

[6020] for the disclosure of the paragraphs [0360.0.0.21] to [0362.0.0.21] see paragraphs [0360.0.0.0] to [0362.0.0.0] above.

[6021] In this manner, more than 50% by weight, advantageously more than 60% by weight, preferably more than 70% by weight, especially preferably more than 80% by weight, very especially preferably more than 90% by weight, of the glycerol and/or glycerol-3-phosphate produced in the process can be isolated. The resulting fine chemical can, if appropriate, subsequently be further purified, if desired mixed with other active ingredients such as other xanthophylls, fatty acids, vitamins, amino acids, carbohydrates, antibiotics and the like, and, if appropriate, formulated.

[6022] In one embodiment, glycerol and/or glycerol-3-phosphate is the fine chemical.

[6023] The glycerol and/or glycerol-3-phosphate, in particular the respective fine chemicals obtained in the process are suitable as starting material for the synthesis of further products of value. For example, they can be used in combination with each other or alone for the production of pharmaceuticals, health products, foodstuffs, animal feeds, nutrients or cosmetics. Accordingly, the present invention relates a method for the production of pharmaceuticals, health products, food stuff, animal feeds, nutrients or cosmetics comprising the steps of the process according to the invention, including the isolation of the glycerol and/or glycerol-3-phosphate containing, in particular glycerol and/or glycerol-3-phosphate containing composition produced or the respective fine chemical produced if desired and formulating the product with a pharmaceutical acceptable carrier or formulating the product in a form acceptable for an application in agriculture. A further embodiment according to the invention is the use of the glycerol and/or glycerol-3-phosphate produced in the process or of the transgenic organisms in animal feeds, foodstuffs, medicines, food supplements, cosmetics or pharmaceuticals.

[6024] for the disclosure of the paragraphs [0366.0.0.21] to [0369.0.0.21] see paragraphs [0366.0.0.0] to [0369.0.0.0] above.

[6025] The fermentation broths obtained in this way, containing in particular glycerol and/or glycerol-3-phosphate in mixtures with other organic acids, amino acids, polypeptides or polysaccarides, normally have a dry matter content of from 1 to 70% by weight, preferably 7.5 to 25% by weight. Sugar-limited fermentation is additionally advantageous, e.g. at the end, for example over at least 30% of the fermentation time. This means that the concentration of utilizable sugar in the fermentation medium is kept at, or reduced to, 0 to 10 g/l, preferably to 0 to 3 g/l during this time. The fermentation broth is then processed further. Depending on requirements, the biomass can be removed or isolated entirely or partly by separation methods, such as, for example, centrifugation, filtration, decantation, coagulation/flocculation or a combination of these methods, from the fermentation broth or left completely in it.

The fermentation broth can then be thickened or concentrated by known methods, such as, for example, with the aid of a rotary evaporator, thin-film evaporator, falling film evaporator, by reverse osmosis or by nanofiltration. This concentrated fermentation broth can then be worked up by freeze-drying, spray drying, spray granulation or by other processes.

[6026] Accordingly, it is possible to purify the glycerol and/or glycerol-3-phosphate, in particular the glycerol and/or glycerol-3-phosphate produced according to the invention further. For this purpose, the product-containing composition, e.g. a total or partial extraction fraction using organic solvents, is subjected for example to separation via e.g. an open column chromatography or HPLC in which case the desired product or the impurities are retained wholly or partly on the chromatography resin. These chromatography steps can be repeated if necessary, using the same or different chromatography resins. The skilled worker is familiar with the choice of suitable chromatography resins and their most effective use.

[6027] for the disclosure of the paragraphs [0372.0.0.21] to [0376.0.0.21], [0376.1.0.21] and [0377.0.0.21] see paragraphs [0372.0.0.0] to [0376.0.0.0], [0376.1.0.0] and [0377.0.0.0] above.

[6028] In one embodiment, the present invention relates to a method for the identification of a gene product conferring an increase in the fine chemical production in a cell, comprising the following steps:
[6029] (a) contacting e.g. hybridising, the nucleic acid molecules of a sample, e.g. cells, tissues, plants or microorganisms or a nucleic acid library, which can contain a candidate gene encoding a gene product conferring an increase in the fine chemical after expression, with the nucleic acid molecule of the present invention;
[6030] (b) identifying the nucleic acid molecules, which hybridize under relaxed stringent conditions with the nucleic acid molecule of the present invention in particular to the nucleic acid molecule sequence shown in table I, application no. 22, columns 5 and 7, preferably in table I B, application no. 22, columns 5 and 7, and, optionally, isolating the full length cDNA clone or complete genomic clone;
[6031] (c) introducing the candidate nucleic acid molecules in host cells, preferably in a plant cell or a microorganism, appropriate for producing the fine chemical;
[6032] (d) expressing the identified nucleic acid molecules in the host cells;
[6033] (e) assaying the fine chemical level in the host cells; and
[6034] (f) identifying the nucleic acid molecule and its gene product which expression confers an increase in the fine chemical level in the host cell after expression compared to the wild type.

[6035] for the disclosure of the paragraphs [0379.0.0.21] to [0383.0.0.21] see paragraphs [0379.0.0.0] to [0383.0.0.0] above.

[6036] The screen for a gene product or an agonist conferring an increase in the fine chemical production can be performed by growth of an organism for example a microorganism in the presence of growth reducing amounts of an inhibitor of the synthesis of the fine chemical. Better growth, eg higher dividing rate or high dry mass in comparison to the control under such conditions would identify a gene or gene product or an agonist conferring an increase in fine chemical production.

One can think to screen for increased fine chemical production by for example resistance to drugs blocking fine chemical synthesis and looking whether this effect is dependent on the proteins as shown in table II, application no. 22, column 3, eg comparing near identical organisms with low and high activity of the proteins as shown in table II, application no. 22, column 3.

[6037] for the disclosure of the paragraphs [0385.0.0.21] to [0404.0.0.21] see paragraphs [0385.0.0.0] to [0404.0.0.0] above.

[6038] Accordingly, the nucleic acid of the invention, or the nucleic acid molecule identified with the method of the present invention or the complement sequences thereof, the polypeptide of the invention, the nucleic acid construct of the invention, the organisms, the host cell, the microorganisms, the plant, plant tissue, plant cell, or the part thereof the invention, the vector of the invention, the agonist identified with the method of the invention, the nucleic acid molecule identified with the method of the present invention, can be used for the production of the fine chemical or of the fine chemical and one or more other polyols or lipids, in particular polyols such as zylitol or sorbitol.

Accordingly, the nucleic acid of the invention, or the nucleic acid molecule identified with the method of the present invention or the complement sequences thereof, the polypeptide of the invention, the nucleic acid construct of the invention, the organisms, the host cell, the microorganisms, the plant, plant tissue, plant cell, or the part thereof of the invention, the vector of the invention, the agonist identified with the method of the invention, the antibody of the present invention, can be used for the reduction of the fine chemical in an organism or part thereof, e.g. in a cell.

[6039] for the disclosure of the paragraphs [0406.0.0.21] to [0435.0.0.21] see paragraphs [0406.0.0.0] to [0435.0.0.0] above.

[6040] Production of Glycerol and/or Glycerol-3-Phosphate in Chlamydomonas reinhardtii

The glycerol and/or glycerol-3-phosphate production can be analysed as mentioned herein.
The proteins and nucleic acids can be analysed as mentioned below.
In addition a production in other organisms such as plants or microorganisms such as yeast, Mortierella alpina, Corynebacterium glutamicum or Escherichia coli is possible.

[6041] for the disclosure of the paragraphs [0437.0.0.21] and [0438.0.0.21] see paragraphs [0437.0.0.0] and [0438.0.0.0] above.

### Example 9

### Analysis of the Effect of the Nucleic Acid Molecule on the Production of Glycerol and/or Glycerol-3-Phosphate

[6042] The effect of the genetic modification of plants or algae on the production of a desired compound (such as glycerol and/or glycerol-3-phosphate) can be determined by growing the modified plant under suitable conditions (such as those described above) and analyzing the medium and/or the cellular components for the elevated production of desired product (i.e. of glycerol and/or glycerol-3-phosphate). These analytical techniques are known to the skilled worker and comprise spectroscopy, thin-layer chromatography, various types of staining methods, enzymatic and microbiological methods and analytical chromatography such as high-performance liquid chromatography (see, for example, Ullman, Encyclopedia of Industrial Chemistry, Vol. A2, p. 89-90 and p. 443-613, VCH: Weinheim (1985); Fallon, A., et al., (1987) “Applications of HPLC in Biochemistry” in: Laboratory Techniques in Biochemistry and Molecular Biology, Vol. 17; Rehm et al. (1993) Biotechnology, Vol. 3, Chapter III: “Product recovery and purification”, p. 469-714, VCH: Weinheim; Belter, P. A., et al. (1988) Bioseparations: downstream processing for Biotechnology, John Wiley and Sons; Kennedy, J. F., and Cabral, J. M. S. (1992) Recovery processes for biological Materials, John Wiley and Sons; Shaeiwitz, J. A., and Henry, J. D. (1988) Biochemical Separations, in: Ullmann's Encyclopedia of Industrial Chemistry, Vol. B3; Chapter 11, p. 1-27, VCH: Weinheim; and Dechow, F. J. (1989) Separation and purification techniques in biotechnology, Noyes Publications) or the methods mentioned above.

[6043] for the disclosure of this paragraph see [0441.0.0.0] above.

[6044] Purification of and Determination of the Glycerol and/or Glycerol-3Phosphate Content:

[6045] Abbreviations: GC-MS, gas liquid chromatography/mass spectrometry; TLC, thin-layer chromatography.

The unambiguous detection for the presence of xanthophylls can be obtained by analyzing recombinant organisms using analytical standard methods: LC, LC-MSMS or TLC, as described The total glycerol and/or glycerol-3-phosphate produced in the organism for example in algae used in the inventive process can be analysed for example according to the following procedure:
The material such as algae or plants to be analyzed can be disrupted by sonication, grinding in a glass mill, liquid nitrogen and grinding or via other applicable methods.
Plant material is initially homogenized mechanically by comminuting in a pestle and mortar to make it more amenable to extraction.

[6046] A typical sample pretreatment consists of a total lipid extraction using such polar organic solvents as acetone or alcohols as methanol, or ethers, saponification, partition between phases, separation of non-polar epiphase from more polar hypophasic derivatives and chromatography. E.g.:

For analysis, solvent delivery and aliquot removal can be accomplished with a robotic system comprising a single injector valve Gilson 232XL and a 402 2S1V diluter [Gilson, Inc. USA, 3000 W. Beltline Highway, Middleton, Wis.]. For saponification, 3 ml of 50% potassium hydroxide hydro-ethanolic solution (4 water:1 ethanol) can be added to each vial, followed by the addition of 3 ml of octanol. The saponification treatment can be conducted at room temperature with vials maintained on an IKA HS 501 horizontal shaker [Labworld-online, Inc., Wilmington, N.C.] for fifteen hours at 250 movements/minute, followed by a stationary phase of approximately one hour.
Following saponification, the supernatant can be diluted with 0.10 ml of methanol. The addition of methanol can be conducted under pressure to ensure sample homogeneity. Using a 0.25 ml syringe, a 0.1 ml aliquot can be removed and transferred to HPLC vials for analysis.
For HPLC analysis, a Hewlett Packard 1100 HPLC, complete with a quaternary pump, vacuum degassing system, six-way injection valve, temperature regulated autosampier, column oven and Photodiode Array detector can be used [Agilent Technologies available through Ultra Scientific Inc., 250 Smith Street, North Kingstown, R.I.]. The column can be a Waters YMC30, 5-micron, 4.6×250 mm with a guard column of the same material [Waters, 34 Maple Street, Milford, Mass.]. The solvents for the mobile phase can be 81 methanol: 4 water: 15 tetrahydrofuran (THF) stabilized with 0.2% BHT (2,6-di-tert-butyl-4-methylphenol). Injections were 20 μl. Separation can be isocratic at 30° C. with a flow rate of 1.7 ml/minute. The peak responses can be measured by absorbance at 447 nm.

[6047] If required and desired, further chromatography steps with a suitable resin may follow. Advantageously, the glycerol and/or glycerol-3-phosphate can be further purified with a so-called RTHPLC. As eluent acetonitrile/water or chloroform/acetonitrile mixtures can be used. If necessary, these chromatography steps may be repeated, using identical or other chromatography resins. The skilled worker is familiar with the selection of suitable chromatography resin and the most effective use for a particular molecule to be purified.

[6048] for the disclosure of the paragraphs [0446.0.0.21] to [0496.0.0.21] see paragraphs [0446.0.0.0] to [0496.0.0.0] above.

[6049] Usually acetone or hexane is used for the extraction of the lipds and further purification is achieved either by column chromatography with a suitable resin.

If necessary, these chromatography steps may be repeated, using identical or other chromatography resins. The skilled worker is familiar with the selection of suitable chromatography resin and the most effective use for a particular molecule to be purified.
In addition depending on the produced fine chemical purification is also possible with crystallization or distillation. Both methods are well known to a person skilled in the art.
[6050] The results of the different plant analyses can be seen from the table, which follows:

TABLE VI

| ORF | Metabolite | Method | Min | Max |
|---|---|---|---|---|
| b0342 | Glycerol-3-phosphate, | GC | 1.19 | 1.71 |
| | lipid fraction | | | |
| b1021 | Glycerol, polar fraction | GC | 1.47 | 1.89 |
| b2022 | Glycerol, lipid fraction | GC | 1.24 | 1.66 |
| b2818 | Glycerol, lipid fraction | GC | 1.17 | 1.29 |
| b3429 | Glycerol, lipid fraction | GC | 1.18 | 1.98 |
| b3429 | Glycerol, polar fraction | GC | 1.87 | 2.89 |
| b3614 | Glycerol-3-phosphate, | GC | 1.19 | 1.46 |
| | lipid fraction | | | |
| b3708 | Glycerol, lipid fraction | GC | 1.19 | 1.39 |
| b4055 | Glycerol, lipid fraction | GC | 1.17 | 1.32 |
| YDR035W | Glycerol, lipid fraction | GC | 1.20 | 1.31 |

[6051] for the disclosure of the paragraphs [0499.0.0.21] and [0500.0.0.21] see paragraphs [0499.0.0.0] and [0500.0.0.0] above.

### Example 15a

### Engineering Ryegrass Plants by Over-Expressing b0342 from Escherichia coli or Homologs of b0342 from Other Organisms

[6052] for the disclosure of the paragraphs [0502.0.0.21] to [0508.0.0.21] see paragraphs [0502.0.0.0] to [0508.0.0.0] above.

### Example 15b

### Engineering Soybean Plants by Over-Expressing b0342 from Escherichia coli or homologs of b0342 from other organisms

[6053] for the disclosure of the paragraphs [0510.0.0.21] to [0513.0.0.21] see paragraphs [0510.0.0.0] to [0513.0.0.0] above.

### Example 15c

### Engineering Corn Plants by Over-Expressing b0342 from Escherichia coli or Homologs of b0342 from Other Organisms

[6054] for the disclosure of the paragraphs [0515.0.0.21] to [0540.0.0.21] see paragraphs [0515.0.0.0] to [0540.0.0.0] above.

### Example 15d

### Engineering Wheat Plants by Over-Expressing b0342 from Escherichia coli or Homologs of b0342 from Other Organisms

[6055] for the disclosure of the paragraphs [0542.0.0.21] to [0544.0.0.21] see paragraphs [0542.0.0.0] to [0544.0.0.0] above.

### Example 15e

### Engineering Rapeseed/Canola Plants by Over-Expressing b0342 from Escherichia coli or Homologs of b0342 from Other Organisms

[6056] for the disclosure of the paragraphs [0546.0.0.21] to [0549.0.0.21] see paragraphs [0544.0.0.0] to [0549.0.0.0] above.

### Example 15f

### Engineering Alfalfa Plants by Over-Expressing b0342 from Escherichia coli or Homologs of b0342 from Other Organisms

[6057] for the disclosure of the paragraphs [0551.0.0.21] to [0554.0.0.21] see paragraphs [0551.0.0.0] to [0554.0.0.0] above.

[6058] %

[6059] for the disclosure of this paragraph see [0554.2.0.0] above.

[6060] for the disclosure of this paragraph see [0555.0.0.0] above.

[6061] for the disclosure of this paragraph see [0001.0.0.0].

[6062] Lipids differ markedly from other groups of biomolecules and metabolites. By definition, lipids are water-insoluble biomolecules that are highly soluble in organic solvents such as chloroform. Lipids have a variety of biological roles: they serve as fuel molecules, highly concentrated energy stores, signal molecules, and components of membranes.

The major kinds of membrane lipids are phospholipids, glycolipids, and cholesterol. Glycolipids are sugar-containing lipids. The term glycolipid designates any compound containing one or more monosaccharide residues bound by a glycosidic linkage to a hydrophobic moiety such as an acylglycerol, a sphingoid, a ceramide (N-acylsphingoid) or a prenyl phosphate.

[6063] Galactose-containing lipids are the predominant nonproteinaceous components of photosynthetic membranes in plants, algae, and a variety of bacteria. In higher plants, the dalactolipids contain a high proportion of polyunsaturated fatty acids, up to 95% of which can be linolenic acid (18:3(n-3)). In non-photosynthetic tissues, such as tubers or roots, the C₁₅ fatty acids are usually more saturated.

In plants, especially photosynthetic tissues, a substantial proportion of the lipids consists of 1,2-diacyl-sn-glycerols joined by a glycosidic linkage at position sn-3 to a carbohydrate moiety. The two most common galactolipids are monogalactosyl diacylglycerol and digalactosyl diacylglycerol. Up to 80% of all lipids in plants are associated with photosynthetic membranes, and monogalactosyl diacylglycerol is widely considered to be the most abundant membrane lipid on earth.
Monogalactosyldiacylglycerols are not solely plant lipids as they have been found in small amounts in brain and nervous tissue in some animal species.
Related compounds of those main components of plant glycolipids, e.g. mono- and digalactosyldiacylglycerols, have been found with up to four galactose units, or in which one or more of these is replaced by glucose moieties. In addition, a 6-O-acyl-monogalactosyldiacylglycerol is occasionally a component of plant tissues.

[6064] The final step in monogalactosyl diacylglycerol biosynthesis occurs in the plastid envelope and is catalyzed by monogalactosyl diacylglycerol synthase (EC 2.4.1.46). This enzyme transfers D-galactose from UDP-galactose to sn-1,2diacylglycerol (DAG) (Joyard, J. & Douce, R. Stumpf, P. K., ed. (1987) in Biochemistry of Plants (Academic, New York).

Digalactosyl diacylglycerol synthase catalyzes the transfer of galactose from one molecule of monogalactosyl diacylglycerol to another, producing digalactosyl diacylglycerol and DAG in equimolar amounts.

[6065] Even if some details are known, galactolipid biosynthesis in plants is highly complex. It involves multiple pathways giving rise to different molecular species.

Recent studies indicate that the amounts of the lipids sulfolipid sulfoquinovosyl-diacylglycerol (SQDG) and digalactosyldiacylglycerol and DGDG increase strongly during phosphate deprivation (Härtel et al., Proc. Natl. Acad. Sci., 97, 10649-10654, 2000). When phosphate is limiting, phospholipids in plant membranes are reduced and at least in part replaced by glycolipids (i.e., SQDG and DGDG).
In addition to serving as a surrogate lipid for phospholipids, galactolipids were found to be critical for the stabilization of photosynthetic complexes in the thylakoids (Dörmann and Benning, Trends Plant Sci. 7, 112-118, 2002).

[6066] In contrast to plants, which contain high amounts of glycolipids, which carry a sugar moiety in the head group, in animals and yeast phospholipids are very abundant. Nevertheless, one type of glycolipids to be found in mammalians are galactosylceramide (cerebroside), which is prevalent in brain and the central nervous system. The cerebrosides have been localized to the outer leaflet of the plasma membrane, exposed on the cell surface. They seem to be responsible for the different blood types. Blood group antigens include cerebrosides with multiple sugars attached.

[6067] It has long been recognized that many complex glycolipid antigens are involved in the binding of lectins and antibodies at the cell surface glycolipids, containing only a single sugar headgroup, may play a combination of immunological, regulatory and structural roles in the membrane (Varki et al., Essentials of Glycobiology. Cold Spring Harbor Laboratory Press, New York, 1999).

The glycosphingolipid, galactosylceramide, has been shown to be a key activator of triggered cell death (Zhao et al., Cancer Res. 59, 482-486, 1999) and may play a role in the inhibition of virus replication (Kakimi et al., J. Exp. Med. 192, 921-930, 2000). It has recently been demonstrated that galactolipids are also responsible for preventing cell damage and the high resistance to oxidation and heat in the membranes of some microorganisms (Nakata, J. Biochem. 127, 731-737, 2000).

[6068] Other glycoglycerolipids, such as the 1,2-di-Oacyl-3-O-(D-galactopyranosyl)-sn-glycerols, are found widely in nature as structural components of the photosynthetic membranes of higher plants in the cell membranes of prokaryotic blue-green algae and several other microorganisms and in the seeds of cereals, such as wheat and oats.

[6069] Galactolipids are one of the more abundant lipid classes in nature. Sources for the galactolipids are foodstuffs, such as certain grains (oat, wheat, barley, and maize), which have been a significant part of the human diet since the beginning of time.

In addition galactolipids contain important fatty acids like linoleic acid, linolenic acids and others which have numerous applications in the food and feed industry, in cosmetics and in the drug sector. For example for cyanobacterium and marine green algae fermentation it has been described that the gamma-linolenic acid (GLA) was restricted the galactolipid fraction (Cohen et al., J. Appl. Phycol.; (1993) 5, 1, 109-15; FEMS-Microbiol. Lett.; (1993) 107, 2-3, 163-67), meaning that increasing the concentration of galactolipids can be another method for increasing the concentration of interesting fatty acids like linoleic acid, linolenic acid, stearic acid and palmitic acid in some production systems.

[6070] Most vegetables and fruits in human and animal diets contain galactolipids, and their breakdown products represent an important dietary source of galactose and polyunsaturated fatty acids.

[6071] On account of the positive properties and interesting physiological roles potential of galactose and galactose comprising lipids there is a need to produce those compounds in large amounts and well defined quality and composition.

Thus, it would be desirable to produce galactolipids, in a defined proportion in microorganisms or plants. This should be in way, which is not dependent on the availability of phosphate, in particular on phosphate deprivation. One way to increase the productive capacity of biosynthesis is to apply recombinant DNA technology. That type of production permits control over quality, quantity and selection of the most suitable and efficient producer organisms. The latter is especially important for commercial production economics and therefore availability to consumers.

[6072] Accordingly, there is still a great demand for new and more suitable genes which encode enzymes or other regulators which participate in the biosynthesis of said galactolipids and make it possible to produce said galactolipids specifically on an industrial scale without that unwanted byproducts are formed. In the selection of genes for biosynthesis two characteristics above all are particularly important. On the one hand, there is as ever a need for improved processes for obtaining the highest possible contents of said galactolipids on the other hand as less as possible byproducts should be produced in the production process.

[6073] for the disclosure of this paragraph see [0013.0.0.0] above.

[6074] Accordingly, in a first embodiment, the invention relates to a process for the production of a fine chemical, whereby the fine chemical is is a lipid, preferably a glycolipid containing galactose, glucose, mannose, rhamnose or xylose, more preferably a galactolipid containing galactose or glucose, most preferably a galactolipid containing galactose. Accordingly, in the present invention, the term “the fine chemical” as used herein relates to “lipid, preferably a glycolipid containing galactose, glucose, mannose, rhamnose or xylose, more preferably a galactolipid containing galactose or glucose, most preferably a galactolipid containing galactose in free or bound form”. Further, the term “the fine chemicals” as used herein also relates to fine chemicals comprising lipid, preferably a glycolipid, a glycolipid containing galactose, glucose, mannose, rhamnose or xylose, more preferably a galactolipid containing galactose or glucose, most preferably a galactolipid containing galactose.

[6075] In one embodiment, the term “lipid, preferably a glycolipid, a glycolipid containing galactose, glucose, mannose, rhamnose or xylose, more preferably a galactolipid containing galactose or glucose, most preferably a galactolipid containing galactose in free or bound form”, “the fine chemical” or “the respective fine chemical” means at least one chemical compound selected from the group consisting of glycolipids containing galactose, glucose, mannose, rhamnose or xylose, more preferably a galactolipid containing galactose or glucose, most preferably a galactolipid containing galactose. Throughout the specification the term “the fine chemical” or “the respective fine chemical” means a compound selected from the group of glycolipids containing galactose, glucose, mannose, rhamnose or xylose, more preferably a galactolipid containing galactose or glucose, most preferably a galactolipid containing galactose or mixtures thereof in free form or bound to other compounds.

In one embodiment, the term “the fine chemical” and the term “the respective fine chemical” mean at least one chemical compound with an activity of the abovementioned fine chemical.
In one embodiment, the term “the fine chemical” and the term “the respective fine chemical” mean at least one chemical compound with an activity of the above mentioned fine chemical

[6076] Accordingly, the present invention relates to a process for the production of glycolipids containing galactose, glucose, mannose, rhamnose or xylose, more preferably a galactolipid containing galactose or glucose, most preferably a galactolipid containing galactose, which comprises
[6077] (a) increasing or generating the activity of a protein as shown in table II, application no. 23, column 3 encoded by the nucleic acid sequences as shown in table I, application no. 23, column 5, in an organelle of a microorganism or plant, or
[6078] (b) increasing or generating the activity of a protein as shown in table II, application no. 23, column 3 encoded by the nucleic acid sequences as shown in table I, application no. 23, column 5 in the plastid of a microorganism or plant, or in one or more parts thereof; and
[6079] (c) growing the organism under conditions which permit the production of the fine chemical, thus, glycolipids containing galactose, glucose, mannose, rhamnose or xylose, more preferably a galactolipid containing galactose or glucose, most preferably a galactolipid containing galactose or fine chemicals comprising glycolipids containing galactose, glucose, mannose, rhamnose or xylose, more preferably a galactolipid containing galactose or glucose, most preferably a galactolipid containing galactose, are produced in said organism or in the culture medium surrounding the organism.

[6080] Accordingly, the term “the fine chemical” means “a lipid, preferably a glycolipid, a glycolipid containing galactose, glucose, mannose, rhamnose or xylose, more preferably a galactolipid containing galactose or glucose” in relation to all sequences listed in table I, application no. 23, columns 5 and 7 or homologs thereof. Accordingly, the term “a lipid, preferably a glycolipide,a glycolipid containing galactose, more preferably a galactolipid or cerebroside”, owing to circumstances and the context. Preferably the term “the fine chemical” means preferably a “glycolipide containing galactose or glucose, more preferably a galactolipide”. In order to illustrate that the meaning of the term “the respective fine chemical” means a “lipid, preferably a glycolipide,a glycolipid containing galactose, more preferably a galactolipide in free or bound form” owing to the sequences listed in the context the term “the respective fine chemical” is also used.

Whereas glycolipids are any lipid containing one or more monosaccharide residues bound by a glycosidic linkage to a hydrophobic moiety such as an acylglycerol, a sphingoid, a ceramide (N-acylsphingoid) or a prenyl phosphate. The term “glycosphingolipid” in the sense of the invention means lipids containing at least one monosaccharide residue and either a sphingoid or a ceramide.

[6081] In another embodiment the present invention is related to a process for the production of glycolipids containing galactose, glucose, mannose, rhamnose or xylose, more preferably a galactolipid containing galactose or glucose, most preferably a galactolipid containing galactose, which comprises
[6082] (a) increasing or generating the activity of a protein as shown in table II, application no. 23, column 3 encoded by the nucleic acid sequences as shown in table I, application no. 23, column 5, in an organelle of a non-human organism, or
[6083] (b) increasing or generating the activity of a protein as shown in table II, application no. 23, column 3 encoded by the nucleic acid sequences as shown in table I, application no. 23, column 5, which are joined to a nucleic acid sequence encoding a transit peptide in a non-human organism, or in one or more parts thereof; or
[6084] (c) increasing or generating the activity of a protein as shown in table II, application no. 23, column 3 encoded by the nucleic acid sequences as shown in table I, application no. 23, column 5, which are joined to a nucleic acid sequence encoding chloroplast localization sequence, in a non-human organism, or in one or more parts thereof, and
[6085] (d) growing the organism under conditions which permit the production of glycolipids containing galactose, glucose, mannose, rhamnose or xylose, more preferably a galactolipid containing galactose or glucose, most preferably a galactolipid containing galactose in said organism.

[6086] In another embodiment, the present invention relates to a process for the production of glycolipids containing galactose, glucose, mannose, rhamnose or xylose, more preferably a galactolipid containing galactose or glucose, most preferably a galactolipid containing galactose, which comprises
[6087] (a) increasing or generating the activity of a protein as shown in table II, application no. 23, column 3 encoded by the nucleic acid sequences as shown in table I, application no. 23, column 5, in an organelle of a microorganism or plant through the transformation of the organelle, or
[6088] (b) increasing or generating the activity of a protein as shown in table II, application no. 23, column 3 encoded by the nucleic acid sequences as shown in table I, application no. 23, column 5 in the plastid of a microorganism or plant, or in one or more parts thereof through the transformation of the plastids; and
[6089] (c) growing the organism under conditions which permit the production of the fine chemical, thus, glycolipids containing galactose, glucose, mannose, rhamnose or xylose, more preferably a galactolipid containing galactose or glucose, most preferably a galactolipid containing galactose or fine chemicals comprising glycolipids containing galactose, glucose, mannose, rhamnose or xylose, more preferably a galactolipid containing galactose or glucose, most preferably a galactolipid containing galactose in said organism or in the culture medium surrounding the organism.

[6090] Advantageously the activity of the protein as shown in table II, application no. 23, column 3 encoded by the nucleic acid sequences as shown in table I, application no. 23, column 5 is increased or generated in the abovementioned process in the plastid of a microorganism or plant.

[6091] for the disclosure of the paragraphs [0019.0.0.22] to [0024.0.0.22] see paragraphs [0019.0.0.0] and [0024.0.0.0] above.

[6092] Even more preferred nucleic acid sequences are encoding transit peptides as disclosed by von Heijne et al. [Plant Molecular Biology Reporter, Vol. 9 (2), 1991: 104-126], which are hereby incorporated by reference. Table V shows some examples of the transit peptide sequences disclosed by von Heijne et al. According to the disclosure of the invention especially in the examples the skilled worker is able to link other nucleic acid sequences disclosed by von Heijne et al. to the nucleic acid sequences shown in table I, application no. 23, columns 5 and 7. Most preferred nucleic acid sequences encoding transit peptides are derived from the genus Spinacia such as chloroplast 30S ribosomal protein PSrp-1, root acyl carrier protein II, acyl carrier protein, ATP synthase: γ subunit, ATP synthase: δ subunit, cytochrom f, ferredoxin I, ferredoxin NADP oxidoreductase (=FNR), nitrite reductase, phosphoribulokinase, plastocyanin or carbonic anhydrase. The skilled worker will recognize that various other nucleic acid sequences encoding transit peptides can easily isolated from plastid-localized proteins, which are expressed from nuclear genes as precursors and are then targeted to plastids. Such transit peptides encoding sequences can be used for the construction of other expression constructs. The transit peptides advantageously used in the inventive process and which are part of the inventive nucleic acid sequences and proteins are typically 20 to 120 amino acids, preferably 25 to 110, 30 to 100 or 35 to 90 amino acids, more preferably 40 to 85 amino acids and most preferably 45 to 80 amino acids in length and functions post-translationally to direct the protein to the plastid preferably to the chloroplast. The nucleic acid sequences encoding such transit peptides are localized upstream of nucleic acid sequence encoding the mature protein. For the correct molecular joining of the transit peptide encoding nucleic acid and the nucleic acid encoding the protein to be targeted it is sometimes necessary to introduce additional base pairs at the joining position, which forms restriction enzyme recognition sequences useful for the molecular joining of the different nucleic acid molecules. This procedure might lead to very few additional amino acids at the N-terminal of the mature imported protein, which usually and preferably do not interfere with the protein function. In any case, the additional base pairs at the joining position which forms restriction enzyme recognition sequences have to be chosen with care, in order to avoid the formation of stop codons or codons which encode amino acids with a strong influence on protein folding, like e.g. proline. It is preferred that such additional codons encode small n.d. structural flexible amino acids such as glycine or alanine.

[6093] As mentioned above the nucleic acid sequences coding for the proteins as shown in table II, application no. 23, column 3 and its homologs as disclosed in table I, application no. 23, columns 5 and 7 are joined to a nucleic acid sequence encoding a transit peptide, This nucleic acid sequence encoding a transit peptide ensures transport of the protein to the plastid. The nucleic acid sequence of the gene to be expressed and the nucleic acid sequence encoding the transit peptide are operably linked. Therefore the transit peptide is fused in frame to the nucleic acid sequence coding for proteins as shown in table II, application no. 23, column 3 and its homologs as disclosed in table I, application no. 23, columns 5 and 7.

[6094] for the disclosure of the paragraphs [0027.0.0.22] to [0029.0.0.22] see paragraphs [0027.0.0.0] and [0029.0.0.0] above.

[6095] Alternatively, nucleic acid sequences coding for the transit peptides may be chemically synthesized either in part or wholly according to structure of transit peptide sequences disclosed in the prior art. Said natural or chemically synthesized sequences can be directly linked to the sequences encoding the mature protein or via a linker nucleic acid sequence, which may be typically less than 500 base pairs, preferably less than 450, 400, 350, 300, 250 or 200 base pairs, more preferably less than 150, 100, 90, 80, 70, 60, 50, 40 or 30 base pairs and most preferably less than 25, 20, 15, 12, 9, 6 or 3 base pairs in length and are in frame to the coding sequence. Furthermore favorable nucleic acid sequences encoding transit peptides may comprise sequences derived from more than one biological and/or chemical source and may include a nucleic acid sequence derived from the amino-terminal region of the mature protein, which in its native state is linked to the transit peptide. In a preferred embodiment of the invention said amino-terminal region of the mature protein is typically less than 150 amino acids, preferably less than 140, 130, 120, 110, 100 or 90 amino acids, more preferably less than 80, 70, 60, 50, 40, 35, 30, 25 or 20 amino acids and most preferably less than 19, 18, 17, 16, 15, 14, 13, 12, 11 or 10 amino acids in length. But even shorter or longer stretches are also possible. In addition target sequences, which facilitate the transport of proteins to other cell compartments such as the vacuole, endoplasmic reticulum, Golgi complex, glyoxysomes, peroxisomes or mitochondria may be also part of the inventive nucleic acid sequence. The proteins translated from said inventive nucleic acid sequences are a kind of fusion proteins that means the nucleic acid sequences encoding the transit peptide for example the ones shown in table V, preferably the last one of the table are joint to the nucleic acid sequences shown in table I, application no. 23, columns 5 and 7. The person skilled in the art is able to join said sequences in a functional manner. Advantageously the transit peptide part is cleaved off from the protein part shown in table II, application no. 23, columns 5 and 7 during the transport preferably into the plastids. All products of the cleavage of the preferred transit peptide shown in the last line of table V have preferably the N-terminal amino acid sequences QIA CSS or QIA EFQLTT in front of the start methionine of the protein mentioned in table II, application no. 23, columns 5 and 7. Other short amino acid sequences of an range of 1 to 20 amino acids preferable 2 to 15 amino acids, more preferable 3 to 10 amino acids most preferably 4 to 8 amino acids are also possible in front of the start methionine of the protein mentioned in table II, application no. 23, columns 5 and 7. In case of the amino acid sequence QIA CSS the three amino acids in front of the start methionine are stemming from the LIC (=ligatation independent cloning) cassette. Said short amino acid sequence is preferred in the case of the expression of E. coli genes. In case of the amino acid sequence QIA EFQLTT the six amino acids in front of the start methionine are stemming from the LIC cassette. Said short amino acid sequence is preferred in the case of the expression of S. cerevisiae genes. The skilled worker knows that other short sequences are also useful in the expression of the genes mentioned in table I, application no. 23, columns 5 and 7. Furthermore the skilled worker is aware of the fact that there is not a need for such short sequences in the expression of the genes.

[6096] Table V: Examples of transit peptides disclosed by von Heijne et al. for the disclosure of Table V see paragraph [0030.2.0.0] above.

[6097] Alternatively to the targeting of the sequences shown in table II, application no. 23, columns 5 and 7 preferably of sequences in general encoded in the nucleus with the aid of the targeting sequences mentioned for example in table V alone or in combination with other targeting sequences preferably into the plastids, the nucleic acids of the invention can directly introduced into the plastidal genome. Therefore in a preferred embodiment the nucleic acid sequences shown in table I, application no. 23, columns 5 and 7 are directly introduced and expressed in plastids.

The term “introduced” in the context of this specification shall mean the insertion of a nucleic acid sequence into the organism by means of a “transfection”, “transduction” or preferably by “transformation”.
A plastid, such as a chloroplast, has been “transformed” by an exogenous (preferably foreign) nucleic acid sequence if nucleic acid sequence has been introduced into the plastid that means that this sequence has crossed the membrane or the membranes of the plastid. The foreign DNA may be integrated (covalently linked) into plastid DNA making up the genome of the plastid, or it may remain unintegrated (e.g., by including a chloroplast origin of replication). “Stably” integrated DNA sequences are those, which are inherited through plastid replication, thereby transferring new plastids, with the features of the integrated DNA sequence to the progeny.

[6098] for the disclosure of the paragraphs [0030.2.0.22] and [0030.3.0.22] see paragraphs [0030.2.0.0] and [0030.3.0.0] above.

[6099] For the inventive process it is of great advantage that by transforming the plastids the intraspecies specific transgene flow is blocked, because a lot of species such as corn, cotton and rice have a strict maternal inheritance of plastids. By placing the genes specified in table I, application no. 23, columns 5 and 7 or active fragments thereof in the plastids of plants, these genes will not be present in the pollen of said plants.

A further preferred embodiment of the invention relates to the use of so called “chloroplast localization sequences”, in which a first RNA sequence or molecule is capable of transporting or “chaperoning” a second RNA sequence, such as a RNA sequence transcribed from the sequences depicted in table I, application no. 23, columns 5 and 7 or a sequence encoding a protein, as depicted in table II, application no. 23, columns 5 and 7, from an external environment inside a cell or outside a plastid into a chloroplast. In one embodiment the chloroplast localization signal is substantially similar or complementary to a complete or intact viroid sequence. The chloroplast localization signal may be encoded by a DNA sequence, which is transcribed into the chloroplast localization RNA. The term “viroid” refers to a naturally occurring single stranded RNA molecule (Flores, C R Acad Sci III. 2001 October; 324(10): 943-52). Viroids usually contain about 200-500 nucleotides and generally exist as circular molecules. Examples of viroids that contain chloroplast localization signals include but are not limited to ASBVd, PLMVd, CChMVd and ELVd. The viroid sequence or a functional part of it can be fused to the sequences depicted in table I, application no. 23, columns 5 and 7 or a sequence encoding a protein, as depicted in table II, application no. 23, columns 5 and 7 in such a manner that the viroid sequence transports a sequence transcribed from a sequence as depicted in table I, application no. 23, columns 5 and 7 or a sequence encoding a protein as depicted in table II, application no. 23, columns 5 and 7 into the chloroplasts. A preferred embodiment uses a modified ASBVd (Navarro et al., Virology. 2000 Mar. 1; 268(1): 218-25).
In a further specific embodiment the protein to be expressed in the plastids such as the proteins depicted in table II, application no. 23, columns 5 and 7 are encoded by different nucleic acids. Such a method is disclosed in WO 2004/040973, which shall be incorporated by reference. WO 2004/040973 teaches a method, which relates to the translocation of an RNA corresponding to a gene or gene fragment into the chloroplast by means of a chloroplast localization sequence. The genes, which should be expressed in the plant or plants cells, are split into nucleic acid fragments, which are introduced into different compartments in the plant e.g. the nucleus, the plastids and/or mitochondria. Additionally plant cells are described in which the chloroplast contains a ribozyme fused at one end to an RNA encoding a fragment of a protein used in the inventive process such that the ribozyme can trans-splice the translocated fusion RNA to the RNA encoding the gene fragment to form and as the case may be reunite the nucleic acid fragments to an intact mRNA encoding a functional protein for example as disclosed in table II, application no. 23, columns 5 and 7.

[6100] In a preferred embodiment of the invention the nucleic acid sequences as shown in table I, application no. 23, columns 5 and 7 used in the inventive process are transformed into plastids, which are metabolical active. Those plastids should preferably maintain at a high copy number in the plant or plant tissue of interest, most preferably the chloroplasts found in green plant tissues, such as leaves or cotyledons or in seeds.

[6101] For a good expression in the plastids the nucleic acid sequences as shown in table I, application no. 23, columns 5 and 7 are introduced into an expression cassette using a preferably a promoter and terminator, which are active in plastids preferably a chloroplast promoter. Examples of such promoters include the psbA promoter from the gene from spinach or pea, the rbcL promoter, and the atpB promoter from corn.

[6102] for the disclosure of the paragraphs [0031.0.0.22] and [0032.0.0.22] see paragraphs [0031.0.0.0] and [0032.0.0.0] above.

[6103] Advantageously the process for the production of the fine chemical leads to an enhanced production of the fine chemical. The terms “enhanced” or “increase” mean at least a 10%, 20%, 30%, 40% or 50%, preferably at least 60%, 70%, 80%, 90% or 100%, more preferably 150%, 200%, 300%, 400% or 500% higher production of the fine chemical in comparison to the reference as defined below, e.g. that means in comparison to an organism without the aforementioned modification of the activity of a protein as shown in table II, application no. 23, column 3. Preferably the modification of the activity of a protein as shown in table II, application no. 23, column 3 or their combination can be achieved by joining the protein to a transit peptide.

[6104] Surprisingly it was found, that the transgenic expression of the Saccharomyces cerevisiae protein as shown in table II, application no. 23, column 3 in plastids of a plant such as Arabidopsis thaliana for example through the linkage to at least one targeting sequence for example as mentioned in table V conferred an increase in the fine chemical content of the transformed plants.

[6105] for the disclosure of this paragraph see paragraph [0035.0.0.0] above.

[6106] The sequence of b3708 (Accession number WZEC) from Escherichia coli has been published in Blattner et al., Science 277 (5331), 1453-1474 (1997), and its activity is being defined as “tryptophan deaminase, PLP-dependent”. Accordingly, in one embodiment, the process of the present invention comprises the use of a “tryptophan deaminase, PLP-dependent” or its homolog, e.g. as shown herein, for the production of the fine chemical, meaning of galactolipids, in particular for increasing the amount of galactolipids in free or bound form in an organism or a part thereof, as mentioned. In one embodiment, in the process of the present invention the activity of a b3708 protein is increased or generated, e.g. from Escherichia coli or a homolog thereof, preferably linked at least to one transit peptide as mentioned for example in table V.

In another embodiment, in the process of the present invention the activity of a b3708 protein is increased or generated in a subcellular compartment of the organism or organism cell such as in an organelle like a plastid or mitochondria.

[6107] In one embodiment, the homolog of the b3708 is a homolog having said activity and being derived from bacteria. In one embodiment, the homolog of the b3708 is a homolog having said activity and being derived from Proteobacteria. In one embodiment, the homolog of the b3708 is a homolog having said activity and being derived from Gammaproteobacteria. In one embodiment, the homolog of the b3708 is a homolog having said activity and being derived from Enterobacteriales. In one embodiment, the homolog of the b3708 is a homolog having said activity and being derived from Enterobacteriaceae. In one embodiment, the homolog of the b3708 is a homolog having said activity and being derived from Escherichia, preferably from Escherichia coli.

[6108] for the disclosure of this paragraph see paragraph [0038.0.0.0] above.

[6109] In accordance with the invention, a protein or polypeptide has the “activity of an protein as shown in table II, application no. 23, column 3” if its de novo activity, or its increased expression directly or indirectly leads to an increased in the fine chemical level in the organism or a part thereof, preferably in a cell of said organism, more preferably in an organelle such as a plastid or mitochondria of said organism and the protein has the above mentioned activities of a protein as shown in table II, application no. 23, column 3, preferably in the event the nucleic acid sequences encoding said proteins is functionally joined to the nucleic acid sequence of a transit peptide. Throughout the specification the activity or preferably the biological activity of such a protein or polypeptide or an nucleic acid molecule or sequence encoding such protein or polypeptide is identical or similar if it still has the biological or enzymatic activity of a protein as shown in table II, application no. 23, column 3, or which has at least 10% of the original enzymatic activity, preferably 20%, particularly preferably 30%, most particularly preferably 40% in comparison to a protein as shown in table II, application no. 23, column 3 of Saccharomyces cerevisiae.

[6110] for the disclosure of the paragraphs [0040.0.0.22] to [0047.0.0.22] see paragraphs [0040.0.0.0] to [0047.0.0.0] above.

[6111] Preferably, the reference, control or wild type differs form the subject of the present invention only in the cellular activity, preferably of the plastidial activity of the polypeptide of the invention, e.g. as result of an increase in the level of the nucleic acid molecule of the present invention or an increase of the specific activity of the polypeptide of the invention, e.g. by or in the expression level or activity of an protein having the activity of a protein as shown in table II, application no. 23, column 3 its biochemical or genetical causes and the increased amount of the fine chemical.

[6112] for the disclosure of the paragraphs [0049.0.0.22] to [0051.0.0.22] see paragraphs [0049.0.0.0] to [0051.0.0.0] above.

[6113] For example, the molecule number or the specific activity of the polypeptide or the nucleic acid molecule may be increased. Larger amounts of the fine chemical can be produced if the polypeptide or the nucleic acid of the invention is expressed de novo in an organism lacking the activity of said protein, preferably the nucleic acid molecules as mentioned in table I, application no. 23, columns 5 and 7 alone or preferably in combination with a transit peptide for example as mentioned in table V or in another embodiment by introducing said nucleic acid molecules into an organelle such as an plastid or mitochondria in the transgenic organism. However, it is also possible to modify the expression of the gene which is naturally present in the organisms, for example by integrating a nucleic acid sequence, encoding a plastidic targeting sequence in front (5 prime) of the coding sequence, leading to a functional preprotein, which is directed for example to the plastids.

[6114] for the disclosure of the paragraphs [0053.0.0.22] to [0058.0.0.22] see paragraphs [0053.0.0.0] to [0058.0.0.0] above.

[6115] In case the activity of the Escherichia coli protein b3708 or its homologs, e.g. a “tryptophan deaminase, PLP-dependent” is increased advantageously in an organelle such as a plastid or mitochondria, preferably, in one embodiment an increase of the fine chemical, preferably of galactolipids in free or bound form between 14% and 34% or more is conferred.

[6116] In case the activity of the Escherichia coli proteins b3708 or their homologs, are increased advantageously in an organelle such as a plastid or mitochondria, preferably an increase of the fine chemical such as glycolipids containing galactose or glucose or mixtures thereof in free or bound form is conferred.

[6117] for the disclosure of the paragraphs [0061.0.0.22] and [0062.0.0.22] see paragraphs [0061.0.0.0] and [0062.0.0.0] above.

[6118] A protein having an activity conferring an increase in the amount or level of the fine chemical, preferably upon targeting to the plastids preferably has the structure of the polypeptide described herein, in particular of the polypeptides comprising the consensus sequence shown in table IV, application no. 23, column 7 or of the polypeptide as shown in the amino acid sequences as disclosed in table II, application no. 23, columns 5 and 7 or the functional homologues thereof as described herein, or is encoded by the nucleic acid molecule characterized herein or the nucleic acid molecule according to the invention, for example by the nucleic acid molecule as shown in table I, application no. 23, columns 5 and 7 or its herein described functional homologues and has the herein mentioned activity.

[6119] /

[6120] for the disclosure of the paragraphs [0065.0.0.22] and [0066.0.0.22] see paragraphs [0065.0.0.0] and [0066.0.0.0] above.

[6121] In one embodiment, the process of the present invention comprises one or more of the following steps
[6122] a) stabilizing a protein conferring the increased expression of a protein encoded by the nucleic acid molecule of the invention or of the polypeptide of the invention, e.g. of a polypeptide having the activity of a protein as indicated in table II, application no. 23, columns 5 and 7 or its homologs activity having herein-mentioned glycolipids containing galactose, glucose, mannose, rhamnose or xylose, more preferably a galactolipid containing galactose or glucose, most preferably a galactolipid containing galactose increasing activity; and/or
[6123] b) stabilizing a mRNA conferring the increased expression of a protein encoded by the nucleic acid molecule of the invention, which is in the sense of the invention a fusion of a nucleic acid sequence encoding a transit peptide and of a nucleic acid sequence as shown in table I, application no. 23, columns 5 and 7, e.g. a nucleic acid sequence encoding a polypeptide having the activity of a protein as indicated in table II, application no. 23, columns 5 and 7 or its homologs activity or of a mRNA encoding the polypeptide of the present invention having herein-mentioned glycolipids containing galactose, glucose, mannose, rhamnose or xylose, more preferably a galactolipid containing galactose or glucose, most preferably a galactolipid containing galactose increasing activity; and/or
[6124] c) increasing the specific activity of a protein conferring the increased expression of a protein encoded by the nucleic acid molecule of the invention or of the polypeptide of the present invention having herein-mentioned glycolipids containing galactose, glucose, mannose, rhamnose or xylose, more preferably a galactolipid containing galactose or glucose, most preferably a galactolipid containing galactose increasing activity, e.g. of a polypeptide having the activity of a protein as indicated in table II, application no. 23, columns 5 and 7 or its homologs activity, or decreasing the inhibitory regulation of the polypeptide of the invention; and/or
[6125] d) generating or increasing the expression of an endogenous or artificial transcription factor mediating the expression of a protein conferring the increased expression of a protein encoded by the nucleic acid molecule of the invention or of the polypeptide of the invention having herein-mentioned glycolipids containing galactose, glucose, mannose, rhamnose or xylose, more preferably a galactolipid containing galactose or glucose, most preferably a galactolipid containing galactose increasing activity, e.g. of a polypeptide having the activity of a protein as indicated in table II, application no. 23, columns 5 and 7 or its homologs activity; and/or
[6126] e) stimulating activity of a protein conferring the increased expression of a protein encoded by the nucleic acid molecule of the present invention or a polypeptide of the present invention having herein-mentioned glycolipids containing galactose, glucose, mannose, rhamnose or xylose, more preferably a galactolipid containing galactose or glucose, most preferably a galactolipid containing galactose increasing activity, e.g. of a polypeptide having the activity of a protein as indicated in table II, application no. 23, columns 5 and 7 or its homologs activity, by adding one or more exogenous inducing factors to the organisms or parts thereof; and/or
[6127] f) expressing a transgenic gene encoding a protein conferring the increased expression of a polypeptide encoded by the nucleic acid molecule of the present invention or a polypeptide of the present invention, having herein-mentioned glycolipids containing galactose, glucose, mannose, rhamnose or xylose, more preferably a galactolipid containing galactose or glucose, most preferably a galactolipid containing galactose increasing activity, e.g. of a polypeptide having the activity of a protein as indicated in table II, application no. 23, columns 5 and 7 or its homologs activity, and/or
[6128] g) increasing the copy number of a gene conferring the increased expression of a nucleic acid molecule encoding a polypeptide encoded by the nucleic acid molecule of the invention or the polypeptide of the invention having herein-mentioned glycolipids containing galactose, glucose, mannose, rhamnose or xylose, more preferably a galactolipid containing galactose or glucose, most preferably a galactolipid containing galactose increasing activity, e.g. of a polypeptide having the activity of a protein as indicated in table II, application no. 23, columns 5 and 7 or its homologs activity; and/or
[6129] h) increasing the expression of the endogenous gene encoding the polypeptide of the invention, e.g. a polypeptide having the activity of a protein as indicated in table II, application no. 23, columns 5 and 7 or its homologs activity, by adding positive expression or removing negative expression elements, e.g. homologous recombination can be used to either introduce positive regulatory elements like for plants the 35S enhancer into the promoter or to remove repressor elements form regulatory regions. Further gene conversion methods can be used to disrupt repressor elements or to enhance to activity of positive elements. Positive elements can be randomly introduced in plants by T-DNA or transposon mutagenesis and lines can be identified in which the positive elements have be integrated near to a gene of the invention, the expression of which is thereby enhanced; and/or
[6130] i) modulating growth conditions of an organism in such a manner, that the expression or activity of the gene encoding the protein of the invention or the protein itself is enhanced for example microorganisms or plants can be grown for example under a higher temperature regime leading to an enhanced expression of heat shock proteins, which can lead an enhanced fine chemical production; and/or
[6131] j) selecting of organisms with especially high activity of the proteins of the invention from natural or from mutagenized resources and breeding them into the target organisms, eg the elite crops; and/or
[6132] k) directing a protein encoded by the nucleic acid molecule of the invention or of the polypeptide of the present invention having herein-mentioned glycolipids containing galactose, glucose, mannose, rhamnose or xylose, more preferably a galactolipid containing galactose or glucose, most preferably a galactolipid containing galactose increasing activity, e.g. of polypeptide having the activity of a protein as indicated in table II, application no. 23, columns 5 and 7 or its homologs activity, to the plastids by the addition of a plastidial targeting sequence; and/or
[6133] l) generating the expression of a protein encoded by the nucleic acid molecule of the invention or of the polypeptide of the present invention having herein-mentioned glycolipids containing galactose, glucose, mannose, rhamnose or xylose, more preferably a galactolipid containing galactose or glucose, most preferably a galactolipid containing galactose increasing activity, e.g. of a polypeptide having the activity of a protein as indicated in table II, application no. 23, columns 5 and 7 or its homologs activity in plastids by the stable or transient transformation advantageously stable transformation of organelles preferably plastids with an inventive nucleic acid sequence preferably in form of an expression cassette containing said sequence leading to the plastidial expression of the nucleic acids or polypeptides of the invention; and/or
[6134] m) generating the expression of a protein encoded by the nucleic acid molecule of the invention or of the polypeptide of the present invention having herein-mentioned glycolipids containing galactose, glucose, mannose, rhamnose or xylose, more preferably a galactolipid containing galactose or glucose, most preferably a galactolipid containing galactose increasing activity, e.g. of a polypeptide having the activity of a protein as indicated in table II, application no. 23, columns 5 and 7 or its homologs activity in plastids by integration of a nucleic acid of the invention into the plastidal genome under control of preferable a plastidial promoter.

[6135] Preferably, said mRNA is the nucleic acid molecule of the present invention and/or the protein conferring the increased expression of a protein encoded by the nucleic acid molecule of the present invention alone or link to a transit nucleic acid sequence or transit peptide encoding nucleic acid sequence or the polypeptide having the herein mentioned activity, e.g. conferring the increase of the fine chemical after increasing the expression or activity of the encoded polypeptide preferably in organelles such as plastids or having the activity of a polypeptide having an activity as the protein as shown in table II, application no. 23, column 3 or its homologs. Preferably the increase of the fine chemical takes place in plastids.

[6136] for the disclosure of the paragraphs [0069.0.0.22] to [0079.0.0.22] see paragraphs [0069.0.0.0] to [0079.0.0.0] above.

[6137] The activation of an endogenous polypeptide having above-mentioned activity, e.g. having the activity of a protein as shown in table II, application no. 23, column 3 or of the polypeptide of the invention, e.g. conferring the increase of the fine chemical after increase of expression or activity in the cytsol and/or in an organelle like a plastid, preferentially in the plastid, can also be increased by introducing a synthetic transcription factor, which binds close to the coding region of the gene encoding the protein as shown in table II, application no. 23, column 3 and activates its transcription. A chimeric zinc finger protein can be constructed, which comprises a specific DNA-binding domain and an activation domain as e.g. the VP16 domain of Herpes Simplex virus. The specific binding domain can bind to the regulatory region of the gene encoding the protein as shown in table II, application no. 23, column 3. The expression of the chimeric transcription factor in a organism, in particular in a plant, leads to a specific expression of the protein as shown in table II, application no. 23, column 3, see e.g. in WO01/52620, Oriz, Proc. Natl. Acad. Sci. USA, 2002, Vol. 99, 13290 or Guan, Proc. Natl. Acad. Sci. USA, 2002, Vol. 99, 13296.

[6138] for the disclosure of the paragraphs [0081.0.0.22] to [0084.0.0.22] see paragraphs [0081.0.0.0] to [0084.0.0.0] above.

[6139] Owing to the introduction of a gene or a plurality of genes conferring the expression of the nucleic acid molecule of the invention or the nucleic acid molecule used in the method of the invention or the polypeptide of the invention or the polypeptide used in the method of the invention as described below, for example the nucleic acid construct mentioned below into an organism alone or in combination with other genes, it is possible not only to increase the biosynthetic flux towards the end product, but also to increase, modify or create de novo an advantageous, preferably novel metabolites composition in the organism, e.g. glycolipids containing galactose, glucose, mannose, rhamnose or xylose, more preferably a galactolipid containing galactose or glucose, most preferably a galactolipid containing galactose and mixtures thereof.

[6140] for the disclosure of this paragraph see paragraph [0086.0.0.0] above.

[6141] By influencing the metabolism thus, it is possible to produce, in the process according to the invention, further advantageous compounds. Examples of such compounds are, in addition to glycolipids containing galactose, glucose, mannose, rhamnose or xylose, more preferably a galactolipid containing galactose or glucose, most preferably a galactolipid containing galactose compounds such as other glycolipids such as glycosphingolipids, sulfoglycosphingolipids, phosphoglycosphingolipids, glycophosphatidyl inositol, vitamins, amino acids or fatty acids.

[6142] Accordingly, in one embodiment, the process according to the invention relates to a process, which comprises:
[6143] a) providing a non-human organism, preferably a microorganism, a non-human animal, a plant or animal cell, a plant or animal tissue or a plant, more preferably a microorganism, a plant or a plant tissue;
[6144] b) increasing the activity of a protein as shown in table II, application no. 23, column 3 or of a polypeptide being encoded by the nucleic acid molecule of the present invention and described below, e.g. conferring an increase of the fine chemical in the organism, preferably in the microorganism, the non-human animal, the plant or animal cell, the plant or animal tissue or the plant, more preferably a microorganism, a plant or a plant tissue, in the cytsol or in the plastids, preferentially in the plastids,
[6145] c) growing the organism, preferably the microorganism, the non-human animal, the plant or animal cell, the plant or animal tissue or the plant under conditions which permit the production of the fine chemical in the organism, preferably the microorganism, the plant cell, the plant tissue or the plant; and
[6146] d) if desired, recovering, optionally isolating, the free and/or bound the fine chemical and, optionally further free and/or bound amino acids synthesized by the organism, the microorganism, the non-human animal, the plant or animal cell, the plant or animal tissue or the plant.

[6147] The organism, in particular the microorganism, non-human animal, the plant or animal cell, the plant or animal tissue or the plant is advantageously grown in such a way that it is not only possible to recover, if desired isolate the free or bound the fine chemical or the free and bound the fine chemical but as option it is also possible to produce, recover and, if desired isolate, other free or/and bound glycolipids such as glycosphingolipids, sulfoglycosphingolipids, phosphoglycosphingolipids, glycophosphatidyl inositol or mixtures thereof.

The fermentation broth, fermentation products, plants or plant products can be purified in the customary manner by hydrolysis with strong bases, extraction and crystallization or via thin layer chromatography and other methods known to the person skilled in the art and described herein below. Products of these different work-up procedures are fatty acids or fatty acid compositions which still comprise fermentation broth, plant particles and cell components in different amounts, advantageously in the range of from 0 to 99% by weight, preferably below 80% by weight, especially preferably between below 50% by weight.

[6148] for the disclosure of the paragraphs [0090.0.0.22] to [0097.0.0.21] see paragraphs [0090.0.0.0] to [0097.0.0.0] above.

[6149] With regard to the nucleic acid sequence as depicted a nucleic acid construct which contains a nucleic acid sequence mentioned herein or an organism (=transgenic organism) which is transformed with said nucleic acid sequence or said nucleic acid construct, “transgene” means all those constructs which have been brought about by genetic manipulation methods, preferably in which either
[6150] a) the nucleic acid sequence as shown in table I, application no. 23, columns 5 and 7 or a derivative thereof, or
[6151] b) a genetic regulatory element, for example a promoter, which is functionally linked to the nucleic acid sequence as shown table I, application no. 23, columns 5 and 7 or a derivative thereof, or
[6152] c) (a) and (b)
   is/are not present in its/their natural genetic environment or has/have been modified by means of genetic manipulation methods, it being possible for the modification to be, by way of example, a substitution, addition, deletion, inversion or insertion of one or more nucleotide. “Natural genetic environment” means the natural chromosomal locus in the organism of origin or the presence in a genomic library. In the case of a genomic library, the natural, genetic environment of the nucleic acid sequence is preferably at least partially still preserved. The environment flanks the nucleic acid sequence at least on one side and has a sequence length of at least 50 bp, preferably at least 500 bp, particularly preferably at least 1000 bp, very particularly preferably at least 5000 bp.

[6153] The use of the nucleic acid sequence according to the invention or of the nucleic acid construct according to the invention for the generation of transgenic plants is therefore also subject matter of the invention. As mentioned above the inventive nucleic acid sequence consists advantageously of the nucleic acid sequences as depicted in the sequence protocol and disclosed in table I, application no. 23, columns 5 and 7 joined to a nucleic acid sequence encoding a transit peptide, or a targeting nucleic acid sequence which directs the nucleic acid sequences disclosed in table I, application no. 23, columns 5 and 7 to the organelle preferentially the plastids. Alternatively the inventive nucleic acids sequences consist advantageously of the nucleic acid sequences as depicted in the sequence protocol and disclosed in table I, application no. 23, columns 5 and 7 joined preferably to a nucleic acids sequence mediating the stable integration of nucleic acids into the plastidial genome and optionally sequences mediating the transcription of the sequence in the plastidial compartment. A transient expression is in principal also desirable and possible.

[6154] for the disclosure of this paragraph see paragraph [0100.0.0.0] above.

[6155] In an advantageous embodiment of the invention, the organism takes the form of a plant whose glycolipid content is modified advantageously owing to the nucleic acid molecule of the present invention expressed. This is important for plant breeders since, for example, the nutritional value of plants for animals is dependent on the abovementioned glycolipids containing galactose, glucose, mannose, rhamnose or xylose, more preferably a galactolipid containing galactose or glucose, most preferably a galactolipid containing galactose and the general amount of glycolipids containing galactose, glucose, mannose, rhamnose or xylose, more preferably a galactolipid containing galactose or glucose, most preferably a galactolipid containing galactose in feed. After the activity of the protein as shown in table II, application no. 23, column 3 has been increased or generated, or after the expression of nucleic acid molecule or polypeptide according to the invention has been generated or increased, the transgenic plant generated thus is grown on or in a nutrient medium or else in the soil and subsequently harvested.

[6156] for the disclosure of the paragraphs [0102.0.0.22] to [0110.0.0.22] see paragraphs [0102.0.0.0] to [0110.0.0.0] above.

[6157] In a preferred embodiment, the fine chemical (glycolipid) is produced in accordance with the invention and, if desired, is isolated. The production of further glycolipids such as glycosphingolipids, sulfoglycosphingolipids, phosphoglycosphingolipids, glycophosphatidyl inositol or mixtures thereof or mixtures of other glycolipids by the process according to the invention is advantageous. It may be advantageous to increase the pool of free glycolipids containing galactose, glucose, mannose, rhamnose or xylose, more preferably a galactolipid containing galactose or glucose, most preferably a galactolipid containing galactose and others as aforementioned in the transgenic organisms by the process according to the invention in order to isolate high amounts of the pure fine chemical.

[6158] In another preferred embodiment of the invention a combination of the increased expression of the nucleic acid sequence or the protein of the invention together with the transformation of a nucleic acid encoding a protein or polypeptide for example another gene of the glycolipids containing galactose, glucose, mannose, rhamnose or xylose, more preferably a galactolipid containing galactose or glucose, most preferably a galactolipid containing galactose biosynthesis, or a compound, which functions as a sink for the desired glycolipids containing galactose, glucose, mannose, rhamnose or xylose, more preferably a galactolipid containing galactose or glucose, most preferably a galactolipid containing galactose in the organism is useful to increase the production of the respective fine chemical.

[6159] In a preferred embodiment, the respective fine chemical is produced in accordance with the invention and, if desired, is isolated. The production of further glycolipids other then glycolipids containing galactose, glucose, mannose, rhamnose or xylose, more preferably a galactolipid containing galactose or glucose, most preferably a galactolipid containing galactose or compounds for which the respective fine chemical is a biosynthesis precursor compounds, e.g. carbohydrates monosaccharides or sugar alcohols, or mixtures thereof or mixtures of other glycolipids, in particular of glycosphingolipids, sulfoglycosphingolipids, phosphoglycosphingolipids or glycophosphatidyl inositol, by the process according to the invention is advantageous.

[6160] In the case of the fermentation of microorganisms, the abovementioned desired fine chemical may accumulate in the medium and/or the cells. If microorganisms are used in the process according to the invention, the fermentation broth can be processed after the cultivation. Depending on the requirement, all or some of the biomass can be removed from the fermentation broth by separation methods such as, for example, centrifugation, filtration, decanting or a combination of these methods, or else the biomass can be left in the fermentation broth. The fermentation broth can subsequently be reduced, or concentrated, with the aid of known methods such as, for example, rotary evaporator, thin-layer evaporator, falling film evaporator, by reverse osmosis or by nanofiltration. Afterwards advantageously further compounds for formulation can be added such as corn starch or silicates. This concentrated fermentation broth advantageously together with compounds for the formulation can subsequently be processed by lyophilization, spray drying, and spray granulation or by other methods. Preferably the respective fine chemical comprising compositions are isolated from the organisms, such as the microorganisms or plants or the culture medium in or on which the organisms have been grown, or from the organism and the culture medium, in the known manner, for example via extraction, distillation, crystallization, chromatography or a combination of these methods. These purification methods can be used alone or in combination with the aforementioned methods such as the separation and/or concentration methods.

[6161] Transgenic plants which comprise the fine chemical such as glycolipids containing galactose, glucose, mannose, rhamnose or xylose, more preferably a galactolipid containing galactose or glucose, most preferably a galactolipid containing galactose synthesized in the process according to the invention can advantageously be marketed directly without there being any need for the fine chemical synthesized to be isolated. Plants for the process according to the invention are listed as meaning intact plants and all plant parts, plant organs or plant parts such as leaf, stem, seeds, root, tubers, anthers, fibers, root hairs, stalks, embryos, calli, cotelydons, petioles, flowers, harvested material, plant tissue, reproductive tissue and cell cultures which are derived from the actual transgenic plant and/or can be used for bringing about the transgenic plant. In this context, the seed comprises all parts of the seed such as the seed coats, epidermal cells, seed cells, endosperm or embryonic tissue.

However, the respective fine chemical produced in the process according to the invention can also be isolated from the organisms, advantageously plants, (in the form of their organic extracts, e.g. alcohol, or other organic solvents or water containing extract and/or free glycolipids containing galactose, glucose, mannose, rhamnose or xylose, more preferably a galactolipid containing galactose or glucose, most preferably a galactolipid containing galactose or other extracts. The respective fine chemical produced by this process can be obtained by harvesting the organisms, either from the medium in which they grow, or from the field. This can be done via pressing or extraction of the plant parts. To increase the efficiency of extraction it is beneficial to clean, to temper and if necessary to hull and to flake the plant material. To allow for greater ease of disruption of the plant parts, specifically the seeds, they can previously be comminuted, steamed or roasted. Seeds, which have been pretreated in this manner can subsequently be pressed or extracted with solvents such as organic solvents like warm hexane or water or mixtures of organic solvents. The solvent is subsequently removed. In the case of microorganisms, the latter are, after harvesting, for example extracted directly without further processing steps or else, after disruption, extracted via various methods with which the skilled worker is familiar. Thereafter, the resulting products can be processed further, i.e. degummed and/or refined. In this process, substances such as the plant mucilages and suspended matter can be first removed. What is known as desliming can be affected enzymatically or, for example, chemico-physically by addition of acid such as phosphoric acid.
Well-established approaches for the harvesting of cells include filtration, centrifugation and coagulation/flocculation as described herein. Of the residual hydrocarbon, adsorbed on the cells, has to be removed. Solvent extraction or treatment with surfactants have been suggested for this purpose. However, it can be advantageous to avoid this treatment as it can result in cells devoid of most carotenoids.

[6162] The identity and purity of the compound(s) isolated can be determined by prior-art techniques. They encompass high-performance liquid chromatography (HPLC), gas chromatography (GC), spectroscopic methods, mass spectrometry (MS), staining methods, thin-layer chromatography, NIRS, enzyme assays or microbiological assays. These analytical methods are compiled in: Patek et al. (1994) Appl. Environ. Microbiol. 60:133-140; Malakhova et al. (1996) Biotekhnologiya 11 27-32; and Schmidt et al. (1998) Bioprocess Engineer. 19:67-70. Ulmann's Encyclopedia of Industrial Chemistry (1996) Bd. A27, VCH Weinheim, pp. 89-90, pp. 521-540, pp. 540-547, pp. 559-566, 575-581 and pp. 581-587; Michal, G (1999) Biochemical Pathways: An Atlas of Biochemistry and Molecular Biology, John Wiley and Sons; Fallon, A. et al. (1987) Applications of HPLC in Biochemistry in: Laboratory Techniques in Biochemistry and Molecular Biology, vol. 17.

[6163] In yet another aspect, the invention also relates to harvestable parts and to propagation material of the transgenic plants according to the invention which either contain transgenic plant cells expressing a nucleic acid molecule according to the invention or which contains cells which show an increased cellular activity of the polypeptide of the invention or the polypeptide used in the method of the invention, e.g. an increased expression level or higher activity of the described protein.

Harvestable parts can be in principle any useful parts of a plant, for example, flowers, pollen, seedlings, tubers, leaves, stems, fruit, seeds, roots etc. Propagation material includes, for example, seeds, fruits, cuttings, seedlings, tubers, rootstocks etc. Preferred are seeds, fruits, seedlings or tubers as harvestable or propagation material.

[6164] In a preferred embodiment, the present invention relates to a process for the production of the fine chemical comprising or generating in an organism or a part thereof, preferably in a cell compartment such as a plastid or mitochondria, the expression of at least one nucleic acid molecule comprising a nucleic acid molecule selected from the group consisting of:
[6165] a) nucleic acid molecule encoding, preferably at least the mature form, of the polypeptide shown in table II, application no. 23, columns 5 and 7 or a fragment thereof, which confers an increase in the amount of the fine chemical in an organism or a part thereof;
[6166] b) nucleic acid molecule comprising, preferably at least the mature form, of the nucleic acid molecule shown in table I, application no. 23, columns 5 and 7;
[6167] c) nucleic acid molecule whose sequence can be deduced from a polypeptide sequence encoded by a nucleic acid molecule of (a) or (b) as result of the degeneracy of the genetic code and conferring an increase in the amount of the fine chemical in an organism or a part thereof;
[6168] d) nucleic acid molecule encoding a polypeptide which has at least 50% identity with the amino acid sequence of the polypeptide encoded by the nucleic acid molecule of (a) to (c) and conferring an increase in the amount of the fine chemical in an organism or a part thereof;
[6169] e) nucleic acid molecule which hybridizes with a nucleic acid molecule of (a) to (c) under stringent hybridisation conditions and conferring an increase in the amount of the fine chemical in an organism or a part thereof;
[6170] f) nucleic acid molecule encoding a polypeptide, the polypeptide being derived by substituting, deleting and/or adding one or more amino acids of the amino acid sequence of the polypeptide encoded by the nucleic acid molecules (a) to (d), preferably to (a) to (c) and conferring an increase in the amount of the fine chemical in an organism or a part thereof;
[6171] g) nucleic acid molecule encoding a fragment or an epitope of a polypeptide which is encoded by one of the nucleic acid molecules of (a) to (e), preferably to (a) to (c) and conferring an increase in the amount of the fine chemical in an organism or a part thereof;
[6172] h) nucleic acid molecule comprising a nucleic acid molecule which is obtained by amplifying nucleic acid molecules from a cDNA library or a genomic library using the primers shown in table III, application no. 23, column 7 and conferring an increase in the amount of the fine chemical in an organism or a part thereof;
[6173] i) nucleic acid molecule encoding a polypeptide which is isolated, e.g. from an expression library, with the aid of monoclonal antibodies against a polypeptide encoded by one of the nucleic acid molecules of (a) to (h), preferably to (a) to (c), and conferring an increase in the amount of the fine chemical in an organism or a part thereof;
[6174] j) nucleic acid molecule which encodes a polypeptide comprising the consensus sequence shown in table IV, application no. 23, column 7 and conferring an increase in the amount of the fine chemical in an organism or a part thereof;
[6175] k) nucleic acid molecule comprising one or more of the nucleic acid molecule encoding the amino acid sequence of a polypeptide encoding a domain of the polypeptide shown in table II, application no. 23, columns 5 and 7 and conferring an increase in the amount of the fine chemical in an organism or a part thereof; and
[6176] l) nucleic acid molecule which is obtainable by screening a suitable library under stringent conditions with a probe comprising one of the sequences of the nucleic acid molecule of (a) to (k), preferably to (a) to (c), or with a fragment of at least 15 nt, preferably 20 nt, 30 nt, 50 nt, 100 nt, 200 nt or 500 nt of the nucleic acid molecule characterized in (a) to (k), preferably to (a) to (c), and conferring an increase in the amount of the fine chemical in an organism or a part thereof;
   or which comprises a sequence which is complementary thereto.

[6177] In one embodiment, the nucleic acid molecule used in the process of the invention distinguishes over the sequence indicated in table I A, application no. 23, columns 5 and 7 by one or more nucleotides. In one embodiment, the nucleic acid molecule used in the process of the invention does not consist of the sequence indicated in table I A, application no. 23, columns 5 and 7. In one embodiment, the nucleic acid molecule used in the process of the invention is less than 100%, 99.999%, 99.99%, 99.9% or 99% identical to a sequence indicated in table I A, application no. 23, columns 5 and 7. In another embodiment, the nucleic acid molecule does not encode a polypeptide of a sequence indicated in table II A, application no. 23, columns 5 and 7.

[6178] In one embodiment, the nucleic acid molecule used in the process of the invention distinguishes over the sequence indicated in table I B, application no. 23, columns 5 and 7, by one or more nucleotides. In one embodiment, the nucleic acid molecule used in the process of the invention does not consist of the sequence indicated in table I B, application no. 23, columns 5 and 7. In one embodiment, the nucleic acid molecule used in the process of the invention is less than 100%, 99.999%, 99.99%, 99.9% or 99% identical to a sequence indicated in table I B, application no. 23, columns 5 and 7. In another embodiment, the nucleic acid molecule does not encode a polypeptide of a sequence indicated in table II B, application no. 23, columns 5 and 7.

[6179] In one embodiment, the nucleic acid molecule used in the process distinguishes over the sequence shown in table I, application no. 23, columns 5 and 7 by one or more nucleotides or does not consist of the sequence shown in table I, application no. 23, columns 5 and 7. In one embodiment, the nucleic acid molecule of the present invention is less than 100%, 99.999%, 99.99%, 99.9% or 99% identical to the sequence shown in table I, application no. 23, columns 5 and 7. In another embodiment, the nucleic acid molecule does not encode a polypeptide of the sequence shown in table II, application no. 23, columns 5 and 7.

[6180] for the disclosure of the paragraphs [0118.0.0.22] to [0120.0.0.22] see paragraphs [0118.0.0.0] to [0120.0.0.0] above.

[6181] Nucleic acid molecules with the sequence shown in table I, application no. 23, columns 5 and 7, nucleic acid molecules which are derived from the amino acid sequences shown in table II, application no. 23, columns 5 and 7 or from polypeptides comprising the consensus sequence shown in table IV, application no. 23, column 7, or their derivatives or homologues encoding polypeptides with the enzymatic or biological activity of a protein as shown in table II, application no. 23, column 3 or conferring the fine chemical increase after increasing its expression or activity are advantageously increased in the process according to the invention by expression either in the cytsol or in an organelle such as a plastid or mitochondria or both, preferably in plastids.

[6182] for the disclosure of this paragraph see paragraph [0122.0.0.0] above.

[6183] Nucleic acid molecules, which are advantageous for the process according to the invention and which encode polypeptides with the activity of a protein as shown in table II, application no. 23, column 3 can be determined from generally accessible databases.

[6184] for the disclosure of this paragraph see paragraph [0124.0.0.0] above.

[6185] The nucleic acid molecules used in the process according to the invention take the form of isolated nucleic acid sequences, which encode polypeptides with the activity of the proteins as shown in table II, application no. 23, column 3 and conferring the fine chemical increase by expression either in the cytsol or in an organelle such as a plastid or mitochondria or both, preferably in plastids.

[6186] for the disclosure of the paragraphs [0126.0.0.22] to [0133.0.0.22] see paragraphs [0126.0.0.0] to [0133.0.0.0] above.

[6187] However, it is also possible to use artificial sequences, which differ in one or more bases from the nucleic acid sequences found in organisms, or in one or more amino acid molecules from polypeptide sequences found in organisms, in particular from the polypeptide sequences shown in table II, application no. 23, columns 5 and 7 or the functional homologues thereof as described herein, preferably conferring above-mentioned activity, i.e. conferring the fine chemical increase after increasing its activity, e.g. after increasing the activity of a protein as shown in table II, application no. 23, column 3 by for example expression either in the cytsol or in an organelle such as a plastid or mitochondria or both, preferably in plastids.

[6188] for the disclosure of the paragraphs [0135.0.0.22] to [0140.0.0.22] see paragraphs [0135.0.0.0] to [0140.0.0.0] above.

[6189] Synthetic oligonucleotide primers for the amplification, e.g. as shown in table III, application no. 23, column 7, by means of polymerase chain reaction can be generated on the basis of a sequence shown herein, for example the sequence shown in table I, application no. 23, columns 5 and 7 or the sequences derived from table II, application no. 23, columns 5 and 7.

[6190] Moreover, it is possible to identify conserved regions from various organisms by carrying out protein sequence alignments with the polypeptide used in the process of the invention, in particular with sequences of the polypeptide of the invention, from which conserved regions, and in turn, degenerate primers can be derived. Conserved regions are those, which show a very little variation in the amino acid in one particular position of several homologs from different origin. The consensus sequence shown in table IV, application no. 23, column 7 is derived from said alignments.

[6191] Degenerated primers can then be utilized by PCR for the amplification of fragments of novel proteins having above-mentioned activity, e.g. conferring the increase of the fine chemical after increasing the expression or activity or having the activity of a protein as shown in table II, application no. 23, column 3 or further functional homologs of the polypeptide of the invention from other organisms.

[6192] for the disclosure of the paragraphs [0144.0.0.22] to [0151.0.0.22] see paragraphs [0144.0.0.0] to [0151.0.0.0] above.

[6193] Polypeptides having above-mentioned activity, i.e. conferring the fine chemical increase, derived from other organisms, can be encoded by other DNA sequences which hybridize to the sequences shown in table I, application no. 23, columns 5 and 7, preferably of table I B, application no. 23, columns 5 and 7 under relaxed hybridization conditions and which code on expression for peptides having the glycolipids containing galactose, glucose, mannose, rhamnose or xylose, more preferably a galactolipid containing galactose or glucose, most preferably a galactolipid containing galactose increasing activity.

[6194] for the disclosure of the paragraphs [0153.0.0.22] to [0159.0.0.22] see paragraphs [0153.0.0.0] to [0159.0.0.0] above.

[6195] Further, the nucleic acid molecule of the invention comprises a nucleic acid molecule, which is a complement of one of the nucleotide sequences of above mentioned nucleic acid molecules or a portion thereof. A nucleic acid molecule which is complementary to one of the nucleotide sequences shown in table I, application no. 23, columns 5 and 7, preferably shown in table I B, application no. 23, columns 5 and 7 is one which is sufficiently complementary to one of the nucleotide sequences shown in table I, application no. 23, columns 5 and 7, preferably shown in table I B, application no. 23, columns 5 and 7 such that it can hybridize to one of the nucleotide sequences shown in table I, application no. 23, columns 5 and 7, preferably shown in table I B, application no. 23, columns 5 and 7, thereby forming a stable duplex. Preferably, the hybridisation is performed under stringent hybridization conditions. However, a complement of one of the herein disclosed sequences is preferably a sequence complement thereto according to the base pairing of nucleic acid molecules well known to the skilled person. For example, the bases A and G undergo base pairing with the bases T and U or C, resp. and visa versa. Modifications of the bases can influence the base-pairing partner.

[6196] The nucleic acid molecule of the invention comprises a nucleotide sequence which is at least about 30%, 35%, 40% or 45%, preferably at least about 50%, 55%, 60% or 65%, more preferably at least about 70%, 80%, or 90%, and even more preferably at least about 95%, 97%, 98%, 99% or more homologous to a nucleotide sequence shown in table I, application no. 23, columns 5 and 7, preferably shown in table I B, application no. 23, columns 5 and 7, or a portion thereof and preferably has above mentioned activity, in particular having a fine chemical increasing activity after increasing the activity or an activity of a gene product as shown in table II, application no. 23, column 3 by for example expression either in the cytsol or in an organelle such as a plastid or mitochondria or both, preferably in plastids.

[6197] The nucleic acid molecule of the invention comprises a nucleotide sequence which hybridizes, preferably hybridizes under stringent conditions as defined herein, to one of the nucleotide sequences shown in table I, application no. 23, columns 5 and 7, preferably shown in table I B, application no. 23, columns 5 and 7, or a portion thereof and encodes a protein having above-mentioned activity, e.g. conferring of a glycolipid increase by for example expression either in the cytsol or in an organelle such as a plastid or mitochondria or both, preferably in plastids, and optionally, the activity of a protein as shown in table II, application no. 23, column 3.

[6198] Moreover, the nucleic acid molecule of the invention can comprise only a portion of the coding region of one of the sequences shown in table I, application no. 23, columns 5 and 7, preferably shown in table I B, application no. 23, columns 5 and 7, for example a fragment which can be used as a probe or primer or a fragment encoding a biologically active portion of the polypeptide of the present invention or of a polypeptide used in the process of the present invention, i.e. having above-mentioned activity, e.g. conferring an increase of the fine chemical if its activity is increased by for example expression either in the cytsol or in an organelle such as a plastid or mitochondria or both, preferably in plastids. The nucleotide sequences determined from the cloning of the present protein-according-to-the-invention-encoding gene allows for the generation of probes and primers designed for use in identifying and/or cloning its homologues in other cell types and organisms. The probe/primer typically comprises substantially purified oligonucleotide. The oligonucleotide typically comprises a region of nucleotide sequence that hybridizes under stringent conditions to at least about 12, 15 preferably about 20 or 25, more preferably about 40, 50 or 75 consecutive nucleotides of a sense strand of one of the sequences set forth, e.g., in table I, application no. 23, columns 5 and 7, an anti-sense sequence of one of the sequences, e.g., set forth in table I, application no. 23, columns 5 and 7, preferably shown in table I B, application no. 23, columns 5 and 7, or naturally occurring mutants thereof. Primers based on a nucleotide of invention can be used in PCR reactions to clone homologues of the polypeptide of the invention or of the polypeptide used in the process of the invention, e.g. as the primers described in the examples of the present invention, e.g. as shown in the examples. A PCR with the primers shown in table III, application no. 23, column 7 will result in a fragment of the gene product as shown in table II, column 3.

[6199] for the disclosure of this paragraph see paragraph [0164.0.0.0] above.

[6200] The nucleic acid molecule of the invention encodes a polypeptide or portion thereof which includes an amino acid sequence which is sufficiently homologous to the amino acid sequence shown in table II, application no. 23, columns 5 and 7 such that the protein or portion thereof maintains the ability to participate in the fine chemical production, in particular a glycolipid increasing activity as mentioned above or as described in the examples in plants or microorganisms is comprised.

[6201] As used herein, the language “sufficiently homologous” refers to proteins or portions thereof which have amino acid sequences which include a minimum number of identical or equivalent amino acid residues (e.g., an amino acid residue which has a similar side chain as an amino acid residue in one of the sequences of the polypeptide of the present invention) to an amino acid sequence shown in table II, application no. 23, columns 5 and 7 such that the protein or portion thereof is able to participate in the increase of the fine chemical production. For examples having the activity of a protein as shown in table II, column 3 and as described herein.

[6202] In one embodiment, the nucleic acid molecule of the present invention comprises a nucleic acid that encodes a portion of the protein of the present invention. The protein is at least about 30%, 35%, 40%, 45% or 50%, preferably at least about 55%, 60%, 65% or 70%, and more preferably at least about 75%, 80%, 85%, 90%, 91%, 92%, 93% or 94% and most preferably at least about 95%, 97%, 98%, 99% or more homologous to an entire amino acid sequence of table II, application no. 23, columns 5 and 7 and having above-mentioned activity, e.g. conferring preferably the increase of the fine chemical by for example expression either in the cytsol or in an organelle such as a plastid or mitochondria or both, preferably in plastids.

[6203] for the disclosure of the paragraphs [0168.0.0.22] and [0169.0.0.22] see paragraphs [0168.0.0.0] and [0169.0.0.0] above.

[6204] The invention further relates to nucleic acid molecules that differ from one of the nucleotide sequences shown in table I, application no. 23, columns 5 and 7 (and portions thereof) due to degeneracy of the genetic code and thus encode a polypeptide of the present invention, in particular a polypeptide having above mentioned activity, e.g. conferring an increase in the fine chemical in a organism, e.g. as that polypeptides depicted by the sequence shown in table II, application no. 23, columns 5 and 7 or the functional homologues. Advantageously, the nucleic acid molecule of the invention comprises, or in an other embodiment has, a nucleotide sequence encoding a protein comprising, or in an other embodiment having, an amino acid sequence shown in table II, application no. 23, columns 5 and 7 or the functional homologues. In a still further embodiment, the nucleic acid molecule of the invention encodes a full length protein which is substantially homologous to an amino acid sequence shown in table II, application no. 23, columns 5 and 7 or the functional homologues. However, in a preferred embodiment, the nucleic acid molecule of the present invention does not consist of the sequence shown in table I, application no. 23, columns 5 and 7, preferably as indicated in table I A, application no. 23, columns 5 and 7. Preferably the nucleic acid molecule of the invention is a functional homologue or identical to a nucleic acid molecule indicated in table I B, application no. 23, columns 5 and 7.

[6205] for the disclosure of the paragraphs [0171.0.0.22] to [0173.0.0.22] see paragraphs [0171.0.0.0] to [0173.0.0.0] above.

[6206] Accordingly, in another embodiment, a nucleic acid molecule of the invention is at least 15, 20, 25 or 30 nucleotides in length. Preferably, it hybridizes under stringent conditions to a nucleic acid molecule comprising a nucleotide sequence of the nucleic acid molecule of the present invention or used in the process of the present invention, e.g. comprising the sequence shown in table I, application no. 23, columns 5 and 7. The nucleic acid molecule is preferably at least 20, 30, 50, 100, 250 or more nucleotides in length.

[6207] for the disclosure of this paragraph see paragraph [0175.0.0.0] above.

[6208] Preferably, nucleic acid molecule of the invention that hybridizes under stringent conditions to a sequence shown in table I, application no. 23, columns 5 and 7 corresponds to a naturally-occurring nucleic acid molecule of the invention. As used herein, a “naturally-occurring” nucleic acid molecule refers to an RNA or DNA molecule having a nucleotide sequence that occurs in nature (e.g., encodes a natural protein). Preferably, the nucleic acid molecule encodes a natural protein having abovementioned activity, e.g. conferring the fine chemical increase after increasing the expression or activity thereof or the activity of a protein of the invention or used in the process of the invention by for example expression the nucleic acid sequence of the gene product in the cytsol and/or in an organelle such as a plastid or mitochondria, preferably in plastids.

[6209] for the disclosure of this paragraph see paragraph [0177.0.0.0] above.

[6210] For example, nucleotide substitutions leading to amino acid substitutions at “non-essential” amino acid residues can be made in a sequence of the nucleic acid molecule of the invention or used in the process of the invention, e.g. shown in table I, application no. 23, columns 5 and 7.

[6211] for the disclosure of the paragraphs [0179.0.0.22] and [0180.0.0.22] see paragraphs [0179.0.0.0] and [0180.0.0.0] above.

[6212] Accordingly, the invention relates to nucleic acid molecules encoding a polypeptide having above-mentioned activity, e.g. conferring an increase in the fine chemical in an organisms or parts thereof by for example expression either in the cytsol or in an organelle such as a plastid or mitochondria or both, preferably in plastids that contain changes in amino acid residues that are not essential for said activity. Such polypeptides differ in amino acid sequence from a sequence contained in the sequences shown in table II, application no. 23, columns 5 and 7, preferably shown in table II A, application no. 23, columns 5 and 7 yet retain said activity described herein. The nucleic acid molecule can comprise a nucleotide sequence encoding a polypeptide, wherein the polypeptide comprises an amino acid sequence at least about 50% identical to an amino acid sequence shown in table II, application no. 23, columns 5 and 7, preferably shown in table II A, application no. 23, columns 5 and 7 and is capable of participation in the increase of production of the fine chemical after increasing its activity, e.g. its expression by for example expression either in the cytsol or in an organelle such as a plastid or mitochondria or both, preferably in plastids. Preferably, the protein encoded by the nucleic acid molecule is at least about 60% identical to the sequence shown in table II, application no. 23, columns 5 and 7, preferably shown in table II A, application no. 23, columns 5 and 7, more preferably at least about 70% identical to one of the sequences shown in table II, application no. 23, columns 5 and 7, preferably shown in table II A, application no. 23, columns 5 and 7, even more preferably at least about 80%, 90%, 95% homologous to the sequence shown in table II, application no. 23, columns 5 and 7, preferably shown in table II A, application no. 23, columns 5 and 7, and most preferably at least about 96%, 97%, 98%, or 99% identical to the sequence shown in table II, application no. 23, columns 5 and 7, preferably shown in table II A, application no. 23, columns 5 and 7.

[6213] for the disclosure of the paragraphs [0182.0.0.22] to [0188.0.0.22] see paragraphs [0182.0.0.0] to [0188.0.0.0] above.

[6214] Functional equivalents derived from one of the polypeptides as shown in table II, application no. 23, columns 5 and 7, preferably shown in table II B, application no. 23, columns 5 and 7 resp., according to the invention by substitution, insertion or deletion have at least 30%, 35%, 40%, 45% or 50%, preferably at least 55%, 60%, 65% or 70% by preference at least 80%, especially preferably at least 85% or 90%, 91%, 92%, 93% or 94%, very especially preferably at least 95%, 97%, 98% or 99% homology with one of the polypeptides as shown in table II, application no. 23, columns 5 and 7, preferably shown in table II B, application no. 23, columns 5 and 7 resp., according to the invention and are distinguished by essentially the same properties as the polypeptide as shown in table II, application no. 23, columns 5 and 7, preferably shown in table II B, application no. 23, columns 5 and 7.

[6215] Functional equivalents derived from the nucleic acid sequence as shown in table I, application no. 23, columns 5 and 7, preferably shown in table I B, application no. 23, columns 5 and 7 resp., according to the invention by substitution, insertion or deletion have at least 30%, 35%, 40%, 45% or 50%, preferably at least 55%, 60%, 65% or 70% by preference at least 80%, especially preferably at least 85% or 90%, 91%, 92%, 93% or 94%, very especially preferably at least 95%, 97%, 98% or 99% homology with one of the polypeptides as shown in table II, application no. 23, columns 5 and 7, preferably shown in table II B, application no. 23, columns 5 and 7 resp., according to the invention and encode polypeptides having essentially the same properties as the polypeptide as shown in table II, application no. 23, columns 5 and 7, preferably shown in table II B, application no. 23, columns 5 and 7.

[6216] for the disclosure of this paragraph see paragraph [0191.0.0.0] above.

[6217] A nucleic acid molecule encoding an homologous to a protein sequence of table II, application no. 23, columns 5 and 7, preferably shown in table II B, application no. 23, columns 5 and 7 resp., can be created by introducing one or more nucleotide substitutions, additions or deletions into a nucleotide sequence of the nucleic acid molecule of the present invention, in particular of table I, application no. 23, columns 5 and 7, preferably shown in table I B, application no. 23, columns 5 and 7 resp., such that one or more amino acid substitutions, additions or deletions are introduced into the encoded protein. Mutations can be introduced into the encoding sequences of table I, application no. 23, columns 5 and 7, preferably shown in table I B, application no. 23, columns 5 and 7 resp., by standard techniques, such as site-directed mutagenesis and PCR-mediated mutagenesis.

[6218] for the disclosure of the paragraphs [0193.0.0.22] to [0196.0.0.22] see paragraphs [0193.0.0.0] to [0196.0.0.0] above.

[6219] Homologues of the nucleic acid sequences used, with the sequence shown in table I, application no. 23, columns 5 and 7, preferably shown in table I B, application no. 23, columns 5 and 7, comprise also allelic variants with at least approximately 30%, 35%, 40% or 45% homology, by preference at least approximately 50%, 60% or 70%, more preferably at least approximately 90%, 91%, 92%, 93%, 94% or 95% and even more preferably at least approximately 96%, 97%, 98%, 99% or more homology with one of the nucleotide sequences shown or the abovementioned derived nucleic acid sequences or their homologues, derivatives or analogues or parts of these. Allelic variants encompass in particular functional variants which can be obtained by deletion, insertion or substitution of nucleotides from the sequences shown, preferably from table I, application no. 23, columns 5 and 7, preferably shown in table I B, application no. 23, columns 5 and 7, or from the derived nucleic acid sequences, the intention being, however, that the enzyme activity or the biological activity of the resulting proteins synthesized is advantageously retained or increased.

[6220] In one embodiment of the present invention, the nucleic acid molecule of the invention or used in the process of the invention comprises the sequences shown in any of the table I, application no. 23, columns 5 and 7, preferably shown in table I B, application no. 23, columns 5 and 7. It is preferred that the nucleic acid molecule comprises as little as possible other nucleotides not shown in any one of table I, application no. 23, columns 5 and 7, preferably shown in table I B, application no. 23, columns 5 and 7. In one embodiment, the nucleic acid molecule comprises less than 500, 400, 300, 200, 100, 90, 80, 70, 60, 50 or 40 further nucleotides. In a further embodiment, the nucleic acid molecule comprises less than 30, 20 or 10 further nucleotides. In one embodiment, the nucleic acid molecule use in the process of the invention is identical to the sequences shown in table I, application no. 23, columns 5 and 7, preferably shown in table I B, application no. 23, columns 5 and 7.

[6221] Also preferred is that the nucleic acid molecule used in the process of the invention encodes a polypeptide comprising the sequence shown in table II, application no. 23, columns 5 and 7, preferably shown in table II B, application no. 23, columns 5 and 7. In one embodiment, the nucleic acid molecule encodes less than 150, 130, 100, 80, 60, 50, 40 or 30 further amino acids. In a further embodiment, the encoded polypeptide comprises less than 20, 15, 10, 9, 8, 7, 6 or 5 further amino acids. In one embodiment used in the inventive process, the encoded polypeptide is identical to the sequences shown in table II, application no. 23, columns 5 and 7, preferably shown in table II B, application no. 23, columns 5 and 7.

[6222] In one embodiment, the nucleic acid molecule of the invention or used in the process encodes a polypeptide comprising the sequence shown in table II, application no. 23, columns 5 and 7, preferably shown in table II B, application no. 23, columns 5 and 7 comprises less than 100 further nucleotides. In a further embodiment, said nucleic acid molecule comprises less than 30 further nucleotides. In one embodiment, the nucleic acid molecule used in the process is identical to a coding sequence of the sequences shown in table I, application no. 23, columns 5 and 7, preferably shown in table I B, application no. 23, columns 5 and 7.

[6223] Polypeptides (=proteins), which still have the essential biological or enzymatic activity of the polypeptide of the present invention conferring an increase of the fine chemical i.e. whose activity is essentially not reduced, are polypeptides with at least 10% or 20%, by preference 30% or 40%, especially preferably 50% or 60%, very especially preferably 80% or 90 or more of the wild type biological activity or enzyme activity, advantageously, the activity is essentially not reduced in comparison with the activity of a polypeptide shown in table II, application no. 23, columns 5 and 7 expressed under identical conditions.

[6224] Homologues of table I, application no. 23, columns 5 and 7 or of the derived sequences of table II, application no. 23, columns 5 and 7 also mean truncated sequences, cDNA, single-stranded DNA or RNA of the coding and noncoding DNA sequence. Homologues of said sequences are also understood as meaning derivatives, which comprise noncoding regions such as, for example, UTRs, terminators, enhancers or promoter variants. The promoters upstream of the nucleotide sequences stated can be modified by one or more nucleotide substitution(s), insertion(s) and/or deletion(s) without, however, interfering with the functionality or activity either of the promoters, the open reading frame (=ORF) or with the 3′-regulatory region such as terminators or other 3′ regulatory regions, which are far away from the ORF. It is furthermore possible that the activity of the promoters is increased by modification of their sequence, or that they are replaced completely by more active promoters, even promoters from heterologous organisms. Appropriate promoters are known to the person skilled in the art and are mentioned herein below.

[6225] for the disclosure of the paragraphs [0203.0.0.22] to [0215.0.0.22] see paragraphs [0203.0.0.0] to [0215.0.0.0] above.

[6226] Accordingly, in one embodiment, the invention relates to a nucleic acid molecule, which comprises a nucleic acid molecule selected from the group consisting of:
[6227] a) nucleic acid molecule encoding, preferably at least the mature form, of the polypeptide shown in table II, application no. 23, columns 5 and 7, preferably in table II B, application no. 23, columns 5 and 7; or a fragment thereof conferring an increase in the amount of the fine chemical in an organism or a part thereof
[6228] b) nucleic acid molecule comprising, preferably at least the mature form, of the nucleic acid molecule shown in table I, application no. 23, columns 5 and 7, preferably in table I B, application no. 23, columns 5 and 7 or a fragment thereof conferring an increase in the amount of the fine chemical in an organism or a part thereof;
[6229] c) nucleic acid molecule whose sequence can be deduced from a polypeptide sequence encoded by a nucleic acid molecule of (a) or (b) as result of the degeneracy of the genetic code and conferring an increase in the amount of the fine chemical in an organism or a part thereof;
[6230] d) nucleic acid molecule encoding a polypeptide whose sequence has at least 50% identity with the amino acid sequence of the polypeptide encoded by the nucleic acid molecule of (a) to (c) and conferring an increase in the amount of the fine chemical in an organism or a part thereof;
[6231] e) nucleic acid molecule which hybridizes with a nucleic acid molecule of (a) to (c) under stringent hybridisation conditions and conferring an increase in the amount of the fine chemical in an organism or a part thereof;
[6232] f) nucleic acid molecule encoding a polypeptide, the polypeptide being derived by substituting, deleting and/or adding one or more amino acids of the amino acid sequence of the polypeptide encoded by the nucleic acid molecules (a) to (d), preferably to (a) to (c), and conferring an increase in the amount of the fine chemical in an organism or a part thereof;
[6233] g) nucleic acid molecule encoding a fragment or an epitope of a polypeptide which is encoded by one of the nucleic acid molecules of (a) to (e), preferably to (a) to (c) and conferring an increase in the amount of the fine chemical in an organism or a part thereof;
[6234] h) nucleic acid molecule comprising a nucleic acid molecule which is obtained by amplifying a cDNA library or a genomic library using the primers in table III, application no. 23, column 7 and conferring an increase in the amount of the fine chemical in an organism or a part thereof;
[6235] i) nucleic acid molecule encoding a polypeptide which is isolated, e.g. from a expression library, with the aid of monoclonal antibodies against a polypeptide encoded by one of the nucleic acid molecules of (a) to (g), preferably to (a) to (c) and conferring an increase in the amount of the fine chemical in an organism or a part thereof;
[6236] j) nucleic acid molecule which encodes a polypeptide comprising the consensus sequence shown in table IV, application no. 23, column 7 and conferring an increase in the amount of the fine chemical in an organism or a part thereof;
[6237] k) nucleic acid molecule encoding the amino acid sequence of a polypeptide encoding a domain of the polypeptide shown in table II, application no. 23, columns 5 and 7 and conferring an increase in the amount of the fine chemical in an organism or a part thereof; and
[6238] l) nucleic acid molecule which is obtainable by screening a suitable nucleic acid library under stringent hybridization conditions with a probe comprising one of the sequences of the nucleic acid molecule of (a) to (k) or with a fragment of at least 15 nt, preferably 20 nt, 30 nt, 50 nt, 100 nt, 200 nt or 500 nt of the nucleic acid molecule characterized in (a) to (h) or of the nucleic acid molecule shown in table I, application no. 23, columns 5 and 7 or a nucleic acid molecule encoding, preferably at least the mature form of, the polypeptide shown in table II, application no. 23, columns 5 and 7, and conferring an increase in the amount of the fine chemical in an organism or a part thereof; or which encompasses a sequence which is complementary thereto;
   whereby, preferably, the nucleic acid molecule according to (a) to (l) distinguishes over the sequence depicted in table I A and/or I B, application no. 23, columns 5 and 7 by one or more nucleotides. In one embodiment, the nucleic acid molecule of the invention does not consist of the sequence shown in table I A and/or I B, application no. 23, columns 5 and 7. In another embodiment, the nucleic acid molecule of the present invention is at least 30% identical and less than 100%, 99.999%, 99.99%, 99.9% or 99% identical to the sequence shown in table I A and/or I B, application no. 23, columns 5 and 7. In a further embodiment the nucleic acid molecule does not encode the polypeptide sequence shown in table II A and/or II B, application no. 23, columns 5 and 7. Accordingly, in one embodiment, the nucleic acid molecule of the present invention encodes in one embodiment a polypeptide which differs at least in one or more amino acids from the polypeptide shown in table II A and/or II B, application no. 23, columns 5 and 7 does not encode a protein of the sequence shown in table II A and/or II B, application no. 23, columns 5 and 7. Accordingly, in one embodiment, the protein encoded by a sequence of a nucleic acid according to (a) to (l) does not consist of the sequence shown in table I A and/or I B, application no. 23, columns 5 and 7. In a further embodiment, the protein of the present invention is at least 30% identical to protein sequence depicted in table II A and/or II B, application no. 23, columns 5 and 7 and less than 100%, preferably less than 99.999%, 99.99% or 99.9%, more preferably less than 99%, 985, 97%, 96% or 95% identical to the sequence shown in table II A and/or II B, application no. 23, columns 5 and 7.

[6239] for the disclosure of the paragraphs [0217.0.0.22] to [0226.0.0.22] see paragraphs [0217.0.0.0] to [0226.0.0.0] above.

[6240] In general, vector systems preferably also comprise further cis-regulatory regions such as promoters and terminators and/or selection markers by means of which suitably transformed organisms can be identified. While vir genes and T-DNA sequences are located on the same vector in the case of cointegrated vector systems, binary systems are based on at least two vectors, one of which bears vir genes, but no T-DNA, while a second one bears T-DNA, but no vir gene. Owing to this fact, the last-mentioned vectors are relatively small, easy to manipulate and capable of replication in E. coli and in Agrobacterium. These binary vectors include vectors from the series pBIB-HYG, pPZP, pBecks, pGreen. Those which are preferably used in accordance with the invention are Bin19, pBI101, pBinAR, pGPTV and pCAMBIA. An overview of binary vectors and their use is given by Hellens et al, Trends in Plant Science (2000) 5, 446-451. The vectors are preferably modified in such a manner, that they already contain the nucleic acid coding for the transitpeptide and that the nucleic acids of the invention, preferentially the nucleic acid sequences encoding the polypeptides shown in table II, application no. 23, columns 5 and 7 can be cloned 3″ prime to the transitpeptide encoding sequence, leading to a functional preprotein, which is directed to the plastids and which means that the mature protein fulfills its biological activity.

[6241] for the disclosure of the paragraphs [0228.0.0.22] to [0239.0.0.22] see paragraphs [0228.0.0.0] to [0239.0.0.0] above.

[6242] The abovementioned nucleic acid molecules can be cloned into the nucleic acid constructs or vectors according to the invention in combination together with further genes, or else different genes are introduced by transforming several nucleic acid constructs or vectors (including plasmids) into a host cell, advantageously into a plant cell or a microorganisms.

In addition to the sequence mentioned in Table I, application no. 23, columns 5 and 7 or its derivatives, it is advantageous additionally to express and/or mutate further genes in the organisms. Especially advantageously, additionally at least one further gene of the glycolipids biosynthetic pathway is expressed in the organisms such as plants or microorganisms. It is also possible that the regulation of the natural genes has been modified advantageously so that the gene and/or its gene product is no longer subject to the regulatory mechanisms which exist in the organisms. This leads to an increased synthesis of the respective desired fine chemical since, for example, feedback regulations no longer exist to the same extent or not at all. In addition it might be advantageously to combine the sequences shown in Table I, application no. 23, columns 5 and 7 with genes which generally support or enhances to growth or yield of the target organism, for example genes which lead to faster growth rate of microorganisms or genes which produces stress-, pathogen, or herbicide resistant plants.

[6243] In a further embodiment of the process of the invention, therefore, organisms are grown, in which there is simultaneous direct or indirect overexpression of at least one nucleic acid or one of the genes which code for proteins involved in the glycolipids metabolism, in particular in synthesis of glycolipids containing galactose, glucose, mannose, rhamnose or xylose, more preferably a galactolipid containing galactose or glucose, most preferably a galactolipid containing galactose. Indirect overexpression might be brought about by the manipulation of the regulation of the endogenous gene, for example through promoter mutations or the expression of natural or artificial transcriptional regulators.

[6244] Further advantageous nucleic acid sequences which can be expressed in combination with the sequences used in the process and/or the abovementioned biosynthesis genes are the sequences encoding further genes of the glycolipid biosynthetic pathway.

[6245] In a further advantageous embodiment of the process of the invention, the organisms used in the process are those in which advantageously simultaneously a glycolipid degrading protein is attenuated, in particular by reducing the rate of expression of the corresponding gene, or by inactivating the gene for example the mutagenesis and/or selection. In another advantageous embodiment the synthesis of competitive pathways which rely on the same precoursers are down regulated or interrupted.

[6246] The respective fine chemical produced can be isolated from the organism by methods with which the skilled worker are familiar, for example via extraction, salt precipitation, and/or different chromatography methods. The process according to the invention can be conducted batchwise, semibatchwise or continuously. The fine chemical and other glycolipids produced by this process can be obtained by harvesting the organisms, either from the crop in which they grow, or from the field. This can be done via for example pressing or extraction of the plant parts.

[6247] Preferrably, the compound is a composition comprising the essentially pure glycolipids containing galactose, glucose, mannose, rhamnose or xylose, more preferably a galactolipid containing galactose or glucose, most preferably a galactolipid containing galactose or a recovered or isolated glycolipids containing galactose, glucose, mannose, rhamnose or xylose, more preferably a galactolipid containing galactose or glucose, most preferably a galactolipid containing galactose.

[6248] for the disclosure of the paragraphs [0243.0.0.22] to [0264.0.0.22] see paragraphs [0243.0.0.0] to [0264.0.0.0] above.

[6249] Other preferred sequences for use in operable linkage in gene expression constructs are targeting sequences, which are required for targeting the gene product into specific cell compartments (for a review, see Kermode, Crit. Rev. Plant Sci. 15, 4 (1996) 285-423 and references cited therein), for example into the vacuole, the nucleus, all types of plastids, such as amyloplasts, chloroplasts, chromoplasts, the extracellular space, the mitochondria, the endoplasmic reticulum, elaioplasts, peroxisomes, glycosomes, and other compartments of cells or extracellular preferred are sequences, which are involved in targeting to plastids as mentioned above. Sequences, which must be mentioned in this context are, in particular, the signal-peptide- or transit-peptide-encoding sequences which are known per se. For example, plastid-transit-peptide-encoding sequences enable the targeting of the expression product into the plastids of a plant cell. Targeting sequences are also known for eukaryotic and to a lower extent for prokaryotic organisms and can advantageously be operable linked with the nucleic acid molecule of the present invention as shown in table I, application no. 23, columns 5 and 7 and described herein to achieve an expression in one of said compartments or extracellular.

[6250] for the disclosure of the paragraphs [0266.0.0.22] to [0287.0.0.22] see paragraphs [0266.0.0.0] to [0287.0.0.0] above.

[6251] Accordingly, one embodiment of the invention relates to a vector where the nucleic acid molecule according to the invention is linked operably to regulatory sequences which permit the expression in a prokaryotic or eukaryotic or in a prokaryotic and eukaryotic host. A further preferred embodiment of the invention relates to a vector in which a nucleic acid sequence encoding one of the polypeptides shown in table II, application no. 23, columns 5 and 7 or their homologs is functionally linked to a plastidial targeting sequence. A further preferred embodiment of the invention relates to a vector in which a nucleic acid sequence encoding one of the polypeptides shown in table II, application no. 23, columns 5 and 7 or their homologs is functionally linked to a regulatory sequences which permit the expression in plastids.

[6252] for the disclosure of the paragraphs [0289.0.0.22] to [0296.0.0.22] see paragraphs [0289.0.0.0] to [0296.0.0.0] above.

[6253] Moreover, native polypeptide conferring the increase of the fine chemical in an organism or part thereof can be isolated from cells (e.g., endothelial cells), for example using the antibody of the present invention as described below, in particular, an anti-b3708 protein antibody or an antibody against polypeptides as shown in table II, application no. 23, columns 5 and 7, which can be produced by standard techniques utilizing the polypeptide of the present invention or fragment thereof, i.e., the polypeptide of this invention. Preferred are monoclonal antibodies.

[6254] for the disclosure of this paragraph see paragraph [0298.0.0.0] above.

[6255] In one embodiment, the present invention relates to a polypeptide having the sequence shown in table II, application no. 23, columns 5 and 7 or as coded by the nucleic acid molecule shown in table I, application no. 23, columns 5 and 7 or functional homologues thereof.

[6256] In one advantageous embodiment, in the method of the present invention the activity of a polypeptide is increased comprising or consisting of the consensus sequence shown in table IV, application no. 23, columns 7 and in one another embodiment, the present invention relates to a polypeptide comprising or consisting of the consensus sequence shown in table IV, application no. 23, column 7 whereby 20 or less, preferably 15 or 10, preferably 9, 8, 7, or 6, more preferred 5 or 4, even more preferred 3, even more preferred 2, even more preferred 1, most preferred 0 of the amino acids positions indicated can be replaced by any amino acid.

[6257] for the disclosure of the paragraphs [0301.0.0.22] to [0304.0.0.22] see paragraphs [0301.0.0.0] to [0304.0.0.0] above.

[6258] In one advantageous embodiment, the method of the present invention comprises the increasing of a polypeptide comprising or consisting of plant or microorganism specific consensus sequences.

In one embodiment, said polypeptide of the invention distinguishes over the sequence shown in table II A and/or II B, application no. 23, columns 5 and 7 by one or more amino acids. In one embodiment, polypeptide distinguishes form the sequence shown in table II A and/or II B, application no. 23, columns 5 and 7 by more than 5, 6, 7, 8 or 9 amino acids, preferably by more than 10, 15, 20, 25 or 30 amino acids, even more preferred are more than 40, 50, or 60 amino acids and, preferably, the sequence of the polypeptide of the invention distinguishes from the sequence shown in table II A and/or II B, application no. 23, columns 5 and 7 by not more than 80% or 70% of the amino acids, preferably not more than 60% or 50%, more preferred not more than 40% or 30%, even more preferred not more than 20% or 10%. In an other embodiment, said polypeptide of the invention does not consist of the sequence shown in table II A and/or II B, application no. 23, columns 5 and 7.

[6259] for the disclosure of this paragraph see paragraph [0306.0.0.0] above.

[6260] In one embodiment, the invention relates to polypeptide conferring an increase in the fine chemical in an organism or part being encoded by the nucleic acid molecule of the invention or used in the process of the invention and having a sequence which distinguishes from the sequence as shown in table II A and/or II B, application no. 23, columns 5 and 7 by one or more amino acids. In another embodiment, said polypeptide of the invention does not consist of the sequence shown in table II A and/or II B, application no. 23, columns 5 and 7. In a further embodiment, said polypeptide of the present invention is less than 100%, 99.999%, 99.99%, 99.9% or 99% identical. In one embodiment, said polypeptide does not consist of the sequence encoded by the nucleic acid molecules shown in table I A and/or I B, application no. 23, columns 5 and 7.

[6261] In one embodiment, the present invention relates to a polypeptide having the activity of the protein as shown in table II A and/or II B, application no. 23, column 3, which distinguishes over the sequence depicted in table II A and/or II B, application no. 23, columns 5 and 7 by one or more amino acids, preferably by more than 5, 6, 7, 8 or 9 amino acids, preferably by more than 10, 15, 20, 25 or 30 amino acids, even more preferred are more than 40, 50, or 60 amino acids but even more preferred by less than 70% of the amino acids, more preferred by less than 50%, even more preferred my less than 30% or 25%, more preferred are 20% or 15%, even more preferred are less than 10%. In a further preferred embodiment the polypeptide of the invention takes the form of a preprotein consisting of a plastidial transitpeptide joint to a polypeptide having the activity of the protein as shown in table II A and/or II B, column 3, from which the transitpeptide is preferably cleaved off upon transport of the preprotein into the organelle for example into the plastid or mitochondria.

[6262] for the disclosure of the paragraphs [0309.0.0.22] to [0311.0.0.22] see paragraphs [0309.0.0.0] to [0311.0.0.0] above.

[6263] A polypeptide of the invention can participate in the process of the present invention. The polypeptide or a portion thereof comprises preferably an amino acid sequence, which is sufficiently homologous to an amino acid sequence shown in table II, application no. 23, columns 5 and 7.

[6264] Further, the polypeptide can have an amino acid sequence which is encoded by a nucleotide sequence which hybridizes, preferably hybridizes under stringent conditions as described above, to a nucleotide sequence of the nucleic acid molecule of the present invention. Accordingly, the polypeptide has an amino acid sequence which is encoded by a nucleotide sequence that is at least about 35%, 40%, 45%, 50%, 55%, 60%, 65% or 70%, preferably at least about 75%, 80%, 85% or 90, and more preferably at least about 91%, 92%, 93%, 94% or 95%, and even more preferably at least about 96%, 97%, 98%, 99% or more homologous to one of the amino acid sequences as shown in table II A and/or II B, application no. 23, columns 5 and 7. The preferred polypeptide of the present invention preferably possesses at least one of the activities according to the invention and described herein. A preferred polypeptide of the present invention includes an amino acid sequence encoded by a nucleotide sequence which hybridizes, preferably hybridizes under stringent conditions, to a nucleotide sequence of table I A and/or I B, application no. 23, columns 5 and 7 or which is homologous thereto, as defined above.

[6265] Accordingly the polypeptide of the present invention can vary from the sequences shown in table II A and/or II B, application no. 23, columns 5 and 7 in amino acid sequence due to natural variation or mutagenesis, as described in detail herein. Accordingly, the polypeptide comprise an amino acid sequence which is at least about 35%, 40%, 45%, 50%, 55%, 60%, 65% or 70%, preferably at least about 75%, 80%, 85% or 90, and more preferably at least about 91%, 92%, 93%, 94% or 95%, and most preferably at least about 96%, 97%, 98%, 99% or more homologous to an entire amino acid sequence shown in table II A and/or II B, application no. 23, columns 5 and 7.

[6266] for the disclosure of this paragraph see paragraph [0315.0.0.0] above.

[6267] Biologically active portions of an polypeptide of the present invention include peptides comprising amino acid sequences derived from the amino acid sequence of the polypeptide of the present invention or used in the process of the present invention, e.g., the amino acid sequence shown in table II, application no. 23, columns 5 and 7 or the amino acid sequence of a protein homologous thereto, which include fewer amino acids than a full length polypeptide of the present invention or used in the process of the present invention or the full length protein which is homologous to an polypeptide of the present invention or used in the process of the present invention depicted herein, and exhibit at least one activity of polypeptide of the present invention or used in the process of the present invention.

[6268] for the disclosure of this paragraph see paragraph [0317.0.0.0] above.

[6269] Manipulation of the nucleic acid molecule of the invention may result in the production of a protein having differences from the wild-type protein as shown in table II, application no. 23, column 3. Differences shall mean at least one amino acid different from the sequences as shown in table II, application no. 23, column 3, preferably at least 2, 3, 4, 5, 6, 7, 8, 9 or 10 amino acids, more preferably at least 15, 20, 25, 30, 35, 40, 45 or 50 amino acids different from the sequences as shown in table II, application no. 23, column 3. These proteins may be improved in efficiency or activity, may be present in greater numbers in the cell than is usual, or may be decreased in efficiency or activity in relation to the wild type protein.

[6270] Any mutagenesis strategies for the polypeptide of the present invention or the polypeptide used in the process of the present invention to result in increasing said activity are not meant to be limiting; variations on these strategies will be readily apparent to one skilled in the art. Using such strategies, and incorporating the mechanisms disclosed herein, the nucleic acid molecule and polypeptide of the invention may be utilized to generate plants or parts thereof, expressing wildtype proteins or mutated proteins of the proteins as shown in table II, application no. 23, column 3. The nucleic acid molecules and polypeptide molecules of the invention are expressed such that the yield, production, and/or efficiency of production of a desired compound is improved.

[6271] for the disclosure of the paragraphs [0320.0.0.22] to [0322.0.0.22] see paragraphs [0320.0.0.0] to [0322.0.0.0] above.

[6272] In one embodiment, a protein (=polypeptide) as shown in table II, application no. 23, column 3 refers to a polypeptide having an amino acid sequence corresponding to the polypeptide of the invention or used in the process of the invention, whereas a “non-inventive protein or polypeptide” or “other polypeptide” refers to a polypeptide having an amino acid sequence corresponding to a protein which is not substantially homologous to a polypeptide of the invention, preferably which is not substantially homologous to a polypeptide or protein as shown in table II, application no. 23, column 3, e.g., a protein which does not confer the activity described herein and which is derived from the same or a different organism.

[6273] for the disclosure of the paragraphs [0324.0.0.22] to [0329.0.0.22] see paragraphs [0324.0.0.0] to [0329.0.0.0] above.

[6274] In an especially preferred embodiment, the polypeptide according to the invention furthermore also does not have the sequences of those proteins, which are encoded by the sequences shown in table II, application no. 23, columns 5 and 7.

[6275] for the disclosure of the paragraphs [0331.0.0.22] to [0346.0.0.22] see paragraphs [0331.0.0.0] to [0346.0.0.0] above.

[6276] Accordingly the present invention relates to any cell transgenic for any nucleic acid characterized as part of the invention, e.g. conferring the increase of the fine chemical in a cell or an organism or a part thereof, e.g. the nucleic acid molecule of the invention, the nucleic acid construct of the invention, the antisense molecule of the invention, the vector of the invention or a nucleic acid molecule encoding the polypeptide of the invention, e.g. encoding a polypeptide having an activity as the protein as shown in table II, application no. 23, column 3. Due to the above mentioned activity the fine chemical content in a cell or an organism is increased. For example, due to modulation or manipulation, the cellular activity is increased preferably in organelles such as plastids or mitochondria, e.g. due to an increased expression or specific activity or specific targeting of the subject matters of the invention in a cell or an organism or a part thereof especially in organelles such as plastids or mitochondria. Transgenic for a polypeptide having a protein or activity means herein that due to modulation or manipulation of the genome, the activity of protein as shown in table II, application no. 23, column 3 or a protein as shown in table II, application no. 23, column 3-like activity is increased in the cell or organism or part thereof especially in organelles such as plastids or mitochondria. Examples are described above in context with the process of the invention.

[6277] for the disclosure of this paragraph see paragraph [0348.0.0.0] above.

[6278] A naturally occurring expression cassette—for example the naturally occurring combination of the promoter of the gene encoding a protein as shown in table II, application no. 23, column 3 with the corresponding encoding gene—becomes a transgenic expression cassette when it is modified by non-natural, synthetic “artificial” methods such as, for example, mutagenization. Such methods have been described (U.S. Pat. No. 5,565,350; WO 00/15815; also see above).

[6279] for the disclosure of the paragraphs [0350.0.0.22] to [0358.0.0.22] see paragraphs [0350.0.0.0] to [0358.0.0.0] above.

[6280] Transgenic plants comprising glycolipids containing galactose, glucose, mannose, rhamnose or xylose, more preferably a galactolipid containing galactose or glucose, most preferably a galactolipid containing galactose or mixtures thereof synthesized in the process according to the invention can be marketed directly without isolation of the compounds synthesized. In the process according to the invention, plants are understood as meaning all plant parts, plant organs such as leaf, stalk, root, tubers or seeds or propagation material or harvested material or the intact plant. In this context, the seed encompasses all parts of the seed such as the seed coats, epidermal cells, seed cells, endosperm or embryonic tissue. The glycolipids containing galactose, glucose, mannose, rhamnose or xylose, more preferably a galactolipid containing galactose or glucose, most preferably a galactolipid containing galactose produced in the process according to the invention may, however, also be isolated from the plant in the form of their free glycolipids containing galactose, glucose, mannose, rhamnose or xylose, more preferably a galactolipid containing galactose or glucose, most preferably a galactolipid containing galactose produced by this process can be isolated by harvesting the plants either from the culture in which they grow or from the field. This can be done for example via expressing, grinding and/or extraction of the plant parts, preferably the plant leaves, plant fruits, flowers and the like.

The invention furthermore relates to the use of the transgenic plants according to the invention and of the cells, cell cultures, parts—such as, for example, roots, leaves, flowers and the like as mentioned above in the case of transgenic plant organisms—derived from them, and to transgenic propagation material such as seeds or fruits and the like as mentioned above, for the production of foodstuffs or feeding stuffs, cosmetics, pharmaceuticals or fine chemicals.

[6281] for the disclosure of the paragraphs [0360.0.0.22] to [0362.0.0.22] see paragraphs [0360.0.0.0] to [0362.0.0.0] above.

[6282] In this manner, more than 50% by weight, advantageously more than 60% by weight, preferably more than 70% by weight, especially preferably more than 80% by weight, very especially preferably more than 90% by weight, of the glycolipids produced in the process can be isolated. The resulting fine chemical can, if appropriate, subsequently be further purified, if desired mixed with other active ingredients such as other xanthophylls, fatty acids, vitamins, amino acids, carbohydrates, antibiotics and the like, and, if appropriate, formulated.

[6283] In one embodiment, glycolipids containing galactose, glucose, mannose, rhamnose or xylose, more preferably a galactolipid containing galactose or glucose, most preferably a galactolipid containing galactose is the fine chemical.

[6284] The glycolipids, in particular the respective fine chemicals obtained in the process are suitable as starting material for the synthesis of further products of value. For example, they can be used in combination with each other or alone for the production of pharmaceuticals, health products, foodstuffs, animal feeds, nutrients or cosmetics. Accordingly, the present invention relates a method for the production of pharmaceuticals, health products, food stuff, animal feeds, nutrients or cosmetics comprising the steps of the process according to the invention, including the isolation of the glyclolipids containing, in particular glycolipids containing galactose, glucose, mannose, rhamnose or xylose, more preferably a galactolipid containing galactose or glucose, most preferably a galactolipid containing galactose containing composition produced or the respective fine chemical produced if desired and formulating the product with a pharmaceutical acceptable carrier or formulating the product in a form acceptable for an application in agriculture. A further embodiment according to the invention is the use of the glycolipids produced in the process or of the transgenic organisms in animal feeds, foodstuffs, medicines, food supplements, cosmetics or pharmaceuticals.

[6285] for the disclosure of the paragraphs [0366.0.0.22] to [0369.0.0.22] see paragraphs [0366.0.0.0] to [0369.0.0.0] above.

[6286] The fermentation broths obtained in this way, containing in particular glycolipids containing galactose, glucose, mannose, rhamnose or xylose, more preferably a galactolipid containing galactose or glucose, most preferably a galactolipid containing galactose in mixtures with other organic acids, amino acids, polypeptides or polysaccarides, normally have a dry matter content of from 1 to 70% by weight, preferably 7.5 to 25% by weight. Sugar-limited fermentation is additionally advantageous, e.g. at the end, for example over at least 30% of the fermentation time. This means that the concentration of utilizable sugar in the fermentation medium is kept at, or reduced to, 0 to 10 g/l, preferably to 0 to 3 g/l during this time. The fermentation broth is then processed further. Depending on requirements, the biomass can be removed or isolated entirely or partly by separation methods, such as, for example, centrifugation, filtration, decantation, coagulation/flocculation or a combination of these methods, from the fermentation broth or left completely in it.

The fermentation broth can then be thickened or concentrated by known methods, such as, for example, with the aid of a rotary evaporator, thin-film evaporator, falling film evaporator, by reverse osmosis or by nanofiltration. This concentrated fermentation broth can then be worked up by freeze-drying, spray drying, spray granulation or by other processes.

[6287] Accordingly, it is possible to purify the glycolipids, in particular the glycolipids containing galactose, glucose, mannose, rhamnose or xylose, more preferably a galactolipid containing galactose or glucose, most preferably a galactolipid containing galactose produced according to the invention further. For this purpose, the product-containing composition, e.g. a total or partial extraction fraction using organic solvents, is subjected for example to separation via e.g. an open column chromatography or HPLC in which case the desired product or the impurities are retained wholly or partly on the chromatography resin. These chromatography steps can be repeated if necessary, using the same or different chromatography resins. The skilled worker is familiar with the choice of suitable chromatography resins and their most effective use.

[6288] for the disclosure of the paragraphs [0372.0.0.22] to [0376.0.0.22], [0376.1.0.22] and [0377.0.0.22] see paragraphs [0372.0.0.0] to [0376.0.0.0], [0376.1.0.0] and [0377.0.0.0] above.

[6289] In one embodiment, the present invention relates to a method for the identification of a gene product conferring an increase in the fine chemical production in a cell, comprising the following steps:
[6290] (a) contacting e.g. hybridising, the nucleic acid molecules of a sample, e.g. cells, tissues, plants or microorganisms or a nucleic acid library, which can contain a candidate gene encoding a gene product conferring an increase in the fine chemical after expression, with the nucleic acid molecule of the present invention;
[6291] (b) identifying the nucleic acid molecules, which hybridize under relaxed stringent conditions with the nucleic acid molecule of the present invention in particular to the nucleic acid molecule sequence shown in table I, application no. 23, columns 5 and 7, preferably in table I B, application no. 23, columns 5 and 7, and, optionally, isolating the full length cDNA clone or complete genomic clone;
[6292] (c) introducing the candidate nucleic acid molecules in host cells, preferably in a plant cell or a microorganism, appropriate for producing the fine chemical;
[6293] (d) expressing the identified nucleic acid molecules in the host cells;
[6294] (e) assaying the fine chemical level in the host cells; and
[6295] (f) identifying the nucleic acid molecule and its gene product which expression confers an increase in the fine chemical level in the host cell after expression compared to the wild type.

[6296] for the disclosure of the paragraphs [0379.0.0.22] to [0383.0.0.22] see paragraphs [0379.0.0.0] to [0383.0.0.0] above.

[6297] The screen for a gene product or an agonist conferring an increase in the fine chemical production can be performed by growth of an organism for example a microorganism in the presence of growth reducing amounts of an inhibitor of the synthesis of the fine chemical. Better growth, eg higher dividing rate or high dry mass in comparison to the control under such conditions would identify a gene or gene product or an agonist conferring an increase in fine chemical production.

One can think to screen for increased fine chemical production by for example resistance to drugs blocking fine chemical synthesis and looking whether this effect is dependent on the proteins as shown in table II, application no. 23, column 3, eg comparing near identical organisms with low and high activity of the proteins as shown in table II, application no. 23, column 3.

[6298] for the disclosure of the paragraphs [0385.0.0.22] to [0404.0.0.22] see paragraphs [0385.0.0.0] to [0404.0.0.0] above.

[6299] Accordingly, the nucleic acid of the invention, or the nucleic acid molecule identified with the method of the present invention or the complement sequences thereof, the polypeptide of the invention, the nucleic acid construct of the invention, the organisms, the host cell, the microorganisms, the plant, plant tissue, plant cell, or the part thereof the invention, the vector of the invention, the agonist identified with the method of the invention, the nucleic acid molecule identified with the method of the present invention, can be used for the production of the fine chemical or of the fine chemical and one or more other glycolipids, in particular glycolipids such as glycosphingolipids, sulfoglycosphingolipids, phosphoglycosphingolipids or glycophosphatidyl inositol.

Accordingly, the nucleic acid of the invention, or the nucleic acid molecule identified with the method of the present invention or the complement sequences thereof, the polypeptide of the invention, the nucleic acid construct of the invention, the organisms, the host cell, the microorganisms, the plant, plant tissue, plant cell, or the part thereof of the invention, the vector of the invention, the agonist identified with the method of the invention, the antibody of the present invention, can be used for the reduction of the fine chemical in an organism or part thereof, e.g. in a cell.

[6300] for the disclosure of the paragraphs [0406.0.0.22] to [0435.0.0.22] see paragraphs [0406.0.0.0] to [0435.0.0.0] above.

[6301] Production of Glycolipids Containing Galactose in Chlamydomonas reinhardtii

The glycolipids production can be analysed as mentioned herein.
The proteins and nucleic acids can be analysed as mentioned below.
In addition a production in other organisms such as plants or microorganisms such as yeast, Mortierella or Escherichia coli is possible.

[6302] for the disclosure of the paragraphs [0437.0.0.22] and [0438.0.0.22] see paragraphs [0437.0.0.0] and [0438.0.0.0] above.

### Example 9

### Analysis of the Effect of the Nucleic Acid Molecule on the Production of Glycolipids

[6303] The effect of the genetic modification of plants or algae on the production of a desired compound (such as glycolipids containing galactose, glucose, mannose, rhamnose or xylose, more preferably a galactolipid containing galactose or glucose, most preferably a galactolipid containing galactose) can be determined by growing the modified plant under suitable conditions (such as those described above) and analyzing the medium and/or the cellular components for the elevated production of desired product (i.e. of glycolipids containing galactose, glucose, mannose, rhamnose or xylose, more preferably a galactolipid containing galactose or glucose, most preferably a galactolipid containing galactose). These analytical techniques are known to the skilled worker and comprise spectroscopy, thin-layer chromatography, various types of staining methods, enzymatic and microbiological methods and analytical chromatography such as high-performance liquid chromatography (see, for example, Ullman, Encyclopedia of Industrial Chemistry, Vol. A2, p. 89-90 and p. 443-613, VCH: Weinheim (1985); Fallon, A., et al., (1987) “Applications of HPLC in Biochemistry” in: Laboratory Techniques in Biochemistry and Molecular Biology, Vol. 17; Rehm et al. (1993) Biotechnology, Vol. 3, Chapter III: “Product recovery and purification”, p. 469 714, VCH: Weinheim; Belter, P.A., et al. (1988) Bioseparations: downstream processing for Biotechnology, John Wiley and Sons; Kennedy, J. F., and Cabral, J. M. S. (1992) Recovery processes for biological Materials, John Wiley and Sons; Shaeiwitz, J. A., and Henry, J. D. (1988) Biochemical Separations, in: Ullmann's Encyclopedia of Industrial Chemistry, Vol. B3; Chapter 11, p. 1-27, VCH: Weinheim; and Dechow, F. J. (1989) Separation and purification techniques in biotechnology, Noyes Publications) or the methods mentioned above.

[6304] for the disclosure of this paragraph see [0441.0.0.0] above.

[6305] Purification of and determination of the glycolipid content:

[6306] One example is the analysis of glycolipids containing galactose, glucose, mannose, rhamnose or xylose, more preferably a galactolipid containing galactose or glucose, most preferably a galactolipid containing galactose (abbreviations: FAME, fatty acid methyl ester; GC-MS, gas liquid chromatography/mass spectrometry; TAG, triacylglycerol; TLC, thin-layer chromatography).

The unambiguous detection for the presence of fatty acid products can be obtained by analyzing recombinant organisms using analytical standard methods: GC, GC-MS or TLC, as described on several occasions by Christie and the references therein (1997, in: Advances on Lipid Methodology, Fourth Edition: Christie, Oily Press, Dundee, 119-169; 1998, Gaschromatographie-Massenspektrometrie-Verfahren [Gas chromatography/mass spectrometric methods], Lipide 33:343-353).
The total fatty acids produced in the organism for example in yeasts used in the inventive process can be analysed for example according to the following procedure:
The material such as yeasts, E. coli or plants to be analyzed can be disrupted by sonication, grinding in a glass mill, liquid nitrogen and grinding or via other applicable methods. After disruption, the material must be centrifuged (1000×g, 10 min., 4° C.) and washed once with 100 mM NaHCO₃, pH 8.0 to remove residual medium and fatty acids. For preparation of the fatty acid methyl esters (FAMES) the sediment is resuspended in distilled water, heated for 10 minutes at 100° C., cooled on ice and recentrifuged, followed by extraction for one hour at 90° C. in 0.5 M sulfuric acid in methanol with 2% dimethoxypropane, which leads to hydrolyzed oil and lipid compounds, which give transmethylated lipids.
The FAMES are then extracted twice with 2 ml petrolether, washed once with 100 mM NaHCO₃, pH 8.0 and once with distilled water and dried with Na₂SO₄. The organic solvent can be evaporated under a stream of Argon and the FAMES were dissolved in 50 μl of petrolether. The samples can be separated on a ZEBRON ZB-Wax capillary column (30 m, 0.32 mm, 0.25 μm; Phenomenex) in a Hewlett Packard 6850 gas chromatograph with a flame ionisation detector. The oven temperature is programmed from 70° C. (1 min. hold) to 200° C. at a rate of 20° C./min., then to 250° C. (5 min. hold) at a rate of 5° C./min and finally to 260° C. at a rate of 5° C./min. Nitrogen is used as carrier gas (4.5 ml/min. at 70° C.). The identity of the resulting fatty acid methyl esters can be identified by comparison with retention times of FAME standards, which are available from commercial sources (i.e. Sigma).
Plant material is initially homogenized mechanically by comminuting in a pestle and mortar to make it more amenable to extraction.
This is followed by heating at 100° C. for 10 minutes and, after cooling on ice, by resedimentation. The cell sediment is hydrolyzed for one hour at 90° C. with 1 M methanolic sulfuric acid and 2% dimethoxypropane, and the lipids are transmethylated. The resulting fatty acid methyl esters (FAMEs) are extracted in petroleum ether. The extracted FAMEs are analyzed by gas liquid chromatography using a capillary column (Chrompack, WCOT Fused Silica, CP-Wax-52 CB, 25 m, 0.32 mm) and a temperature gradient of from 170° C. to 240° C. in 20 minutes and 5 minutes at 240° C. The identity of the fatty acid methyl esters is confirmed by comparison with corresponding FAME standards (Sigma). The identity and position of the double bond can be analyzed further by suitable chemical derivatization of the FAME mixtures, for example to give 4,4-dimethoxyoxazoline derivatives (Christie, 1998) by means of GC-MS.
The methodology is described for example in Napier and Michaelson, 2001, Lipids. 36(8):761-766; Sayanova et al., 2001, Journal of Experimental Botany. 52(360):1581 1585, Sperling et al., 2001, Arch. Biochem. Biophys. 388(2): 293-298 and Michaelson et al., 1998, FEBS Letters. 439(3): 215-218.
If required and desired, further chromatography steps with a suitable resin may follow. Advantageously the lipid, preferably a glycolipid, glycolipid containing galactose, more preferably a galactolipide and/or cerebroside can be further purified with a so-called RTHPLC. As eluent different an acetonitrile/water or chloroform/acetonitrile mixtures are advantageously is used. For the analysis of the fatty acids an ELSD detector (evaporative light-scattering detector) is used. MPLC, dry-flash chromatography or thin layer chromatography are other beneficial chromatography methods for the purification of glycolipids. If necessary, these chromatography steps may be repeated, using identical or other chromatography resins. The skilled worker is familiar with the selection of suitable chromatography resin and the most effective use for a particular molecule to be purified.

[6307] A typical sample pretreatment consists of a total lipid extraction using such polar organic solvents as acetone or alcohols as methanol, or ethers, saponification, partition between phases, separation of non-polar epiphase from more polar hypophasic derivatives and chromatography. E.g.:

For analysis, solvent delivery and aliquot removal can be accomplished with a robotic system comprising a single injector valve Gilson 232XL and a 402 2S1V diluter [Gilson, Inc. USA, 3000 W. Beltline Highway, Middleton; WI]. For saponification, 3 ml of 50% potassium hydroxide hydro-ethanolic solution (4 water:1 ethanol) can be added to each vial, followed by the addition of 3 ml of octanol. The saponification treatment can be conducted at room temperature with vials maintained on an IKA HS 501 horizontal shaker [Labworld-online, Inc., Wilmington, N.C.] for fifteen hours at 250 movements/minute, followed by a stationary phase of approximately one hour.
Following saponification, the supernatant can be diluted with 0.10 ml of methanol. The addition of methanol can be conducted under pressure to ensure sample homogeneity. Using a 0.25 ml syringe, a 0.1 ml aliquot can be removed and transferred to HPLC vials for analysis.
For HPLC analysis, a Hewlett Packard 1100 HPLC, complete with a quaternary pump, vacuum degassing system, six-way injection valve, temperature regulated autosampler, column oven and Photodiode Array detector can be used [Agilent Technologies available through Ultra Scientific Inc., 250 Smith Street, North Kingstown, R.I.]. The column can be a Waters YMC30, 5-micron, 4.6×250 mm with a guard column of the same material [Waters, 34 Maple Street, Milford, Mass.]. The solvents for the mobile phase can be 81 methanol: 4 water: 15 tetrahydrofuran (THF) stabilized with 0.2% BHT (2,6-di-tert-butyl-4-methylphenol). Injections were 20 μl. Separation can be isocratic at 30° C. with a flow rate of 1.7 ml/minute. The peak responses can be measured by absorbance at 447 nm.

[6308] One example is the analysis of the coenzymes. The unambiguous detection for the presence of the coenzymes products can be obtained by analyzing recombinant organisms using analytical standard methods, especially HPLC with UV or electrochemical detection as for example described in The Journal of Lipid Research, Vol. 39, 2099-2105, 1998.

Possible methods for the production and preparation of coenzymes like Coenzyme Q10 has also been described for example in WO2003056024, J57129695, J57202294, DE3416853 and DD-229152. Further methods for the isolation of the respective fine chemical can also been found in WO 9500634, Fat-Sci. Technol.; (1992) 94, 4, 153-57, DD-294280, DD-293048, JP-145413, DD-273002, DD-271128, SU1406163, JP166837, JP-176705, Acta-Biotechnol.; (1986) 6, 3, 277-79, DD-229152, DE3416854, DE3416853, JP-202840, JP-048433, JP-125306, JP-087137, JP-014026, WO2003056024 and WO200240682.
Plant material is initially homogenized mechanically by comminuting in a pestle and mortar to make it more amenable to extraction.

[6309] for the disclosure of the paragraphs [0446.0.0.22] to [0496.0.0.22] see paragraphs [0446.0.0.0] to [0496.0.0.0] above.

[6310] In order to analyze glycolipids being present in the transgenic organism by the means of gas chromatography-mass spectrometry, material from the transgenic organisms have to be extracted and the extracts subsequently being hydrolyzed in the presence of methanol and an inorganic acid, yielding the corresponding fatty acid methyl esters and the respective monosaccharid moiety as its methylhexopyranoside.

Primary and secondary amino functions, hydroxy groups and free carboxylic functions eventually will be trimethylsilylated by reaction with N-Methyl-N-trimethylsilyl-trifluoroacetamide, yielding the trimethylsilyl (TMS) derivatives of the methylhexopyranosides formed in the previous hydrolysis step (eg methylgalactopyranoside 4TMS in the case of a galactolipid). These compounds are accessible to gas chromatographic-mass spectrometric analysis.
Therefore, an increased content of the trimethylsilylated methylhexopyranosides directly correlates to an increased content of glycolipids in the transgenic organism.
[6311] The results of the different plant analyses can be seen from the table, which follows:

TABLE VI

| ORF | Metabolite | Method | Min | Max |
|---|---|---|---|---|
| b3708 | Methylgalactopyranosid, | GC | 1.14 | 1.34 |
| | from Galactolipids | | | |

[6312] for the disclosure of the paragraphs [0499.0.0.22] and [0500.0.0.22] see paragraphs [0499.0.0.0] and [0500.0.0.0] above.

### Example 15a

### Engineering Ryegrass Plants by Over-Expressing b3708 from Escherichia coli or Homologs of b3708 from Other Organisms

[6313] for the disclosure of the paragraphs [0502.0.0.22] to [0508.0.0.22] see paragraphs [0502.0.0.0] to [0508.0.0.0] above.

### Example 15b

### Engineering Soybean Plants by Over-Expressing b3708 from Escherichia coli or Homologs of b3708 from Other Organisms

[6314] for the disclosure of the paragraphs [0510.0.0.22] to [0513.0.0.22] see paragraphs [0510.0.0.0] to [0513.0.0.0] above.

### Example 15c

### Engineering Corn Plants by Over-Expressing b3708 from Escherichia coli or Homologs of b3708 from Other Organisms

[6315] for the disclosure of the paragraphs [0515.0.0.22] to [0540.0.0.22] see paragraphs [0515.0.0.0] to [0540.0.0.0] above.

### Example 15d

### Engineering Wheat Plants by Over-Expressing b3708 from Escherichia coli or Homologs of b3708 from Other Organisms

[6316] for the disclosure of the paragraphs [0542.0.0.22] to [0544.0.0.22] see paragraphs [0542.0.0.0] to [0544.0.0.0] above.

### Example 15e

### Engineering Rapeseed/Canola Plants by Over-Expressing b3708 from Escherichia coli or Homologs of b3708 from Other Organisms

[6317] for the disclosure of the paragraphs [0546.0.0.22] to [0549.0.0.22] see paragraphs [0544.0.0.0] to [0549.0.0.0] above.

### Example 15f

### Engineering Alfalfa Plants by Over-Expressing b3708 from Escherichia coli or Homologs of b3708 from Other Organisms

[6318] for the disclosure of the paragraphs [0551.0.0.22] to [0554.0.0.22] see paragraphs [0551.0.0.0] to [0554.0.0.0] above.

[6319] %

[6320] for the disclosure of this paragraph see [0554.2.0.0] above.

[6321] for the disclosure of this paragraph see [0555.0.0.0] above.

[6322] for the disclosure of this paragraph see [0001.0.0.0].

[6323] Salicylic acid is common throughout the plant kingdom and is also found in bacteria. It is an important regulator of induced plant resistance to pathogens. Small amounts of salicylic acid are known to be present in plants. Originally salicylic acid was extracted from the willow bark to make the well-known pain relief medication Aspirin. Salicylic acid is thought to promote disease resistance, increase flower life, inhibit seed germination, and promote ethylene synthesis.

Salicylic acid can be synthesized from cinnamate. Previous isotope feeding experiments in tobacco and other higher plants, including rice, demonstrated that the direct precursor of salicylic acid is free benzoic acid. Benzoic acid is synthesized by cinnamate chain shortening reactions via the so-called beta-oxidation, analogous to fatty acid beta-oxidation. Benzoic acid is then converted to salicylic acid by benzoic acid 2-hydroxylase. Recent studies in tobacco indicated that conjugated benzoic acid, CoA thioesters or glucose esters, are more likely to be the precursors of salicylic acid. More recent genetic studies in Arabidopsis have shown that salicylic acid can also be synthesized from chorismate and that the bulk of salicylic acid is produced from chorismate.
Plants react to pathogen attack by activating elaborate defense mechanisms. The defense response is activated not only at the sites of infection, but also in neighboring and even distal uninfected parts of the plant, leading to systemic acquired resistance. Plant resistance is associated with activated expression of a large number of defenserelated genes, whose products may play important roles in the restriction of pathogen growth and spread. During the past several years, evidence has accumulated which indicates that salicylic acid (SA) acts as an endogenous signal for plant defense responses.
In most plants, exposure to powdery mildew and other pathogens triggers the plant defense pathway, a series of biochemical events that occur in succession and help the plant resist infection. Salicylic acid governs this pathway.
Where resistance to a pathogen is associated with a localised necrotic lesion, the plant will subsequently be systemically “immunized” so that further infection will either exhibit increased resistance or reduced disease symptoms (reviewed by Ryals et al., 1996). This “systemic acquired resistance” (SAR) is associated with the systemic expression of a subset of defence genes, e.g. the acidic forms of pathogenesis-related PR1-5 proteins (Ward et al., 1992). Search for a signal that may be mobilised from the lesion to elicit systemic resistance has led to the identification of salicylic acid (SA) as the most likely candidate. SA is synthesised to high levels around the necrotic lesion, before being (possibly) mobilised through the phloem to accumulate, at much lower levels, systemically.

[6324] When faced with a fungus or bacteria, most plants turn up their production of salicylic acid, which then interacts with other molecules in the plant, eventually turning on the genes that produce the proteins involved in fighting infection. These infection-fighting proteins also turn off salicylic acid production, a phenomenon known as negative feedback. In this way, plants can turn the pathogen defense pathway on and off as needed.

The basic idea to enhance plant disease resistance by overproduction of salicylic acid has already been published years ago for example by Verberne et al., Pharm. World Sci.; (1995) 17, 6. Later on in 2000 is was published that the expression of the Escherichia coli isochorismate-synthase and Pseudomonas fluorescence isochorismatepyruvate-lyase in transgenic tobacco can lead to improved disease-resistance (Verberne, M et al., Nat. Biotechnol.; (2000) 18, 7, 779-83. The two enzymes converted chorismate into SA by a 2-step process. When the enzymes were targeted to the chloroplasts, the transgenic plants showed a 500- to 1,000-fold increased accumulation of SA and SA glucoside compared to control plants. These plants showed a resistance to viral (tobacco-mosaic virus) and fungal (Oidium lycopersicon) infection resembling SAR in nontransgenic plants. As the effect was the result of the plastidal expression of two heterologous genes, there is the obvious need for alternative and more simple methods for enhanced salicylic acid production in plants by the cytosolic expression of individual genes. For individual cases or specific plant species a more moderate salicylic acid increase may also be useful and desired.
Additionally salicylic acid binding proteins have been described as useful for the production of transgenic plants with increased resistance to disease (WO2003016551). Most plants maintain very low levels of salicylic acid in their tissues unless they are fighting an infection. Metal hyperaccumulators, however, have significantly elevated salicylic acid in their tissues all the time—see: www.newswise.com/articles/view/510423/
Recent results also suggest that in some plant species high level of endogenous salicylic acid protects the plants from oxidative stress caused for example by aging or biotic or abiotic stress (Yang et al., Plant J. 2004 December; 40 (6): 909-19).

[6325] Aspirin was introduced into clinical practice more than 100 years ago. This unique drug belongs to a family of compounds called the salicylates, the simplest of which is salicylic acid, the principal metabolite of aspirin. Salicylic acid is responsible for the anti-inflammatory action of aspirin, and may cause the reduced risk of colorectal cancer observed in those who take aspirin. Yet salicylic acid and other salicylates occur naturally in fruits and plants, while diets rich in these are believed to reduce the risk of colorectal cancer. Serum salicylic acid concentrations are greater in vegetarians than non-vegetarians, and there is overlap between concentrations in vegetarians and those taking low-dose aspirin. It is proposed that the cancer-preventive action of aspirin is due to its principal metabolite, salicylic acid, and that dietary salicylates can have the same effect. It is also possible that natural salicylates contribute to the other recognized benefits of a healthy diet.

[6326] The hydroxyl group of salicylic acid reacts with acetic acid to form the acetate ester, acetylsalicylic acid (see aspirin). Several useful esters are formed by reaction of the carboxyl group with alcohols. The methyl ester, methyl salicylate (also called oil of wintergreen since it produces the fragrance of wintergreen), is formed with methanol; it is used in food flavorings and in liniments. The phenyl ester, phenyl salicylate, or salol, is formed with phenol; it is used in medicine as an antiseptic and antipyretic. This ester hydrolyzes, not in the acidic stomach, but in the alkaline intestines, releasing free salicylic acid. The menthyl ester, menthyl salicylate, which is used in suntan lotions, is formed with menthol.

Salicylic acid possesses bacteriostatic, fungicidal, and keratolytic actions.

[6327] Salicylic acid is used as a food preservative and as an antiseptic in toothpaste. It is a peeling agent in ointments, creams, gels, and shampoos applied to reduce the scaling of the skin or scalp in psoriasis. It is the active ingredient in many skin products for the treatment of acne since it causes skin cells to slough off more readily, preventing them from clogging up the pores.

[6328] Salicylic acid belongs to the group of medicines known as keratolytics. Salicylic acid works by breaking down keratin, a protein, which forms part of the skin structure. This results in the shedding of skin cells from the affected area. In the treatment of warts, calluses and verrucae the effect of salicylic acid is to remove the affected skin over a period of time. If successful, the new skin, which grows underneath will be healthy.

[6329] One way to increase the productive capacity of biosynthesis is to apply recombinant DNA technology. Thus, it would be desirable to produce salicylic acid and/or salicylic acid esters in plants. That type of production permits control over quality, quantity and selection of the most suitable and efficient producer organisms. The latter is especially important for commercial production economics and therefore availability to consumers. In addition it is desirable to produce salicylic acid in plants in order to increase plant productivity and resistance against biotic and abiotic stress as discussed before.

Methods of recombinant DNA technology have been used for some years to improve the production of fine chemicals in microorganisms and plants by amplifying individual biosynthesis genes and investigating the effect on production of fine chemicals. It is for example reported, that the xanthophyll astaxanthin could be produced in the nectaries of transgenic tobacco plants. Those transgenic plants were prepared by Argobacterium tumifaciens-mediated transformation of tobacco plants using a vector that contained a ketolase-encoding gene from H. pluvialis denominated crtO along with the Pds gene from tomato as the promoter and to encode a leader sequence. Those results indicated that about 75 percent of the carotenoids found in the flower of the transformed plant contained a keto group.

[6330] Thus, it would be advantageous if algae, plant or other microorganism were available which produce large amounts of salicylic acid. The invention discussed hereinafter relates in some embodiments to such transformed prokaryotic or eukaryotic microorganisms.

It would also be advantageous if plants were available whose roots, leaves, stems, fruits, seeds or flowers produced large amounts of salicylic acid. The invention discussed hereinafter relates in some embodiments to such transformed plants.

[6331] Therefore improving the quality of foodstuffs and animal feeds is an important task of the food-and-feed industry. This is necessary since, for example, salicylic acid, which occur in plants and some microorganisms are limited with regard to the supply of mammals. Especially advantageous for the quality of foodstuffs and animal feeds is as balanced as possible a specific salicylic acid profile in the diet in order to avoid side effects.

[6332] To ensure a high quality of foods and animal feeds, it is therefore necessary to add salicylic acid in a balanced manner to suit the organism.

[6333] Accordingly, there is still a great demand for new and more suitable genes which encode proteins which participate in the biosynthesis of salicylic acid and/or salicylic acid esters and make it possible to produce certain salicylic acid and/or salicylic acid esters specifically on an industrial scale without unwanted byproducts forming. In the selection of genes for or regulators of biosynthesis two characteristics above all are particularly important. On the one hand, there is as ever a need for improved processes for obtaining the highest possible contents of salicylic acid and/or salicylic acid esters on the other hand as less as possible byproducts should be produced in the production process.

[6334] for the disclosure of this paragraph see [0013.0.0.0] above.

[6335] Accordingly, in a first embodiment, the invention relates to a process for the production of a fine chemical, whereby the fine chemical is salicylic acid and/or salicylic acid esters. Accordingly, in the present invention, the term “the fine chemical” as used herein relates to “salicylic acid” and/or “salicylic acid esters”. Further, the term “the fine chemicals” as used herein also relates to fine chemicals comprising salicylic acid.

[6336] In one embodiment, the term “salicylic acid” or “the fine chemical” or “the respective fine chemical” means at least one chemical compound with salicylic acid activity.

An increased salicylic acid content normally means an increased total salicylic acid content. However, an increased salicylic acid content also means, in particular, a modified content of the of a salicylic acid esters, without the need for an inevitable increase in the total salicylic acid content. In a preferred embodiment, the term “the fine chemical” means salicylic acid in free form or its salts or its ester or bound.

[6337] Accordingly, the present invention relates to a process for the production of salicylic acid, which comprises
[6338] (a) increasing or generating the activity of a protein as shown in table II, application no. 24, column 3 encoded by the nucleic acid sequences as shown in table I, application no. 24, column 5, in an organelle of a microorganism or plant, or
[6339] (b) increasing or generating the activity of a protein as shown in table II, application no. 24, column 3 encoded by the nucleic acid sequences as shown in table I, application no. 24, column 5 in the plastid of a microorganism or plant, or in one or more parts thereof; and
[6340] (c) growing the organism under conditions which permit the production of the fine chemical, thus, salicylic acid or fine chemicals comprising salicylic acid, in said organism or in the culture medium surrounding the organism.

[6341] Accordingly, the term “the fine chemical” means in one embodiment “salicylic acid” in relation to all sequences listed in Table I to IV, application number 24 or homologs thereof;

[6342] In another embodiment the present invention is related to a process for the production of salicylic acid, which comprises
[6343] (a) increasing or generating the activity of a protein as shown in table II, application no. 24 column 3 encoded by the nucleic acid sequences as shown in table I, application no. 24, column 5, in an organelle of a non-human organism, or
[6344] (b) increasing or generating the activity of a protein as shown in table II, application no. 24, column 3 encoded by the nucleic acid sequences as shown in table I, application no. 24, column 5, which are joined to a nucleic acid sequence encoding a transit peptide in a non-human organism, or in one or more parts thereof; or
[6345] (c) increasing or generating the activity of a protein as shown in table II, application no. 24, column 3 encoded by the nucleic acid sequences as shown in table I, application no. 24, column 5, which are joined to a nucleic acid sequence encoding chloroplast localization sequence, in a non-human organism, or in one or more parts thereof, and
[6346] (d) growing the organism under conditions which permit the production of salicylic acid in said organism.

[6347] In another embodiment, the present invention relates to a process for the production of salicylic acid, which comprises
[6348] (a) increasing or generating the activity of a protein as shown in table II, application no. 24, column 3 encoded by the nucleic acid sequences as shown in table I, application no. 24, column 5, in an organelle of a microorganism or plant through the transformation of the organelle, or
[6349] (b) increasing or generating the activity of a protein as shown in table II, application no. 24, column 3 encoded by the nucleic acid sequences as shown in table I, application no. 24, column 5 in the plastid of a microorganism or plant, or in one or more parts thereof through the transformation of the plastids; and
[6350] (c) growing the organism under conditions which permit the production of the fine chemical, thus, salicylic acid or fine chemicals comprising salicylic acid, in said organism or in the culture medium surrounding the organism.

[6351] Advantageously the activity of the protein as shown in table II, application no. 24, column 3 encoded by the nucleic acid sequences as shown in table I, application no. 24, column 5 is increased or generated in the abovementioned process in the plastid of a microorganism or plant.

[6352] for the disclosure of the paragraphs [0019.0.0.23] to [0024.0.0.23] see paragraphs [0019.0.0.0] and [0024.0.0.0] above.

[6353] Even more preferred nucleic acid sequences are encoding transit peptides as disclosed by von Heijne et al. [Plant Molecular Biology Reporter, Vol. 9 (2), 1991: 104-126], which are hereby incorporated by reference. Table V shows some examples of the transit peptide sequences disclosed by von Heijne et al. According to the disclosure of the invention especially in the examples the skilled worker is able to link other nucleic acid sequences disclosed by von Heijne et al. to the nucleic acid sequences shown in table I, application no. 24, columns 5 and 7. Most preferred nucleic acid sequences encoding transit peptides are derived from the genus Spinacia such as chloroplast 30S ribosomal protein PSrp-1, root acyl carrier protein II, acyl carrier protein, ATP synthase: γ subunit, ATP synthase: δ subunit, cytochrom f, ferredoxin I, ferredoxin NADP oxidoreductase (=FNR), nitrite reductase, phosphoribulokinase, plastocyanin or carbonic anhydrase. The skilled worker will recognize that various other nucleic acid sequences encoding transit peptides can easily isolated from plastid-localized proteins, which are expressed from nuclear genes as precursors and are then targeted to plastids. Such transit peptides encoding sequences can be used for the construction of other expression constructs. The transit peptides advantageously used in the inventive process and which are part of the inventive nucleic acid sequences and proteins are typically 20 to 120 amino acids, preferably 25 to 110, 30 to 100 or 35 to 90 amino acids, more preferably 40 to 85 amino acids and most preferably 45 to 80 amino acids in length and functions post-translationally to direct the protein to the plastid preferably to the chloroplast. The nucleic acid sequences encoding such transit peptides are localized upstream of nucleic acid sequence encoding the mature protein. For the correct molecular joining of the transit peptide encoding nucleic acid and the nucleic acid encoding the protein to be targeted it is sometimes necessary to introduce additional base pairs at the joining position, which forms restriction enzyme recognition sequences useful for the molecular joining of the different nucleic acid molecules. This procedure might lead to very few additional amino acids at the N-terminal of the mature imported protein, which usually and preferably do not interfere with the protein function. In any case, the additional base pairs at the joining position which forms restriction enzyme recognition sequences have to be chosen with care, in order to avoid the formation of stop codons or codons which encode amino acids with a strong influence on protein folding, like e.g. proline. It is preferred that such additional codons encode small n.d. structural flexible amino acids such as glycine or alanine.

[6354] As mentioned above the nucleic acid sequences coding for the proteins as shown in table II, application no. 24, column 3 and its homologs as disclosed in table I, application no. 24, columns 5 and 7 are joined to a nucleic acid sequence encoding a transit peptide, This nucleic acid sequence encoding a transit peptide ensures transport of the protein to the plastid. The nucleic acid sequence of the gene to be expressed and the nucleic acid sequence encoding the transit peptide are operably linked. Therefore the transit peptide is fused in frame to the nucleic acid sequence coding for proteins as shown in table II, application no. 24, column 3 and its homologs as disclosed in table I, application no. 24, columns 5 and 7.

[6355] for the disclosure of the paragraphs [0027.0.0.23] to [0029.0.0.23] see paragraphs [0027.0.0.0] and [0029.0.0.0] above.

[6356] Alternatively, nucleic acid sequences coding for the transit peptides may be chemically synthesized either in part or wholly according to structure of transit peptide sequences disclosed in the prior art. Said natural or chemically synthesized sequences can be directly linked to the sequences encoding the mature protein or via a linker nucleic acid sequence, which may be typically less than 500 base pairs, preferably less than 450, 400, 350, 300, 250 or 200 base pairs, more preferably less than 150, 100, 90, 80, 70, 60, 50, 40 or 30 base pairs and most preferably less than 25, 20, 15, 12, 9, 6 or 3 base pairs in length and are in frame to the coding sequence. Furthermore favorable nucleic acid sequences encoding transit peptides may comprise sequences derived from more than one biological and/or chemical source and may include a nucleic acid sequence derived from the amino-terminal region of the mature protein, which in its native state is linked to the transit peptide. In a preferred embodiment of the invention said amino-terminal region of the mature protein is typically less than 150 amino acids, preferably less than 140, 130, 120, 110, 100 or 90 amino acids, more preferably less than 80, 70, 60, 50, 40, 35, 30, 25 or 20 amino acids and most preferably less than 19, 18, 17, 16, 15, 14, 13, 12, 11 or 10 amino acids in length. But even shorter or longer stretches are also possible. In addition target sequences, which facilitate the transport of proteins to other cell compartments such as the vacuole, endoplasmic reticulum, Golgi complex, glyoxysomes, peroxisomes or mitochondria may be also part of the inventive nucleic acid sequence. The proteins translated from said inventive nucleic acid sequences are a kind of fusion proteins that means the nucleic acid sequences encoding the transit peptide for example the ones shown in table V, preferably the last one of the table are joint to the nucleic acid sequences shown in table I, application no. 24, columns 5 and 7. The person skilled in the art is able to join said sequences in a functional manner. Advantageously the transit peptide part is cleaved off from the protein part shown in table II, application no. 24, columns 5 and 7 during the transport preferably into the plastids. All products of the cleavage of the preferred transit peptide shown in the last line of table V have preferably the N-terminal amino acid sequences QIA CSS or QIA EFQLTT in front of the start methionine of the protein mentioned in table II, application no. 24, columns 5 and 7. Other short amino acid sequences of an range of 1 to 20 amino acids preferable 2 to 15 amino acids, more preferable 3 to 10 amino acids most preferably 4 to 8 amino acids are also possible in front of the start methionine of the protein mentioned in table II, application no. 24, columns 5 and 7. In case of the amino acid sequence QIA CSS the three amino acids in front of the start methionine are stemming from the LIC (=ligatation independent cloning) cassette. Said short amino acid sequence is preferred in the case of the expression of E. coli genes. In case of the amino acid sequence QIA EFQLTT the six amino acids in front of the start methionine are stemming from the LIC cassette. Said short amino acid sequence is preferred in the case of the expression of S. cerevisiae genes. The skilled worker knows that other short sequences are also useful in the expression of the genes mentioned in table I, application no. 24, columns 5 and 7. Furthermore the skilled worker is aware of the fact that there is not a need for such short sequences in the expression of the genes.

[6357] Table V: Examples of transit peptides disclosed by von Heijne et al. for the disclosure of Table V see paragraph [0030.2.0.0] above.

[6358] Alternatively to the targeting of the sequences shown in table II, application no. 24, columns 5 and 7 preferably of sequences in general encoded in the nucleus with the aid of the targeting sequences mentioned for example in table V alone or in combination with other targeting sequences preferably into the plastids, the nucleic acids of the invention can directly introduced into the plastidal genome. Therefore in a preferred embodiment the nucleic acid sequences shown in table I, application no. 24, columns 5 and 7 are directly introduced and expressed in plastids.

The term “introduced” in the context of this specification shall mean the insertion of a nucleic acid sequence into the organism by means of a “transfection”, “transduction” or preferably by “transformation”.
A plastid, such as a chloroplast, has been “transformed” by an exogenous (preferably foreign) nucleic acid sequence if nucleic acid sequence has been introduced into the plastid that means that this sequence has crossed the membrane or the membranes of the plastid. The foreign DNA may be integrated (covalently linked) into plastid DNA making up the genome of the plastid, or it may remain unintegrated (e.g., by including a chloroplast origin of replication). “Stably” integrated DNA sequences are those, which are inherited through plastid replication, thereby transferring new plastids, with the features of the integrated DNA sequence to the progeny.

[6359] for the disclosure of the paragraphs [0030.2.0.23] and [0030.3.0.23] see paragraphs [0030.2.0.0] and [0030.3.0.0] above.

[6360] For the inventive process it is of great advantage that by transforming the plastids the intraspecies specific transgene flow is blocked, because a lot of species such as corn, cotton and rice have a strict maternal inheritance of plastids. By placing the genes specified in table I, application no. 24, columns 5 and 7 or active fragments thereof in the plastids of plants, these genes will not be present in the pollen of said plants.

A further preferred embodiment of the invention relates to the use of so called “chloroplast localization sequences”, in which a first RNA sequence or molecule is capable of transporting or “chaperoning” a second RNA sequence, such as a RNA sequence transcribed from the sequences depicted in table 1, application no. 24, columns 5 and 7 or a sequence encoding a protein, as depicted in table II, application no. 24, columns 5 and 7, from an external environment inside a cell or outside a plastid into a chloroplast. In one embodiment the chloroplast localization signal is substantially similar or complementary to a complete or intact viroid sequence. The chloroplast localization signal may be encoded by a DNA sequence, which is transcribed into the chloroplast localization RNA. The term “viroid” refers to a naturally occurring single stranded RNA molecule (Flores, C R Acad Sci III. 2001 October; 324(10): 943-52). Viroids usually contain about 200-500 nucleotides and generally exist as circular molecules. Examples of viroids that contain chloroplast localization signals include but are not limited to ASBVd, PLMVd, CChMVd and ELVd. The viroid sequence or a functional part of it can be fused to the sequences depicted in table, 1, application no. 24, columns 5 and 7 or a sequence encoding a protein, as depicted in table II, application no. 24, columns 5 and 7 in such a manner that the viroid sequence transports a sequence transcribed from a sequence as depicted in table 1 application no. 24, columns 5 and 7 or a sequence encoding a protein as depicted in table II, application no. 24, columns 5 and 7 into the chloroplasts. A preferred embodiment uses a modified ASBVd (Navarro et al., Virology. 2000 Mar. 1; 268(1): 218-25).
In a further specific embodiment the protein to be expressed in the plastids such as the proteins depicted in table II, application no. 24, columns 5 and 7 are encoded by different nucleic acids. Such a method is disclosed in WO 2004/040973, which shall be incorporated by reference. WO 2004/040973 teaches a method, which relates to the translocation of an RNA corresponding to a gene or gene fragment into the chloroplast by means of a chloroplast localization sequence. The genes, which should be expressed in the plant or plants cells, are split into nucleic acid fragments, which are introduced into different compartments in the plant e.g. the nucleus, the plastids and/or mitochondria. Additionally plant cells are described in which the chloroplast contains a ribozyme fused at one end to an RNA encoding a fragment of a protein used in the inventive process such that the ribozyme can trans-splice the translocated fusion RNA to the RNA encoding the gene fragment to form and as the case may be reunite the nucleic acid fragments to an intact mRNA encoding a functional protein for example as disclosed in table II, application no. 24, columns 5 and 7.

[6361] In a preferred embodiment of the invention the nucleic acid sequences as shown in table I, application no. 24, columns 5 and 7 used in the inventive process are transformed into plastids, which are metabolical active. Those plastids should preferably maintain at a high copy number in the plant or plant tissue of interest, most preferably the chloroplasts found in green plant tissues, such as leaves or cotyledons or in seeds:

[6362] For a good expression in the plastids the nucleic acid sequences as shown in table I, application no. 24, columns 5 and 7 are introduced into an expression cassette using a preferably a promoter and terminator, which are active in plastids preferably a chloroplast promoter. Examples of such promoters include the psbA promoter from the gene from spinach or pea, the rbcL promoter, and the atpB promoter from corn.

[6363] for the disclosure of the paragraphs [0031.0.0.23] and [0032.0.0.23] see paragraphs [0031.0.0.0] and [0032.0.0.0] above.

[6364] Advantageously the process for the production of the fine chemical leads to an enhanced production of the fine chemical. The terms “enhanced” or “increase” mean at least a 10%, 20%, 30%, 40% or 50%, preferably at least 60%, 70%, 80%, 90% or 100%, more preferably 150%, 200%, 300%, 400% or 500% higher production of the fine chemical in comparison to the reference as defined below, e.g. that means in comparison to an organism without the aforementioned modification of the activity of a protein as shown in table II, application no. 24, column 3. Preferably the modification of the activity of a protein as shown in table II, application no. 24, column 3 or their combination can be achieved by joining the protein to a transit peptide.

[6365] Surprisingly it was found, that the transgenic expression of the E. coli proteins shown in table II, application no. 24, column 3 in plastids of a plant such as Arabidopsis thaliana for example through the linkage to at least one targeting sequence—for example as mentioned in table V—conferred an increase in the respective fine chemical indicated in column 6 “metabolite” of each table I to IV in the transformed plant.

Surprisingly it was found, that the transgenic expression of the E. coli protein b1704, b2040, b3337, b3616 and/or b4039 and/or of the Saccharomyces cerevisiae protein YLL033W in Arabidopsis thaliana conferred an increase in the salicylic acid content. For example, in one embodiment the level of salicylic acid and/or salicylic acid esters is increased in combination with the modulation of the expression of other genes of the biosynthesis of salicylic acid and/or salicylic acid esters, in particular of genes of the cinnamate and/or chorismate biosynthetic pathway.

[6366] for the disclosure of this paragraph see paragraph [0035.0.0.0] above.

[6367] The sequence of b1704 (Accession number NP_{—}416219) from Escherichia coli has been published in Blattner et al., Science 277 (5331), 1453-1474 (1997), and its activity is being defined as “3-deoxy-D-arabinoheptulosonate-7-phosphate synthase (DAHP synthetase), tryptophanrepressible”. Accordingly, in one embodiment, the process of the present invention comprises the use of a “3-deoxy-D-arabinoheptulosonate-7-phosphate synthase (DAHP synthetase), tryptophanrepressible” or its homolog, e.g. as shown herein, for the production of the fine chemical, meaning of salicylic acid, in particular for increasing the amount of salicylic acid in free or bound form in an organism or a part thereof, as mentioned. In one embodiment, in the process of the present invention the activity of a b1704 protein is increased or generated, e.g. from Escherichia coli or a homolog thereof, preferably linked at least to one transit peptide as mentioned for example in table V.

In another embodiment, in the process of the present invention the activity of a b1704 protein is increased or generated in a subcellular compartment of the organism or organism cell such as in an organelle like a plastid or mitochondria.
The sequence of b2040 (Accession number G64969) from Escherichia coli has been published in Blattner et al., Science 277 (5331), 1453-1474 (1997), and its activity is being defined as “TDP-rhamnose synthase, NAD(P)-binding”. Accordingly, in one embodiment, the process of the present invention comprises the use of a “TDP-rhamnose synthase, NAD(P)-binding” or its homolog, e.g. as shown herein, for the production of the fine chemical, meaning of salicylic acid, in particular for increasing the amount of salicylic acid in free or bound form in an organism or a part thereof, as mentioned. In one embodiment, in the process of the present invention the activity of a b2040 protein is increased or generated, e.g. from Escherichia coli or a homolog thereof, preferably linked at least to one transit peptide as mentioned for example in table V.
In another embodiment, in the process of the present invention the activity of a b2040 protein is increased or generated in a subcellular compartment of the organism or organism cell such as in an organelle like a plastid or mitochondria.
The sequence of b3337 (Accession number QQECBB7) from Escherichia coli has been published in Blattner et al., Science 277 (5331), 1453-1474 (1997), and its activity is being defined as “yheA protein”. Accordingly, in one embodiment, the process of the present invention comprises the use of a “yheA protein” or its homolog, e.g. as shown herein, for the production of the fine chemical, meaning of salicylic acid, in particular for increasing the amount of salicylic acid in free or bound form in an organism or a part thereof, as mentioned. In one embodiment, in the process of the present invention the activity of a b3337 protein is increased or generated, e.g. from Escherichia coli or a homolog thereof, preferably linked at least to one transit peptide as mentioned for example in table V.
In another embodiment, in the process of the present invention the activity of a b3337 protein is increased or generated in a subcellular compartment of the organism or organism cell such as in an organelle like a plastid or mitochondria.
The sequence of b3616 (Accession number NP_{—}418073) from Escherichia coli has been published in Blattner et al., Science 277 (5331), 1453-1474 (1997), and its activity is being defined as “threonine 3-dehydrogenase, NAD(P)-binding”. Accordingly, in one embodiment, the process of the present invention comprises the use of a “threonine 3dehydrogenase, NAD(P)-binding” or its homolog, e.g. as shown herein, for the production of the fine chemical, meaning of salicylic acid, in particular for increasing the amount of salicylic acid in free or bound form in an organism or a part thereof, as mentioned. In one embodiment, in the process of the present invention the activity of a b3616 protein is increased or generated, e.g. from Escherichia coli or a homolog thereof, preferably linked at least to one transit peptide as mentioned for example in table V.
In another embodiment, in the process of the present invention the activity of a b3616 protein is increased or generated in a subcellular compartment of the organism or organism cell such as in an organelle like a plastid or mitochondria.
The sequence of b4039 (Accession number S25660) from Escherichia coli has been published in Blattner et al., Science 277 (5331), 1453-1474 (1997), and its activity is being defined as “4-hydroxybenzoate synthetase”. Accordingly, in one embodiment, the process of the present invention comprises the use of a “4-hydroxybenzoate synthetase” or its homolog, e.g. as shown herein, for the production of the fine chemical, meaning of salicylic acid, in particular for increasing the amount of salicylic acid in free or bound form in an organism or a part thereof, as mentioned. In one embodiment, in the process of the present invention the activity of a b4039 protein is increased or generated, e.g. from Escherichia coli or a homolog thereof, preferably linked at least to one transit peptide as mentioned for example in table V.
In another embodiment, in the process of the present invention the activity of a b4039 protein is increased or generated in a subcellular compartment of the organism or organism cell such as in an organelle like a plastid or mitochondria.
The sequence of YLL033W (Accession number S64784) from Saccharomyces cerevisiae has been published in Goffeau et al., Science 274 (5287), 546-547, 1996, and its activity is being defined as “uncharacterized protein”. Accordingly, in one embodiment, the process of the present invention comprises the use of a “uncharacterized protein” or its homolog, e.g. as shown herein, for the production of the fine chemical, meaning of salicylic acid, in particular for increasing the amount of salicylic acid in free or bound form in an organism or a part thereof, as mentioned. In one embodiment, in the process of the present invention the activity of a YLL033W protein is increased or generated, e.g. from Saccharomyces cerevisiae or a homolog thereof, preferably linked at least to one transit peptide as mentioned for example in table V.
In another embodiment, in the process of the present invention the activity of an YLL033W protein is increased or generated in a subcellular compartment of the organism or organism cell such as in an organelle like a plastid or mitochondria.

[6368] In one embodiment, the homolog of the YLL033W protein, is a homolog having said activity and being derived from Eukaryot. In one embodiment, the homolog of the b1704, b2040, b3337, b3616 and/or b4039 protein is a homolog having said activity and being derived from bacteria. In one embodiment, the homolog of the YLL033W is a homolog having said activity and being derived from Fungi. In one embodiment, the homolog of the b1704, b2040, b3337, b3616 and/or b4039 is a homolog having said activity and being derived from Proteobacteria. In one embodiment, the homolog of the YLL033W is a homolog having said activity and being derived from Ascomycota. In one embodiment, the homolog of the b1704, b2040, b3337, b3616 and/or b4039 is a homolog having said activity and being derived from Gammaproteobacteria. In one embodiment, the homolog of the YLL033W is a homolog having said activity and being derived from Saccharomycotina. In one embodiment, the homolog of the b1704, b2040, b3337, b3616 and/or b4039 is a homolog having said activity and being derived from Enterobacteriales. In one embodiment, the homolog of the YLL033W is a homolog having said activity and being derived from Saccharomycetes. In one embodiment, the homolog of the b1704, b2040, b3337, b3616 and/or b4039 is a homolog having said activity and being derived from Enterobacteriaceae. In one embodiment, the homolog of the YLL033W is a homolog having said activity and being derived from Saccharomycetales. In one embodiment, the homolog of the b1704, b2040, b3337, b3616 and/or b4039 is a homolog having said activity and being derived from Escherichia, preferably from Escherichia coli. In one embodiment, the homolog of the YLL033W is a homolog having said activity and being derived from Saccharomycetaceae. In one embodiment, the homolog of the YLL033W is a homolog having said activity and being derived from Saccharomycetes, preferably from Saccharomyces cerevisiae.

[6369] Homologs of the polypeptide table II, application no. 24, column 3 may be the polypeptides encoded by the nucleic acid molecules indicated in table I, application no. 24, column 7, resp., or may be the polypeptides indicated in table II, application no. 24, column 7, resp.

[6370] for the disclosure of this paragraph see paragraph [0038.0.0.0] above.

[6371] In accordance with the invention, a protein or polypeptide has the “activity of an protein as shown in table II, application no. 24, column 3” if its de novo activity, or its increased expression directly or indirectly leads to an increased in the level of the fine chemical indicated in the respective line of table II, application no. 24, column 6 “metabolite” in the organism or a part thereof, preferably in a cell of said organism, more preferably in an organelle such as a plastid or mitochondria of said organism. The protein has the above mentioned activities of a protein as shown in table II, application no. 24, column 3, preferably in the event the nucleic acid sequences encoding said proteins is functionally joined to the nucleic acid sequence of a transit peptide. Throughout the specification the activity or preferably the biological activity of such a protein or polypeptide or an nucleic acid molecule or sequence encoding such protein or polypeptide is identical or similar if it still has the biological or enzymatic activity of a protein as shown in table II, application no. 24, column 3, or which has at least 10% of the original enzymatic activity, preferably 20%, particularly preferably 30%, most particularly preferably 40% in comparison to a protein as shown in the respective line of table II, application no. 24, column 3.

[6372] for the disclosure of the paragraphs [0040.0.0.23] to [0047.0.0.23] see paragraphs [0040.0.0.0] to [0047.0.0.0] above.

[6373] Preferably, the reference, control or wild type differs form the subject of the present invention only in the cellular activity, preferably of the plastidial activity of the polypeptide of the invention, e.g. as result of an increase in the level of the nucleic acid molecule of the present invention or an increase of the specific activity of the polypeptide of the invention, e.g. by or in the expression level or activity of an protein having the activity of a respective protein as shown in table II, application no. 24, column 3 its biochemical or genetical causes and the increased amount of the respective fine chemical.

[6374] for the disclosure of the paragraphs [0049.0.0.23] to [0051.0.0.23] see paragraphs [0049.0.0.0] to [0051.0.0.0] above.

[6375] For example, the molecule number or the specific activity of the polypeptide or the nucleic acid molecule may be increased. Larger amounts of the fine chemical can be produced if the polypeptide or the nucleic acid of the invention is expressed de novo in an organism lacking the activity of said protein, preferably the nucleic acid molecules as mentioned in table I, application no. 24, columns 5 and 7 alone or preferably in combination with a transit peptide for example as mentioned in table V or in another embodiment by introducing said nucleic acid molecules into an organelle such as an plastid or mitochondria in the transgenic organism. However, it is also possible to modify the expression of the gene which is naturally present in the organisms, for example by integrating a nucleic acid sequence, encoding a plastidic targeting sequence in front (5 prime) of the coding sequence, leading to a functional preprotein, which is directed for example to the plastids.

[6376] for the disclosure of the paragraphs [0053.0.0.23] to [0058.0.0.23] see paragraphs [0053.0.0.0] to [0058.0.0.0] above.

[6377] In case the activity of the Escherichia coli protein b1704 or its homologs, e.g. a “3-deoxy-D-arabinoheptulosonate-7-phosphate synthase (DAHP synthetase), tryptophanrepressible” is increased advantageously in an organelle such as a plastid or mitochondria, preferably, in one embodiment an increase of the fine chemical, preferably of salicylic acid between 25% and 266% or more is conferred.

In case the activity of the Escherichia coli protein b2040 or its homologs, e.g. a “TDP-rhamnose synthetase, NAD(P)-binding” is increased advantageously in an organelle such as a plastid or mitochondria, preferably, in one embodiment an increase of the fine chemical, preferably of salicylic acid between 41% and 81% or more is conferred.
In case the activity of the Escherichia coli protein b3337 or its homologs, e.g. a “yheA protein” is increased advantageously in an organelle such as a plastid or mitochondria, preferably, in one embodiment an increase of the fine chemical, preferably of salicylic acid between 73% and 104% or more is conferred.
In case the activity of the Escherichia coli protein b3616 or its homologs, e.g. a “threonine 3-dehydrogenase, NAD (P)-binding” is increased advantageously in an organelle such as a plastid or mitochondria, preferably, in one embodiment an increase of the fine chemical, preferably of salicylic acid between 49% and 75% or more is conferred.
In case the activity of the Escherichia coli protein b4039 or its homologs, e.g. a “4-hydroxybenzoate synthetase” is increased advantageously in an organelle such as a plastid or mitochondria, preferably, in one embodiment an increase of the fine chemical, preferably of salicylic acid between 44% and 173% or more is conferred.
In case the activity of the Escherichia coli protein YLL033W or its homologs, e.g. a “uncharacterized protein” is increased advantageously in an organelle such as a plastid or mitochondria, preferably, in one embodiment an increase of the fine chemical, preferably of salicylic acid between 40% and 59% or more is conferred:

[6378] In one embodiment, the activity of any on of the Escherichia coli proteins b1704, b2040, b3337, b3616 and/or b4039 and/or of the Saccharomyces cerevisiae protein YLL033W f or their homologs, is advantageously increased in an organelle such as a plastid or mitochondria, preferably conferring an increase of the fine chemical indicated in column 6 “metabolites” for application no. 24 in any one of Tables I to IV, resp.,

[6379] for the disclosure of the paragraphs [0061.0.0.23] and [0062.0.0.23] see paragraphs [0061.0.0.0] and [0062.0.0.0] above.

[6380] A protein having an activity conferring an increase in the amount or level of the fine chemical, preferably upon targeting to the plastids, has in one embodiment the structure of the polypeptide described herein, in particular of the polypeptides comprising the consensus sequence shown in table IV, application no. 24, column 7 or of the polypeptide as shown in the amino acid sequences as disclosed in table II, application no. 24, columns 5 and 7 or the functional homologues thereof as described herein, or is encoded by the nucleic acid molecule characterized herein or the nucleic acid molecule according to the invention, for example by the nucleic acid molecule as shown in table I, application no. 24, columns 5 and 7 or its herein described functional homologues and has the herein mentioned activity.

[6381] For the purposes of the present invention, the reference to the fine chemical, e.g. to the term “salicylic acid”, also encompasses the corresponding salts, such as, for example, the potassium or sodium salts or the salts with amines and/salicylic acid esters, e.g. but not limited to the methyl ester, the phenyl ester or the menthol ester.

[6382] for the disclosure of the paragraphs [0065.0.0.23] and [0066.0.0.23] see paragraphs [0065.0.0.0] and [0066.0.0.0] above.

[6383] In one embodiment, the process of the present invention comprises one or more of the following steps
[6384] a) stabilizing a protein conferring the increased expression of a protein encoded by the nucleic acid molecule of the invention or of the polypeptide of the invention, e.g. of a polypeptide having the activity of a protein as indicated in table II, application no. 24, columns 5 and 7 or its homologs activity having herein-mentioned salicylic acid increasing activity; and/or
[6385] b) stabilizing a mRNA conferring the increased expression of a protein encoded by the nucleic acid molecule of the invention, which is in the sense of the invention a fusion of a nucleic acid sequence encoding a transit peptide and of a nucleic acid sequence as shown in table I, application no. 24, columns 5 and 7, e.g. a nucleic acid sequence encoding a polypeptide having the activity of a protein as indicated in table II, application no. 24, columns 5 and 7 or its homologs activity or of a mRNA encoding the polypeptide of the present invention having herein-mentioned salicylic acid increasing activity; and/or
[6386] c) increasing the specific activity of a protein conferring the increased expression of a protein encoded by the nucleic acid molecule of the invention or of the polypeptide of the present invention having herein-mentioned salicylic acid increasing activity, e.g. of a polypeptide having the activity of a protein as indicated in table II, application no. 24, columns 5 and 7 or its homologs activity, or decreasing the inhibitory regulation of the polypeptide of the invention; and/or
[6387] d) generating or increasing the expression of an endogenous or artificial transcription factor mediating the expression of a protein conferring the increased expression of a protein encoded by the nucleic acid molecule of the invention or of the polypeptide of the invention having herein-mentioned salicylic acid increasing activity, e.g. of a polypeptide having the activity of a protein as indicated in table II, application no. 24, columns 5 and 7 or its homologs activity; and/or
[6388] e) stimulating activity of a protein conferring the increased expression of a protein encoded by the nucleic acid molecule of the present invention or a polypeptide of the present invention having herein-mentioned salicylic acid increasing activity, e.g. of a polypeptide having the activity of a protein as indicated in table II, application no. 24, columns 5 and 7 or its homologs activity, by adding one or more exogenous inducing factors to the organisms or parts thereof; and/or
[6389] f) expressing a transgenic gene encoding a protein conferring the increased expression of a polypeptide encoded by the nucleic acid molecule of the present invention or a polypeptide of the present invention, having herein-mentioned salicylic acid increasing activity, e.g. of a polypeptide having the activity of a protein as indicated in table II, application no. 24, columns 5 and 7 or its homologs activity, and/or
[6390] g) increasing the copy number of a gene conferring the increased expression of a nucleic acid molecule encoding a polypeptide encoded by the nucleic acid molecule of the invention or the polypeptide of the invention having herein-mentioned salicylic acid increasing activity, e.g. of a polypeptide having the activity of a protein as indicated in table II, application no. 24, columns 5 and 7 or its homologs activity; and/or
[6391] h) increasing the expression of the endogenous gene encoding the polypeptide of the invention, e.g. a polypeptide having the activity of a protein as indicated in table II, application no. 24, columns 5 and 7 or its homologs activity, by adding positive expression or removing negative expression elements, e.g. homologous recombination can be used to either introduce positive regulatory elements like for plants the 35S enhancer into the promoter or to remove repressor elements form regulatory regions. Further gene conversion methods can be used to disrupt repressor elements or to enhance to activity of positive elements. Positive elements can be randomly introduced in plants by T-DNA or transposon mutagenesis and lines can be identified in which the positive elements have be integrated near to a gene of the invention, the expression of which is thereby enhanced; and/or
[6392] i) modulating growth conditions of an organism in such a manner, that the expression or activity of the gene encoding the protein of the invention or the protein itself is enhanced for example, microorganisms or plants can be grown for example under a higher temperature regime leading to an enhanced expression of heat shock proteins, which can lead an enhanced fine chemical production; and/or
[6393] j) selecting of organisms with especially high activity of the proteins of the invention from natural or from mutagenized resources and breeding them into the target organisms, eg the elite crops; and/or
[6394] k) directing a protein encoded by the nucleic acid molecule of the invention or of the polypeptide of the present invention having herein-mentioned salicylic acid increasing activity, e.g. of polypeptide having the activity of a protein as indicated in table II, application no. 24, columns 5 and 7 or its homologs activity, to the plastids by the addition of a plastidial targeting sequence; and/or
[6395] l) generating the expression of a protein encoded by the nucleic acid molecule of the invention or of the polypeptide of the present invention having herein-mentioned salicylic acid increasing activity, e.g. of a polypeptide having the activity of a protein as indicated in table II, application no. 24, columns 5 and 7 or its homologs activity in plastids by the stable or transient transformation advantageously stable transformation of organelles preferably plastids with an inventive nucleic acid sequence preferably in form of an expression cassette containing said sequence leading to the plastidial expression of the nucleic acids or polypeptides of the invention; and/or
[6396] m) generating the expression of a protein encoded by the nucleic acid molecule of the invention or of the polypeptide of the present invention having herein-mentioned salicylic acid increasing activity, e.g. of a polypeptide having the activity of a protein as indicated in table II, application no. 24, columns 5 and 7 or its homologs activity in plastids by integration of a nucleic acid of the invention into the plastidal genome under control of preferable a plastidial promoter.

[6397] Preferably, said mRNA is the nucleic acid molecule of the present invention and/or the protein conferring the increased expression of a protein encoded by the nucleic acid molecule of the present invention alone or link to a transit nucleic acid sequence or transit peptide encoding nucleic acid sequence or the polypeptide having the herein mentioned activity, e.g. conferring the increase of the respective fine chemical as indicated in column 6 of application no. 24 in Table I to IV, resp., after increasing the expression or activity of the encoded polypeptide preferably in organelles such as plastids or having the activity of a polypeptide having an activity as the protein as shown in table II, application no. 24, column 3 or its homologs. Preferably the increase of the fine chemical takes place in plastids.

[6398] for the disclosure of the paragraphs [0069.0.0.23] to [0079.0.0.23] see paragraphs [0069.0.0.0] to [0079.0.0.0] above.

[6399] The activation of an endogenous polypeptide having above-mentioned activity, e.g. having the activity of a protein as shown in table II, application no. 24, column 3 or of the polypeptide of the invention, e.g. conferring the increase of the respective fine chemical after increase of expression or activity in the cytsol and/or in an organelle like a plastid, preferentially in the plastid, can also be increased by introducing a synthetic transcription factor, which binds close to the coding region of the gene encoding the protein as shown in table II, application no. 24, column 3 and activates its transcription. A chimeric zinc finger protein can be constructed, which comprises a specific DNA-binding domain and an activation domain as e.g. the VP16 domain of Herpes Simplex virus. The specific binding domain can bind to the regulatory region of the gene encoding the protein as shown in table II, application no. 24, column 3. The expression of the chimeric transcription factor in a organism, in particular in a plant, leads to a specific expression of the protein as shown in table II, application no. 24, column 3, see e.g. in WO01/52620, Oriz, Proc. Natl. Acad. Sci. USA, 2002, Vol. 99, 13290 or Guan, Proc. Natl. Acad. Sci. USA, 2002, Vol. 99, 13296.

[6400] for the disclosure of the paragraphs [0081.0.0.23] to [0084.0.0.23] see paragraphs [0081.0.0.0] to [0084.0.0.0] above.

[6401] Owing to the introduction of a gene or a plurality of genes conferring the expression of the nucleic acid molecule of the invention or the nucleic acid molecule used in the method of the invention or the polypeptide of the invention or the polypeptide used in the method of the invention as described below, for example the nucleic acid construct mentioned below into an organism alone or in combination with other genes, it is possible not only to increase the biosynthetic flux towards the end product, but also to increase, modify or create de novo an advantageous, preferably novel metabolites composition in the organism, e.g. an advantageous salicylic acid, composition comprising a higher content of (from a viewpoint of nutritional physiology limited) salicylic acid and/or the above mentioned salts and/or esters.

[6402] for the disclosure of this paragraph see paragraph [0086.0.0.0] above.

[6403] By influencing the metabolism thus, it is possible to produce, in the process according to the invention, further advantageous compounds. Examples of such compounds are salicylic acid salt and/or esters, cinnamate, coumarate, chorismate and/or phenylpyruvate.

[6404] Accordingly, in one embodiment, the process according to the invention relates to a process, which comprises:
[6405] a) providing a non-human organism, preferably a microorganism, a non-human animal, a plant or animal cell, a plant or animal tissue or a plant, more preferably a microorganism, a plant or a plant tissue;
[6406] b) increasing the activity of a protein as shown in table II, application no. 24, column 3 or of a polypeptide being encoded by the nucleic acid molecule of the present invention and described below, e.g. conferring an increase of the respective fine chemical as indicated in any one of Tables I to IV, application no. 24, column 6 “metabolite” in the organism, preferably in the microorganism, the non-human animal, the plant or animal cell, the plant or animal tissue or the plant, more preferably a microorganism, a plant or a plant tissue, in the cytsol or in the plastids, preferentially in the plastids,
[6407] c) growing the organism, preferably the microorganism, the non-human animal, the plant or animal cell, the plant or animal tissue or the plant under conditions which permit the production of the respective fine chemical in the organism, preferably the microorganism, the plant cell, the plant tissue or the plant; and
[6408] d) if desired, recovering, optionally isolating, the respective free and/or bound the fine chemical and, optionally further free and/or bound amino acids synthesized by the organism, the microorganism, the non-human animal, the plant or animal cell, the plant or animal tissue or the plant.

[6409] The organism, in particular the microorganism, non-human animal, the plant or animal cell, the plant or animal tissue or the plant is advantageously grown in such a way that it is not only possible to recover, if desired isolate the free or bound the respective fine chemical or the free and bound the respective fine chemical but as option it is also possible to produce, recover and, if desired isolate, other free or/and bound salicylic acid salt and/or esters, cinnamate, coumarate, chorismate and/or phenylpyruvate.

[6410] for the disclosure of the paragraphs [0090.0.0.23] to [0097.0.0.23] see paragraphs [0090.0.0.0] to [0097.0.0.0] above.

[6411] With regard to the nucleic acid sequence as depicted a nucleic acid construct which contains a nucleic acid sequence mentioned herein or an organism (=transgenic organism) which is transformed with said nucleic acid sequence or said nucleic acid construct, “transgene” means all those constructs which have been brought about by genetic manipulation methods, preferably in which either
[6412] a) the nucleic acid sequence as shown in table I, application no. 24, columns 5 and 7 or a derivative thereof, or
[6413] b) a genetic regulatory element, for example a promoter, which is functionally linked to the nucleic acid sequence as shown table I, application no. 24, columns 5 and 7 or a derivative thereof, or
[6414] c) (a) and (b)
   is/are not present in its/their natural genetic environment or has/have been modified by means of genetic manipulation methods, it being possible for the modification to be, by way of example, a substitution, addition, deletion, inversion or insertion of one or more nucleotide. “Natural genetic environment” means the natural chromosomal locus in the organism of origin or the presence in a genomic library. In the case of a genomic library, the natural, genetic environment of the nucleic acid sequence is preferably at least partially still preserved. The environment flanks the nucleic acid sequence at least on one side and has a sequence length of at least 50 bp, preferably at least 500 bp, particularly preferably at least 1000 bp, very particularly preferably at least 5000 bp.

[6415] The use of the nucleic acid sequence according to the invention or of the nucleic acid construct according to the invention for the generation of transgenic plants is therefore also subject matter of the invention. As mentioned above the inventive nucleic acid sequence consists advantageously of the nucleic acid sequences as depicted in the sequence protocol and disclosed in table I, application no. 24, columns 5 and 7 joined to a nucleic acid sequence encoding a transit peptide, or a targeting nucleic acid sequence which directs the nucleic acid sequences disclosed in table I, application no. 24, columns 5 and 7 to the organelle preferentially the plastids. Alternatively the inventive nucleic acids sequences consist advantageously of the nucleic acid sequences as depicted in the sequence protocol and disclosed in table I, application no. 24, columns 5 and 7 joined preferably to a nucleic acids sequence mediating the stable integration of nucleic acids into the plastidial genome and optionally sequences mediating the transcription of the sequence in the plastidial compartment. A transient expression is in principal also desirable and possible.

[6416] for the disclosure of this paragraph see paragraph [0100.0.0.0] above.

[6417] In an advantageous embodiment of the invention, the organism takes the form of a plant whose salicylic acid content is modified advantageously owing to the nucleic acid molecule of the present invention expressed, hence it enhance plant disease resistance. Further, An increased content in salicylic acid or its salts or esters in plants is important because of the multiple use of these compounds as food flavorings and preservatives; antiseptic, anti-infectives, antipyretic, antipyretic, analgesic, fungicidal, keratinolytic and antipyretic agent and as pharmaceutically active ingredients including against colds, flu, or other virus infections, which can be achieved by working up the genetically modified plants.

After the activity of the protein as shown in table II, application no. 24, column 3 has been increased or generated, or after the expression of nucleic acid molecule or polypeptide according to the invention has been generated or increased, the transgenic plant generated thus is grown on or in a nutrient medium or else in the soil and subsequently harvested.

[6418] for the disclosure of the paragraphs [0102.0.0.23] to [0110.0.0.23] see paragraphs [0102.0.0.0] to [0110.0.0.0] above.

[6419] In a preferred embodiment, the respective fine chemical as indicated in any one of Tables I to IV, application no. 24, column 6 “metabolite” (salicylic acid) is produced in accordance with the invention and, if desired, is isolated. The production of further salts or esters of salicylic acid or mixtures thereof or mixtures with other compounds by the process according to the invention is advantageous.

Thus, the content of plant components and preferably also further impurities is as low as possible, and the abovementioned fine chemicals are obtained in as pure form as possible. In these applications, the content of plant components advantageously amounts to less than 10%, preferably 1%, more preferably 0.1%, very especially preferably 0.01% or less.

[6420] In another preferred embodiment of the invention a combination of the increased expression of the nucleic acid sequence or the protein of the invention together with the transformation of a protein or polypeptide or a compound, which functions as a sink for the desired fine chemical, for example salicylic acid in the organism, is useful to increase the production of the respective fine chemical.

[6421] In the case of the fermentation of microorganisms, the abovementioned salicylic acid may accumulate in the medium and/or the cells. If microorganisms are used in the process according to the invention, the fermentation broth can be processed after the cultivation. Depending on the requirement, all or some of the biomass can be removed from the fermentation broth by separation methods such as, for example, centrifugation, filtration, decanting or a combination of these methods, or else the biomass can be left in the fermentation broth. The fermentation broth can subsequently be reduced, or concentrated, with the aid of known methods such as, for example, rotary evaporator, thin-layer evaporator, falling film evaporator, by reverse osmosis or by nanofiltration. Afterwards advantageously further compounds for formulation can be added such as corn starch or silicates. This concentrated fermentation broth advantageously together with compounds for the formulation can subsequently be processed by lyophilization, spray drying, spray granulation or by other methods. Preferably the the respective fine chemical or the salicylic acid comprising compositions are isolated from the organisms, such as the microorganisms or plants or the culture medium in or on which the organisms have been grown, or from the organism and the culture medium, in the known manner, for example via extraction, distillation, crystallization, chromatography or a combination of these methods. These purification methods can be used alone or in combination with the aforementioned methods such as the separation and/or concentration methods.

[6422] Transgenic plants which comprise the salicylic acid and/or salicylic acid esters synthesized in the process according to the invention can advantageously be marketed directly without there being any need for salicylic acid and/or salicylic acid esters synthesized to be isolated. Plants for the process according to the invention are listed as meaning intact plants and all plant parts, plant organs or plant parts such as leaf, stem, seeds, root, tubers, anthers, fibers, root hairs, stalks, embryos, calli, cotelydons, petioles, harvested material, plant tissue, reproductive tissue and cell cultures which are derived from the actual transgenic plant and/or can be used for bringing about the transgenic plant. In this context, the seed comprises all parts of the seed such as the seed coats, epidermal cells, seed cells, endosperm or embryonic tissue. However, the respective fine chemical produced in the process according to the invention can also be isolated from the organisms, advantageously plants, in the form of their oils, fats, lipids as extracts, e.g. ether, alcohol, or other organic solvents or water containing extract and/or free salicylic acid and/or salicylic acid esters. The respective fine chemical produced by this process can be obtained by harvesting the organisms, either from the crop in which they grow, or from the field. This can be done via pressing or extraction of the plant parts, preferably the plant seeds. To increase the efficiency of oil extraction it is beneficial to clean, to temper and if necessary to hull and to flake the plant material especially the seeds. E.g the oils, fats, lipids, extracts, e.g. ether, alcohol, or other organic solvents or water containing extract and/or free salicylic acid and/or salicylic acid esters can be obtained by what is known as cold beating or cold pressing without applying heat. To allow for greater ease of disruption of the plant parts, specifically the seeds, they are previously comminuted, steamed or roasted. The seeds, which have been pretreated in this manner can subsequently be pressed or extracted with solvents such as preferably warm hexane. The solvent is subsequently removed. In the case of microorganisms, the latter are, after harvesting, for example extracted directly without further processing steps or else, after disruption, extracted via various methods with which the skilled worker is familiar. In this manner, more than 96% of the compounds produced in the process can be isolated. Thereafter, the resulting products are processed further, i.e. degummed and/or refined. In this process, substances such as the plant mucilages and suspended matter are first removed. What is known as desliming can be affected enzymatically or, for example, chemico-physically by addition of acid such as phosphoric acid.

[6423] Salicylic acid and/or salicylic acid esters can for example be analyzed advantageously via HPLC, LC or GC separation and MS (masspectrometry) detection methods. The unambiguous detection for the presence of salicylic acid and/or salicylic acid containing products can be obtained by analyzing recombinant organisms using analytical standard methods: LC, LC-MS, MS or TLC). The material to be analyzed can be disrupted by sonication, grinding in a glass mill, liquid nitrogen and grinding, cooking, or via other applicable methods.

[6424] In a preferred embodiment, the present invention relates to a process for the production of the respective fine chemical comprising or generating in an organism or a part thereof, preferably in a cell compartment such as a plastid or mitochondria, the expression of at least one nucleic acid molecule comprising a nucleic acid molecule selected from the group consisting of:
[6425] a) nucleic acid molecule encoding, preferably at least the mature form, of the polypeptide shown in table II, application no. 24, columns 5 and 7 or a fragment thereof, which confers an increase in the amount of the respective fine chemical in an organism or a part thereof;
[6426] b) nucleic acid molecule comprising, preferably at least the mature form, of the nucleic acid molecule shown in table I, application no. 24, columns 5 and 7;
[6427] c) nucleic acid molecule whose sequence can be deduced from a polypeptide sequence encoded by a nucleic acid molecule of (a) or (b) as result of the degeneracy of the genetic code and conferring an increase in the amount of the respective fine chemical in an organism or a part thereof;
[6428] d) nucleic acid molecule encoding a polypeptide which has at least 50% identity with the amino acid sequence of the polypeptide encoded by the nucleic acid molecule of (a) to (c) and conferring an increase in the amount of the respective fine chemical in an organism or a part thereof;
[6429] e) nucleic acid molecule which hybridizes with a nucleic acid molecule of (a) to (c) under stringent hybridisation conditions and conferring an increase in the amount of the respective fine chemical in an organism or a part thereof;
[6430] f) nucleic acid molecule encoding a polypeptide, the polypeptide being derived by substituting, deleting and/or adding one or more amino acids of the amino acid sequence of the polypeptide encoded by the nucleic acid molecules (a) to (d), preferably to (a) to (c) and conferring an increase in the amount of the respective fine chemical in an organism or a part thereof;
[6431] g) nucleic acid molecule encoding a fragment or an epitope of a polypeptide which is encoded by one of the nucleic acid molecules of (a) to (e), preferably to (a) to (c) and conferring an increase in the amount of the respective fine chemical in an organism or a part thereof;
[6432] h) nucleic acid molecule comprising a nucleic acid molecule which is obtained by amplifying nucleic acid molecules from a cDNA library or a genomic library using the primers shown in table III, application no. 24, column 7 and conferring an increase in the amount of the respective fine chemical in an organism or a part thereof;
[6433] i) nucleic acid molecule encoding a polypeptide which is isolated, e.g. from an expression library, with the aid of monoclonal antibodies against a polypeptide encoded by one of the nucleic acid molecules of (a) to (h), preferably to (a) to (c), and conferring an increase in the amount of the respective fine chemical in an organism or a part thereof;
[6434] j) nucleic acid molecule which encodes a polypeptide comprising the consensus sequence shown in table IV, application no. 24, column 7 and conferring an increase in the amount of the respective fine chemical in an organism or a part thereof;
[6435] k) nucleic acid molecule comprising one or more of the nucleic acid molecule encoding the amino acid sequence of a polypeptide encoding a domain of the polypeptide shown, in table II, application no. 24, columns 5 and 7 and conferring an increase in the amount of the fine chemical in an organism or a part thereof; and
[6436] l) nucleic acid molecule which is obtainable by screening a suitable library under stringent conditions with a probe comprising one of the sequences of the nucleic acid molecule of (a) to (k), preferably to (a) to (c), or with a fragment of at least 15 nt, preferably 20 nt, 30 nt, 50 nt, 100 nt, 200 nt or 500 nt of the nucleic acid molecule characterized in (a) to (k), preferably to (a) to (c), and conferring an increase in the amount of the respective fine chemical in an organism or a part thereof;
   or which comprises a sequence which is complementary thereto.

[6437] In one embodiment, the nucleic acid molecule used in the process of the invention distinguishes over the sequence indicated in table I A, application no. 24, columns 5 and 7 by one or more nucleotides. In one embodiment, the nucleic acid molecule used in the process of the invention does not consist of the sequence indicated in table I A, application no. 24, columns 5 and 7. In one embodiment, the nucleic acid molecule used in the process of the invention is less than 100%, 99.999%, 99.99%, 99.9% or 99% identical to a sequence indicated in table I A, application no. 24, columns 5 and 7. In another embodiment, the nucleic acid molecule does not encode a polypeptide of a sequence indicated in table II A, application no. 24, columns 5 and 7.

[6438] In one embodiment, the nucleic acid molecule used in the process of the invention distinguishes over the sequence indicated in table I B, application no. 24, columns 5 and 7, by one or more nucleotides. In one embodiment, the nucleic acid molecule used in the process of the invention does not consist of the sequence indicated in table I B, application no. 24, columns 5 and 7. In one embodiment, the nucleic acid molecule used in the process of the invention is less than 100%, 99.999%, 99.99%, 99.9% or 99% identical to a sequence indicated in table I B, application no. 24, columns 5 and 7. In another embodiment, the nucleic acid molecule does not encode a polypeptide of a sequence indicated in table II B, application no. 24, columns 5 and 7.

[6439] In one embodiment, the nucleic acid molecule used in the process distinguishes over the sequence shown in table I, application no. 24, columns 5 and 7 by one or more nucleotides or does not consist of the sequence shown in table I, application no. 24, columns 5 and 7. In one embodiment, the nucleic acid molecule of the present invention is less than 100%, 99.999%, 99.99%, 99.9% or 99% identical to the sequence shown in table I, application no. 24, columns 5 and 7. In another embodiment, the nucleic acid molecule does not encode a polypeptide of the sequence shown in table II, application no. 24, columns 5 and 7.

[6440] for the disclosure of the paragraphs [0118.0.0.23] to [0120.0.0.23] see paragraphs [0118.0.0.0] to [0120.0.0.0] above.

[6441] The expression of nucleic acid molecules with the sequence shown in table I, application no. 24, columns 5 and 7, or nucleic acid molecules which are derived from the amino acid sequences shown in table II, application no. 24, columns 5 and 7 or from polypeptides comprising the consensus sequence shown in table IV, application no. 24, column 7, or their derivatives or homologues encoding polypeptides with the enzymatic or biological activity of a protein as shown in table II, application no. 24, column 3, and conferring an increase of the respective fine chemical (column 6 of application no. 24 in any one of Tables I to IV) after increasing its plastidic and/or specific activity in the plastids is advantageously increased in the process according to the invention by expression either in the cytsol or in an organelle such as a plastid or mitochondria or both, preferably in plastids.

[6442] for the disclosure of this paragraph see paragraph [0122.0.0.0] above.

[6443] Nucleic acid molecules, which are advantageous for the process according to the invention and which encode polypeptides with the activity of a protein as shown in table II, application no. 24, column 3 can be determined from generally accessible databases.

[6444] for the disclosure of this paragraph see paragraph [0124.0.0.0] above.

[6445] The nucleic acid molecules used in the process according to the invention take the form of isolated nucleic acid sequences, which encode polypeptides with the activity of the proteins as shown in table II, application no. 24, column 3 and which confer an increase in the level of the respective fine chemical indicated in table II, application no. 24, column 6 by being expressed either in the cytsol or in an organelle such as a plastid or mitochondria or both, preferably in plastids, and the gene product being localized in the plastid and other parts of the cell or in the plastid as described above.

[6446] for the disclosure of the paragraphs [0126.0.0.23] to [0133.0.0.23] see paragraphs [0126.0.0.0] to [0133.0.0.0] above.

[6447] However, it is also possible to use artificial sequences, which differ in one or more bases from the nucleic acid sequences found in organisms, or in one or more amino acid molecules from polypeptide sequences found in organisms, in particular from the polypeptide sequences shown in table II, application no. 24, columns 5 and 7 or the functional homologues thereof as described herein, preferably conferring above-mentioned activity, i.e. conferring an increase of the respective fine chemical after increasing its plastidic activity, e.g. after increasing the activity of a protein as shown in table II, application no. 24, column 3 by—for example—expression either in the cytsol or in an organelle such as a plastid or mitochondria or both, preferably in plastids and the gene product, e.g. the polypeptide, being localized in the plastid and other parts of the cell or in the plastid as described above.

[6448] for the disclosure of the paragraphs [0135.0.0.23] to [0140.0.0.23] see paragraphs [0135.0.0.0] to [0140.0.0.0] above.

[6449] Synthetic oligonucleotide primers for the amplification, e.g. as shown in table III, application no. 24, column 7, by means of polymerase chain reaction can be generated on the basis of a sequence shown herein, for example the sequence shown in table I, application no. 24, columns 5 and 7 or the sequences derived from table II, application no. 24, columns 5 and 7.

[6450] Moreover, it is possible to identify conserved regions from various organisms by carrying out protein sequence alignments with the polypeptide used in the process of the invention, in particular with sequences of the polypeptide of the invention, from which conserved regions, and in turn, degenerate primers can be derived. Conserved regions are those, which show a very little variation in the amino acid in one particular position of several homologs from different origin. The consensus sequence shown in table IV, application no. 24, column 7 is derived from said alignments.

[6451] Degenerated primers can then be utilized by PCR for the amplification of fragments of novel proteins having above-mentioned activity, e.g. conferring the increase of the fine chemical after increasing the expression or activity or having the activity of a protein as shown in table II, application no. 24, column 3 or further functional homologs of the polypeptide of the invention from other organisms.

[6452] for the disclosure of the paragraphs [0144.0.0.23] to [0151.0.0.23] see paragraphs [0144.0.0.0] to [0151.0.0.0] above.

[6453] Polypeptides having above-mentioned activity, i.e. conferring the increase of the respective fine chemical indicated in table I, application no. 24, column 6, and being derived from other organisms, can be encoded by other DNA sequences which hybridize to the sequences shown in table I, application no. 24, columns 5 and 7, preferably of table I B, application no. 24, columns 5 and 7 under relaxed hybridization conditions and which code on expression for peptides having the respective fine chemical, i.e. salicylic acid resp., in particular, of salicylic acid increasing activity.

[6454] for the disclosure of the paragraphs [0153.0.0.23] to [0159.0.0.23] see paragraphs [0153.0.0.0] to [0159.0.0.0] above.

[6455] Further, the nucleic acid molecule of the invention comprises a nucleic acid molecule, which is a complement of one of the nucleotide sequences of above mentioned nucleic acid molecules or a portion thereof. A nucleic acid molecule which is complementary to one of the nucleotide sequences shown in table I, application no. 24, columns 5 and 7, preferably shown in table I B, application no. 24, columns 5 and 7 is one which is sufficiently complementary to one of the nucleotide sequences shown in table I, application no. 24, columns 5 and 7, preferably shown in table I B, application no. 24, columns 5 and 7 such that it can hybridize to one of the nucleotide sequences shown in table I, application no. 24, columns 5 and 7, preferably shown in table I B, application no. 24, columns 5 and 7, thereby forming a stable duplex. Preferably, the hybridisation is performed under stringent hybridization conditions. However, a complement of one of the herein disclosed sequences is preferably a sequence complement thereto according to the base pairing of nucleic acid molecules well known to the skilled person. For example, the bases A and G undergo base pairing with the bases T and U or C, resp. and visa versa. Modifications of the bases can influence the base-pairing partner.

[6456] The nucleic acid molecule of the invention comprises a nucleotide sequence which is at least about 30%, 35%, 40% or 45%, preferably at least about 50%, 55%, 60% or 65%, more preferably at least about 70%, 80%, or 90%, and even more preferably at least about 95%, 97%, 98%, 99% or more homologous to a nucleotide sequence shown in table I, application no. 24, columns 5 and 7, preferably shown in table I B, application no. 24, columns 5 and 7, or a portion thereof and preferably has above mentioned activity, in particular having a respective fine chemical increasing activity after increasing the activity or an activity of a gene product as shown in table II, application no. 24, column 3 by for example expression either in the cytsol or in an organelle such as a plastid or mitochondria or both, preferably in plastids, and the gene product, e.g. the polypeptide, being localized in the plastid and other parts of the cell or in the plastid as described above.

[6457] The nucleic acid molecule of the invention comprises a nucleotide sequence which hybridizes, preferably hybridizes under stringent conditions as defined herein, to one of the nucleotide sequences shown in table I, application no. 24, columns 5 and 7, preferably shown in table I B, application no. 24, columns 5 and 7, or a portion thereof and encodes a protein having above-mentioned activity, e.g. conferring of a salicylic acid and/or salicylic acid esters increase by for example expression either in the cytsol or in an organelle such as a plastid or mitochondria or both, preferably in plastids, and optionally, the activity of a protein as shown in table II, application no. 24, column 3, and the gene product, e.g. the polypeptide, being localized in the plastid and other parts of the cell or in the plastid as described above.

[6458] Moreover, the nucleic acid molecule of the invention can comprise only a portion of the coding region of one of the sequences shown in table I, application no. 24, columns 5 and 7, preferably shown in table I B, application no. 24, columns 5 and 7, for example a fragment which can be used as a probe or primer or a fragment encoding a biologically active portion of the polypeptide of the present invention or of a polypeptide used in the process of the present invention, i.e. having above-mentioned activity, e.g. conferring an increase of the respective fine chemical indicated in Table I, application no. 24, column 6, if its activity is increased by for example expression either in the cytsol or in an organelle such as a plastid or mitochondria or both, preferably in plastids, and the gene product, e.g. the polypeptide, being localized in the plastid and other parts of the cell or in the plastid as described above. The nucleotide sequences determined from the cloning of the present protein-according-to-the-invention-encoding gene allows for the generation of probes and primers designed for use in identifying and/or cloning its homologues in other cell types and organisms. The probe/primer typically comprises substantially purified oligonucleotide. The oligonucleotide typically comprises a region of nucleotide sequence that hybridizes under stringent conditions to at least about 12, 15 preferably about 20 or 25, more preferably about 40, 50 or 75 consecutive nucleotides of a sense strand of one of the sequences set forth, e.g., in table I, application no. 24, columns 5 and 7, an anti-sense sequence of one of the sequences, e.g., set forth in table I, application no. 24, columns 5 and 7, preferably shown in table I B, application no. 24, columns 5 and 7, or naturally occurring mutants thereof. Primers based on a nucleotide of invention can be used in PCR reactions to clone homologues of the polypeptide of the invention or of the polypeptide used in the process of the invention, e.g. as the primers described in the examples of the present invention, e.g. as shown in the examples. A PCR with the primers shown in table Ill, application no. 24, column 7 will result in a fragment of the gene product as shown in table II, column 3.

[6459] for the disclosure of this paragraph see paragraph [0164.0.0.0] above.

[6460] The nucleic acid molecule of the invention encodes a polypeptide or portion thereof which includes an amino acid sequence which is sufficiently homologous to the amino acid sequence shown in table II, application no. 24, columns 5 and 7 such that the protein or portion thereof maintains the ability to participate in the fine chemical production, in particular an activity increasing the level of salicylic acid, increasing the activity as mentioned above or as described in the examples in plants or microorganisms is comprised.

[6461] As used herein, the language “sufficiently homologous” refers to proteins or portions thereof which have amino acid sequences which include a minimum number of identical or equivalent amino acid residues (e.g., an amino acid residue which has a similar side chain as an amino acid residue in one of the sequences of the polypeptide of the present invention) to an amino acid sequence shown in table II, application no. 24, columns 5 and 7 such that the protein or portion thereof is able to participate in the increase of the fine chemical production. For examples having the activity of a protein as shown in table II, column 3 and as described herein.

[6462] In one embodiment, the nucleic acid molecule of the present invention comprises a nucleic acid that encodes a portion of the protein of the present invention. The protein is at least about 30%, 35%, 40%, 45% or 50%, preferably at least about 55%, 60%, 65% or 70%, and more preferably at least about 75%, 80%, 85%, 90%, 91%, 92%, 93% or 94% and most preferably at least about 95%, 97%, 98%, 99% or more homologous to an entire amino acid sequence of table II, application no. 24, columns 5 and 7 and having above-mentioned activity, e.g. conferring preferably the increase of the respective fine chemical by for example expression either in the cytsol or in an organelle such as a plastid or mitochondria or both, preferably in plastids, and the gene product, e.g. the polypeptide, being localized in the plastid and other parts of the cell or in the plastid as described above.

[6463] for the disclosure of the paragraphs [0168.0.0.23] and [0169.0.0.23] see paragraphs [0168.0.0.0] and [0169.0.0.0] above.

[6464] The invention further relates to nucleic acid molecules that differ from one of the nucleotide sequences shown in table I, application no. 24, columns 5 and 7 (and portions thereof) due to degeneracy of the genetic code and thus encode a polypeptide of the present invention, in particular a polypeptide having above mentioned activity, e.g. conferring an increase in the respective fine chemical in a organism, e.g. as that polypeptides depicted by the sequence shown in table II, application no. 24, columns 5 and 7 or the functional homologues. Advantageously, the nucleic acid molecule of the invention comprises, or in an other embodiment has, a nucleotide sequence encoding a protein comprising, or in an other embodiment having, an amino acid sequence shown in table II, application no. 24, columns 5 and 7 or the functional homologues. In a still further embodiment, the nucleic acid molecule of the invention encodes a full length protein which is substantially homologous to an amino acid sequence shown in table II, application no. 24, columns 5 and 7 or the functional homologues. However, in a preferred embodiment, the nucleic acid molecule of the present invention does not consist of the sequence shown in table I, application no. 24, columns 5 and 7, preferably as indicated in table I A, application no. 24, columns 5 and 7. Preferably the nucleic acid molecule of the invention is a functional homologue or identical to a nucleic acid molecule indicated in table I B, application no. 24, columns 5 and 7.

[6465] for the disclosure of the paragraphs [0171.0.0.23] to [0173.0.0.23] see paragraphs [0171.0.0.0] to [0173.0.0.0] above.

[6466] Accordingly, in another embodiment, a nucleic acid molecule of the invention is at least 15, 20, 25 or 30 nucleotides in length. Preferably, it hybridizes under stringent conditions to a nucleic acid molecule comprising a nucleotide sequence of the nucleic acid molecule of the present invention or used in the process of the present invention, e.g. comprising the sequence shown in table I, application no. 24, columns 5 and 7. The nucleic acid molecule is preferably at least 20, 30, 50, 100, 250 or more nucleotides in length.

[6467] for the disclosure of this paragraph see paragraph [0175.0.0.0] above.

[6468] Preferably, nucleic acid molecule of the invention that hybridizes under stringent conditions to a sequence shown in table I, application no. 24, columns 5 and 7 corresponds to a naturally-occurring nucleic acid molecule of the invention. As used herein, a “naturally-occurring” nucleic acid molecule refers to an RNA or DNA molecule having a nucleotide sequence that occurs in nature (e.g., encodes a natural protein). Preferably, the nucleic acid molecule encodes a natural protein having abovementioned activity, e.g. conferring the respective fine chemical increase after increasing the expression or activity thereof or the activity of a protein of the invention or used in the process of the invention by for example expression the nucleic acid sequence of the gene product in the cytsol and/or in an organelle such as a plastid or mitochondria, preferably in plastids.

[6469] for the disclosure of this paragraph see paragraph [0177.0.0.0] above.

[6470] For example, nucleotide substitutions leading to amino acid substitutions at “non-essential” amino acid residues can be made in a sequence of the nucleic acid molecule of the invention or used in the process of the invention, e.g. shown in table I, application no. 24, columns 5 and 7.

[6471] for the disclosure of the paragraphs [0179.0.0.23] and [0180.0.0.23] see paragraphs [0179.0.0.0] and [0180.0.0.0] above.

[6472] Accordingly, the invention relates to nucleic acid molecules encoding a polypeptide having above-mentioned activity, e.g. conferring an increase in the the respective fine chemical in an organisms or parts thereof by for example expression either in the cytsol or.in an organelle such as a plastid or mitochondria or both, preferably in plastids (as described), that contain changes in amino acid residues that are not essential for said activity. Such polypeptides differ in amino acid sequence from a sequence contained in the sequences shown in table II, application no. 24, columns 5 and 7, preferably shown in table II A, application no. 24, columns 5 and 7 yet retain said activity described herein. The nucleic acid molecule can comprise a nucleotide sequence encoding a polypeptide, wherein the polypeptide comprises an amino acid sequence at least about 50% identical to an amino acid sequence shown in table II, application no. 24, columns 5 and 7, preferably shown in table II A, application no. 24, columns 5 and 7 and is capable of participation in the increase of production of the fine chemical after increasing its activity, e.g. its expression by for example expression either in the cytsol or in an organelle such as a plastid or mitochondria or both, preferably in plastids and the gene product, e.g. the polypeptide, being localized in the plastid and other parts of the cell or in the plastid as described above. Preferably, the protein encoded by the nucleic acid molecule is at least about 60% identical to the sequence shown in table II, application no. 24, columns 5 and 7, preferably shown in table II A, application no. 24, columns 5 and 7, more preferably at least about 70% identical to one of the sequences shown in table II, application no. 24, columns 5 and 7, preferably shown in table II A, application no. 24, columns 5 and 7, even more preferably at least about 80%, 90%, 95% homologous to the sequence shown in table II, application no. 24, columns 5 and 7, preferably shown in table II A, application no. 24, columns 5 and 7, and most preferably at least about 96%, 97%, 98%, or 99% identical to the sequence shown in table II, application no. 24, columns 5 and 7, preferably shown in table II A, application no. 24, columns 5 and 7.

[6473] for the disclosure of the paragraphs [0182.0.0.23] to [0188.0.0.23] see paragraphs [0182.0.0.0] to [0188.0.0.0] above.

[6474] Functional equivalents derived from one of the polypeptides as shown in table II, application no. 24, columns 5 and 7, preferably shown in table II B, application no. 24, columns 5 and 7 resp., according to the invention by substitution, insertion or deletion have at least 30%, 35%, 40%, 45% or 50%, preferably at least 55%, 60%, 65% or 70% by preference at least 80%, especially preferably at least 85% or 90%, 91%, 92%, 93% or 94%, very especially preferably at least 95%, 97%, 98% or 99% homology with one of the polypeptides as shown in table II, application no. 24, columns 5 and 7, preferably shown in table II B, application no. 24, columns 5 and 7 resp., according to the invention and are distinguished by essentially the same properties as the polypeptide as shown in table II, application no. 24, columns 5 and 7, preferably shown in table II B, application no. 24, columns 5 and 7.

[6475] Functional equivalents derived from the nucleic acid sequence as shown in table I, application no. 24, columns 5 and 7, preferably shown in table I B, application no. 24, columns 5 and 7 resp., according to the invention by substitution, insertion or deletion have at least 30%, 35%, 40%, 45% or 50%, preferably at least 55%, 60%, 65% or 70% by preference at least 80%, especially preferably at least 85% or 90%, 91%, 92%, 93% or 94%, very especially preferably at least 95%, 97%, 98% or 99% homology with one of the polypeptides as shown in table II, application no. 24, columns 5 and 7, preferably shown in table II B, application no. 24, columns 5 and 7 resp., according to the invention and encode polypeptides having essentially the same properties as the polypeptide as shown in table II, application no. 24, columns 5 and 7, preferably shown in table II B, application no. 24, columns 5 and 7.

[6476] for the disclosure of this paragraph see paragraph [0191.0.0.0] above.

[6477] A nucleic acid molecule encoding an homologous to a protein sequence of table II, application no. 24, columns 5 and 7, preferably shown in table II B, application no. 24, columns 5 and 7 resp., can be created by introducing one or more nucleotide substitutions, additions or deletions into a nucleotide sequence of the nucleic acid molecule of the present invention, in particular of table I, application no. 24, columns 5 and 7, preferably shown in table I B, application no. 24, columns 5 and 7 resp., such that one or more amino acid substitutions, additions or deletions are introduced into the encoded protein. Mutations can be introduced into the encoding sequences of table I, application no. 24, columns 5 and 7, preferably shown in table I B, application no. 24, columns 5 and 7 resp., by standard techniques, such as site-directed mutagenesis and PCR-mediated mutagenesis.

[6478] for the disclosure of the paragraphs [0193.0.0.23] to [0196.0.0.23] see paragraphs [0193.0.0.0] to [0196.0.0.0] above.

[6479] Homologues of the nucleic acid sequences used, with the sequence shown in table I, application no. 24, columns 5 and 7, preferably shown in table I B, application no. 24, columns 5 and 7, comprise also allelic variants with at least approximately 30%, 35%, 40% or 45% homology, by preference at least approximately 50%, 60% or 70%, more preferably at least approximately 90%, 91%, 92%, 93%, 94% or 95% and even more preferably at least approximately 96%, 97%, 98%, 99% or more homology with one of the nucleotide sequences shown or the abovementioned derived nucleic acid sequences or their homologues, derivatives or analogues or parts of these. Allelic variants encompass in particular functional variants which can be obtained by deletion, insertion or substitution of nucleotides from the sequences shown, preferably from table I, application no. 24, columns 5 and 7, preferably shown in table I B, application no. 24, columns 5 and 7, or from the derived nucleic acid sequences, the intention being, however, that the enzyme activity or the biological activity of the resulting proteins synthesized is advantageously retained or increased.

[6480] In one embodiment of the present invention, the nucleic acid molecule of the invention or used in the process of the invention comprises the sequences shown in any of the table I, application no. 24, columns 5 and 7, preferably shown in table I B, application no. 24, columns 5 and 7. It is preferred that the nucleic acid molecule comprises as little as possible other nucleotides not shown in any one of table I, application no. 24, columns 5 and 7, preferably shown in table I B, application no. 24, columns 5 and 7. In one embodiment, the nucleic acid molecule comprises less than 500, 400, 300, 200, 100, 90, 80, 70, 60, 50 or 40 further nucleotides. In a further embodiment, the nucleic acid molecule comprises less than 30, 20 or 10 further nucleotides. In one embodiment, the nucleic acid molecule use in the process of the invention is identical to the sequences shown in table I, application no. 24, columns 5 and 7, preferably shown in table I B, application no. 24, columns 5 and 7.

[6481] Also preferred is that the nucleic acid molecule used in the process of the invention encodes a polypeptide comprising the sequence shown in table II, application no. 24, columns 5 and 7, preferably shown in table II B, application no. 24, columns 5 and 7. In one embodiment, the nucleic acid molecule encodes less than 150, 130, 100, 80, 60, 50, 40 or 30 further amino acids. In a further embodiment, the encoded polypeptide comprises less than 20, 15, 10, 9, 8, 7, 6 or 5 further amino acids. In one embodiment used in the inventive process, the encoded polypeptide is identical to the sequences shown in table II, application no. 24, columns 5 and 7, preferably shown in table II B, application no. 24, columns 5 and 7.

[6482] In one embodiment, the nucleic acid molecule of the invention or used in the process encodes a polypeptide comprising the sequence shown in table II, application no. 24, columns 5 and 7, preferably shown in table II B, application no. 24, columns 5 and 7 comprises less than 100 further nucleotides. In a further embodiment, said nucleic acid molecule comprises less than 30 further nucleotides. In one embodiment, the nucleic acid molecule used in the process is identical to a coding sequence of the sequences shown in table I, application no. 24, columns 5 and 7, preferably shown in table I B, application no. 24, columns 5 and 7.

[6483] Polypeptides (=proteins), which still have the essential biological or enzymatic activity of the polypeptide of the present invention conferring an increase of the respective fine chemical indicated in column 6 of Table I, application no. 24, i.e. whose activity is essentially not reduced, are polypeptides with at least 10% or 20%, by preference 30% or 40%, especially preferably 50% or 60%, very especially preferably 80% or 90 or more of the wild type biological activity or enzyme activity, advantageously, the activity is essentially not reduced in comparison with the activity of a polypeptide shown in table II, application no. 24, columns 5 and 7 expressed under identical conditions.

[6484] Homologues of table I, application no. 24, columns 5 and 7 or of the derived sequences of table II, application no. 24, columns 5 and 7 also mean truncated sequences, cDNA, single-stranded DNA or RNA of the coding and noncoding DNA sequence. Homologues of said sequences are also understood as meaning derivatives, which comprise noncoding regions such as, for example, UTRs, terminators, enhancers or promoter variants. The promoters upstream of the nucleotide sequences stated can be modified by one or more nucleotide substitution(s), insertion(s) and/or deletion(s) without, however, interfering with the functionality or activity either of the promoters, the open reading frame (=ORF) or with the 3′-regulatory region such as terminators or other 3′ regulatory regions, which are far away from the ORF. It is furthermore possible that the activity of the promoters is increased by modification of their sequence, or that they are replaced completely by more active promoters, even promoters from heterologous organisms. Appropriate promoters are known to the person skilled in the art and are mentioned herein below.

[6485] for the disclosure of the paragraphs [0203.0.0.23] to [0215.0.0.23] see paragraphs [0203.0.0.0] to [0215.0.0.0] above.

[6486] Accordingly, in one embodiment, the invention relates to a nucleic acid molecule, which comprises a nucleic acid molecule selected from the group consisting of:
[6487] a) nucleic acid molecule encoding, preferably at least the mature form, of the polypeptide shown in table II, application no. 24, columns 5 and 7, preferably in table II B, application no. 24, columns 5 and 7; or a fragment thereof conferring an increase in the amount of the fine chemical according to table II B, application no. 24, column 6 in an organism or a part thereof
[6488] b) nucleic acid molecule comprising, preferably at least the mature form, of the nucleic acid molecule shown in table I, application no. 24, columns 5 and 7, preferably in table I B, application no. 24, columns 5 and 7 or a fragment thereof conferring an increase in the amount of the fine chemical according to table II B, application no. 24, column 6 in an organism or a part thereof;
[6489] c) nucleic acid molecule whose sequence can be deduced from a polypeptide sequence encoded by a nucleic acid molecule of (a) or (b) as result of the degeneracy of the genetic code and conferring an increase in the amount of the fine chemical according to table II B, application no. 24, column 6 in an organism or a part thereof;
[6490] d) nucleic acid molecule encoding a polypeptide whose sequence has at least 50% identity with the amino acid sequence of the polypeptide encoded by the nucleic acid molecule of (a) to (c) and conferring an increase in the amount of the fine chemical according to table II B, application no. 24, column 6 in an organism or a part thereof;
[6491] e) nucleic acid molecule which hybridizes with a nucleic acid molecule of (a) to (c) under stringent hybridisation conditions and conferring an increase in the amount of the fine chemical according to table II B, application no. 24, column 6 in an organism or a part thereof;
[6492] f) nucleic acid molecule encoding a polypeptide, the polypeptide being derived by substituting, deleting and/or adding one or more amino acids of the amino acid sequence of the polypeptide encoded by the nucleic acid molecules (a) to (d), preferably to (a) to (c), and conferring an increase in the amount of the fine chemical according to table II B, application no. 24, column 6 in an organism or a part thereof;
[6493] g) nucleic acid molecule encoding a fragment or an epitope of a polypeptide which is encoded by one of the nucleic acid molecules of (a) to (e), preferably to (a) to (c) and conferring an increase in the amount of the fine chemical according to table II B, application no. 24, column 6 in an organism or a part thereof;
[6494] h) nucleic acid molecule comprising a nucleic acid molecule which is obtained by amplifying a cDNA library or a genomic library using the primers in table III, application no. 24, column 7 and conferring an increase in the amount of the fine chemical according to table II B, application no. 24, column 6 in an organism or a part thereof;
[6495] i) nucleic acid molecule encoding a polypeptide which is isolated, e.g. from a expression library, with the aid of monoclonal antibodies against a polypeptide encoded by one of the nucleic acid molecules of (a) to (g), preferably to (a) to (c) and conferring an increase in the amount of the fine chemical in an organism or a part thereof;
[6496] j) nucleic acid molecule which encodes a polypeptide comprising the consensus sequence shown in table IV, application no. 24, column 7 and conferring an increase in the amount of the fine chemical in an organism or a part thereof;
[6497] k) nucleic acid molecule encoding the amino acid sequence of a polypeptide encoding a domain of the polypeptide shown in table II, application no. 24, columns 5 and 7 and conferring an increase in the amount of the fine chemical according to table II B, application no. 24, column 6 in an organism or a part thereof; and
[6498] l) nucleic acid molecule which is obtainable by screening a suitable nucleic acid library under stringent hybridization conditions with a probe comprising one of the sequences of the nucleic acid molecule of (a) to (k) or with a fragment of at least 15 nt, preferably 20 nt, 30 nt, 50 nt, 100 nt, 200 nt or 500 nt of the nucleic acid molecule characterized in (a) to (h) or of the nucleic acid molecule shown in table I, application no. 24, columns 5 and 7 or a nucleic acid molecule encoding, preferably at least the mature form of, the polypeptide shown in table II, application no. 24, columns 5 and 7, and conferring an increase in the amount of the fine chemical according to table II B, application no. 24, column 6 in an organism or a part thereof; or which encompasses a sequence which is complementary thereto;
   whereby, preferably, the nucleic acid molecule according to (a) to (l) distinguishes over the sequence depicted in table I A and/or I B, application no. 24, columns 5 and 7 by one or more nucleotides. In one embodiment, the nucleic acid molecule of the invention does not consist of the sequence shown in table IA and/or I B, application no. 24, columns 5 and 7. In an other embodiment, the nucleic acid molecule of the present invention is at least 30% identical and less than 100%, 99.999%, 99.99%, 99.9% or 99% identical to the sequence shown in table IA and/or I B, application no. 24, columns 5 and 7. In a further embodiment the nucleic acid molecule does not encode the polypeptide sequence shown in table II A and/or II B, application no. 24, columns 5 and 7. Accordingly, in one embodiment, the nucleic acid molecule of the present invention encodes in one embodiment a polypeptide which differs at least in one or more amino acids from the polypeptide shown in table II A and/or II B, application no. 24, columns 5 and 7 does not encode a protein of the sequence shown in table II A and/or II B, application no. 24, columns 5 and 7. Accordingly, in one embodiment, the protein encoded by a sequence of a nucleic acid according to (a) to (l) does not consist of the sequence shown in table IA and/or I B, application no. 24, columns 5 and 7. In a further embodiment, the protein of the present invention is at least 30% identical to protein sequence depicted in table II A and/or II B, application no. 24, columns 5 and 7 and less than 100%, preferably less than 99.999%, 99.99% or 99.9%, more preferably less than 99%, 985, 97%, 96% or 95% identical to the sequence shown in table II A and/or II B, application no. 24, columns 5 and 7.

[6499] for the disclosure of the paragraphs [0217.0.0.23] to [0226.0.0.23] see paragraphs [0217.0.0.0] to [0226.0.0.0] above.

[6500] In general, vector systems preferably also comprise further cis-regulatory regions such as promoters and terminators and/or selection markers by means of which suitably transformed organisms can be identified. While vir genes and T-DNA sequences are located on the same vector in the case of cointegrated vector systems, binary systems are based on at least two vectors, one of which bears vir genes, but no T-DNA, while a second one bears T-DNA, but no vir gene. Owing to this fact, the last-mentioned vectors are relatively small, easy to manipulate and capable of replication in E. coli and in Agrobacterium. These binary vectors include vectors from the series pBIB-HYG, pPZP, pBecks, pGreen. Those which are preferably used in accordance with the invention are Bin19, pBI101, pBinAR, pGPTV and pCAMBIA. An overview of binary vectors and their use is given by Hellens et al, Trends in Plant Science (2000) 5, 446-451. The vectors are preferably modified in such a manner, that they already contain the nucleic acid coding for the transitpeptide and that the nucleic acids of the invention, preferentially the nucleic acid sequences encoding the polypeptides shown in table II, application no. 24, columns 5 and 7 can be cloned 3′ prime to the transitpeptide encoding sequence, leading to a functional preprotein, which is directed to the plastids and which means that the mature protein fulfills its biological activity.

[6501] for the disclosure of the paragraphs [0228.0.0.23] to [0239.0.0.23] see paragraphs [0228.0.0.0] to [0239.0.0.0] above.

[6502] The abovementioned nucleic acid molecules can be cloned into the nucleic acid constructs or vectors according to the invention in combination together with further genes, or else different genes are introduced by transforming several nucleic acid constructs or vectors (including plasmids) into a host cell, advantageously into a plant cell or a microorganisms.

In addition to the sequence mentioned in Table I, application no. 24, columns 5 and 7 or its derivatives, it is advantageous additionally to express and/or mutate further genes in the organisms. Especially advantageously, additionally at least one further gene of the cinnamate and/or chorismate biosynthetic pathway such as for a salicylic acid precursor, is expressed in the organisms such as plants or microorganisms. It is also possible that the regulation of the natural genes has been modified advantageously so that the gene and/or its gene product is no longer subject to the regulatory mechanisms which exist in the organisms. This leads to an increased synthesis of the amino acids desired since, for example, feedback regulations no longer exist to the same extent or not at all. In addition it might be advantageously to combine the sequences shown in Table I, application no. 24, columns 5 and 7 with genes which generally support or enhances to growth or yield of the target organism, for example genes which lead to faster growth rate of microorganisms or genes which produces stress-, pathogen, or herbicide resistant plants.

[6503] In a further embodiment of the process of the invention, therefore, organisms are grown, in which there is simultaneous overexpression of at least one nucleic acid or one of the genes which code for proteins involved in the salicylic acidmetabolism, in particular in synthesis of salicylic acid.

[6504] Further advantageous nucleic acid sequences which can be expressed in combination with the sequences used in the process and/or the abovementioned biosynthesis genes are the sequences encoding further genes of the salicylic acid biosynthetic pathway, genes of the glutamic acid metabolism, the phosphoenolpyruvate metabolism, the amino acid metabolism, of glycolysis, of the tricarboxylic acid metabolism or their combinations. These genes can lead to an increased synthesis of the essential salicylic acid resp., in particular, of the fine chemical indicated in column 6, application no. 24 of any one of Tables I to IV.

[6505] In a further advantageous embodiment of the process of the invention, the organisms used in the process are those in which simultaneously a salicylic acid degrading protein is attenuated, in particular by reducing the rate of expression of the corresponding gene.

[6506] for the disclosure of the paragraph [0242.2.0.23] see paragraph [0242.2.0.9]

[6507] for the disclosure of the paragraphs [0243.0.0.23] to [0264.0.0.23] see paragraphs [0243.0.0.0] to [0264.0.0.0] above.

[6508] Other preferred sequences for use in operable linkage in gene expression constructs are targeting sequences, which are required for targeting the gene product into specific cell compartments (for a review, see Kermode, Crit. Rev. Plant Sci. 15, 4 (1996) 285-423 and references cited therein), for example into the vacuole, the nucleus, all types of plastids, such as amyloplasts, chloroplasts, chromoplasts, the extracellular space, the mitochondria, the endoplasmic reticulum, elaioplasts, peroxisomes, glycosomes, and other compartments of cells or extracellular preferred are sequences, which are involved in targeting to plastids as mentioned above. Sequences, which must be mentioned in this context are, in particular, the signal-peptide- or transit-peptide-encoding sequences which are known per se. For example, plastid-transit-peptide-encoding sequences enable the targeting of the expression product into the plastids of a plant cell. Targeting sequences are also known for eukaryotic and to a lower extent for prokaryotic organisms and can advantageously be operable linked with the nucleic acid molecule of the present invention as shown in table I, application no. 24, columns 5 and 7 and described herein to achieve an expression in one of said compartments or extracellular.

[6509] for the disclosure of the paragraphs [0266.0.0.23] to [0287.0.0.23] see paragraphs [0266.0.0.0] to [0287.0.0.0] above.

[6510] Accordingly, one embodiment of the invention relates to a vector where the nucleic acid molecule according to the invention is linked operably to regulatory sequences which permit the expression in a prokaryotic or eukaryotic or in a prokaryotic and eukaryotic host. A further preferred embodiment of the invention relates to a vector in which a nucleic acid sequence encoding one of the polypeptides shown in table II, application no. 24, columns 5 and 7 or their homologs is functionally linked to a plastidial targeting sequence. A further preferred embodiment of the invention relates to a vector in which a nucleic acid sequence encoding one of the polypeptides shown in table II, application no. 2410, columns 5 and 7 or their homologs is functionally linked to a regulatory sequences which permit the expression in plastids.

[6511] for the disclosure of the paragraphs [0289.0.0.23] to [0296.0.0.23] see paragraphs [0289.0.0.0] to [0296.0.0.0] above.

[6512] Moreover, a native polypeptide conferring the increase of the respective fine chemical in an organism or part thereof can be isolated from cells (e.g., endothelial cells), for example using the antibody of the present invention as described herein, in particular, an antibody against polypeptides as shown in table II, application no. 24, columns 5 and 7, which can be produced by standard techniques utilizing the polypeptide of the present invention or fragment thereof, i.e., the polypeptide of this invention. Preferred are monoclonal antibodies.

[6513] for the disclosure of this paragraph see paragraph [0298.0.0.0] above.

[6514] In one embodiment, the present invention relates to a polypeptide having the sequence shown in table II, application no. 24, columns 5 and 7 or as coded by the nucleic acid molecule shown in table I, application no. 24, columns 5 and 7 or functional homologues thereof.

[6515] In one advantageous embodiment, in the method of the present invention the activity of a polypeptide is increased comprising or consisting of the consensus sequence shown in table IV, application no. 24, columns 7 and in one another embodiment, the present invention relates to a polypeptide comprising or consisting of the consensus sequence shown in table IV, application no. 24, column 7 whereby 20 or less, preferably 15 or 10, preferably 9, 8, 7, or 6, more preferred 5 or 4, even more preferred 3, even more preferred 2, even more preferred 1, most preferred 0 of the amino acids positions indicated can be replaced by any amino acid.

[6516] for the disclosure of the paragraphs [0301.0.0.23] to [0304.0.0.23] see paragraphs [0301.0.0.0] to [0304.0.0.0] above.

[6517] In one advantageous embodiment, the method of the present invention comprises the increasing of a polypeptide comprising or consisting of plant or microorganism specific consensus sequences.

In one embodiment, said polypeptide of the invention distinguishes over the sequence shown in table II A and/or II B, application no. 24, columns 5 and 7 by one or more amino acids. In one embodiment, polypeptide distinguishes form the sequence shown in table II A and/or II B, application no. 24, columns 5 and 7 by more than 5, 6, 7, 8 or 9 amino acids, preferably by more than 10, 15, 20, 25 or 30 amino acids, even more preferred are more than 40, 50, or 60 amino acids and, preferably, the sequence of the polypeptide of the invention distinguishes from the sequence shown in table II A and/or II B, application no. 24, columns 5 and 7 by not more than 80% or 70% of the amino acids, preferably not more than 60% or 50%, more preferred not more than 40% or 30%, even more preferred not more than 20% or 10%. In an other embodiment, said polypeptide of the invention does not consist of the sequence shown in table II A and/or II B, application no. 24, columns 5 and 7.

[6518] for the disclosure of this paragraph see paragraph [0306.0.0.0] above.

[6519] In one embodiment, the invention relates to polypeptide conferring an increase of level of the respective fine chemical indicated in Table II A and/or II B, application no. 24, column 6 in an organism or part being encoded by the nucleic acid molecule of the invention or used in the process of the invention and having a sequence which distinguishes from the sequence as shown in table II A and/or II B, application no. 24, columns 5 and 7 by one or more amino acids. In another embodiment, said polypeptide of the invention does not consist of the sequence shown in table II A and/or II B, application no. 24, columns 5 and 7. In a further embodiment, said polypeptide of the present invention is less than 100%, 99.999%, 99.99%, 99.9% or 99% identical. In one embodiment, said polypeptide does not consist of the sequence encoded by the nucleic acid molecules shown in table I A and/or I B, application no. 24, columns 5 and 7.

[6520] In one embodiment, the present invention relates to a polypeptide having the activity of the protein as shown in table II, application no. 24, column 3, which distinguishes over the sequence depicted in table II A and/or II B, application no. 24, columns 5 and 7 by one or more amino acids, preferably by more than 5, 6, 7, 8 or 9 amino acids, preferably by more than 10, 15, 20, 25 or 30 amino acids, even more preferred are more than 40, 50, or 60 amino acids but even more preferred by less than 70% of the amino acids, more preferred by less than 50%, even more preferred my less than 30% or 25%, more preferred are 20% or 15%, even more preferred are less than 10%. In a further preferred embodiment the polypeptide of the invention takes the form of a preprotein consisting of a plastidial transitpeptide joint to a polypeptide having the activity of the protein as shown in table II A and/or II B, column 3, from which the transitpeptide is preferably cleaved off upon transport of the preprotein into the organelle, for example into the plastid or mitochondria.

[6521] for the disclosure of the paragraphs [0309.0.0.23] to [0311.0.0.23] see paragraphs [0309.0.0.0] to [0311.0.0.0] above.

[6522] A polypeptide of the invention can participate in the process of the present invention. The polypeptide or a portion thereof comprises preferably an amino acid sequence, which is sufficiently homologous to an amino acid sequence shown in table II, application no. 24, columns 5 and 7.

[6523] Further, the polypeptide can have an amino acid sequence which is encoded by a nucleotide sequence which hybridizes, preferably hybridizes under stringent conditions as described above, to a nucleotide sequence of the nucleic acid molecule of the present invention. Accordingly, the polypeptide has an amino acid sequence which is encoded by a nucleotide sequence that is at least about 35%, 40%, 45%, 50%, 55%, 60%, 65% or 70%, preferably at least about 75%, 80%, 85% or 90, and more preferably at least about 91%, 92%, 93%, 94% or 95%, and even more preferably at least about 96%, 97%, 98%, 99% or more homologous to one of the amino acid sequences as shown in table II A and/or II B, application no. 24, columns 5 and 7. The preferred polypeptide of the present invention preferably possesses at least one of the activities according to the invention and described herein. A preferred polypeptide of the present invention includes an amino acid sequence encoded by a nucleotide sequence which hybridizes, preferably hybridizes under stringent conditions, to a nucleotide sequence of table I A and/or I B, application no. 24, columns 5 and 7 or which is homologous thereto, as defined above.

[6524] Accordingly the polypeptide of the present invention can vary from the sequences shown in table II A and/or II B, application no. 24, columns 5 and 7 in amino acid sequence due to natural variation or mutagenesis, as described in detail herein. Accordingly, the polypeptide comprise an amino acid sequence which is at least about 35%, 40%, 45%, 50%, 55%, 60%, 65% or 70%, preferably at least about 75%, 80%, 85% or 90, and more preferably at least about 91%, 92%, 93%, 94% or 95%, and most preferably at least about 96%, 97%, 98%, 99% or more homologous to an entire amino acid sequence shown in table II A and/or II B, application no. 24, columns 5 and 7.

[6525] for the disclosure of this paragraph see paragraph [0315.0.0.0] above.

[6526] Biologically active portions of an polypeptide of the present invention include peptides comprising amino acid sequences derived from the amino acid sequence of the polypeptide of the present invention or used in the process of the present invention, e.g., the amino acid sequence shown in table II, application no. 24, columns 5 and 7 or the amino acid sequence of a protein homologous thereto, which include fewer amino acids than a full length polypeptide of the present invention or used in the process of the present invention or the full length protein which is homologous to an polypeptide of the present invention or used in the process of the present invention depicted herein, and exhibit at least one activity of polypeptide of the present invention or used in the process of the present invention.

[6527] for the disclosure of this paragraph see paragraph [0317.0.0.0] above.

[6528] Manipulation of the nucleic acid molecule of the invention may result in the production of a protein having differences from the wild-type protein as shown in table II, application no. 24, column 3. Differences shall mean at least one amino acid different from the sequences as shown in table II, application no. 24, column 3, preferably at least 2, 3, 4, 5, 6, 7, 8, 9 or 10 amino acids, more preferably at least 15, 20, 25, 30, 35, 40, 45 or 50 amino acids different from the sequences as shown in table II, application no. 24, column 3. These proteins may be improved in efficiency or activity, may be present in greater numbers in the cell than is usual, or may be decreased in efficiency or activity in relation to the wild type protein.

[6529] Any mutagenesis strategies for the polypeptide of the present invention or the polypeptide used in the process of the present invention to result in increasing said activity are not meant to be limiting; variations on these strategies will be readily apparent to one skilled in the art. Using such strategies, and incorporating the mechanisms disclosed herein, the nucleic acid molecule and polypeptide of the invention may be utilized to generate plants or parts thereof, expressing wildtype proteins or mutated proteins of the proteins as shown in table II, application no. 24, column 3. The nucleic acid molecules and polypeptide molecules of the invention are expressed such that the yield, production, and/or efficiency of production of a desired compound is improved.

[6530] Preferably, the compound is a composition comprising the essentially pure fine chemical, i.e. salicylic acid or a recovered or isolated salicylic acid, respectively, e.g. in free or in protein- or membrane-bound form.

[6531] for the disclosure of the paragraphs [0320.0.0.23] to [0322.0.0.23] see paragraphs [0320.0.0.0] to [0322.0.0.0] above.

[6532] In one embodiment, a protein (=polypeptide) as shown in table II, application no. 24, column 3 refers to a polypeptide having an amino acid sequence corresponding to the polypeptide of the invention or used in the process of the invention, whereas a “non-inventive protein or polypeptide” or “other polypeptide” refers to a polypeptide having an amino acid sequence corresponding to a protein which is not substantially homologous to a polypeptide of the invention, preferably which is not substantially homologous to a polypeptide or protein as shown in table II, application no.

[6533] 24, column 3, e.g., a protein which does not confer the activity described herein and which is derived from the same or a different organism.

[6534] for the disclosure of the paragraphs [0324.0.0.23] to [0329.0.0.23] see paragraphs [0324.0.0.0] to [0329.0.0.0] above.

[6535] In an especially preferred embodiment, the polypeptide according to the invention furthermore also does not have the sequences of those proteins, which are encoded by the sequences shown in table II, application no. 24, columns 5 and 7.

[6536] for the disclosure of the paragraphs [0331.0.0.23] to [0346.0.0.23] see paragraphs [0331.0.0.0] to [0346.0.0.0] above.

[6537] Accordingly the present invention relates to any cell transgenic for any nucleic acid characterized as part of the invention, e.g. conferring the increase of the respective fine chemical indicated in column 6 of application no. 24 in any one of Tables I to IV in a cell or an organism or a part thereof, e.g. the nucleic acid molecule of the invention, the nucleic acid construct of the invention, the antisense molecule of the invention, the vector of the invention or a nucleic acid molecule encoding the polypeptide of the invention, e.g. encoding a polypeptide having an activity as the protein as shown in table II, application no. 24, column 3. Due to the above mentioned activity the respective fine chemical content in a cell or an organism is increased. For example, due to modulation or manipulation, the cellular activity is increased preferably in organelles such as plastids or mitochondria, e.g. due to an increased expression or specific activity or specific targeting of the subject matters of the invention in a cell or an organism or a part thereof especially in organelles such as plastids or mitochondria. Transgenic for a polypeptide having a protein or activity means herein that due to modulation or manipulation of the genome, the activity of protein as shown in table II, application no. 24, column 3 or a protein as shown in table II, application no. 24, column 3-like activity is increased in the cell or organism or part thereof especially in organelles such as plastids or mitochondria. Examples are described above in context with the process of the invention.

[6538] for the disclosure of this paragraph see paragraph [0348.0.0.0] above.

[6539] A naturally occurring expression cassette—for example the naturally occurring combination of the promoter of the gene encoding a protein as shown in table II, application no. 24, column 3 with the corresponding encoding gene—becomes a transgenic expression cassette when it is modified by non-natural, synthetic “artificial” methods such as, for example, mutagenization. Such methods have been described (U.S. Pat. No. 5,565,350; WO 00/15815; also see above).

[6540] for the disclosure of the paragraphs [0350.0.0.23] to [0358.0.0.23] see paragraphs [0350.0.0.0] to [0358.0.0.0] above.

[6541] Transgenic plants comprising the respective fine chemical synthesized in the process according to the invention can be marketed directly without isolation of the compounds synthesized. In the process according to the invention, plants are understood as meaning all plant parts, plant organs such as leaf, stalk, root, tubers or seeds or propagation material or harvested material or the intact plant. In this context, the seed encompasses all parts of the seed such as the seed coats, epidermal cells, seed cells, endosperm or embryonic tissue. The respective fine chemical indicated in column 6 of any one of Tables I to IV, application no. 24, e.g. salicylic acid resp., and being produced in the process according to the invention may, however, also be isolated from the plant and can be isolated by harvesting the plants either from the culture in which they grow or from the field. This can be done for example via expressing, grinding and/or extraction of the plant parts, preferably the plant seeds, plant fruits, plant tubers and the like.

[6542] for the disclosure of the paragraphs [0360.0.0.23] to [0364.0.0.23] see paragraphs [0360.0.0.0] to [0364.0.0.0] above.

[6543] The fine chemical indicated in column 6 of application no. 24 in Table I, in particular salicylic acid resp., and being obtained in the process of the invention are suitable as starting material for the synthesis of further products of value. For example, they can be used in combination with each other or alone for the production of pharmaceuticals, foodstuffs, animal feeds or cosmetics. Accordingly, the present invention relates a method for the production of pharmaceuticals, food stuff, animal feeds, nutrients or cosmetics comprising the steps of the process according to the invention, including the isolation of a composition comprising the fine chemical, e.g. salicylic acid, or the isolated respective fine chemical produced, if desired, and formulating the product with a pharmaceutical acceptable carrier or formulating the product in a form acceptable for an application in agriculture. A further embodiment according to the invention is the use of the respective fine chemical indicated in application no. 24, Table I, column 6, and being produced in the process or the use of the transgenic organisms in animal feeds, foodstuffs, medicines, food supplements, cosmetics or pharmaceuticals.

[6544] for the disclosure of the paragraphs [0366.0.0.23] to [0369.0.0.23] see paragraphs [0366.0.0.0] to [0369.0.0.0] above.

[6545] The fermentation broths obtained in this way, containing in particular the respective fine chemical indicated in column 6 of any one of Tables I to IV; application no. 24 or containing mixtures with other compounds, in particular with salicylic acid and/or salicylic acid salts and/or salicylic acid esters or containing microorganisms or parts of microorganisms, like plastids, normally have a dry matter content of from 7.5 to 25% by weight. The fermentation broth can be processed further. Depending on requirements, the biomass can be separated, such as, for example, by centrifugation, filtration, decantation coagulation/flocculation or a combination of these methods, from the fermentation broth or left completely in it. The fermentation broth can be thickened or concentrated by known methods, such as, for example, with the aid of a rotary evaporator, thin-film evaporator, falling film evaporator, by reverse osmosis or by nanofiltration. This concentrated fermentation broth can then be worked up by extraction, freeze-drying, spray drying, spray granulation or by other processes.

[6546] Accordingly, it is possible to purify the salicylic acid and/or salicylic acid esters produced according to the invention further. For this purpose, the product-containing composition is subjected for example to separation via e.g. an open column chromatography or HPLC in which case the desired product or the impurities are retained wholly or partly on the chromatography resin. These chromatography steps can be repeated if necessary, using the same or different chromatography resins. The skilled worker is familiar with the choice of suitable chromatography resins and their most effective use.

[6547] for the disclosure of the paragraphs [0372.0.0.23] to [0376.0.0.23], [0376.1.0.23] and [0377.0.0.23] see paragraphs [0372.0.0.0] to [0376.0.0.0], [0376.1.0.0] and [0377.0.0.0] above.

[6548] In one embodiment, the present invention relates to a method for the identification of a gene product conferring an increase in the fine chemical production in a cell, comprising the following steps:
[6549] (a) contacting, e.g. hybridising, the nucleic acid molecules of a sample, e.g. cells, tissues, plants or microorganisms or a nucleic acid library, which can contain a candidate gene encoding a gene product conferring an increase in the respective fine chemical after expression, with the nucleic acid molecule of the present invention;
[6550] (b) identifying the nucleic acid molecules, which hybridize under relaxed stringent conditions with the nucleic acid molecule of the present invention in particular to the nucleic acid molecule sequence shown in table I, application no. 24, columns 5 and 7, preferably in table I B, application no. 24, columns 5 and 7, and, optionally, isolating the full length cDNA clone or complete genomic clone;
[6551] (c) introducing the candidate nucleic acid molecules in host cells, preferably in a plant cell or a microorganism, appropriate for producing the respective fine chemical;
[6552] (d) expressing the identified nucleic acid molecules in the host cells;
[6553] (e) assaying the respective fine chemical level in the host cells; and
[6554] (f) identifying the nucleic acid molecule and its gene product which expression confers an increase in the respective fine chemical level in the host cell after expression compared to the wild type.

[6555] for the disclosure of the paragraphs [0379.0.0.23] to [0383.0.0.23] see paragraphs [0379.0.0.0] to [0383.0.0.0] above.

[6556] The screen for a gene product or an agonist conferring an increase in the fine chemical production can be performed by growth of an organism for example a microorganism in the presence of growth reducing amounts of an inhibitor of the synthesis of the fine chemical. Better growth, eg higher dividing rate or high dry mass in comparison to the control under such conditions would identify a gene or gene product or an agonist conferring an increase in fine chemical production.

One can think to screen for increased fine chemical production by for example resistance to drugs blocking fine chemical synthesis and looking whether this effect is dependent on the proteins as shown in table II, application no. 24, column 3, eg comparing near identical organisms with low and high activity of the proteins as shown in table II, application no. 24, column 3.

[6557] for the disclosure of the paragraphs [0385.0.0.23] to [0404.0.0.23] see paragraphs [0385.0.0.0] to [0404.0.0.0] above.

[6558] Accordingly, the nucleic acid of the invention, the polypeptide of the invention, the nucleic acid construct of the invention, the organisms, the host cell, the microorganisms, the plant, plant tissue, plant cell, or the part thereof the invention, the vector of the invention, the agonist identified with the method of the invention, the nucleic acid molecule identified with the method of the present invention, can be used for the production of the respective fine chemical indicated in Column 6, Table I, application no. 24 or for the production of the respective fine chemical and one or more other carotenoids, vitamins or fatty acids. In one embodiment, in the process of the present invention, the produced salicylic acid is used as food flavorings and preservatives; antiseptic, anti-infectives, antipyretic, antipyretic, analgesic, fungicidal, keratinolytic and antipyretic agent and as pharmaceutically active ingredients including against colds, flu, or other virus infections

Accordingly, the nucleic acid of the invention, or the nucleic acid molecule identified with the method of the present invention or the complement sequences thereof, the polypeptide of the invention, the nucleic acid construct of the invention, the organisms, the host cell, the microorganisms, the plant, plant tissue, plant cell, or the part thereof of the invention, the vector of the invention, the agonist identified with the method of the invention, the antibody of the present invention, can be used for the reduction of the respective fine chemical in a organism or part thereof, e.g. in a cell.

[6559] for the disclosure of the paragraphs [0406.0.0.23] to [0416.0.0.23] see paragraphs [0406.0.0.0] to [0416.0.0.0] above.

[6560] An in vivo mutagenesis of organisms such as algae (e.g. Spongiococcum sp, e.g. Spongiococcum exentricum, Chlorella sp., Haematococcus, Phaedactylum tricornatum, Volvox or Dunaliella), Synechocystis sp. PCC 6803, Physcometrella patens, Saccharomyces, Mortierella, Escherichia and others mentioned above, which are beneficial for the production of salicylic acid can be carried out by passing a plasmid DNA (or another vector DNA) containing the desired nucleic acid sequence or nucleic acid sequences, e.g. the nucleic acid molecule of the invention or the vector of the invention, through E. coli and other microorganisms (for example Bacillus spp. or yeasts such as Saccharomyces cerevisiae) which are not capable of maintaining the integrity of its genetic information. Usual mutator strains have mutations in the genes for the DNA repair system [for example mutHLS, mutD, mutT and the like; for comparison, see Rupp, W. D. (1996) DNA repair mechanisms in Escherichia coli and Salmonella, pp. 2277-2294, ASM: Washington]. The skilled worker knows these strains. The use of these strains is illustrated for example in Greener, A. and Callahan, M. (1994) Strategies 7; 32-34.

In-vitro mutation methods such as increasing the spontaneous mutation rates by chemical or physical treatment are well known to the skilled person. Mutagens like 5-bromo-uracil, N-methyl-N-nitro-N-nitrosoguanidine (=NTG), ethyl methanesulfonate (=EMS), hydroxylamine and/or nitrous acid are widely used as chemical agents for random in-vitro mutagenesis. The most common physical method for mutagenesis is the treatment with UV irradiation. Another random mutagenesis technique is the error-prone PCR for introducing amino acid changes into proteins. Mutations are deliberately introduced during PCR through the use of error-prone DNA polymerases and special reaction conditions known to a person skilled in the art. For this method randomized DNA sequences are cloned into expression vectors and the resulting mutant libraries screened for altered or improved protein activity as described below.
Site-directed mutagenesis method such as the introduction of desired mutations with an M13 or phagemid vector and short oligonucleotides primers is a well-known approach for site-directed mutagenesis. The clou of this method involves cloning of the nucleic acid sequence of the invention into an M13 or phagemid vector, which permits recovery of single-stranded recombinant nucleic acid sequence. A mutagenic oligonucleotide primer is then designed whose sequence is perfectly complementary to nucleic acid sequence in the region to be mutated, but with a single difference: at the intended mutation site it bears a base that is complementary to the desired mutant nucleotide rather than the original. The mutagenic oligonucleotide is then allowed to prime new DNA synthesis to create a complementary full-length sequence containing the desired mutation. Another site-directed mutagenesis method is the PCR mismatch primer mutagenesis method also known to the skilled person. DpnI site-directed mutagenesis is a further known method as described for example in the Stratagene Quickchange™ site-directed mutagenesis kit protocol. A huge number of other methods are also known and used in common practice.
Positive mutation events can be selected by screening the organisms for the production of the desired fine chemical.

[6561] for the disclosure of the paragraphs [0418.0.0.9] to [0427.0.0.9] see paragraphs [0418.0.0.0] to [0427.0.0.0] above.

[6562] for the disclosure of the paragraphs [0428.0.0.23] to [0435.0.0.23] see paragraphs [0428.0.0.0] to [0435.0.0.0] above.

[6563] Salicylic Acid Production

Salicylic acid, can be detected and analysed as mentioned above. The proteins and nucleic acids can be analysed as mentioned below.

[6564] for the disclosure of the paragraphs [0437.0.0.23] and [0438.0.0.23] see paragraphs [0437.0.0.0] and [0438.0.0.0] above.

### Example 8

### Analysis of the Effect of the Nucleic Acid Molecule on the Production of the Respective Fine Chemical Indicated in Table I, Application No. 24, Column 6

[6565] The effect of the genetic modification in plants, fungi, algae or ciliates on the production of a desired compound can be determined by growing the modified microorganisms or the modified plant under suitable conditions (such as those described above) and analyzing the medium and/or the cellular components for the elevated production of desired product (i.e. of the lipids or a fatty acid). These analytical techniques are known to the skilled worker and comprise spectroscopy, thin-layer chromatography, various types of staining methods, enzymatic and microbiological methods and analytical chromatography such as high-performance liquid chromatography (see, for example, Ullman, Encyclopedia of Industrial Chemistry, Vol. A2, p. 89-90 and p. 443-613, VCH: Weinheim (1985); Fallon, A., et al., (1987) “Applications of HPLC in Biochemistry” in: Laboratory Techniques in Biochemistry and Molecular Biology, Vol. 17; Rehm et al. (1993) Biotechnology, Vol. 3, Chapter III: “Product recovery and purification”, p. 469-714, VCH: Weinheim; Belter, P.A., et al. (1988) Bioseparations: downstream processing for Biotechnology, John Wiley and Sons; Kennedy, J. F., and Cabral, J. M. S. (1992) Recovery processes for biological Materials, John Wiley and Sons; Shaeiwitz, J. A., and Henry, J. D. (1988) Biochemical Separations, in: Ullmann's Encyclopedia of Industrial Chemistry, Vol. B3; Chapter 11, p. 1-27, VCH: Weinheim; and Dechow, F. J. (1989) Separation and purification techniques in biotechnology, Noyes Publications).

[6566] for the disclosure of this paragraph see [0441.0.0.0] above.

### Example 9

### Purification of the Salicylic Acid

[6567] Abbreviations: GC-MS, gas liquid chromatography/mass spectrometry; TLC, thin-layer chromatography.

The unambiguous detection for the presence of salicylic acid and/or salts and/or esters of salicylic acid can be obtained by analyzing recombinant organisms using analytical standard methods: GC, GC-MS or TLC, as described (1997, in: Advances on Lipid Methodology, Fourth Edition: Christie, Oily Press, Dundee, 119-169; 1998, Gaschromatographie-Massenspektrometrie-Verfahren [Gas chromatography/mass spectrometric methods], Lipide 33:343-353).
The total salicylic acid produced in the organism for example in yeasts used in the inventive process can be analysed for example according to the following procedure: The material such as yeasts, E. coli or plants to be analyzed can be disrupted by sonication, grinding in a glass mill, liquid nitrogen and grinding or via other applicable methods.
Plant material is initially homogenized mechanically by comminuting in a pestle and mortar to make it more amenable to extraction.
A typical sample pretreatment consists of a total lipid extraction using such polar organic solvents as acetone or alcohols as methanol, or ethers, saponification, partition between phases, separation of non-polar epiphase from more polar hypophasic derivatives and chromatography.

[6568] Characterization of the Transgenic Plants

In order to confirm that salicylic acid biosynthesis in the transgenic plants is influenced by the expression of the polypeptides described herein, the tocopherol/vitamin E content in leaves and seeds of the plants transformed with the described constructs (Arabidopsis thaliana, Brassica napus and Nicotiana tabacum) is analyzed. For this purpose, the transgenic plants are grown in a greenhouse, and plants which express the gene coding for polypeptide of the invention or used in the method of the invention are identified at the Northern level. The tocopherol content or the vitamin E content in leaves and seeds of these plants is measured. In all, the tocopherol concentration is raised by comparison with untransformed plants.

[6569] If required and desired, further chromatography steps with a suitable resin may follow. Advantageously, the salicylic acid, can be further purified with a so called RTHPLC. As eluent acetonitrile/water or chloroform/acetonitrile mixtures can be used. If necessary, these chromatography steps may be repeated, using identical or other chromatography resins. The skilled worker is familiar with the selection of suitable chromatography resin and the most effective use for a particular molecule to be purified.

[6570] In addition depending on the produced fine chemical purification is also possible with cristalisation or destilation. Both methods are well known to a person skilled in the art.

[6571] for the disclosure of the paragraphs [0446.0.0.23] to [0496.0.0.23] see paragraphs [0446.0.0.0] to [0496.0.0.0] above.

[6572] %
[6573] The results of the different plant analyses can be seen from the table, which follows:

TABLE VI

| | | Method/ | Min.- | Max.- |
|---|---|---|---|---|
| ORF | Metabolite | Analytics | Value | Value |
| b1704 | Salicylic acid | LC | 1.25 | 3.66 |
| b2040 | Salicylic acid | LC | 1.41 | 1.81 |
| b3337 | Salicylic acid | LC | 1.73 | 2.04 |
| b3616 | Salicylic acid | LC | 1.49 | 1.75 |
| b4039 | Salicylic acid | LC | 1.44 | 2.73 |
| YLL033W | Salicylic acid | LC | 1.40 | 1.59 |

In the context of this table “salicylic acid” means the total amount salicylic acid.

[6574] for the disclosure of the paragraphs [0499.0.0.23] and [0500.0.0.23] see paragraphs [0499.0.0.0] and [0500.0.0.0] above.

### Example 15a

### Engineering Ryegrass Plants by Over-Expressing b1704 from E. coli or Homologs of b1704 from Other Organisms

[6575] for the disclosure of the paragraphs [0502.0.0.23] to [0508.0.0.23] see paragraphs [0502.0.0.0] to [0508.0.0.0] above.

### Example 15b

### Engineering Soybean Plants by Over-Expressing b1704 from E. coli or Homologs of b1704 from Other Organisms

[6576] for the disclosure of the paragraphs [0510.0.0.23] to [0513.0.0.23] see paragraphs [0510.0.0.0] to [0513.0.0.0] above.

### Example 15c

### Engineering Corn Plants by Over-Expressing b1704 from E. coli or Homologs of b1704 from Other Organisms

[6577] for the disclosure of the paragraphs [0515.0.0.23] to [0540.0.0.23] see paragraphs [0515.0.0.0] to [0540.0.0.0] above.

### Example 15d

### Engineering Wheat Plants by Over-Expressing b1704 from E. coli or Homologs of b1704 from Other Organisms

[6578] for the disclosure of the paragraphs [0542.0.0.23] to [0544.0.0.23] see paragraphs [0542.0.0.0] to [0544.0.0.0] above.

### Example 15e

### Engineering Rapeseed/Canola Plants by Over-Expressing b1704 from E. coli or Homologs of b1704 from Other Organisms

[6579] for the disclosure of the paragraphs [0546.0.0.23] to [0549.0.0.23] see paragraphs [0544.0.0.0] to [0549.0.0.0] above.

### Example 15f

### Engineering Alfalfa Plants by Over-Expressing b1704 from E. coli or Homologs of b1704 from Other Organisms

[6580] for the disclosure of the paragraphs [0551.0.0.23] to [0554.0.0.23] see paragraphs [0551.0.0.0] to [0554.0.0.0] above.

[6581] for the disclosure of this paragraph see [0554.2.0.0] above.

[6582] for the disclosure of this paragraph see [0555.0.0.0] above.

[6583] for the disclosure of this paragraph see [0001.0.0.0].

[6584] for the disclosure of the paragraphs [0002.0.0.9] to [0009.0.0.9] see paragraphs [0002.0.10.10] and [0009.0.10.10] above.

[6585] Therefore improving the quality of foodstuffs and animal feeds is an important task of the food-and-feed industry. This is necessary since, for example, carotenoids, e.g. beta-carotene or its/their precursor, e.g. isopentyl pyrophosphate (IPP), which occur in plants and some microorganisms are limited with regard to the supply of mammals. Especially advantageous for the quality of foodstuffs and animal feeds is as balanced as possible a cartenoid profile in the diet since a great excess of some carotenoids above a specific concentration in the food has only some or little or no positive effect. A further increase in quality is only possible via addition of further carotenoids, which are limiting.

[6586] for the disclosure of the paragraph [0011.0.24.24] see paragraph [0011.0.10.10].

[6587] Accordingly, there is still a great demand for new and more suitable genes which encode proteins which participate in the biosynthesis of carotenoids, e.g. beta-carotene or its/their precursor, e.g. isopentyl pyrophosphate (IPP) and make it possible to produce certain carotenoids, e.g. beta-carotene or its/their precursor, e.g. isopentyl pyrophosphate (IPP) specifically on an industrial scale without unwanted byproducts forming. In the selection of genes for or regulators of biosynthesis two characteristics above all are particularly important. On the one hand, there is as ever a need for improved processes for obtaining the highest possible contents of carotenoids, like beta-carotene or its/their precursor, like isopentyl pyrophosphate (IPP) on the other hand as less as possible byproducts should be produced in the production process.

[6588] for the disclosure of this paragraph see [0013.0.0.0] above.

[6589] Accordingly, in a first embodiment, the invention relates to a process for the production of a fine chemical, whereby the fine chemical is carotenoids, e.g. beta-carotene or its/their precursor, e.g. isopentyl pyrophosphate (IPP). Accordingly, in the present invention, the term “the fine chemical” as used herein relates to “carotenoids”, e.g. “beta-carotene” or its/their precursor, e.g. “isopentyl pyrophosphate” (“IPP”)“. Further, the term “the fine chemicals” as used herein also relates to fine chemicals comprising carotenoids, e.g. beta-carotene or its/their precursor, e.g. isopentyl pyrophosphate (IPP).

[6590] In one embodiment, the term “carotenoids”, “beta-carotene” or its/their precursor, e.g. “isopentyl pyrophosphate (IPP)” or “the fine chemical” or “the respective fine chemical” means at least one chemical compound with carotenoids, preferably beta-carotene or its/their precursor, preferably isopentyl pyrophosphate (IPP) activity selected from the group Isopentenylpyrophosphate (IPP) Geranylgeranylpyrophosphate (GGPP), Phytoene, Lycopene, zeta-carotene, beta-carotene. In another embodiment, the term “carotenoids, e.g. beta-carotene or its/their precursor, e.g. isopentyl pyrophosphate (IPP)” or “the fine chemical” or “the respective fine chemical” means at least one chemical compound with carotenoids, e.g. beta-carotene or its/their precursor, e.g. isopentyl pyrophosphate (IPP) activity selected from the group Isopentenylpyrophosphate (IPP) Geranylgeranylpyrophosphate (GGPP), Phytoene, Lycopene, zeta-carotene, beta-carotene. In an preferred embodiment, the term “the fine chemical” or the term “carotenoids, e.g. beta-carotene or its/their precursor, e.g. isopentyl pyrophosphate (IPP)” or the term “the respective fine chemical” means at least one chemical compound with carotenoids, e.g. beta-carotene or its/their precursor, e.g. isopentyl pyrophosphate (IPP) activity selected from the group “Isopentenylpyrophosphate (IPP) “, “Geranylgeranylpyrophosphate (GGPP) “, “Phytoene”, “Lycopene”, “zeta-carotene “, and/or “beta-carotene”.

An increased carotenoids, e.g. beta-carotene or its/their precursor, e.g. isopentyl pyrophosphate (IPP) content normally means an increased total carotenoids, e.g. beta-carotene or its/their precursor, e.g. isopentyl pyrophosphate (IPP) content. However, an increased carotenoids, e.g. beta-carotene or its/their precursor, e.g. isopentyl pyrophosphate (IPP) content also means, in particular, a modified content of the above-described 6 compounds with carotenoids, e.g. beta-carotene or its/their precursor, e.g. isopentyl pyrophosphate (IPP) activity, without the need for an inevitable increase in the total carotenoids, e.g. beta-carotene or its/their precursor, e.g. isopentyl pyrophosphate (IPP) content. In a preferred embodiment, the term “the fine chemical” means carotenoids, e.g. beta-carotene or its/their precursor, e.g. isopentyl pyrophosphate (IPP) in free form or its salts or its ester or bound.

[6591] Accordingly, the present invention relates to a process for the production of carotenoids, e.g. beta-carotene or its/their precursor, e.g. isopentyl pyrophosphate (IPP), which comprises
[6592] (a) increasing or generating the activity of a protein as shown in table II, application no. 25, column 3 encoded by the nucleic acid sequences as shown in table I, application no. 125, column 5, in an organelle of a microorganism or plant, or
[6593] (b) increasing or generating the activity of a protein as shown in table II, application no. 25, column 3 encoded by the nucleic acid sequences as shown in table I, application no. 25, column 5 in the plastid of a microorganism or plant, or in one or more parts thereof; and
[6594] (c) growing the organism under conditions which permit the production of the fine chemical, thus, carotenoids, e.g. beta-carotene or its/their precursor, e.g. isopentyl pyrophosphate (IPP) or fine chemicals comprising carotenoids, e.g. beta-carotene or its/their precursor, e.g. isopentyl pyrophosphate (IPP), in said organism or in the culture medium surrounding the organism.

[6595] Accordingly, the term “the fine chemical” means in one embodiment “carotenoids, e.g. beta-carotene or its/their precursor, e.g. isopentyl pyrophosphate (IPP)” in relation to all sequences listed in Table I to IV, application no. 25 or homologs thereof;

Accordingly, in one embodiment the term “the fine chemical” means “carotenoids, e.g. beta-carotene or its/their precursor, e.g. isopentyl pyrophosphate (IPP)” in relation to all sequences listed in Table I to IV, application no. 25.
Accordingly, the term “the fine chemical” can mean “Isopentenylpyrophosphate (IPP) “, “Geranylgeranylpyrophosphate (GGPP) “, “Phytoene”, “Lycopene”, “zeta-carotene “, and/or “beta-carotene”., owing to circumstances and the context.

[6596] In another embodiment the present invention is related to a process for the production of carotenoids, e.g. beta-carotene or its/their precursor, e.g. isopentyl pyrophosphate (IPP), which comprises
[6597] (a) increasing or generating the activity of a protein as shown in table II, application no. 6 column 3 encoded by the nucleic acid sequences as shown in table I, application no. 25, column 5, in an organelle of a non-human organism, or
[6598] (b) increasing or generating the activity of a protein as shown in table II, application no. 25, column 3 encoded by the nucleic acid sequences as shown in table I, application no. 125, column 5, which are joined to a nucleic acid sequence encoding a transit peptide in a non-human organism, or in one or more parts thereof; or
[6599] (c) increasing or generating the activity of a protein as shown in table II, application no. 25, column 3 encoded by the nucleic acid sequences as shown in table I, application no. 25, column 5, which are joined to a nucleic acid sequence encoding chloroplast localization sequence, in a non-human organism, or in one or more parts thereof, and
[6600] (d) growing the organism under conditions which permit the production of carotenoids, e.g. beta-carotene or its/their precursor, e.g. isopentyl pyrophosphate (IPP), in said organism.

[6601] In another embodiment, the present invention relates to a process for the production of carotenoids, e.g. beta-carotene or its/their precursor, e.g. isopentyl pyrophosphate (IPP), which comprises
[6602] (a) increasing or generating the activity of a protein as shown in table II, application no. 25, column 3 encoded by the nucleic acid sequences as shown in table I, application no. 25, column 5, in an organelle of a microorganism or plant through the transformation of the organelle, or
[6603] (b) increasing or generating the activity of a protein as shown in table II, application no. 25, column 3 encoded by the nucleic acid sequences as shown in table I, application no. 250, column 5 in the plastid of a microorganism or plant, or in one or more parts thereof through the transformation of the plastids; and
[6604] (c) growing the organism under conditions which permit the production of the fine chemical, thus, carotenoids, e.g. beta-carotene or its/their precursor, e.g. isopentyl pyrophosphate (IPP), or fine chemicals comprising carotenoids, e.g. beta-carotene or its/their precursor, e.g. isopentyl pyrophosphate (IPP), in said organism or in the culture medium surrounding the organism.

[6605] Advantageously the activity of the protein as shown in table II, application no. 25, column 3 encoded by the nucleic acid sequences as shown in table I, application no. 25, column 5 is increased or generated in the abovementioned process in the plastid of a microorganism or plant.

[6606] for the disclosure of the paragraphs [0019.0.0.24] to [0024.0.0.24] see paragraphs [0019.0.0.0] and [0024.0.0.0] above.

[6607] Even more preferred nucleic acid sequences are encoding transit peptides as disclosed by von Heijne et al. [Plant Molecular Biology Reporter, Vol. 9 (2), 1991: 104-126], which are hereby incorporated by reference. Table V shows some examples of the transit peptide sequences disclosed by von Heijne et al. According to the disclosure of the invention especially in the examples the skilled worker is able to link other nucleic acid sequences disclosed by von Heijne et al. to the nucleic acid sequences shown in table I, application no. 25, columns 5 and 7. Most preferred nucleic acid sequences encoding transit peptides are derived from the genus Spinacia such as chloroplast 30S ribosomal protein PSrp-1, root acyl carrier protein II, acyl carrier protein, ATP synthase: γ subunit, ATP synthase: δ subunit, cytochrom f, ferredoxin I, ferredoxin NADP oxidoreductase (=FNR), nitrite reductase, phosphoribulokinase, plastocyanin or carbonic anhydrase. The skilled worker will recognize that various other nucleic acid sequences encoding transit peptides can easily isolated from plastid-localized proteins, which are expressed from nuclear genes as precursors and are then targeted to plastids. Such transit peptides encoding sequences can be used for the construction of other expression constructs. The transit peptides advantageously used in the inventive process and which are part of the inventive nucleic acid sequences and proteins are typically 20 to 120 amino acids, preferably 25 to 110, 30 to 100 or 35 to 90 amino acids, more preferably 40 to 85 amino acids and most preferably 45 to 80 amino acids in length and functions post-translationally to direct the protein to the plastid preferably to the chloroplast. The nucleic acid sequences encoding such transit peptides are localized upstream of nucleic acid sequence encoding the mature protein. For the correct molecular joining of the transit peptide encoding nucleic acid and the nucleic acid encoding the protein to be targeted it is sometimes necessary to introduce additional base pairs at the joining position, which forms restriction enzyme recognition sequences useful for the molecular joining of the different nucleic acid molecules. This procedure might lead to very few additional amino acids at the N-terminal of the mature imported protein, which usually and preferably do not interfere with the protein function. In any case, the additional base pairs at the joining position which forms restriction enzyme recognition sequences have to be chosen with care, in order to avoid the formation of stop codons or codons which encode amino acids with a strong influence on protein folding, like e.g. proline. It is preferred that such additional codons encode small n.d. structural flexible amino acids such as glycine or alanine.

[6608] As mentioned above the nucleic acid sequences coding for the proteins as shown in table II, application no. 25, column 3 and its homologs as disclosed in table I, application no. 25, columns 5 and 7 are joined to a nucleic acid sequence encoding a transit peptide, This nucleic acid sequence encoding a transit peptide ensures transport of the protein to the plastid. The nucleic acid sequence of the gene to be expressed and the nucleic acid sequence encoding the transit peptide are operably linked. Therefore the transit peptide is fused in frame to the nucleic acid sequence coding for proteins as shown in table II, application no. 25, column 3 and its homologs as disclosed in table I, application no. 25, columns 5 and 7.

[6609] for the disclosure of the paragraphs [0027.0.0.24] to [0029.0.0.24] see paragraphs [0027.0.0.0] and [0029.0.0.0] above.

[6610] Alternatively, nucleic acid sequences coding for the transit peptides may be chemically synthesized either in part or wholly according to structure of transit peptide sequences disclosed in the prior art. Said natural or chemically synthesized sequences can be directly linked to the sequences encoding the mature protein or via a linker nucleic acid sequence, which may be typically less than 500 base pairs, preferably less than 450, 400, 350, 300, 250 or 200 base pairs, more, preferably less than 150, 100, 90, 80, 70, 60, 50, 40 or 30 base pairs and most preferably less than 25, 20, 15, 12, 9, 6 or 3 base pairs in length and are in frame to the coding sequence. Furthermore favorable nucleic acid sequences encoding transit peptides may comprise sequences derived from more than one biological and/or chemical source and may include a nucleic acid sequence derived from the amino-terminal region of the mature protein, which in its native state is linked to the transit peptide. In a preferred embodiment of the invention said amino-terminal region of the mature protein is typically less than 150 amino acids, preferably less than 140, 130, 120, 110, 100 or 90 amino acids, more preferably less than 80, 70, 60, 50, 40, 35, 30, 25 or 20 amino acids and most preferably less than 19, 18, 17, 16, 15, 14, 13, 12, 11 or 10 amino acids in length. But even shorter or longer stretches are also possible. In addition target sequences, which facilitate the transport of proteins to other cell compartments such as the vacuole, endoplasmic reticulum, Golgi complex, glyoxysomes, peroxisomes or mitochondria may be also part of the inventive nucleic acid sequence. The proteins translated from said inventive nucleic acid sequences are a kind of fusion proteins that means the nucleic acid sequences encoding the transit peptide for example the ones shown in table V, preferably the last one of the table are joint to the nucleic acid sequences shown in table I, application no. 25, columns 5 and 7. The person skilled in the art is able to join said sequences in a functional manner. Advantageously the transit peptide part is cleaved off from the protein part shown in table II, application no. 25, columns 5 and 7 during the transport preferably into the plastids. All products of the cleavage of the preferred transit peptide shown in the last line of table V have preferably the N-terminal amino acid sequences QIA CSS or QIA EFQLTT in front of the start methionine of the protein mentioned in table II, application no. 25, columns 5 and 7. Other short amino acid sequences of an range of 1 to 20 amino acids preferable 2 to 15 amino acids, more preferable 3 to 10 amino acids most preferably 4 to 8 amino acids are also possible in front of the start methionine of the protein mentioned in table II, application no. 25, columns 5 and 7. In case of the amino acid sequence QIA CSS the three amino acids in front of the start methionine are stemming from the LIC (=ligatation independent cloning) cassette. Said short amino acid sequence is preferred in the case of the expression of E. coli genes. In case of the amino acid sequence QIA EFQLTT the six amino acids in front of the start methionine are stemming from the LIC cassette. Said short amino acid sequence is preferred in the case of the expression of S. cerevisiae genes. The skilled worker knows that other short sequences are also useful in the expression of the genes mentioned in table I, application no. 25, columns 5 and 7. Furthermore the skilled worker is aware of the fact that there is not a need for such short sequences in the expression of the genes.

[6611] Table V: Examples of transit peptides disclosed by von Heijne et al. for the disclosure of Table V see paragraph [0030.2.0.0] above.

[6612] Alternatively to the targeting of the sequences shown in table II, application no. 25, columns 5 and 7 preferably of sequences in general encoded in the nucleus with the aid of the targeting sequences mentioned for example in table V alone or in combination with other targeting sequences preferably into the plastids, the nucleic acids of the invention can directly introduced into the plastidal genome. Therefore in a preferred embodiment the nucleic acid sequences shown in table I, application no. 25, columns 5 and 7 are directly introduced and expressed in plastids.

The term “introduced” in the context of this specification shall mean the insertion of a nucleic acid sequence into the organism by means of a “transfection”, “transduction” or preferably by “transformation”.
A plastid, such as a chloroplast, has been “transformed” by an exogenous (preferably foreign) nucleic acid sequence if nucleic acid sequence has been introduced into the plastid that means that this sequence has crossed the membrane or the membranes of the plastid. The foreign DNA may be integrated (covalently linked) into plastid DNA making up the genome of the plastid, or it may remain unintegrated (e.g., by including a chloroplast origin of replication). “Stably” integrated DNA sequences are those, which are inherited through plastid replication, thereby transferring new plastids, with the features of the integrated DNA sequence to the progeny.

[6613] for the disclosure of the paragraphs [0030.2.0.24] and [0030.3.0.24] see paragraphs [0030.2.0.0] and [0030.3.0.0] above.

[6614] For the inventive process it is of great advantage that by transforming the plastids the intraspecies specific transgene flow is blocked, because a lot of species such as corn, cotton and rice have a strict maternal inheritance of plastids. By placing the genes specified in table I, application no. 25, columns 5 and 7 or active fragments thereof in the plastids of plants, these genes will not be present in the pollen of said plants.

A further preferred embodiment of the invention relates to the use of so called “chloroplast localization sequences”, in which a first RNA sequence or molecule is capable of transporting or “chaperoning” a second RNA sequence, such as a RNA sequence transcribed from the sequences depicted in table 1, application no. 25, columns 5 and 7 or a sequence encoding a protein, as depicted in table II, application no. 25, columns 5 and 7, from an external environment inside a cell or outside a plastid into a chloroplast. In one embodiment the chloroplast localization signal is substantially similar or complementary to a complete or intact viroid sequence. The chloroplast localization signal may be encoded by a DNA sequence, which is transcribed into the chloroplast localization RNA. The term “viroid” refers to a naturally occurring single stranded RNA molecule (Flores, C R Acad Sci III. 2001 October; 324(10): 943-52). Viroids usually contain about 200-500 nucleotides and generally exist as circular molecules. Examples of viroids that contain chloroplast localization signals include but are not limited to ASBVd, PLMVd, CChMVd and ELVd. The viroid sequence or a functional part of it can be fused to the sequences depicted in table, 1, application no. 25, columns 5 and 7 or a sequence encoding a protein, as depicted in table II, application no. 25, columns 5 and 7 in such a manner that the viroid sequence transports a sequence transcribed from a sequence as depicted in table 1 application no. 25, columns 5 and 7 or a sequence encoding a protein as depicted in table II, application no. 25, columns 5 and 7 into the chloroplasts. A preferred embodiment uses a modified ASBVd (Navarro et al., Virology. 2000 Mar. 1; 268(1): 218-25).
In a further specific embodiment the protein to be expressed in the plastids such as the proteins depicted in table II, application no. 25, columns 5 and 7 are encoded by different nucleic acids. Such a method is disclosed in WO 2004/040973, which shall be incorporated by reference. WO 2004/040973 teaches a method, which relates to the translocation of an RNA corresponding to a gene or gene fragment into the chloroplast by means of a chloroplast localization sequence. The genes, which should be expressed in the plant or plants cells, are split into nucleic acid fragments, which are introduced into different compartments in the plant e.g. the nucleus, the plastids and/or mitochondria. Additionally plant cells are described in which the chloroplast contains a ribozyme fused at one end to an RNA encoding a fragment of a protein used in the inventive process such that the ribozyme can trans-splice the translocated fusion RNA to the RNA encoding the gene fragment to form and as the case may be reunite the nucleic acid fragments to an intact mRNA encoding a functional protein for example as disclosed in table II, application no. 25, columns 5 and 7.

[6615] In a preferred embodiment of the invention the nucleic acid sequences as shown in table I, application no. 25, columns 5 and 7 used in the inventive process are transformed into plastids, which are metabolical active. Those plastids should preferably maintain at a high copy number in the plant or plant tissue of interest, most preferably the chloroplasts found in green plant tissues, such as leaves or cotyledons or in seeds.

[6616] For a good expression in the plastids the nucleic acid sequences as shown in table I, application no. 25, columns 5 and 7 are introduced into an expression cassette using a preferably a promoter and terminator, which are active in plastids preferably a chloroplast promoter. Examples of such promoters include the psbA promoter from the gene from spinach or pea, the rbcL promoter, and the atpB promoter from corn.

[6617] for the disclosure of the paragraphs [0031.0.0.24] and [0032.0.0.24] see paragraphs [0031.0.0.0] and [0032.0.0.0] above.

[6618] Advantageously the process for the production of the fine chemical leads to an enhanced production of the fine chemical. The terms “enhanced” or “increase” mean at least a 10%, 20%, 30%, 40% or 50%, preferably at least 60%, 70%, 80%, 90% or 100%, more preferably 150%, 200%, 300%, 400% or 500% higher production of the fine chemical in comparison to the reference as defined below, e.g. that means in comparison to an organism without the aforementioned modification of the activity of a protein as shown in table II, application no. 25, column 3. Preferably the modification of the activity of a protein as shown in table II, application no. 25, column 3 or their combination can be achieved by joining the protein to a transit peptide.

[6619] Surprisingly it was found, that the transgenic expression of the E. coli or Saccharomyces cerevisiae proteins shown in table II, application no. 25, column 3 in plastids of a plant such as Arabidopsis thaliana for example through the linkage to at least one targeting sequence—for example as mentioned in table V—conferred an increase in the respective fine chemical indicated in column 6 “metabolite” of each table I to IV in the transformed plant.

Surprisingly it was found, that the transgenic expression of the E. coli protein b0931, b1868 and/or b2032 and of the Saccharomyces cerevisiae protein YLR099C and/or
YPL080C in Arabidopsis thaliana conferred an increase in the isopentyl pyrophosphate (IPP) content, which is a precursor in the biosynthesis of carotenoids, e.g. beta-carotene or its/their precursors like Geranylgeranylpyrophosphate (GGPP), Phytoene, Lycopene, zeta-carotene, in particular of isopentyl pyrophosphate (IPP),and thus of carotenoids, e.g. beta-carotene or its/their precursor. Thus, an increase in the level of this precursor of the carotenoids, e.g. beta-carotene bioynthesis can be advantageous for the production of carotenoids, e.g. beta-carotene or its/their precursor Geranylgeranylpyrophosphate (GGPP), Phytoene, Lycopene, zeta-carotene. For example, in one embodiment the level of carotenoids, e.g. beta-carotene or its/their precursor, e.g. isopentyl pyrophosphate (IPP),is increased in combination with the modulation of the expression of other genes of the biosynthesis of other carotenoids, e.g. alpha-carotene, lutein, zeaxanthine or its/their precursors, in particular of genes encoding enzymes metabolising carotenoids or a precursor thereof, such as the Isopentenyl diphosphate isomerase, Geranylgeranyl diphosphate synthase, Phytoene synthase, Phytoene desaturase, zeta-Carotene desaturase, beta-Cyclase, beta-Hydroxylase.

[6620] for the disclosure of this paragraph see paragraph [0035.0.0.0] above.

[6621] The sequence of b0931 (Accession number JQ0756) from Escherichia coli has been published in Blattner et al., Science 277 (5331), 1453-1474 (1997), and its activity is being defined as “nicotinate phosphoribosyltransferase”. Accordingly, in one embodiment, the process of the present invention comprises the use of a “nicotinate phosphoribosyltransferase” or its homolog, e.g. as shown herein, for the production of the fine chemical, meaning of carotenoids, e.g. beta-carotene or its/their precursor, e.g. isopentyl pyrophosphate (IPP), in particular for increasing the amount of carotenoids, e.g. beta-carotene or its/their precursor, e.g. isopentyl pyrophosphate (IPP), in free or bound form in an organism or a part thereof, as mentioned. In one embodiment, in the process of the present invention the activity of a b0931 protein is increased or generated, e.g. from Escherichia coli or a homolog thereof, preferably linked at least to one transit peptide as mentioned for example in table V.

In another embodiment, in the process of the present invention the activity of a b0931 protein is increased or generated in a subcellular compartment of the organism or organism cell such as in an organelle like a plastid or mitochondria.
The sequence of b1868 (Accession number D64949) from Escherichia coli has been published in Blattner et al., Science 277 (5331), 1453-1474 (1997), and its activity is being defined as “yecE protein”. Accordingly, in one embodiment, the process of the present invention comprises the use of a “yecE protein” or its homolog, e.g. as shown herein, for the production of the fine chemical, meaning of carotenoids, e.g. beta-carotene or its/their precursor, e.g. isopentyl pyrophosphate (IPP), in particular for increasing the amount of carotenoids, e.g. beta-carotene or its/their precursor, e.g. isopentyl pyrophosphate (IPP), in free or bound form in an organism or a part thereof, as mentioned. In one embodiment, in the process of the present invention the activity of a b1868 protein is increased or generated, e.g. from Escherichia coli or a homolog thereof, preferably linked at least to one transit peptide as mentioned for example in table V.
In another embodiment, in the process of the present invention the activity of a b1868 protein is increased or generated in a subcellular compartment of the organism or organism cell such as in an organelle like a plastid or mitochondria.
The sequence of b2032 (Accession number 169647) from Escherichia coli has been published in Blattner et al., Science 277 (5331), 1453-1474 (1997), and its activity is being defined as “glycosyltransferase”. Accordingly, in one embodiment, the process of the present invention comprises the use of a “glycosyltransferase” or its homolog, e.g. as shown herein, for the production of the fine chemical, meaning of carotenoids, e.g. beta-carotene or its/their precursor, e.g. isopentyl pyrophosphate (IPP), in particular for increasing the amount of carotenoids, e.g. beta-carotene or its/their precursor, e.g. isopentyl pyrophosphate (IPP), in free or bound form in an organism or a part thereof, as mentioned. In one embodiment, in the process of the present invention the activity of a b2032 protein is increased or generated, e.g. from Escherichia coli or a homolog thereof, preferably linked at least to one transit peptide as mentioned for example in table V. In another embodiment, in the process of the present invention the activity of a b2032 protein is increased or generated in a subcellular compartment of the organism or organism cell such as in an organelle like a plastid or mitochondria.
The sequence of YLR099C (Accession number NP_{—}013200) from Saccharomyces cerevisiae has been published in Goffeau et al., Science 274 (5287), 546-547, 1996, and its activity is being defined as “lipase”. Accordingly, in one embodiment, the process of the present invention comprises the use of a “lipase” or its homolog, e.g. as shown herein, for the production of the fine chemical, meaning of carotenoids, e.g. beta-carotene or its/their precursor, e.g. isopentyl pyrophosphate (IPP), in particular for increasing the amount of carotenoids, e.g. beta-carotene or its/their precursor, e.g. isopentyl pyrophosphate (IPP) in free or bound form in an organism or a part thereof, as mentioned. In one embodiment, in the process of the present invention the activity of a YLR0990C protein is increased or generated, e.g. from Saccharomyces cerevisiae or a homolog thereof, preferably linked at least to one transit peptide as mentioned for example in table V.
In another embodiment, in the process of the present invention the activity of an YLR099C protein is increased or generated in a subcellular compartment of the organism or organism cell such as in an organelle like a plastid or mitochondria.
The sequence of YPL080C (Accession number S61107) from Saccharomyces cerevisiae has been published in Goffeau et al., Science 274 (5287), 546-547, 1996, and its activity is being defined as “uncharacterised I protein”. Accordingly, in one embodiment, the process of the present invention comprises the use of a “uncharacterised protein” or its homolog, e.g. as shown herein, for the production of the fine chemical, meaning of linoleic acid and/or tryglycerides, lipids, oils and/or fats containing linoleic acid, in particular for increasing the amount of meaning of carotenoids, e.g. beta-carotene or its/their precursor, e.g. isopentyl pyrophosphate (IPP), in particular for increasing the amount of carotenoids, e.g. beta-carotene or its/their precursor, e.g. isopentyl pyrophosphate (IPP) in free or bound form in an organism or a part thereof, as mentioned. In one embodiment, in the process of the present invention the activity of a YPL080C protein is increased or generated, e.g. from Saccharomyces cerevisiae or a homolog thereof, preferably linked at least to one transit peptide as mentioned for example in table V.
In another embodiment, in the process of the present invention the activity of an YPL080C protein is increased or generated in a subcellular compartment of the organism or organism cell such as in an organelle like a plastid or mitochondria.

[6622] In one embodiment, the homolog of the YLR099C and/or YPL080C, is a homolog having said activity and being derived from Eukaryot. In one embodiment, the homolog of the b0931, b1868 and/or b2032 is a homolog having said activity and being derived from bacteria. In one embodiment, the homolog of the YLR099C and/or YPL080C is a homolog having said activity and being derived from Fungi. In one embodiment, the homolog of the b0931, b1868 and/or b2032 is a homolog having said activity and being derived from Proteobacteria. In one embodiment, the homolog of the YLR099C and/or YPL080C is a homolog having said activity and being derived from Ascomycota. In one embodiment, the homolog of the b0931, b1868 and/or b2032 is a homolog having said activity and being derived from Gammaproteobacteria. In one embodiment, the homolog of the YLR099C and/or YPL080C is a homolog having said activity and being derived from Saccharomycotina. In one embodiment, the homolog of the b0931, b1868 and/or b2032 is a homolog having said activity and being derived from Enterobacteriales. In one embodiment, the homolog of the YLR099C and/or

YPL080C is a homolog having said activity and being derived from Saccharomycetes. In one embodiment, the homolog of the b0931, b1868 and/or b2032 is a homolog having said activity and being derived from Enterobacteriaceae. In one embodiment, the homolog of the YLR099C and/or YPL080C is a homolog having said activity and being derived from Saccharomycetales. In one embodiment, the homolog of the b0931, b1868 and/or b2032 is a homolog having said activity and being derived from Escherichia, preferably from Escherichia coli. In one embodiment, the homolog of the YLR099C and/or YPL080C is a homolog having said activity and being derived from Saccharomycetaceae. In one embodiment, the homolog of the YLR099C and/or
YPL080C is a homolog having said activity and being derived from Saccharomycetes, preferably from Saccharomyces cerevisiae.

[6623] Homologs of the polypeptide table II, application no. 25, column 5 may be the polypeptides encoded by the nucleic acid molecules indicated in table I, application no. 25, column 7, resp., or may be the polypeptides indicated in table II, application no. 25, column 7, resp.

[6624] for the disclosure of this paragraph see paragraph [0038.0.0.0] above.

[6625] In accordance with the invention, a protein or polypeptide has the “activity of an protein as shown in table II, application no. 25, column 3” if its de novo activity, or its increased expression directly or indirectly leads to an increased in the level of the fine chemical indicated in the respective line of table II, application no. 25, column 6 “metabolite” in the organism or a part thereof, preferably in a cell of said organism, more preferably in an organelle such as a plastid or mitochondria of said organism. The protein has the above mentioned activities of a protein as shown in table II, application no. 25, column 3, preferably in the event the nucleic acid sequences encoding said proteins is functionally joined to the nucleic acid sequence of a transit peptide. Throughout the specification the activity or preferably the biological activity of such a protein or polypeptide or an nucleic acid molecule or sequence encoding such protein or polypeptide is identical or similar if it still has the biological or enzymatic activity of a protein as shown in table II, application no. 25, column 3, or which has at least 10% of the original enzymatic activity, preferably 20%, particularly preferably 30%, most particularly preferably 40% in comparison to a protein as shown in the respective line of table II, application no. 25, column 3 of E. coli.

[6626] for the disclosure of the paragraphs [0040.0.0.24] to [0047.0.0.24] see paragraphs [0040.0.0.0] to [0047.0.0.0] above.

[6627] Preferably, the reference, control or wild type differs form the subject of the present invention only in the cellular activity, preferably of the plastidial activity of the polypeptide of the invention, e.g. as result of an increase in the level of the nucleic acid molecule of the present invention or an increase of the specific activity of the polypeptide of the invention, e.g. by or in the expression level or activity of an protein having the activity of a respective protein as shown in table II, application no. 25, column 3 its biochemical or genetical causes and the increased amount of the respective fine chemical.

[6628] for the disclosure of the paragraphs [0049.0.0.24] to [0051.0.0.24] see paragraphs [0049.0.0.0] to [0051.0.0.0] above.

[6629] For example, the molecule number or the specific activity of the polypeptide or the nucleic acid molecule may be increased. Larger amounts of the fine chemical can be produced if the polypeptide or the nucleic acid of the invention is expressed de novo in an organism lacking the activity of said protein, preferably the nucleic acid molecules as mentioned in table I, application no. 25, columns 5 and 7 alone or preferably in combination with a transit peptide for example as mentioned in table V or in another embodiment by introducing said nucleic acid molecules into an organelle such as an plastid or mitochondria in the transgenic organism. However, it is also possible to modify the expression of the gene which is naturally present in the organisms, for example by integrating a nucleic acid sequence, encoding a plastidic targeting sequence in front (5 prime) of the coding sequence, leading to a functional preprotein, which is directed for example to the plastids.

[6630] for the disclosure of the paragraphs [0053.0.0.24] to [0058.0.0.24] see paragraphs [0053.0.0.0] to [0058.0.0.0] above.

[6631] In case the activity of the Escherichia coli protein b0931 or its homologs, e.g. a “nicotinate phosphoribosyltransferase” is increased advantageously in an organelle such as a plastid or mitochondria, preferably, in one embodiment an increase of the fine chemical, preferably of carotenoids, e.g. beta-carotene or its/their precursor, e.g. isopentyl pyrophosphate (IPP) between 60% and 148% or more is conferred.

In case the activity of the Escherichia coli protein b1868 or its homologs, e.g. a “yecE protein” is increased advantageously in an organelle such as a plastid or mitochondria, preferably, in one embodiment an increase of the fine chemical, preferably of carotenoids, e.g. beta-carotene or its/their precursor, e.g. isopentyl pyrophosphate (IPP) between 35% and 40% or more is conferred.
In case the activity of the Escherichia coli protein b2032 or its homologs, e.g. a “glycosyltransferase” is increased advantageously in an organelle such as a plastid or mitochondria, preferably, in one embodiment an increase of the fine chemical, preferably of carotenoids, e.g. beta-carotene or its/their precursor, e.g. isopentyl pyrophosphate (IPP) between 40% and 68% or more is conferred.
In case the activity of the Saccharomyces cerevisiae protein YLR099C or its homologs, e.g. a “lipase” is increased advantageously in an organelle such as a plastid or mitochondria, preferably, in one embodiment an increase of the fine chemical, preferably of carotenoids, e.g. beta-carotene or its/their precursor, e.g. isopentyl pyrophosphate (IPP) between 218% and 351% or more is conferred.
In case the activity of the Saccharomyces cerevisiae protein YPL080C or its homologs, e.g. a “uncharacterized protein” is increased advantageously in an organelle such as a plastid or mitochondria, preferably, in one embodiment an increase of the fine chemical, preferably of linoleic acid and/or tryglycerides, lipids, oils and/or fats containing linoleic acid between 50% and 146% or more is conferred.

[6632] In one embodiment, the activity of any on of the Escherichia coli proteins b0931, b1868 and/or b2032 and/or of the Saccharomyces cerevisiae proteins YLR099C and/or YPL080C or their homologs,” is advantageously are increased in an organelle such as a plastid or mitochondria, preferably conferring an increase of the fine chemical indicated in column 6 “metabolites” for application no. 25 in any one of Tables I to IV, resp.,

[6633] for the disclosure of the paragraphs [0061.0.0.24] and [0062.0.0.24] see paragraphs [0061.0.0.0] and [0062.0.0.0] above.

[6634] A protein having an activity conferring an increase in the amount or level of the fine chemical, preferably upon targeting to the plastids, has in one embodiment the structure of the polypeptide described herein, in particular of the polypeptides comprising the consensus sequence shown in table IV, application no. 250, column 7 or of the polypeptide as shown in the amino acid sequences as disclosed in table II, application no. 250, columns 5 and 7 or the functional homologues thereof as described herein, or is encoded by the nucleic acid molecule characterized herein or the nucleic acid molecule according to the invention, for example by the nucleic acid molecule as shown in table I, application no. 10, columns 5 and 7 or its herein described functional homologues and has the herein mentioned activity.

[6635] For the purposes of the present invention, the reference to the fine chemical, e.g. to the term “carotenoids”, e.g. “beta-carotene” or “its/their precursor”, e.g. “isopentyl pyrophosphate (IPP)”,“, also encompasses the corresponding salts, such as, for example, the potassium or sodium salts or the salts with amines such as diethylamine as well as their ester, or glucoside thereof, e.g the diglucoside thereof

[6636] for the disclosure of the paragraphs [0065.0.0.24] and [0066.0.0.24] see paragraphs [0065.0.0.0] and [0066.0.0.0] above.

[6637] In one embodiment, the process of the present invention comprises one or more of the following steps
[6638] a) stabilizing a protein conferring the increased expression of a protein encoded by the nucleic acid molecule of the invention or of the polypeptide of the invention, e.g. of a polypeptide having the activity of a protein as indicated in table II, application no. 25, columns 5 and 7 or its homologs activity having herein-mentioned carotenoids, e.g. beta-carotene or its/their precursor, e.g. isopentyl pyrophosphate (IPP), increasing activity; and/or
[6639] b) stabilizing a mRNA conferring the increased expression of a protein encoded by the nucleic acid molecule of the invention, which is in the sense of the invention a fusion of a nucleic acid sequence encoding a transit peptide and of a nucleic acid sequence as shown in table I, application no. 25, columns 5 and 7, e.g. a nucleic acid sequence encoding a polypeptide having the activity of a protein as indicated in table II, application no. 25, columns 5 and 7 or its homologs activity or of a mRNA encoding the polypeptide of the present invention having herein-mentioned carotenoids, e.g. beta-carotene or its/their precursor, e.g. isopentyl pyrophosphate (IPP), increasing activity; and/or
[6640] c) increasing the specific activity of a protein conferring the increased expression of a protein encoded by the nucleic acid molecule of the invention or of the polypeptide of the present invention having herein-mentioned carotenoids, e.g. beta-carotene or its/their precursor, e.g. isopentyl pyrophosphate (IPP), increasing activity, e.g. of a polypeptide having the activity of a protein as indicated in table II, application no. 25, columns 5 and 7 or its homologs activity, or decreasing the inhibitory regulation of the polypeptide of the invention; and/or
[6641] d) generating or increasing the expression of an endogenous or artificial transcription factor mediating the expression of a protein conferring the increased expression of a protein encoded by the nucleic acid molecule of the invention or of the polypeptide of the invention having herein-mentioned carotenoids, e.g. beta-carotene or its/their precursor, e.g. isopentyl pyrophosphate (IPP), increasing activity, e.g. of a polypeptide having the activity of a protein as indicated in table II, application no. 25, columns 5 and 7 or its homologs activity; and/or
[6642] e) stimulating activity of a protein conferring the increased expression of a protein encoded by the nucleic acid molecule of the present invention or a polypeptide of the present invention having herein-mentioned carotenoids, e.g. beta-carotene or its/their precursor, e.g. isopentyl pyrophosphate (IPP), increasing activity, e.g. of a polypeptide having the activity of a protein as indicated in table II, application no. 25, columns 5 and 7 or its homologs activity, by adding one or more exogenous inducing factors to the organisms or parts thereof; and/or
[6643] f) expressing a transgenic gene encoding a protein conferring the increased expression of a polypeptide encoded by the nucleic acid molecule of the present invention or a polypeptide of the present invention, having herein-mentioned carotenoids, e.g. beta-carotene or its/their precursor, e.g. isopentyl pyrophosphate (IPP), increasing activity, e.g. of a polypeptide having the activity of a protein as indicated in table II, application no. 25, columns 5 and 7 or its homologs activity, and/or
[6644] g) increasing the copy number of a gene conferring the increased expression of a nucleic acid molecule encoding a polypeptide encoded by the nucleic acid molecule of the invention or the polypeptide of the invention having herein-mentioned carotenoids, e.g. beta-carotene or its/their precursor, e.g. isopentyl pyrophosphate (IPP),increasing activity, e.g. of a polypeptide having the activity of a protein as indicated in table II, application no. 25, columns 5 and 7 or its homologs activity; and/or
[6645] h) increasing the expression of the endogenous gene encoding the polypeptide of the invention, e.g. a polypeptide having the activity of a protein as indicated in table II, application no. 25, columns 5 and 7 or its homologs activity, by adding positive expression or removing negative expression elements, e.g. homologous recombination can be used to either introduce positive regulatory elements like for plants the 35S enhancer into the promoter or to remove repressor elements form regulatory regions. Further gene conversion methods can be used to disrupt repressor elements or to enhance to activity of positive elements. Positive elements can be randomly introduced in plants by T-DNA or transposon mutagenesis and lines can be identified in which the positive elements have be integrated near to a gene of the invention, the expression of which is thereby enhanced; and/or
[6646] i) modulating growth conditions of an organism in such a manner, that the expression or activity of the gene encoding the protein of the invention or the protein itself is enhanced for example microorganisms or plants can be grown for example under a higher temperature regime leading to an enhanced expression of heat shock proteins, which can lead an enhanced fine chemical production; and/or
[6647] j) selecting of organisms with especially high activity of the proteins of the invention from natural or from mutagenized resources and breeding them into the target organisms, eg the elite crops; and/or
[6648] k) directing a protein encoded by the nucleic acid molecule of the invention or of the polypeptide of the present invention having herein-mentioned carotenoids, e.g. beta-carotene or its/their precursor, e.g. isopentyl pyrophosphate (IPP), increasing activity, e.g. of polypeptide having the activity of a protein as indicated in table II, application no. 25, columns 5 and 7 or its homologs activity, to the plastids by the addition of a plastidial targeting sequence; and/or
[6649] l) generating the expression of a protein encoded by the nucleic acid molecule of the invention or of the polypeptide of the present invention having herein-mentioned carotenoids, e.g. beta-carotene or its/their precursor, e.g. isopentyl pyrophosphate (IPP), increasing activity, e.g. of a polypeptide having the activity of a protein as indicated in table II, application no. 25, columns 5 and 7 or its homologs activity in plastids by the stable or transient transformation advantageously stable transformation of organelles preferably plastids with an inventive nucleic acid sequence preferably in form of an expression cassette containing said sequence leading to the plastidial expression of the nucleic acids or polypeptides of the invention; and/or
[6650] m) generating the expression of a protein encoded by the nucleic acid molecule of the invention or of the polypeptide of the present invention having herein-mentioned carotenoids, e.g. beta-carotene or its/their precursor, e.g. isopentyl pyrophosphate (IPP), increasing activity, e.g. of a polypeptide having the activity of a protein as indicated in table II, application no. 25, columns 5 and 7 or its homologs activity in plastids by integration of a nucleic acid of the invention into the plastidal genome under control of preferable a plastidial promoter.

[6651] Preferably, said mRNA is the nucleic acid molecule of the present invention and/or the protein conferring the increased expression of a protein encoded by the nucleic acid molecule of the present invention alone or link to a transit nucleic acid sequence or transit peptide encoding nucleic acid sequence or the polypeptide having the herein mentioned activity, e.g. conferring the increase of the respective fine chemical as indicated in column 6 of application no. 25 in Table I to IV, resp., after increasing the expression or activity of the encoded polypeptide preferably in organelles such as plastids or having the activity of a polypeptide having an activity as the protein as shown in table II, application no. 25, column 3 or its homologs. Preferably the increase of the fine chemical takes place in plastids.

[6652] for the disclosure of the paragraphs [0069.0.0.24] to [0079.0.0.24] see paragraphs [0069.0.0.0] to [0079.0.0.0] above.

[6653] The activation of an endogenous polypeptide having above-mentioned activity, e.g. having the activity of a protein as shown in table II, application no. 10, column 3 or of the polypeptide of the invention, e.g. conferring the increase of the respective fine chemical after increase of expression or activity in the cytsol and/or in an organelle like a plastid, preferentially in the plastid, can also be increased by introducing a synthetic transcription factor, which binds close to the coding region of the gene encoding the protein as shown in table II, application no. 25, column 3 and activates its transcription. A chimeric zinc finger protein can be constructed, which comprises a specific DNA-binding domain and an activation domain as e.g. the VP16 domain of Herpes Simplex virus. The specific binding domain can bind to the regulatory region of the gene encoding the protein as shown in table II, application no. 25, column 3. The expression of the chimeric transcription factor in a organism, in particular in a plant, leads to a specific expression of the protein as shown in table II, application no. 25, column 3, see e.g. in WO01/52620, Oriz, Proc. Natl. Acad. Sci. USA, 2002, Vol. 99, 13290 or Guan, Proc. Natl. Acad. Sci. USA, 2002, Vol. 99, 13296.

[6654] for the disclosure of the paragraphs [0081.0.0.24] to [0084.0.0.24] see paragraphs [0081.0.0.0] to [0084.0.0.0] above.

[6655] Owing to the introduction of a gene or a plurality of genes conferring the expression of the nucleic acid molecule of the invention or the nucleic acid molecule used in the method of the invention or the polypeptide of the invention or the polypeptide used in the method of the invention as described below, for example the nucleic acid construct mentioned below into an organism alone or in combination with other genes, it is possible not only to increase the biosynthetic flux towards the end product, but also to increase, modify or create de novo an advantageous, preferably novel metabolites composition in the organism, e.g. an advantageous carotinoid composition comprising a higher content of (from a viewpoint of nutritional physiology limited) carotinoids, like xanthopylls, like violaxanthin, antheraxanthin, lutein, astaxanthin, canthaxanthin and/or fucoxanthin or its precursor like Isopentenylpyrophosphate (IPP) Geranylgeranylpyrophosphate (GGPP), Phytoene, Lycopene, zeta-carotene, beta-carotene or.

[6656] for the disclosure of this paragraph see paragraph [0086.0.0.0] above.

[6657] By influencing the metabolism thus, it is possible to produce, in the process according to the invention, further advantageous compounds. Examples of such compounds are further vitamins or provitamins or carotenoids.

[6658] Accordingly, in one embodiment, the process according to the invention relates to a process, which comprises:
[6659] a) providing a non-human organism, preferably a microorganism, a non-human animal, a plant or animal cell, a plant or animal tissue or a plant, more preferably a microorganism, a plant or a plant tissue;
[6660] b) increasing the activity of a protein as shown in table II, application no. 25, column 3 or of a polypeptide being encoded by the nucleic acid molecule of the present invention and described below, e.g. conferring an increase of the respective fine chemical as indicated in any one of Tables I to IV, application no. 25, column 6 “metabolite” in the organism, preferably in the microorganism, the non-human animal, the plant or animal cell, the plant or animal tissue or the plant, more preferably a microorganism, a plant or a plant tissue, in the cytsol or in the plastids, preferentially in the plastids,
[6661] c) growing the organism, preferably the microorganism, the non-human animal, the plant or animal cell, the plant or animal tissue or the plant under conditions which permit the production of the respective fine chemical in the organism, preferably the microorganism, the plant cell, the plant tissue or the plant; and
[6662] d) if desired, recovering, optionally isolating, the respective free and/or bound the fine chemical and, optionally further free and/or bound amino acids synthesized by the organism, the microorganism, the non-human animal, the plant or animal cell, the plant or animal tissue or the plant.

[6663] The organism, in particular the microorganism, non-human animal, the plant or animal cell, the plant or animal tissue or the plant is advantageously grown in such a way that it is not only possible to recover, if desired isolate the free or bound the respective fine chemical or the free and bound the respective fine chemical but as option it is also possible to produce, recover and, if desired isolate, other free or/and bound carotenoids, vitamins, provitamins etc.

[6664] for the disclosure of the paragraphs [0090.0.0.24] to [0097.0.0.24] see paragraphs [0090.0.0.0] to [0097.0.0.0] above.

[6665] With regard to the nucleic acid sequence as depicted a nucleic acid construct which contains a nucleic acid sequence mentioned herein or an organism (=transgenic organism) which is transformed with said nucleic acid sequence or said nucleic acid construct, “transgene” means all those constructs which have been brought about by genetic manipulation methods, preferably in which either
[6666] a) the nucleic acid sequence as shown in table I, application no. 25, columns 5 and 7 or a derivative thereof, or
[6667] b) a genetic regulatory element, for example a promoter, which is functionally linked to the nucleic acid sequence as shown table I, application no. 25, columns 5 and 7 or a derivative thereof, or
[6668] c) (a) and (b)
   is/are not present in its/their natural genetic environment or has/have been modified by means of genetic manipulation methods, it being possible for the modification to be, by way of example, a substitution, addition, deletion, inversion or insertion of one or more nucleotide. “Natural genetic environment” means the natural chromosomal locus in the organism of origin or the presence in a genomic library. In the case of a genomic library, the natural, genetic environment of the nucleic acid sequence is preferably at least partially still preserved. The environment flanks the nucleic acid sequence at least on one side and has a sequence length of at least 50 bp, preferably at least 500 bp, particularly preferably at least 1000 bp, very particularly preferably at least 5000 bp.

[6669] The use of the nucleic acid sequence according to the invention or of the nucleic acid construct according to the invention for the generation of transgenic plants is therefore also subject matter of the invention. As mentioned above the inventive nucleic acid sequence consists advantageously of the nucleic acid sequences as depicted in the sequence protocol and disclosed in table I, application no. 25, columns 5 and 7 joined to a nucleic acid sequence encoding a transit peptide, or a targeting nucleic acid sequence which directs the nucleic acid sequences disclosed in table I, application no. 25, columns 5 and 7 to the organelle preferentially the plastids. Alternatively the inventive nucleic acids sequences consist advantageously of the nucleic acid sequences as depicted in the sequence protocol and disclosed in table I, application no. 25, columns 5 and 7 joined preferably to a nucleic acids sequence mediating the stable integration of nucleic acids into the plastidial genome and optionally sequences mediating the transcription of the sequence in the plastidial compartment. A transient expression is in principal also desirable and possible.

[6670] for the disclosure of this paragraph see paragraph [0100.0.0.0] above.

[6671] In an advantageous embodiment of the invention, the organism takes the form of a plant whose carotenoids, e.g. beta-carotene or its/their precursor, e.g. isopentyl pyrophosphate (IPP), content is modified advantageously owing to the nucleic acid molecule of the present invention expressed. This is important for plant breeders since, for example, the nutritional value of plants for poultry is dependent on the abovementioned carotenoids as vitamin source, free radical scavenger and/or dye source in feed. Further, this is also important for the production of cosmetic compostions since, for example, the antioxidant level of plant extracts is depending on the abovementioned carotenoids and the general amount of vitamins e.g. as antioxidants.

After the activity of the protein as shown in table II, application no. 25, column 3 has been increased or generated, or after the expression of nucleic acid molecule or polypeptide according to the invention has been generated or increased, the transgenic plant generated thus is grown on or in a nutrient medium or else in the soil and subsequently harvested.

[6672] for the disclosure of the paragraphs [0102.0.0.24] to [0110.0.0.24] see paragraphs [0102.0.0.0] to [0110.0.0.0] above.

[6673] In a preferred embodiment, the respective fine chemical (carotenoids, e.g. beta-carotene or its/their precursor, e.g. isopentyl pyrophosphate (IPP),) is produced in accordance with the invention and, if desired, is isolated. The production of further vitamins, provitamins or carotenoids, e.g. carotenes or xanthophylls, or mixtures thereof or mixtures with other compounds by the process according to the invention is advantageous.

Thus, the content of plant components and preferably also further impurities is as low as possible, and the abovementioned carotenoids, e.g. beta-carotene or its/their precursor, e.g. isopentyl pyrophosphate (IPP), are obtained in as pure form as possible. In these applications, the content of plant components advantageously amounts to less than 10%, preferably 1%, more preferably 0.1%, very especially preferably 0.01% or less.

[6674] In another preferred embodiment of the invention a combination of the increased expression of the nucleic acid sequence or the protein of the invention together with the transformation of a protein or polypeptide or a compound, which functions as a sink for the desired fine chemical, for example carotenoids, e.g. beta-carotene or its/their precursor, e.g. isopentyl pyrophosphate (IPP), in the organism, is useful to increase the production of the respective fine chemical.

[6675] In the case of the fermentation of microorganisms, the abovementioned carotenoids, e.g. beta-carotene or its/their precursor, e.g. isopentyl pyrophosphate (IPP),may accumulate in the medium and/or the cells. If microorganisms are used in the process according to the invention, the fermentation broth can be processed after the cultivation. Depending on the requirement, all or some of the biomass can be removed from the fermentation broth by separation methods such as, for example, centrifugation, filtration, decanting or a combination of these methods, or else the biomass can be left in the fermentation broth. The fermentation broth can subsequently be reduced, or concentrated, with the aid of known methods such as, for example, rotary evaporator, thin-layer evaporator, falling film evaporator, by reverse osmosis or by nanofiltration. Afterwards advantageously further compounds for formulation can be added such as corn starch or silicates. This concentrated fermentation broth advantageously together with compounds for the formulation can subsequently be processed by lyophilization, spray drying, spray granulation or by other methods. Preferably the the respective fine chemical or the carotenoids, e.g. beta-carotene or its/their precursor, e.g. isopentyl pyrophosphate (IPP), comprising compositions are isolated from the organisms, such as the microorganisms or plants or the culture medium in or on which the organisms have been grown, or from the organism and the culture medium, in the known manner, for example via extraction, distillation, crystallization, chromatography or a combination of these methods. These purification methods can be used alone or in combination with the aforementioned methods such as the separation and/or concentration methods.

[6676] Transgenic plants which comprise the carotenoids, e.g. beta-carotene or its/their precursor, e.g. isopentyl pyrophosphate (IPP), synthesized in the process according to the invention can advantageously be marketed directly without there being any need for carotenoids, e.g. beta-carotene or its/their precursor, e.g. isopentyl pyrophosphate (IPP), synthesized to be isolated. Plants for the process according to the invention are listed as meaning intact plants and all plant parts, plant organs or plant parts such as leaf, stem, seeds, root, tubers, anthers, fibers, root hairs, stalks, embryos, calli, cotelydons, petioles, harvested material, plant tissue, reproductive tissue and cell cultures which are derived from the actual transgenic plant and/or can be used for bringing about the transgenic plant. In this context, the seed comprises all parts of the seed such as the seed coats, epidermal cells, seed cells, endosperm or embryonic tissue.

The site of carotenoids, e.g. beta-carotene or its/their precursor, e.g. isopentyl pyrophosphate (IPP), biosynthesis in plants is, inter alia, the leaf tissue or florescence so that the isolation of these tissues makes sense. However, this is not limiting, since the expression may also take place in a tissue-specific manner in all of the remaining parts of the plant, in particular in fat-containing seeds. A further preferred embodiment therefore relates to a seed-specific isolation of carotenoids, e.g. beta-carotene or its/their precursor, e.g. isopentyl pyrophosphate (IPP).
However, the respective fine chemical produced in the process according to the invention can also be isolated from the organisms, advantageously plants, in the form of their oils, fats, lipids, glycosides as extracts, e.g. ether, alcohol, or other organic solvents or water containing extract and/or free carotenoids, e.g. beta-carotene or its/their precursor, e.g. isopentyl pyrophosphate (IPP). The respective fine chemical produced by this process can be obtained by harvesting the organisms, either from the crop in which they grow, or from the field. This can be done via pressing or extraction of the plant parts, preferably the plant seeds. To increase the efficiency of oil extraction it is beneficial to clean, to temper and if necessary to hull and to flake the plant material especially the seeds. E.g the oils, fats, lipids, extracts, e.g. ether, alcohol, or other organic solvents or water containing extract and/or free carotenoids, e.g. beta-carotene or its/their precursor, e.g. isopentyl pyrophosphate (IPP), can be obtained by what is known as cold beating or cold pressing without applying heat. To allow for greater ease of disruption of the plant parts, specifically the seeds, they are previously comminuted, steamed or roasted. The seeds, which have been pretreated in this manner can subsequently be pressed or extracted with solvents such as preferably warm hexane. The solvent is subsequently removed. In the case of microorganisms, the latter are, after harvesting, for example extracted directly without further processing steps or else, after disruption, extracted via various methods with which the skilled worker is familiar. In this manner, more than 96% of the compounds produced in the process can be isolated. Thereafter, the resulting products are processed further, i.e. degummed and/or refined. In this process, substances such as the plant mucilages and suspended matter are first removed. What is known as desliming can be affected enzymatically or, for example, chemico-physically by addition of acid such as phosphoric acid.
Because carotenoids in microorganisms are localized intracellular, their recovery essentials comes down to the isolation of the biomass. Well-established approaches for the harvesting of cells include filtration, centrifugation and coagulation/flocculation as described herein. Of the residual hydrocarbon, adsorbed on the cells, has to be removed. Solvent extraction or treatment with surfactants have been suggested for this purpose. However, it can be advantageous to avoid this treatment as it can result in cells devoid of most carotenoids.

[6677] Carotenoids, can for example be analyzed advantageously via HPLC or GC or LC separation methods and detected by MS oder MSMS methods. The unambiguous detection for the presence of carotenoids, e.g. beta-carotene or its/their precursor, e.g. isopentyl pyrophosphate (IPP),containing products can be obtained by analyzing recombinant organisms using analytical standard methods: LC, LC-MS, GC, GC-MS or TLC, as described on several occasions by Christie and the references therein (1997, in: Advances on Lipid Methodology, Fourth Edition: Christie, Oily Press, Dundee, 119-169; 1998, Gaschromatographie-Massenspektrometrie-Verfahren [Gas chromatography/mass spectrometric methods], Lipide 33:343-353). The material to be analyzed can be disrupted by sonication, grinding in a glass mill, liquid nitrogen and grinding, cooking, or via other applicable methods; see also Biotechnology of Vitamins, Pigments and Growth Factors, Edited by Erik J. Vandamme, London, 1989, p. 96 to 103.

[6678] In a preferred embodiment, the present invention relates to a process for the production of the respective fine chemical comprising or generating in an organism or a part thereof, preferably in a cell compartment such as a plastid or mitochondria, the expression of at least one nucleic acid molecule comprising a nucleic acid molecule selected from the group consisting of:
[6679] a) nucleic acid molecule encoding, preferably at least the mature form, of the polypeptide shown in table II, application no. 25, columns 5 and 7 or a fragment thereof, which confers an increase in the amount of the respective fine chemical in an organism or a part thereof;
[6680] b) nucleic acid molecule comprising, preferably at least the mature form, of the nucleic acid molecule shown in table I, application no. 25, columns 5 and 7;
[6681] c) nucleic acid molecule whose sequence can be deduced from a polypeptide sequence encoded by a nucleic acid molecule of (a) or (b) as result of the degeneracy of the genetic code and conferring an increase in the amount of the respective fine chemical in an organism or a part thereof;
[6682] d) nucleic acid molecule encoding a polypeptide which has at least 50% identity with the amino acid sequence of the polypeptide encoded by the nucleic acid molecule of (a) to (c) and conferring an increase in the amount of the respective fine chemical in an organism or a part thereof;
[6683] e) nucleic acid molecule which hybridizes with a nucleic acid molecule of (a) to (c) under stringent hybridisation conditions and conferring an increase in the amount of the respective fine chemical in an organism or a part thereof;
[6684] f) nucleic acid molecule encoding a polypeptide, the polypeptide being derived by substituting, deleting and/or adding one or more amino acids of the amino acid sequence of the polypeptide encoded by the nucleic acid molecules (a) to (d), preferably to (a) to (c) and conferring an increase in the amount of the respective fine chemical in an organism or a part thereof;
[6685] g) nucleic acid molecule encoding a fragment or an epitope of a polypeptide which is encoded by one of the nucleic acid molecules of (a) to (e), preferably to (a) to (c) and conferring an increase in the amount of the respective fine chemical in an organism or a part thereof;
[6686] h) nucleic acid molecule comprising a nucleic acid molecule which is obtained by amplifying nucleic acid molecules from a cDNA library or a genomic library using the primers shown in table III, application no. 25, column 7 and conferring an increase in the amount of the respective fine chemical in an organism or a part thereof;
[6687] i) nucleic acid molecule encoding a polypeptide which is isolated, e.g. from an expression library, with the aid of monoclonal antibodies against a polypeptide encoded by one of the nucleic acid molecules of (a) to (h), preferably to (a) to (c), and conferring an increase in the amount of the respective fine chemical in an organism or a part thereof;
[6688] j) nucleic acid molecule which encodes a polypeptide comprising the consensus sequence shown in table IV, application no. 25, column 7 and conferring an increase in the amount of the respective fine chemical in an organism or a part thereof;
[6689] k) nucleic acid molecule comprising one or more of the nucleic acid molecule encoding the amino acid sequence of a polypeptide encoding a domain of the polypeptide shown in table II, application no. 25, columns 5 and 7 and conferring an increase in the amount of the fine chemical in an organism or a part thereof; and
[6690] l) nucleic acid molecule which is obtainable by screening a suitable library under stringent conditions with a probe comprising one of the sequences of the nucleic acid molecule of (a) to (k), preferably to (a) to (c), or with a fragment of at least 15 nt, preferably 20 nt, 30 nt, 50 nt, 100 nt, 200 nt or 500 nt of the nucleic acid molecule characterized in (a) to (k), preferably to (a) to (c), and conferring an increase in the amount of the respective fine chemical in an organism or a part thereof;
   or which comprises a sequence which is complementary thereto.

[6691] In one embodiment, the nucleic acid molecule used in the process of the invention distinguishes over the sequence indicated in table I A, application no. 25, columns 5 and 7 by one or more nucleotides. In one embodiment, the nucleic acid molecule used in the process of the invention does not consist of the sequence indicated in table I A, application no. 25, columns 5 and 7. In one embodiment, the nucleic acid molecule used in the process of the invention is less than 100%, 99.999%, 99.99%, 99.9% or 99% identical to a sequence indicated in table I A, application no. 25, columns 5 and 7. In another embodiment, the nucleic acid molecule does not encode a polypeptide of a sequence indicated in table II A, application no. 10, columns 5 and 7.

[6692] In one embodiment, the nucleic acid molecule used in the process of the invention distinguishes over the sequence indicated in table I B, application no. 25, columns 5 and 7, by one or more nucleotides. In one embodiment, the nucleic acid molecule used in the process of the invention does not consist of the sequence indicated in table I B, application no. 25, columns 5 and 7. In one embodiment, the nucleic acid molecule used in the process of the invention is less than 100%, 99.999%, 99.99%, 99.9% or 99% identical to a sequence indicated in table I B, application no. 25, columns 5 and 7. In another embodiment, the nucleic acid molecule does not encode a polypeptide of a sequence indicated in table II B, application no. 25, columns 5 and 7.

[6693] In one embodiment, the nucleic acid molecule used in the process distinguishes over the sequence shown in table I, application no. 25, columns 5 and 7 by one or more nucleotides or does not consist of the sequence shown in table I, application no. 25, columns 5 and 7. In one embodiment, the nucleic acid molecule of the present invention is less than 100%, 99.999%, 99.99%, 99.9% or 99% identical to the sequence shown in table I, application no. 25, columns 5 and 7. In another embodiment, the nucleic acid molecule does not encode a polypeptide of the sequence shown in table II, application no. 25, columns 5 and 7.

[6694] for the disclosure of the paragraphs [0118.0.0.24] to [0120.0.0.24] see paragraphs [0118.0.0.0] to [0120.0.0.0] above.

[6695] The expression of nucleic acid molecules with the sequence shown in table I, application no. 25, columns 5 and 7, or nucleic acid molecules which are derived from the amino acid sequences shown in table II, application no. 25, columns 5 and 7 or from polypeptides comprising the consensus sequence shown in table IV, application no. 25, column 7, or their derivatives or homologues encoding polypeptides with the enzymatic or biological activity of a protein as shown in table II, application no. 25, column 3, and conferring an increase of the respective fine chemical (column 6 of application no. 25 in any one of Tables I to IV) after increasing its plastidic and/or specific activity in the plastids is advantageously increased in the process according to the invention by expression either in the cytsol or in an organelle such as a plastid or mitochondria or both, preferably in plastids.

[6696] for the disclosure of this paragraph see paragraph [0122.0.0.0] above.

[6697] Nucleic acid molecules, which are advantageous for the process according to the invention and which encode polypeptides with the activity of a protein as shown in table II, application no. 25, column 3 can be determined from generally accessible databases.

[6698] for the disclosure of this paragraph see paragraph [0124.0.0.0] above.

[6699] The nucleic acid molecules used in the process according to the invention take the form of isolated nucleic acid sequences, which encode polypeptides with the activity of the proteins as shown in table II, application no. 25, column 3 and which confer an increase in the level of the respective fine chemical indicated in table II, application no. 25, column 6 by being expressed either in the cytsol or in an organelle such as a plastid or mitochondria or both, preferably in plastids, and the gene product being localized in the plastid and other parts of the cell or in the plastid as described above.

[6700] for the disclosure of the paragraphs [0126.0.0.24] to [0133.0.0.24] see paragraphs [0126.0.0.0] to [0133.0.0.0] above.

[6701] However, it is also possible to use artificial sequences, which differ in one or more bases from the nucleic acid sequences found in organisms, or in one or more amino acid molecules from polypeptide sequences found in organisms, in particular from the polypeptide sequences shown in table II, application no. 25, columns 5 and 7 or the functional homologues thereof as described herein, preferably conferring above-mentioned activity, i.e. conferring an increase of the respective fine chemical after increasing its plastidic activity, e.g. after increasing the activity of a protein as shown in table II, application no. 25, column 3 by—for example—expression either in the cytsol or in an organelle such as a plastid or mitochondria or both, preferably in plastids and the gene product, e.g. the polypeptide, being localized in the plastid and other parts of the cell or in the plastid as described above.

[6702] for the disclosure of the paragraphs [0135.0.0.24] to [0140.0.0.24] see paragraphs [0135.0.0.0] to [0140.0.0.0] above.

[6703] Synthetic oligonucleotide primers for the amplification, e.g. as shown in table III, application no. 25, column 7, by means of polymerase chain reaction can be generated on the basis of a sequence shown herein, for example the sequence shown in table I, application no. 25, columns 5 and 7 or the sequences derived from table II, application no. 25, columns 5 and 7.

[6704] Moreover, it is possible to identify conserved regions from various organisms by carrying out protein sequence alignments with the polypeptide used in the process of the invention, in particular with sequences of the polypeptide of the invention, from which conserved regions, and in turn, degenerate primers can be derived. Conserved regions are those, which show a very little variation in the amino acid in one particular position of several homologs from different origin. The consensus sequence shown in table IV, application no. 25, column 7 is derived from said alignments.

[6705] Degenerated primers can then be utilized by PCR for the amplification of fragments of novel proteins having above-mentioned activity, e.g. conferring the increase of the fine chemical after increasing the expression or activity or having the activity of a protein as shown in table II, application no. 25, column 3 or further functional homologs of the polypeptide of the invention from other organisms.

[6706] for the disclosure of the paragraphs [0144.0.0.24 to [0151.0.0.24] see paragraphs [0144.0.0.0] to [0151.0.0.0] above.

[6707] Polypeptides having above-mentioned activity, i.e. conferring the increase of the respective fine chemical indicated in table I, application no. 25, column 6, and being derived from other organisms, can be encoded by other DNA sequences which hybridize to the sequences shown in table I, application no. 25, columns 5 and 7, preferably of table I B, application no. 25, columns 5 and 7 under relaxed hybridization conditions and which code on expression for peptides having the respective fine chemical, i.e. carotenoids, e.g. beta-carotene or its/their precursor, e.g. isopentyl pyrophosphate (IPP), increasing activity.

[6708] for the disclosure of the paragraphs [0153.0.0.24] to [0159.0.0.24] see paragraphs [0153.0.0.0] to [0159.0.0.0] above.

[6709] Further, the nucleic acid molecule of the invention comprises a nucleic acid molecule, which is a complement of one of the nucleotide sequences of above mentioned nucleic acid molecules or a portion thereof. A nucleic acid molecule which is complementary to one of the nucleotide sequences shown in table I, application no. 25, columns 5 and 7, preferably shown in table I B, application no. 25, columns 5 and 7 is one which is sufficiently complementary to one of the nucleotide sequences shown in table I, application no. 25, columns 5 and 7, preferably shown in table I B, application no. 25, columns 5 and 7 such that it can hybridize to one of the nucleotide sequences shown in table I, application no. 25, columns 5 and 7, preferably shown in table I B, application no. 25, columns 5 and 7, thereby forming a stable duplex. Preferably, the hybridisation is performed under stringent hybridization conditions. However, a complement of one of the herein disclosed sequences is preferably a sequence complement thereto according to the base pairing of nucleic acid molecules well known to the skilled person. For example, the bases A and G undergo base pairing with the bases T and U or C, resp. and visa versa. Modifications of the bases can influence the base-pairing partner.

[6710] The nucleic acid molecule of the invention comprises a nucleotide sequence which is at least about 30%, 35%, 40% or 45%, preferably at least about 50%, 55%, 60% or 65%, more preferably at least about 70%, 80%, or 90%, and even more preferably at least about 95%, 97%, 98%, 99% or more homologous to a nucleotide sequence shown in table I, application no. 25, columns 5 and 7, preferably shown in table I B, application no. 25, columns 5 and 7, or a portion thereof and preferably has above mentioned activity, in particular having a respective fine chemical increasing activity after increasing the activity or an activity of a gene product as shown in table II, application no. 25, column 3 by for example expression either in the cytsol or in an organelle such as a plastid or mitochondria or both, preferably in plastids, and the gene product, e.g. the polypeptide, being localized in the plastid and other parts of the cell or in the plastid as described above.

[6711] The nucleic acid molecule of the invention comprises a nucleotide sequence which hybridizes, preferably hybridizes under stringent conditions as defined herein, to one of the nucleotide sequences shown in table I, application no. 25, columns 5 and 7, preferably shown in table I B, application no. 25, columns 5 and 7, or a portion thereof and encodes a protein having above-mentioned activity, e.g. conferring of a carotenoids, e.g. beta-carotene or its/their precursor, e.g. isopentyl pyrophosphate (IPP), increase by for example expression either in the cytsol or in an organelle such as a plastid or mitochondria or both, preferably in plastids, and optionally, the activity of a protein as shown in table II, application no. 25, column 3, and the gene product, e.g. the polypeptide, being localized in the plastid and other parts of the cell or in the plastid as described above.

[6712] Moreover, the nucleic acid molecule of the invention can comprise only a portion of the coding region of one of the sequences shown in table I, application no. 25, columns 5 and 7, preferably shown in table I B, application no. 25, columns 5 and 7, for example a fragment which can be used as a probe or primer or a fragment encoding a biologically active portion of the polypeptide of the present invention or of a polypeptide used in the process of the present invention, i.e. having above-mentioned activity, e.g. conferring an increase of the respective fine chemical indicated in Table I, application no. 25, column 6, if its activity is increased by for example expression either in the cytsol or in an organelle such as a plastid or mitochondria or both, preferably in plastids, and the gene product, e.g. the polypeptide, being localized in the plastid and other parts of the cell or in the plastid as described above. The nucleotide sequences determined from the cloning of the present protein-according-to-the-invention-encoding gene allows for the generation of probes and primers designed for use in identifying and/or cloning its homologues in other cell types and organisms. The probe/primer typically comprises substantially purified oligonucleotide. The oligonucleotide typically comprises a region of nucleotide sequence that hybridizes under stringent conditions to at least about 12, 15 preferably about 20 or 25, more preferably about 40, 50 or 75 consecutive nucleotides of a sense strand of one of the sequences set forth, e.g., in table I, application no. 25, columns 5 and 7, an anti-sense sequence of one of the sequences, e.g., set forth in table I, application no. 25, columns 5 and 7, preferably shown in table I B, application no. 25, columns 5 and 7, or naturally occurring mutants thereof. Primers based on a nucleotide of invention can be used in PCR reactions to clone homologues of the polypeptide of the invention or of the polypeptide used in the process of the invention, e.g. as the primers described in the examples of the present invention, e.g. as shown in the examples. A PCR with the primers shown in table Ill, application no. 25, column 7 will result in a fragment of the gene product as shown in table II, column 3.

[6713] for the disclosure of this paragraph see paragraph [0164.0.0.0] above.

[6714] The nucleic acid molecule of the invention encodes a polypeptide or portion thereof which includes an amino acid sequence which is sufficiently homologous to the amino acid sequence shown in table II, application no. 25, columns 5 and 7 such that the protein or portion thereof maintains the ability to participate in the fine chemical production, in particular an activity increasing the level of carotenoids, e.g. beta-carotene or its/their precursor, e.g. isopentyl pyrophosphate (IPP), resp., increasing the activity as mentioned above or as described in the examples in plants or microorganisms is comprised.

[6715] As used herein, the language “sufficiently homologous” refers to proteins or portions thereof which have amino acid sequences which include a minimum number of identical or equivalent amino acid residues (e.g., an amino acid residue which has a similar side chain as an amino acid residue in one of the sequences of the polypeptide of the present invention) to an amino acid sequence shown in table II, application no. 25, columns 5 and 7 such that the protein or portion thereof is able to participate in the increase of the fine chemical production. For examples having the activity of a protein as shown in table II, column 3 and as described herein.

[6716] In one embodiment, the nucleic acid molecule of the present invention comprises a nucleic acid that encodes a portion of the protein of the present invention. The protein is at least about 30%, 35%, 40%, 45% or 50%, preferably at least about 55%, 60%, 65% or 70%, and more preferably at least about 75%, 80%, 85%, 90%, 91%, 92%, 93% or 94% and most preferably at least about 95%, 97%, 98%, 99% or more homologous to an entire amino acid sequence of table II, application no. 25, columns 5 and 7 and having above-mentioned activity, e.g. conferring preferably the increase of the respective fine chemical by for example expression either in the cytsol or in an organelle such as a plastid or mitochondria or both, preferably in plastids, and the gene product, e.g. the polypeptide, being localized in the plastid and other parts of the cell or in the plastid as described above.

[6717] for the disclosure of the paragraphs [0168.0.0.24] and [0169.0.0.24] see paragraphs [0168.0.0.0] and [0169.0.0.0] above.

[6718] The invention further relates to nucleic acid molecules that differ from one of the nucleotide sequences shown in table I, application no. 25, columns 5 and 7 (and portions thereof) due to degeneracy of the genetic code and thus encode a polypeptide of the present invention, in particular a polypeptide having above mentioned activity, e.g. conferring an increase in the respective fine chemical in a organism, e.g. as that polypeptides depicted by the sequence shown in table II, application no. 25, columns 5 and 7 or the functional homologues. Advantageously, the nucleic acid molecule of the invention comprises, or in an other embodiment has, a nucleotide sequence encoding a protein comprising, or in an other embodiment having, an amino acid sequence shown in table II, application no. 25, columns 5 and 7 or the functional homologues. In a still further embodiment, the nucleic acid molecule of the invention encodes a full length protein which is substantially homologous to an amino acid sequence shown in table II, application no. 25, columns 5 and 7 or the functional homologues. However, in a preferred embodiment, the nucleic acid molecule of the present invention does not consist of the sequence shown in table I, application no. 25, columns 5 and 7, preferably as indicated in table I A, application no. 25, columns 5 and 7. Preferably the nucleic acid molecule of the invention is a functional homologue or identical to a nucleic acid molecule indicated in table I B, application no. 25, columns 5 and 7.

[6719] for the disclosure of the paragraphs [0171.0.0.24] to [0173.0.0.24] see paragraphs [0171.0.0.0] to [0173.0.0.0] above.

[6720] Accordingly, in another embodiment, a nucleic acid molecule of the invention is at least 15, 20, 25 or 30 nucleotides in length. Preferably, it hybridizes under stringent conditions to a nucleic acid molecule comprising a nucleotide sequence of the nucleic acid molecule of the present invention or used in the process of the present invention, e.g. comprising the sequence shown in table I, application no. 25, columns 5 and 7. The nucleic acid molecule is preferably at least 20, 30, 50, 100, 250 or more nucleotides in length.

[6721] for the disclosure of this paragraph see paragraph [0175.0.0.0] above.

[6722] Preferably, nucleic acid molecule of the invention that hybridizes under stringent conditions to a sequence shown in table I, application no. 25, columns 5 and 7 corresponds to a naturally-occurring nucleic acid molecule of the invention. As used herein, a “naturally-occurring” nucleic acid molecule refers to an RNA or DNA molecule having a nucleotide sequence that occurs in nature (e.g., encodes a natural protein). Preferably, the nucleic acid molecule encodes a natural protein having abovementioned activity, e.g. conferring the respective fine chemical increase after increasing the expression or activity thereof or the activity of a protein of the invention or used in the process of the invention by for example expression the nucleic acid sequence of the gene product in the cytsol and/or in an organelle such as a plastid or mitochondria, preferably in plastids.

[6723] for the disclosure of this paragraph see paragraph [0177.0.0.0] above.

[6724] For example, nucleotide substitutions leading to amino acid substitutions at “non-essential” amino acid residues can be made in a sequence of the nucleic acid molecule of the invention or used in the process of the invention, e.g. shown in table I, application no. 25, columns 5 and 7.

[6725] for the disclosure of the paragraphs [0179.0.0.24] and [0180.0.0.24] see paragraphs [0179.0.0.0] and [0180.0.0.0] above.

[6726] Accordingly, the invention relates to nucleic acid molecules encoding a polypeptide having above-mentioned activity, e.g. conferring an increase in the the respective fine chemical in an organisms or parts thereof by for example expression either in the cytsol or in an organelle such as a plastid or mitochondria or both, preferably in plastids (as described), that contain changes in amino acid residues that are not essential for said activity. Such polypeptides differ in amino acid sequence from a sequence contained in the sequences shown in table II, application no. 25, columns 5 and 7, preferably shown in table II A, application no. 25, columns 5 and 7 yet retain said activity described herein. The nucleic acid molecule can comprise a nucleotide sequence encoding a polypeptide, wherein the polypeptide comprises an amino acid sequence at least about 50% identical to an amino acid sequence shown in table II, application no. 25, columns 5 and 7, preferably shown in table II A, application no. 25, columns 5 and 7 and is capable of participation in the increase of production of the fine chemical after increasing its activity, e.g. its expression by for example expression either in the cytsol or in an organelle such as a plastid or mitochondria or both, preferably in plastids and the gene product, e.g. the polypeptide, being localized in the plastid and other parts of the cell or in the plastid as described above. Preferably, the protein encoded by the nucleic acid molecule is at least about 60% identical to the sequence shown in table II, application no. 25, columns 5 and 7, preferably shown in table II A, application no. 25, columns 5 and 7, more preferably at least about 70% identical to one of the sequences shown in table II, application no. 25, columns 5 and 7, preferably shown in table II A, application no. 25, columns 5 and 7, even more preferably at least about 80%, 90%, 95% homologous to the sequence shown in table II, application no. 25, columns 5 and 7, preferably shown in table II A, application no. 25, columns 5 and 7, and most preferably at least about 96%, 97%, 98%, or 99% identical to the sequence shown in table II, application no. 25, columns 5 and 7, preferably shown in table II A, application no. 25, columns 5 and 7.

[6727] for the disclosure of the paragraphs [0182.0.0.24] to [0188.0.0.24] see paragraphs [0182.0.0.0] to [0188.0.0.0] above.

[6728] Functional equivalents derived from one of the polypeptides as shown in table II, application no. 10, columns 5 and 7, preferably shown in table II B, application no. 25, columns 5 and 7 resp., according to the invention by substitution, insertion or deletion have at least 30%, 35%, 40%, 45% or 50%, preferably at least 55%, 60%, 65% or 70% by preference at least 80%, especially preferably at least 85% or 90%, 91%, 92%, 93% or 94%, very especially preferably at least 95%, 97%, 98% or 99% homology with one of the polypeptides as shown in table II, application no. 25, columns 5 and 7, preferably shown in table II B, application no. 25, columns 5 and 7 resp., according to the invention and are distinguished by essentially the same properties as the polypeptide as shown in table II, application no. 25, columns 5 and 7, preferably shown in table II B, application no. 25, columns 5 and 7.

[6729] Functional equivalents derived from the nucleic acid sequence as shown in table I, application no. 25, columns 5 and 7, preferably shown in table I B, application no. 25, columns 5 and 7 resp., according to the invention by substitution, insertion or deletion have at least 30%, 35%, 40%, 45% or 50%, preferably at least 55%, 60%, 65% or 70% by preference at least 80%, especially preferably at least 85% or 90%, 91%, 92%, 93% or 94%, very especially preferably at least 95%, 97%, 98% or 99% homology with one of the polypeptides as shown in table II, application no. 25, columns 5 and 7, preferably shown in table II B, application no. 25, columns 5 and 7 resp., according to the invention and encode polypeptides having essentially the same properties as the polypeptide as shown in table II, application no. 25, columns 5 and 7, preferably shown in table II B, application no. 25, columns 5 and 7.

[6730] for the disclosure of this paragraph see paragraph [0191.0.0.0] above.

[6731] A nucleic acid molecule encoding an homologous to a protein sequence of table II, application no. 25, columns 5 and 7, preferably shown in table II B, application no. 25, columns 5 and 7 resp., can be created by introducing one or more nucleotide substitutions, additions or deletions into a nucleotide sequence of the nucleic acid molecule of the present invention, in particular of table I, application no. 25, columns 5 and 7, preferably shown in table I B, application no. 25, columns 5 and 7 resp., such that one or more amino acid substitutions, additions or deletions are introduced into the encoded protein. Mutations can be introduced into the encoding sequences of table I, application no. 25, columns 5 and 7, preferably shown in table I B, application no. 25, columns 5 and 7 resp., by standard techniques, such as site-directed mutagenesis and PCR-mediated mutagenesis.

[6732] for the disclosure of the paragraphs [0193.0.0.24] to [0196.0.0.24] see paragraphs [0193.0.0.0] to [0196.0.0.0] above.

[6733] Homologues of the nucleic acid sequences used, with the sequence shown in table I, application no. 25, columns 5 and 7, preferably shown in table I B, application no. 25, columns 5 and 7, comprise also allelic variants with at least approximately 30%, 35%, 40% or 45% homology, by preference at least approximately 50%, 60% or 70%, more preferably at least approximately 90%, 91%, 92%, 93%, 94% or 95% and even more preferably at least approximately 96%, 97%, 98%, 99% or more homology with one of the nucleotide sequences shown or the abovementioned derived nucleic acid sequences or their homologues, derivatives or analogues or parts of these. Allelic variants encompass in particular functional variants which can be obtained by deletion, insertion or substitution of nucleotides from the sequences shown, preferably from table I, application no. 25, columns 5 and 7, preferably shown in table I B, application no. 25, columns 5 and 7, or from the derived nucleic acid sequences, the intention being, however, that the enzyme activity or the biological activity of the resulting proteins synthesized is advantageously retained or increased.

[6734] In one embodiment of the present invention, the nucleic acid molecule of the invention or used in the process of the invention comprises the sequences shown in any of the table I, application no. 25, columns 5 and 7, preferably shown in table I B, application no. 25, columns 5 and 7. It is preferred that the nucleic acid molecule comprises as little as possible other nucleotides not shown in any one of table I, application no. 25, columns 5 and 7, preferably shown in table I B, application no. 25, columns 5 and 7. In one embodiment, the nucleic acid molecule comprises less than 500, 400, 300, 200, 100, 90, 80, 70., 60, 50 or 40 further nucleotides. In a further embodiment, the nucleic acid molecule comprises less than 30, 20 or 10 further nucleotides. In one embodiment, the nucleic acid molecule use in the process of the invention is identical to the sequences shown in table I, application no. 25, columns 5 and 7, preferably shown in table I B, application no. 25, columns 5 and 7.

[6735] Also preferred is that the nucleic acid molecule used in the process of the invention encodes a polypeptide comprising the sequence shown in table II, application no. 25, columns 5 and 7, preferably shown in table II B, application no. 25, columns 5 and 7. In one embodiment, the nucleic acid molecule encodes less than 150, 130, 100, 80, 60, 50, 40 or 30 further amino acids. In a further embodiment, the encoded polypeptide comprises less than 20, 15, 10, 9, 8, 7, 6 or 5 further amino acids. In one embodiment used in the inventive process, the encoded polypeptide is identical to the sequences shown in table II, application no. 25, columns 5 and 7, preferably shown in table II B, application no. 25, columns 5 and 7.

[6736] In one embodiment, the nucleic acid molecule of the invention or used in the process encodes a polypeptide comprising the sequence shown in table II, application no. 25, columns 5 and 7, preferably shown in table II B, application no. 25, columns 5 and 7 comprises less than 100 further nucleotides. In a further embodiment, said nucleic acid molecule comprises less than 30 further nucleotides. In one embodiment, the nucleic acid molecule used in the process is identical to a coding sequence of the sequences shown in table I, application no. 25, columns 5 and 7, preferably shown in table I B, application no. 25, columns 5 and 7.

[6737] Polypeptides (=proteins), which still have the essential biological or enzymatic activity of the polypeptide of the present invention conferring an increase of the respective fine chemical indicated in column 6 of Table I, application no. 25, i.e. whose activity is essentially not reduced, are polypeptides with at least 10% or 20%, by preference 30% or 40%, especially preferably 50% or 60%, very especially preferably 80% or 90 or more of the wild type biological activity or enzyme activity, advantageously, the activity is essentially not reduced in comparison with the activity of a polypeptide shown in table II, application no. 25, columns 5 and 7 expressed under identical conditions.

[6738] Homologues of table I, application no. 25, columns 5 and 7 or of the derived sequences of table II, application no. 25, columns 5 and 7 also mean truncated sequences, cDNA, single-stranded DNA or RNA of the coding and noncoding DNA sequence. Homologues of said sequences are also understood as meaning derivatives, which comprise noncoding regions such as, for example, UTRs, terminators, enhancers or promoter variants. The promoters upstream of the nucleotide sequences stated can be modified by one or more nucleotide substitution(s), insertion(s) and/or deletion(s) without, however, interfering with the functionality or activity either of the promoters, the open reading frame (=ORF) or with the 3′-regulatory region such as terminators or other 3′ regulatory regions, which are far away from the ORF. It is furthermore possible that the activity of the promoters is increased by modification of their sequence, or that they are replaced completely by more active promoters, even promoters from heterologous organisms. Appropriate promoters are known to the person skilled in the art and are mentioned herein below.

[6739] for the disclosure of the paragraphs [0203.0.0.24] to [0215.0.0.24] see paragraphs [0203.0.0.0] to [0215.0.0.0] above.

[6740] Accordingly, in one embodiment, the invention relates to a nucleic acid molecule, which comprises a nucleic acid molecule selected from the group consisting of:
[6741] a) nucleic acid molecule encoding, preferably at least the mature form, of the polypeptide shown in table II, application no. 25, columns 5 and 7, preferably in table II B, application no. 25, columns 5 and 7; or a fragment thereof conferring an increase in the amount of the fine chemical according to table II B, application no. 25, column 6 in an organism or a part thereof
[6742] b) nucleic acid molecule comprising, preferably at least the mature form, of the nucleic acid molecule shown in table I, application no. 25, columns 5 and 7, preferably in table I B, application no. 25, columns 5 and 7 or a fragment thereof conferring an increase in the amount of the fine chemical according to table II B, application no. 25, column 6 in an organism or a part thereof;
[6743] c) nucleic acid molecule whose sequence can be deduced from a polypeptide sequence encoded by a nucleic acid molecule of (a) or (b) as result of the degeneracy of the genetic code and conferring an increase in the amount of the fine chemical according to table II B, application no. 25, column 6 in an organism or a part thereof;
[6744] d) nucleic acid molecule encoding a polypeptide whose sequence has at least 50% identity with the amino acid sequence of the polypeptide encoded by the nucleic acid molecule of (a) to (c) and conferring an increase in the amount of the fine chemical according to table II B, application no. 25, column 6 in an organism or a part thereof;
[6745] e) nucleic acid molecule which hybridizes with a nucleic acid molecule of (a) to (c) under stringent hybridisation conditions and conferring an increase in the amount of the fine chemical according to table II B, application no. 25, column 6 in an organism or a part thereof;
[6746] f) nucleic acid molecule encoding a polypeptide, the polypeptide being derived by substituting, deleting and/or adding one or more amino acids of the amino acid sequence of the polypeptide encoded by the nucleic acid molecules (a) to (d), preferably to (a) to (c), and conferring an increase in the amount of the fine chemical according to table II B, application no. 25, column 6 in an organism or a part thereof;
[6747] g) nucleic acid molecule encoding a fragment or an epitope of a polypeptide which is encoded by one of the nucleic acid molecules of (a) to (e), preferably to (a) to (c) and conferring an increase in the amount of the fine chemical according to table II B, application no. 25, column 6 in an organism or a part thereof;
[6748] h) nucleic acid molecule comprising a nucleic acid molecule which is obtained by amplifying a cDNA library or a genomic library using the primers in table III, application no. 25, column 7 and conferring an increase in the amount of the fine chemical according to table II B, application no. 25, column 6 in an organism or a part thereof;
[6749] i) nucleic acid molecule encoding a polypeptide which is isolated, e.g. from a expression library, with the aid of monoclonal antibodies against a polypeptide encoded by one of the nucleic acid molecules of (a) to (g), preferably to (a) to (c) and conferring an increase in the amount of the fine chemical in an organism or a part thereof;
[6750] j) nucleic acid molecule which encodes a polypeptide comprising the consensus sequence shown in table IV, application no. 25, column 7 and conferring an increase in the amount of the fine chemical in an organism or a part thereof;
[6751] k) nucleic acid molecule encoding the amino acid sequence of a polypeptide encoding a domain of the polypeptide shown in table II, application no. 252, columns 5 and 7 and conferring an increase in the amount of the fine chemical according to table II B, application no. 25, column 6 in an organism or a part thereof; and
[6752] l) nucleic acid molecule which is obtainable by screening a suitable nucleic acid library under stringent hybridization conditions with a probe comprising one of the sequences of the nucleic acid molecule of (a) to (k) or with a fragment of at least 15 nt, preferably 20 nt, 30 nt, 50 nt, 100 nt, 200 nt or 500 nt of the nucleic acid molecule characterized in (a) to (h) or of the nucleic acid molecule shown in table I, application no. 25, columns 5 and 7 or a nucleic acid molecule encoding, preferably at least the mature form of, the polypeptide shown in table II, application no. 25, columns 5 and 7, and conferring an increase in the amount of the fine chemical according to table II B, application no. 25, column 6 in an organism or a part thereof; or which encompasses a sequence which is complementary thereto;
   whereby, preferably, the nucleic acid molecule according to (a) to (l) distinguishes over the sequence depicted in table I A and/or I B, application no. 25, columns 5 and 7 by one or more nucleotides. In one embodiment, the nucleic acid molecule of the invention does not consist of the sequence shown in table IA and/or I B, application no. 25, columns 5 and 7. In an other embodiment, the nucleic acid molecule of the present invention is at least 30% identical and less than 100%, 99.999%, 99.99%, 99.9% or 99% identical to the sequence shown in table IA and/or I B, application no. 25, columns 5 and 7. In a further embodiment the nucleic acid molecule does not encode the polypeptide sequence shown in table II A and/or II B, application no. 25, columns 5 and 7. Accordingly, in one embodiment, the nucleic acid molecule of the present invention encodes in one embodiment a polypeptide which differs at least in one or more amino acids from the polypeptide shown in table II A and/or II B, application no. 252, columns 5 and 7 does not encode a protein of the sequence shown in table II A and/or II B, application no. 25, columns 5 and 7. Accordingly, in one embodiment, the protein encoded by a sequence of a nucleic acid according to (a) to (l) does not consist of the sequence shown in table IA and/or I B, application no. 25, columns 5 and 7. In a furthey embodiment, the protein of the present invention is at least 30% identical to protein sequence depicted in table II A and/or II B, application no. 25, columns 5 and 7 and less than 100%, preferably less than 99.999%, 99.99% or 99.9%, more preferably less than 99%, 985, 97%, 96% or 95% identical to the sequence shown in table II A and/or II B, application no. 25, columns 5 and 7.

[6753] for the disclosure of the paragraphs [0217.0.0.24] to [0226.0.0.24] see paragraphs [0217.0.0.0] to [0226.0.0.0] above.

[6754] In general, vector systems preferably also comprise further cis-regulatory regions such as promoters and terminators and/or selection markers by means of which suitably transformed organisms can be identified. While vir genes and T-DNA sequences are located on the same vector in the case of cointegrated vector systems, binary systems are based on at least two vectors, one of which bears vir genes, but no T-DNA, while a second one bears T-DNA, but no vir gene. Owing to this fact, the last-mentioned vectors are relatively small, easy to manipulate and capable of replication in E. coli and in Agrobacterium. These binary vectors include vectors from the series pBIB-HYG, pPZP, pBecks, pGreen. Those which are preferably used in accordance with the invention are Bin19, pBI101, pBinAR, pGPTV and pCAMBIA. An overview of binary vectors and their use is given by Hellens et al, Trends in Plant Science (2000) 5, 446-451. The vectors are preferably modified in such a manner, that they already contain the nucleic acid coding for the transitpeptide and that the nucleic acids of the invention, preferentially the nucleic acid sequences encoding the polypeptides shown in table II, application no. 25, columns 5 and 7 can be cloned 3″ prime to the transitpeptide encoding sequence, leading to a functional preprotein, which is directed to the plastids and which means that the mature protein fulfills its biological activity.

[6755] for the disclosure of the paragraphs [0228.0.0.24] to [0239.0.0.24] see paragraphs [0228.0.0.0] to [0239.0.0.0] above.

[6756] The abovementioned nucleic acid molecules can be cloned into the nucleic acid constructs or vectors according to the invention in combination together with further genes, or else different genes are introduced by transforming several nucleic acid constructs or vectors (including plasmids) into a host cell, advantageously into a plant cell or a microorganisms.

In addition to the sequence mentioned in Table I, application no. 25, columns 5 and 7 or its derivatives, it is advantageous additionally to express and/or mutate further genes in the organisms. Especially advantageously, additionally at least one further gene of the isoprenoid or carotene biosynthetic pathway such as for a carotenoid precursor, is expressed in the organisms such as plants or microorganisms. It is also possible that the regulation of the natural genes has been modified advantageously so that the gene and/or its gene product is no longer subject to the regulatory mechanisms which exist in the organisms. This leads to an increased synthesis of the amino acids desired since, for example, feedback regulations no longer exist to the same extent or not at all. In addition it might be advantageously to combine the sequences shown in Table I, application no. 25, columns 5 and 7 with genes which generally support or enhances to growth or yield of the target organism, for example genes which lead to faster growth rate of microorganisms or genes which produces stress-, pathogen, or herbicide resistant plants.

[6757] In a further embodiment of the process of the invention, therefore, organisms are grown, in which there is simultaneous overexpression of at least one nucleic acid or one of the genes which code for proteins involved in the isoprenoid or beta-carotene metabolism, in particular in synthesis of carotenoids, e.g. beta-carotene or its/their precursor, e.g. isopentyl pyrophosphate (IPP).

[6758] Further advantageous nucleic acid sequences which can be expressed in combination with the sequences used in the process and/or the abovementioned biosynthesis genes are the sequences encoding further genes of the beta-carotene biosynthetic pathway, such as the Isopentenyl diphosphate isomerase, Geranylgeranyl diphosphate synthase, Phytoene synthase, Phytoene desaturase, zeta-Carotene desaturase, beta-Cyclase, beta-Hydroxylase and others. These genes can lead to an increased synthesis of the carotenoids, e.g. beta-carotene or its/their precursor, e.g. isopentyl pyrophosphate (IPP), in particular, of the fine chemical indicated in column 6 of any one of Tables I to IV.

[6759] In a further advantageous embodiment of the process of the invention, the organisms used in the process are those in which simultaneously a carotenoids, e.g. beta-carotene or its/their precursor, e.g. isopentyl pyrophosphate (IPP), degrading protein is attenuated, in particular by reducing the rate of expression of the corresponding gene.

[6760] The respective fine chemical produced can be isolated from the organism by methods with which the skilled worker is familiar. For example, via extraction, salt precipitation, and/or different chromatography methods. The process according to the invention can be conducted batchwise, semibatchwise or continuously. The respective fine chemical produced by this process can be obtained by harvesting the organisms, either from the crop in which they grow, or from the field. This can be done via pressing or extraction of the plant parts.

[6761] for the disclosure of the paragraphs [0243.0.0.24] to [0264.0.0.24] see paragraphs [0243.0.0.0] to [0264.0.0.0] above.

[6762] Other preferred sequences for use in operable linkage in gene expression constructs are targeting sequences, which are required for targeting the gene product into specific cell compartments (for a review, see Kermode, Crit. Rev. Plant Sci. 15, 4 (1996) 285-423 and references cited therein), for example into the vacuole, the nucleus, all types of plastids, such as amyloplasts, chloroplasts, chromoplasts, the extracellular space, the mitochondria, the endoplasmic reticulum, elaioplasts, peroxisomes, glycosomes, and other compartments of cells or extracellular preferred are sequences, which are involved in targeting to plastids as mentioned above. Sequences, which must be mentioned in this context are, in particular, the signal-peptide- or transit-peptide-encoding sequences which are known per se. For example, plastid-transit-peptide-encoding sequences enable the targeting of the expression product into the plastids of a plant cell. Targeting sequences are also known for eukaryotic and to a lower extent for prokaryotic organisms and can advantageously be operable linked with the nucleic acid molecule of the present invention as shown in table I, application no. 25, columns 5 and 7 and described herein to achieve an expression in one of said compartments or extracellular.

[6763] for the disclosure of the paragraphs [0266.0.0.24] to [0287.0.0.24] see paragraphs [0266.0.0.0] to [0287.0.0.0] above.

[6764] Accordingly, one embodiment of the invention relates to a vector where the nucleic acid molecule according to the invention is linked operably to regulatory sequences which permit the expression in a prokaryotic or eukaryotic or in a prokaryotic and eukaryotic host. A further preferred embodiment of the invention relates to a vector in which a nucleic acid sequence encoding one of the polypeptides shown in table II, application no. 25, columns 5 and 7 or their homologs is functionally linked to a plastidial targeting sequence. A further preferred embodiment of the invention relates to a vector in which a nucleic acid sequence encoding one of the polypeptides shown in table II, application no. 25, columns 5 and 7 or their homologs is functionally linked to a regulatory sequences which permit the expression in plastids.

[6765] for the disclosure of the paragraphs [0289.0.0.24] to [0296.0.0.24] see paragraphs [0289.0.0.0] to [0296.0.0.0] above.

[6766] Moreover, a native polypeptide conferring the increase of the respective fine chemical in an organism or part thereof can be isolated from cells (e.g., endothelial cells), for example using the antibody of the present invention as described herein, in particular, an antibody against polypeptides as shown in table II, application no. 25, columns 5 and 7, which can be produced by standard techniques utilizing the polypeptide of the present invention or fragment thereof, i.e., the polypeptide of this invention. Preferred are monoclonal antibodies.

[6767] for the disclosure of this paragraph see paragraph [0298.0.0.0] above.

[6768] In one embodiment, the present invention relates to a polypeptide having the sequence shown in table II, application no. 25, columns 5 and 7 or as coded by the nucleic acid molecule shown in table I, application no. 25, columns 5 and 7 or functional homologues thereof.

[6769] In one advantageous embodiment, in the method of the present invention the activity of a polypeptide is increased comprising or consisting of the consensus sequence shown in table IV, application no. 25, columns 7 and in one another embodiment, the present invention relates to a polypeptide comprising or consisting of the consensus sequence shown in table IV, application no. 25, column 7 whereby 20 or less, preferably 15 or 10, preferably 9, 8, 7, or 6, more preferred 5 or 4, even more preferred 3, even more preferred 2, even more preferred 1, most preferred 0 of the amino acids positions indicated can be replaced by any amino acid.

[6770] for the disclosure of the paragraphs [0301.0.0.24] to [0304.0.0.24] see paragraphs [0301.0.0.0] to [0304.0.0.0] above.

[6771] In one advantageous embodiment, the method of the present invention comprises the increasing of a polypeptide comprising or consisting of plant or microorganism specific consensus sequences.

In one embodiment, said polypeptide of the invention distinguishes over the sequence shown in table II A and/or II B, application no. 25, columns 5 and 7 by one or more amino acids. In one embodiment, polypeptide distinguishes form the sequence shown in table II A and/or II B, application no. 25, columns 5 and 7 by more than 5, 6, 7, 8 or 9 amino acids, preferably by more than 10, 15, 20, 25 or 30 amino acids, even more preferred are more than 40, 50, or 60 amino acids and, preferably, the sequence of the polypeptide of the invention distinguishes from the sequence shown in table II A and/or II B, application no. 25, columns 5 and 7 by not more than 80% or 70% of the amino acids, preferably not more than 60% or 50%, more preferred not more than 40% or 30%, even more preferred not more than 20% or 10%. In an other embodiment, said polypeptide of the invention does not consist of the sequence shown in table II A and/or II B, application no. 25, columns 5 and 7.

[6772] for the disclosure of this paragraph see paragraph [0306.0.0.0] above.

[6773] In one embodiment, the invention relates to polypeptide conferring an increase of level of the respective fine chemical indicated in Table II A and/or II B, application no. 25, column 6 in an organism or part being encoded by the nucleic acid molecule of the invention or used in the process of the invention and having a sequence which distinguishes from the sequence as shown in table II A and/or II B, application no. 25, columns 5 and 7 by one or more amino acids. In another embodiment, said polypeptide of the invention does not consist of the sequence shown in table II A and/or II B, application no. 25, columns 5 and 7. In a further embodiment, said polypeptide of the present invention is less than 100%, 99.999%, 99.99%, 99.9% or 99% identical. In one embodiment, said polypeptide does not consist of the sequence encoded by the nucleic acid molecules shown in table I A and/or I B, application no. 25, columns 5 and 7.

[6774] In one embodiment, the present invention relates to a polypeptide having the activity of the protein as shown in table II A and/or II B, application no. 25, column 3, which distinguishes over the sequence depicted in table II A and/or II B, application no. 25, columns 5 and 7 by one or more amino acids, preferably by more than 5, 6, 7, 8 or 9 amino acids, preferably by more than 10, 15, 20, 25 or 30 amino acids, even more preferred are more than 40, 50, or 60 amino acids but even more preferred by less than 70% of the amino acids, more preferred by less than 50%, even more preferred my less than 30% or 25%, more preferred are 20% or 15%, even more preferred are less than 10%. In a further preferred embodiment the polypeptide of the invention takes the form of a preprotein consisting of a plastidial transitpeptide joint to a polypeptide having the activity of the protein as shown in table II A and/or II B, column 3, from which the transitpeptide is preferably cleaved off upon transport of the preprotein into the organelle, for example into the plastid or mitochondria.

[6775] for the disclosure of the paragraphs [0309.0.0.24] to [0311.0.0.24] see paragraphs [0309.0.0.0] to [0311.0.0.0] above.

[6776] A polypeptide of the invention can participate in the process of the present invention. The polypeptide or a portion thereof comprises preferably an amino acid sequence, which is sufficiently homologous to an amino acid sequence shown in table II, application no. 25, columns 5 and 7.

[6777] Further, the polypeptide can have an amino acid sequence which is encoded by a nucleotide sequence which hybridizes, preferably hybridizes under stringent conditions as described above, to a nucleotide sequence of the nucleic acid molecule of the present invention. Accordingly, the polypeptide has an amino acid sequence which is encoded by a nucleotide sequence that is at least about 35%, 40%, 45%, 50%, 55%, 60%, 65% or 70%, preferably at least about 75%, 80%, 85% or 90, and more preferably at least about 91%, 92%, 93%, 94% or 95%, and even more preferably at least about 96%, 97%, 98%, 99% or more homologous to one of the amino acid sequences as shown in table II A and/or II B, application no. 25, columns 5 and 7. The preferred polypeptide of the present invention preferably possesses at least one of the activities according to the invention and described herein. A preferred polypeptide of the present invention includes an amino acid sequence encoded by a nucleotide sequence which hybridizes, preferably hybridizes under stringent conditions, to a nucleotide sequence of table I A and/or I B, application no. 25, columns 5 and 7 or which is homologous thereto, as defined above.

[6778] Accordingly the polypeptide of the present invention can vary from the sequences shown in table II A and/or II B, application no. 25, columns 5 and 7 in amino acid sequence due to natural variation or mutagenesis, as described in detail herein. Accordingly, the polypeptide comprise an amino acid sequence which is at least about 35%, 40%, 45%, 50%, 55%, 60%, 65% or 70%, preferably at least about 75%, 80%, 85% or 90, and more preferably at least about 91%, 92%, 93%, 94% or 95%, and most preferably at least about 96%, 97%, 98%, 99% or more homologous to an entire amino acid sequence shown in table II A and/or II B, application no. 25, columns 5 and 7.

[6779] for the disclosure of this paragraph see paragraph [0315.0.0.0] above.

[6780] Biologically active portions of an polypeptide of the present invention include peptides comprising amino acid sequences derived from the amino acid sequence of the polypeptide of the present invention or used in the process of the present invention, e.g., the amino acid sequence shown in table II, application no. 25, columns 5 and 7 or the amino acid sequence of a protein homologous thereto, which include fewer amino acids than a full length polypeptide of the present invention or used in the process of the present invention or the full length protein which is homologous to an polypeptide of the present invention or used in the process of the present invention depicted herein, and exhibit at least one activity of polypeptide of the present invention or used in the process of the present invention.

[6781] for the disclosure of this paragraph see paragraph [0317.0.0.0] above.

[6782] Manipulation of the nucleic acid molecule of the invention may result in the production of a protein having differences from the wild-type protein as shown in table II, application no. 25, column 3. Differences shall mean at least one amino acid different from the sequences as shown in table II, application no. 25, column 3, preferably at least 2, 3, 4, 5, 6, 7, 8, 9 or 10 amino acids, more preferably at least 15, 20, 25, 30, 35, 40, 45 or 50 amino acids different from the sequences as shown in table II, application no. 25, column 3. These proteins may be improved in efficiency or activity, may be present in greater numbers in the cell than is usual, or may be decreased in efficiency or activity in relation to the wild type protein.

[6783] Any mutagenesis strategies for the polypeptide of the present invention or the polypeptide used in the process of the present invention to result in increasing said activity are not meant to be limiting; variations on these strategies will be readily apparent to one skilled in the art. Using such strategies, and incorporating the mechanisms disclosed herein, the nucleic acid molecule and polypeptide of the invention may be utilized to generate plants or parts thereof, expressing wildtype proteins or mutated proteins of the proteins as shown in table II, application no. 25, column 3. The nucleic acid molecules and polypeptide molecules of the invention are expressed such that the yield, production, and/or efficiency of production of a desired compound is improved.

[6784] Preferably, the compound is a composition comprising the essentially pure fine chemical, i.e. carotenoids, e.g. beta-carotene or its/their precursor, e.g. isopentyl pyrophosphate (IPP), respectively or a recovered or isolated carotenoids, e.g. beta-carotene or its/their precursor, e.g. isopentyl pyrophosphate (IPP), respectively, e.g. in free or in protein- or membrane-bound form.

[6785] for the disclosure of the paragraphs [0320.0.0.24] to [0322.0.0.24] see paragraphs [0320.0.0.0] to [0322.0.0.0] above.

[6786] In one embodiment, a protein (=polypeptide) as shown in table II, application no. 25, column 3 refers to a polypeptide having an amino acid sequence corresponding to the polypeptide of the invention or used in the process of the invention, whereas a “non-inventive protein or polypeptide” or “other polypeptide” refers to a polypeptide having an amino acid sequence corresponding to a protein which is not substantially homologous to a polypeptide of the invention, preferably which is not substantially homologous to a polypeptide or protein as shown in table II, application no. 25, column 3, e.g., a protein which does not confer the activity described herein and which is derived from the same or a different organism.

[6787] for the disclosure of the paragraphs [0324.0.0.24] to [0329.0.0.24] see paragraphs [0324.0.0.0] to [0329.0.0.0] above.

[6788] In an especially preferred embodiment, the polypeptide according to the invention furthermore also does not have the sequences of those proteins, which are encoded by the sequences shown in table II, application no. 25, columns 5 and 7.

[6789] for the disclosure of the paragraphs [0331.0.0.24] to [0346.0.0.24] see paragraphs [0331.0.0.0] to [0346.0.0.0] above.

[6790] Accordingly the present invention relates to any cell transgenic for any nucleic acid characterized as part of the invention, e.g. conferring the increase of the respective fine chemical indicated in column 6 of application no. 25 in any one of Talbes I to IV in a cell or an organism or a part thereof, e.g. the nucleic acid molecule of the invention, the nucleic acid construct of the invention, the antisense molecule of the invention, the vector of the invention or a nucleic acid molecule encoding the polypeptide of the invention, e.g. encoding a polypeptide having an activity as the protein as shown in table II, application no. 25, column 3. Due to the above mentioned activity the respective fine chemical content in a cell or an organism is increased. For example, due to modulation or manipulation, the cellular activity is increased preferably in organelles such as plastids or mitochondria, e.g. due to an increased expression or specific activity or specific targeting of the subject matters of the invention in a cell or an organism or a part thereof especially in organelles such as plastids or mitochondria. Transgenic for a polypeptide having a protein or activity means herein that due to modulation or manipulation of the genome, the activity of protein as shown in table II, application no. 25, column 3 or a protein as shown in table II, application no. 25, column 3-like activity is increased in the cell or organism or part thereof especially in organelles such as plastids or mitochondria. Examples are described above in context with the process of the invention.

[6791] for the disclosure of this paragraph see paragraph [0348.0.0.0] above.

[6792] A naturally occurring expression cassette—for example the naturally occurring combination of the promoter of the gene encoding a protein as shown in table II, application no. 25, column 3 with the corresponding encoding gene—becomes a transgenic expression cassette when it is modified by non-natural, synthetic “artificial” methods such as, for example, mutagenization. Such methods have been described (U.S. Pat. No. 5,565,350; WO 00/15815; also see above).

[6793] for the disclosure of the paragraphs [0350.0.0.24] to [0358.0.0.24] see paragraphs [0350.0.0.0] to [0358.0.0.0] above.

[6794] Transgenic plants comprising the respective fine chemical synthesized in the process according to the invention can be marketed directly without isolation of the compounds synthesized. In the process according to the invention, plants are understood as meaning all plant parts, plant organs such as leaf, stalk, root, tubers or seeds or propagation material or harvested material or the intact plant. In this context, the seed encompasses all parts of the seed such as the seed coats, epidermal cells, seed cells, endosperm or embryonic tissue. The respective fine chemical indicated in column 6 of any one of Tables I to IV, application no. 25, e.g. carotenoids, e.g. beta-carotene or its/their precursor, e.g. isopentyl pyrophosphate (IPP), and being produced in the process according to the invention may, however, also be isolated from the plant and can be isolated by harvesting the plants either from the culture in which they grow or from the field. This can be done for example via expressing, grinding and/or extraction of the plant parts, preferably the plant seeds, plant fruits, plant tubers and the like.

[6795] for the disclosure of the paragraphs [0360.0.0.24] to [0362.0.0.24] see paragraphs [0360.0.0.0] to [0362.0.0.0] above.

[6796] In this manner, more than 50% by weight, advantageously more than 60% by weight, preferably more than 70% by weight, especially preferably more than 80% by weight, very especially preferably more than 90% by weight, of the respective fine chemical produced in the process can be isolated. The resulting composition or fraction comprising the respective fine chemical can, if appropriate, subsequently be further purified, if desired mixed with other active ingredients such as fatty acids, vitamins, amino acids, carbohydrates, antibiotics, covitamins, antioxidants, carotenoids, and the like, and, if appropriate, formulated.

[6797] In one embodiment, the composition is the fine chemical.

[6798] The fine chemical indicated in column 6 of application no. 25 in Table I, in particular carotenoids, e.g. beta-carotene or its/their precursor, e.g. isopentyl pyrophosphate (IPP), and being obtained in the process of the invention are suitable as starting material for the synthesis of further products of value. For example, they can be used in combination with each other or alone for the production of pharmaceuticals, foodstuffs, animal feeds or cosmetics. Accordingly, the present invention relates a method for the production of pharmaceuticals, food stuff, animal feeds, nutrients or cosmetics comprising the steps of the process according to the invention, including the isolation of a composition comprising the fine chemical, e.g. carotenoids, e.g. beta-carotene or its/their precursor, e.g. isopentyl pyrophosphate (IPP), or the isolated respective fine chemical produced, if desired, and formulating the product with a pharmaceutical acceptable carrier or formulating the product in a form acceptable for an application in agriculture. A further embodiment according to the invention is the use of the respective fine chemical indicated in application no. 25, Table I, column 6, and being produced in the process or the use of the transgenic organisms in animal feeds, foodstuffs, medicines, food supplements, cosmetics or pharmaceuticals.

[6799] for the disclosure of the paragraphs [0366.0.0.24] to [0369.0.0.24] see paragraphs [0366.0.0.0] to [0369.0.0.0] above.

[6800] The fermentation broths obtained in this way, containing in particular the respective fine chemical indicated in column 6 of any one of Tables I to IV; application no. 25 or containing mixtures with other compounds, in particular with other vitamins or e.g. with carotenoids, e.g. with astaxanthin, or fatty acids or containing microorganisms or parts of microorganisms, like plastids, normally have a dry matter content of from 7.5 to 25% by weight. The fermentation broth can be processed further. Depending on requirements, the biomass can be separated, such as, for example, by centrifugation, filtration, decantation coagulation/flocculation or a combination of these methods, from the fermentation broth or left completely in it. The fermentation broth can be thickened or concentrated by known methods, such as, for example, with the aid of a rotary evaporator, thin-film evaporator, falling film evaporator, by reverse osmosis or by nanofiltration. This concentrated fermentation broth can then be worked up by extraction, freeze-drying, spray drying, spray granulation or by other processes.

[6801] As carotenoids, e.g. beta-carotene or its/their precursor, e.g. isopentyl pyrophosphate (IPP), is often localized in membranes or plastids, in one embodiment it is advantageous to avoid a leaching of the cells when the biomass is isolated entirely or partly by separation methods, such as, for example, centrifugation, filtration, decantation, coagulation/flocculation or a combination of these methods, from the fermentation broth. The dry biomass can directly be added to animal feed, provided the carotenoids, e.g. beta-carotene or its/their precursor, e.g. isopentyl pyrophosphate (IPP), concentration is sufficiently high and no toxic compounds are present. In view of the instability of carotenoids, e.g. beta-carotene or its/their precursor, e.g. isopentyl pyrophosphate (IPP), conditions for drying, e.g. spray or flash-drying, can be mild and can be avoiding oxidation and cis/trans isomerization. For example antioxidants, e.g. BHT, ethoxyquin or other, can be added. In case the carotenoids, e.g. beta-carotene or its/their precursor, e.g. isopentyl pyrophosphate (IPP), concentration in the biomass is to dilute, solvent extraction can be used for their isolation, e.g. with alcohols, ether or other organic solvents, e.g. with methanol, ethanol, aceton, alcoholic potassium hydroxide, glycerol-fenol, liquefied fenol or for example with acids or bases, like trichloroacetatic acid or potassium hydroxide. A wide range of advantageous methods and techniques for the isolation of vitamin E can be found in the state of the art. Accordingly, it is possible to further purify the produced carotenoids, e.g. beta-carotene or its/their precursor, e.g. isopentyl pyrophosphate (IPP), resp. For this purpose, the product-containing composition, e.g. a total or partial lipid extraction fraction using organic solvents, e.g. as described above, is subjected for example to a saponification to remove triglycerides, partition between e.g. hexane/methanol (separation of non-polar epiphase from more polar hypophasic derivates) and separation via e.g. an open column chromatography or HPLC in which case the desired product or the impurities are retained wholly or partly on the chromatography resin. These chromatography steps can be repeated if necessary, using the same or different chromatography resins. The skilled worker is familiar with the choice of suitable chromatography resins and their most effective use.

[6802] for the disclosure of the paragraphs [0372.0.0.24] to [0376.0.0.24], [0376.1.0.24] and [0377.0.0.24] see paragraphs [0372.0.0.0] to [0376.0.0.0], [0376.1.0.0] and [0377.0.0.0] above.

[6803] In one embodiment, the present invention relates to a method for the identification of a gene product conferring an increase in the fine chemical production in a cell, comprising the following steps:
[6804] (a) contacting e.g. hybridising, the nucleic acid molecules of a sample, e.g. cells, tissues, plants or microorganisms or a nucleic acid library, which can contain a candidate gene encoding a gene product conferring an increase in the respective fine chemical after expression, with the nucleic acid molecule of the present invention;
[6805] (b) identifying the nucleic acid molecules, which hybridize under relaxed stringent conditions with the nucleic acid molecule of the present invention in particular to the nucleic acid molecule sequence shown in table I, application no. 25, columns 5 and 7, preferably in table I B, application no. 25, columns 5 and 7, and, optionally, isolating the full length cDNA clone or complete genomic clone;
[6806] (c) introducing the candidate nucleic acid molecules in host cells, preferably in a plant cell or a microorganism, appropriate for producing the respective fine chemical;
[6807] (d) expressing the identified nucleic acid molecules in the host cells;
[6808] (e) assaying the respective fine chemical level in the host cells; and
[6809] (f) identifying the nucleic acid molecule and its gene product which expression confers an increase in the respective fine chemical level in the host cell after expression compared to the wild type.

[6810] for the disclosure of the paragraphs [0379.0.0.24] to [0383.0.0.24] see paragraphs [0379.0.0.0] to [0383.0.0.0] above.

[6811] The screen for a gene product or an agonist conferring an increase in the fine chemical production can be performed by growth of an organism for example a microorganism in the presence of growth reducing amounts of an inhibitor of the synthesis of the fine chemical. Better growth, eg higher dividing rate or high dry mass in comparison to the control under such conditions would identify a gene or gene product or an agonist conferring an increase in fine chemical production.

One can think to screen for increased fine chemical production by for example resistance to drugs blocking fine chemical synthesis and looking whether this effect is dependent on the proteins as shown in table II, application no. 25, column 3, eg comparing near identical organisms with low and high activity of the proteins as shown in table II, application no. 25, column 3.

[6812] for the disclosure of the paragraphs [0385.0.0.24] to [0404.0.0.24] see paragraphs [0385.0.0.0] to [0404.0.0.0] above.

[6813] Accordingly, the nucleic acid of the invention, the polypeptide of the invention, the nucleic acid construct of the invention, the organisms, the host cell, the microorganisms, the plant, plant tissue, plant cell, or the part thereof the invention, the vector of the invention, the agonist identified with the method of the invention, the nucleic acid molecule identified with the method of the present invention, can be used for the production of the respective fine chemical indicated in Column 6, Table I, application no. 25 or for the production of the respective fine chemical and one or more other carotenoids, vitamins or fatty acids. In one embodiment, in the process of the present invention, the produced carotenoids, e.g. beta-carotene or its/their precursor, e.g. isopentyl pyrophosphate (IPP), is used to protect fatty acids against oxidization, e.g. it is in a further step added in a pure form or only partly isolated to a composition comprising fatty acids.

Accordingly, the nucleic acid of the invention, or the nucleic acid molecule identified with the method of the present invention or the complement sequences thereof, the polypeptide of the invention, the nucleic acid construct of the invention, the organisms, the host cell, the microorganisms, the plant, plant tissue, plant cell, or the part thereof of the invention, the vector of the invention, the agonist identified with the method of the invention, the antibody of the present invention, can be used for the reduction of the respective fine chemical in a organism or part thereof, e.g. in a cell.

[6814] The nucleic acid molecule of the invention, the vector of the invention or the nucleic acid construct of the invention may also be useful for the production of organisms resistant to inhibitors of the carotenoids, e.g. beta-carotene or its/their precursor, e.g. isopentyl pyrophosphate (IPP), production biosynthesis pathways. In particular, the overexpression of the polypeptide of the present invention may protect an organism such as a microorganism or a plant against inhibitors, which block the carotenoids, e.g. beta-carotene or its/their precursor, e.g. isopentyl pyrophosphate (IPP), in particular the respective fine chemical synthesis in said organism.

As carotenoids, e.g. beta-carotene or its/their precursor, e.g. isopentyl pyrophosphate (IPP), can protect organisms against damages of oxidative stress, especially singlet oxygens, a increased level of the respective fine chemical can protect plants against herbicides which cause the toxic buildup of oxidative compounds,e.g. singlet oxygens. For example, inhibition of the protoporphorineogen oxidase (Protox), an enzyme important in the synthesis of chlorophyll and heme biosynthesis results in the loss of chlorophyll and carotenoids and in leaky membranes; the membrane destruction is due to creation of free oxygen radicals (which is also reported for other classic photosynthetic inhibitor herbicides).
Accordingly, in one embodiment, the increase of the level of the respective fine chemical is used to protect plants against herbicides destroying membranes due to the creation of free oxygen radicals.
Examples of inhibitors or herbicides building up oxidative stress are aryl triazion, e.g. sulfentrazone, carfentrazone; or diphenylethers, e.g. acifluorfen, lactofen, or oxyfluorfen; or N-Phenylphthalimide, e.g. flumiclorac or flumioxazin; substituted ureas, e.g.

[6815] fluometuron, tebuthiuron, diuron, or linuron; triazines, e.g. atrazine, prometryn, ametryn, metributzin, prometon, simazine, or hexazinone: or uracils, e.g. bromacil or terbacil.

[6816] In a further embodiment the present invention relates to the use of the antagonist of the present invention, the plant of the present invention or a part thereof, the microorganism or the host cell of the present invention or a part thereof for the production a cosmetic composition or a pharmaceutical composition. Such a composition has an antioxidative activity, photoprotective activity, can be used to protect, treat or heal the above mentioned diseases, e.g. hypercholesterolemic or cardiovascular diseases, certain cancers, and cataract formation or as as immunostimulatory agent.

The carotenoids, e.g. beta-carotene or its/their precursor, e.g. isopentyl pyrophosphate (IPP), can be also used as stabilizer of other colours or oxygen sensitive compounds, like fatty acids, in particular unsaturated fatty acids.
The carotenoids, e.g. beta-carotene or its/their precursor, e.g. isopentyl pyrophosphate (IPP), of the present invention can be further used for coloring cosmetics or feed and food, specially for coloring food by coloring the feed of for example poultry or lobsters.

[6817] for the disclosure of the paragraphs [0406.0.0.24] to [0416.0.0.24] see paragraphs [0406.0.0.0] to [0416.0.0.0] above.

[6818] An in vivo mutagenesis of organisms such as algae (e.g. Spongiococcum sp, e.g. Spongiococcum exentricum, Chlorella sp., Haematococcus, Phaedactylum tricornatum, Volvox or Dunaliella), Synechocystis sp. PCC 6803, Physcometrella patens, Saccharomyces, Mortierella, Escherichia and others mentioned above, which are beneficial for the production of carotenoids, e.g. beta-carotene or its/their precursor, e.g. isopentyl pyrophosphate (IPP), can be carried out by passing a plasmid DNA (or another vector DNA) containing the desired nucleic acid sequence or nucleic acid sequences, e.g. the nucleic acid molecule of the invention or the vector of the invention, through E. coli and other microorganisms (for example Bacillus spp. or yeasts such as Saccharomyces cerevisiae) which are not capable of maintaining the integrity of its genetic information. Usual mutator strains have mutations in the genes for the DNA repair system [for example mutHLS, mutD, mutT and the like; for comparison, see Rupp, W. D. (1996) DNA repair mechanisms in Escherichia coli and Salmonella, pp. 2277-2294, ASM: Washington]. The skilled worker knows these strains. The use of these strains is illustrated for example in Greener, A. and Callahan, M. (1994) Strategies 7; 32-34.

In-vitro mutation methods such as increasing the spontaneous mutation rates by chemical or physical treatment are well known to the skilled person. Mutagens like 5-bromo-uracil, N-methyl-N-nitro-N-nitrosoguanidine (=NTG), ethyl methanesulfonate (=EMS), hydroxylamine and/or nitrous acid are widely used as chemical agents for random in-vitro mutagenesis. The most common physical method for mutagenesis is the treatment with UV irradiation. Another random mutagenesis technique is the error-prone PCR for introducing amino acid changes into proteins. Mutations are deliberately introduced during PCR through the use of error-prone DNA polymerases and special reaction conditions known to a person skilled in the art. For this method randomized DNA sequences are cloned into expression vectors and the resulting mutant libraries screened for altered or improved protein activity as described below.
Site-directed mutagenesis method such as the introduction of desired mutations with an M13 or phagemid vector and short oligonucleotides primers is a well-known approach for site-directed mutagenesis. The clou of this method involves cloning of the nucleic acid sequence of the invention into an M13 or phagemid vector, which permits recovery of single-stranded recombinant nucleic acid sequence. A mutagenic oligonucleotide primer is then designed whose sequence is perfectly complementary to nucleic acid sequence in the region to be mutated, but with a single difference: at the intended mutation site it bears a base that is complementary to the desired mutant nucleotide rather than the original. The mutagenic oligonucleotide is then allowed to prime new DNA synthesis to create a complementary full-length sequence containing the desired mutation. Another site-directed mutagenesis method is the PCR mismatch primer mutagenesis method also known to the skilled person. DpnI site-directed mutagenesis is a further known method as described for example in the Stratagene Quickchange™ site-directed mutagenesis kit protocol. A huge number of other methods are also known and used in common practice.
Positive mutation events can be selected by screening the organisms for the production of the desired fine chemical.

[6819] for the disclosure of the paragraphs [0418.0.0.24] to [0435.0.0.24] see paragraphs [0418.0.0.0] to [0435.0.0.0] above.

[6820] Carotenoids, e.g. beta-carotene or its/their precursor, e.g. isopentyl pyrophosphate (IPP), production

[6821] Carotenoids, e.g. beta-carotene or its/their precursor, e.g. isopentyl pyrophosphate (IPP), can be detected advantageously as described in Deli, J. & Molnar, P., Paprika carotenoids: Analysis, isolation, structure elucidation. Curr. Org. Chem. 6, 1197-1219 (2004) or Fraser, P. D., Pinto, M. E., Holloway, D. E. & Bramley, P. M. Technical advance: application of high-performance liquid chromatography with photodiode array detection to the metabolic profiling of plant isoprenoids. Plant J. 24, 551-558 (2000).

[6822] for the disclosure of the paragraphs [0437.0.0.24] and [0438.0.0.24] see paragraphs [0437.0.0.0] and [0438.0.0.0] above.

### Example 8

### Analysis of the Effect of the Nucleic Acid Molecule on the Production of the Respective Fine Chemical Indicated in Table I, Application No. 25, Column 6

[6823] for the disclosure of the paragraph [0440.0.0.24] see paragraph [0440.0.0.10] above.

[6824] for the disclosure of this paragraph see [0441.0.0.0] above.

### Example 9

### Purification of the Carotenoids, e.g. Beta-Carotene or its/their Precursor, e.g. Isopentyl Pyrophosphate (IPP)

[6825] Abbreviations: GC-MS, gas liquid chromatography/mass spectrometry; TLC, thin-layer chromatography.

The unambiguous detection for the presence of carotenoids, e.g. beta-carotene or its/their precursor, e.g. isopentyl pyrophosphate (IPP),can be obtained by analyzing recombinant organisms using analytical standard methods: GC, GC-MS or TLC, as described (1997, in: Advances on Lipid Methodology, Fourth Edition: Christie, Oily Press, Dundee, 119-169; 1998, Gaschromatographie-Massenspektrometrie-Verfahren [Gas chromatography/mass spectrometric methods], Lipide 33:343-353).
The total vitamin E produced in the organism for example in yeasts used in the inventive process can be analysed for example according to the following procedure: The material such as yeasts, E. coli or plants to be analyzed can be disrupted by sonication, grinding in a glass mill, liquid nitrogen and grinding or via other applicable methods.
Plant material is initially homogenized mechanically by comminuting in a pestle and mortar to make it more amenable to extraction.
A typical sample pretreatment consists of a total lipid extraction using such polar organic solvents as acetone or alcohols as methanol, or ethers, saponification, partition between phases, separation of non-polar epiphase from more polar hypophasic derivatives and chromatography.

[6826] Characterization of the Transgenic Plants

In order to confirm that carotenoids, e.g. beta-carotene or its/their precursor, e.g. isopentyl pyrophosphate (IPP),biosynthesis in the transgenic plants is influenced by the expression of the polypeptides described herein, the tocopherol/carotenoids, e.g. beta-carotene or its/their precursor, e.g. isopentyl pyrophosphate (IPP), content in leaves and seeds of the plants transformed with the described constructs (Arabidopsis thaliana, Brassica napus and Nicotiana tabacum) is analyzed. For this purpose, the transgenic plants are grown in a greenhouse, and plants which express the gene coding for polypeptide of the invention or used in the method of the invention are identified at the Northern level. The tocopherol content or the carotenoids, e.g. beta-carotene or its/their precursor, e.g. isopentyl pyrophosphate (IPP),content in leaves and seeds of these plants is measured. In all, the tocopherol concentration is raised by comparison with untransformed plants.

[6827] If required and desired, further chromatography steps with a suitable resin may follow. Advantageously, carotenoids, e.g. beta-carotene or its/their precursor, e.g. isopentyl pyrophosphate (IPP), can be further purified with a so-called RTHPLC. As eluent acetonitrile/water or chloroform/acetonitrile mixtures can be used. If necessary, these chromatography steps may be repeated, using identical or other chromatography resins. The skilled worker is familiar with the selection of suitable chromatography resin and the most effective use for a particular molecule to be purified.

In addition depending on the produced fine chemical purification is also possible with cristalisation or destilation. Both methods are well known to a person skilled in the art.

[6828] for the disclosure of the paragraph [0445.0.0.24] see paragraph [0450.0.0.10] above.

[6829] for the disclosure of the paragraphs [0446.0.0.24] to [0496.0.0.24] see paragraphs [0446.0.0.0] to [0496.0.0.0] above.

[6830] As an alternative, the carotenoids, e.g. beta-carotene or its/their precursor, e.g. isopentyl pyrophosphate (IPP), can be detected advantageously as described in Deli, J. & Molnar, P., Paprika carotenoids: Analysis, isolation, structure elucidation. Curr. Org. Chem. 6, 1197-1219 (2004) or Fraser, P. D., Pinto, M. E., Holloway, D. E. & Bramley, P. M. Technical advance: application of high-performance liquid chromatography with photodiode array detection to the metabolic profiling of plant isoprenoids. Plant J. 24, 551-558 (2000).
[6831] The results of the different plant analyses can be seen from the table, which follows:

TABLE VI

| | | Method/ | Min.- | Max.- |
|---|---|---|---|---|
| ORF | Metabolite | Analytics | Value | Value |
| b0931 | Isopentenyl Pyrophosphate | LC | 1.60 | 2.48 |
| b1868 | Isopentenyl Pyrophosphate | LC | 1.35 | 1.40 |
| b2032 | Isopentenyl Pyrophosphate | LC | 1.40 | 1.68 |
| YLR099C | Isopentenyl Pyrophosphate | LC | 3.18 | 4.51 |
| YPL080C | Isopentenyl Pyrophosphate | LC | 1.50 | 2.46 |

[6832] for the disclosure of the paragraphs [0499.0.0.24] and [0500.0.0.24] see paragraphs [0499.0.0.0] and [0500.0.0.0] above.

### Example 15a

### Engineering Ryegrass Plants by Over-Expressing b0931 from E. coli or Homologs of b0931 from Other Organisms

[6833] for the disclosure of the paragraphs [0502.0.0.24] to [0508.0.0.24] see paragraphs [0502.0.0.0] to [0508.0.0.0] above.

### Example 15b

### Engineering Soybean Plants by Over-Expressing b0931 from E. coli or Homologs of b0931 from Other Organisms

[6834] for the disclosure of the paragraphs [0510.0.0.24] to [0513.0.0.24] see paragraphs [0510.0.0.0] to [0513.0.0.0] above.

### Example 15c

### Engineering Corn Plants by Over-Expressing b0931 from E. coli or Homologs of b0931 from Other Organisms

[6835] for the disclosure of the paragraphs [0515.0.0.24] to [0540.0.0.24] see paragraphs [0515.0.0.0] to [0540.0.0.0] above.

### Example 15d

### Engineering Wheat Plants by Over-Expressing b0931 from E. coli or Homologs of b0931 from Other Organisms

[6836] for the disclosure of the paragraphs [0542.0.0.24] to [0544.0.0.24] see paragraphs [0542.0.0.0] to [0544.0.0.0] above.

### Example 15e

### Engineering Rapeseed/Canola Plants by Over-Expressing b0931 from E. coli or Homologs of b0931 from Other Organisms

[6837] for the disclosure of the paragraphs [0546.0.0.24] to [0549.0.0.24] see paragraphs [0544.0.0.0] to [0549.0.0.0] above.

### Example 15f

### Engineering Alfalfa Plants by Over-Expressing b0931 from E. coli or Homologs of b0931 from Other Organisms

[6838] for the disclosure of the paragraphs [0551.0.0.24] to [0554.0.0.24] see paragraphs [0551.0.0.0] to [0554.0.0.0] above.

[6839] %

[6840] for the disclosure of this paragraph see [0554.2.0.0] above.

[6841] for the disclosure of this paragraph see [0555.0.0.0] above.

Lengthy table referenced here
US20140199313A1-20140717-T00001
Please refer to the end of the specification for access instructions.

Lengthy table referenced here
US20140199313A1-20140717-T00002
Please refer to the end of the specification for access instructions.

Lengthy table referenced here
US20140199313A1-20140717-T00003
Please refer to the end of the specification for access instructions.

Lengthy table referenced here
US20140199313A1-20140717-T00004
Please refer to the end of the specification for access instructions.

Lengthy table referenced here
US20140199313A1-20140717-T00005
Please refer to the end of the specification for access instructions.

Lengthy table referenced here
US20140199313A1-20140717-T00006
Please refer to the end of the specification for access instructions.

Lengthy table referenced here
US20140199313A1-20140717-T00007
Please refer to the end of the specification for access instructions.

LENGTHY TABLES
The patent application contains a lengthy table section. A copy of the table is available in electronic form from the USPTO web site (http://seqdata.uspto.gov/?pageRequest=docDetail&DocID=US20140199313A1). An electronic copy of the table will also be available from the USPTO upon request and payment of the fee set forth in 37 CFR 1.19(b)(3).

The application's sequence listing, which the Patent Office published only in electronic form, follows.

SEQUENCE LISTING (70350 sequences)

SEQ ID NO: 1 - DNA, 1440 bp, Saccharomyces cerevisiae
  CDS (1)..(1440)
atgttcttttcaaaagttatgcttactcggcgtattttggtgaggggtttggcaacagccaaatcttcagctccaaagttaacagatgtattaatcgtaggtgggggtcctgcaggtttgactttagctgcatcgattaagaattctccgcaattaaaagatctaaagacaactttagtcgatatggtggacttaaaagataaattatcggacttttataattcacccccagattattttacgaacaggattgtcagtgttacgcctagatctattcattttcttgagaataacgctggggcaactttgatgcatgacaggattcaaagttatgacggactctatgtcacggacggttgttctaaggctactttggatctggcaagggactccatgctttgtatgattgaaattataaatatacaggcctccttatacaacagaatttctcagtacgattcaaagaaggactccattgatattattgataatacaaaagttgtcaatattaaacacagcgaccctaatgatccattgtcctggcctttagtcactctttccaatggtgaagtatacaagacgagattgctagtgggtgcagacgggttcaattctcctaccagaagattttcccagatcccatctaggggctggatgtataatgcctatggtgttgtggccagcatgaagttagagtatcctccctttaaactaaggggctggcagaggttcttacccactggtccaattgcacacttacccatgcctgaaaataatgctactttagtctggagttcatctgaacgtttatcgaggcttttgttgtcattacctccagaatcattcactgcacttatcaatgctgcttttgtcttggaagacgcagacatgaactactattaccgtacattggaagatggctctatggacaccgataaattgatagaagatattaaattcagaactgaggaaatatacgccacgttgaaggacgagtcggatattgatgaaatttacccaccaagagttgttagtataatagataagacaagagcacgttttcccttaaaattaacacatgcagatcgttattgcactgatagagttgcccttgttggggacgcagcacatacgacacatcctctcgctggacaggggttaaacatggggcaaacagacgttcatggtttagtatacgctttagaaaaggcaatggaaagaggtttagacattggctcttcattgagcttagaacccttttgggcagaaagatatccgtcgaacaacgttctattaggaatggcggataaattatttaaattatatcacactaattttcctcctgtggtagccctaagaacttttggtttgaatctgacgaataagatcggtccagttaagaatatgatcattgacacattaggaggaaatgagaaatga

SEQ ID NO: 2 - protein, 479 aa, Saccharomyces cerevisiae
MFFSKVMLTRRILVRGLATAKSSAPKLTDVLIVGGGPAGLTLAASIKNSPQLKDLKTTLVDMVDLKDKLSDFYNSPPDYFTNRIVSVTPRSIHFLENNAGATLMHDRIQSYDGLYVTDGCSKATLDLARDSMLCMIEIINIQASLYNRISQYDSKKDSIDIIDNTKVVNIKHSDPNDPLSWPLVTLSNGEVYKTRLLVGADGFNSPTRRFSQIPSRGWMYNAYGVVASMKLEYPPFKLRGWQRFLPTGPIAHLPMPENNATLVWSSSERLSRLLLSLPPESFTALINAAFVLEDADMNYYYRTLEDGSMDTDKLIEDIKFRTEEIYATLKDESDIDEIYPPRVVSIIDKTRARFPLKLTHADRYCTDRVALVGDAAHTTHPLAGQGLNMGQTDVHGLVYALEKAMERGLDIGSSLSLEPFWAERYPSNNVLLGMADKLFKLYHTNFPPVVALRTFGLNLTNKIGPVKNMIIDTLGGNEK

SEQ ID NO: 3 - DNA, 1260 bp, Nostoc sp. PCC 7120
  CDS (1)..(1260)
atggcgctaacgcagcttactcaaactatttctcctcaaccgacaccgccagaactgcgaaaatacgactatgatttagtcatcgtcggcggtggaattgttgggttaactctagcttcagcattaaaagattctggcttgaatatactgctaattgaagccaaagttgcatcagcagcagtagctaaaggtcaagcctacgcagttcatctactatcagccctaatttaccaaggaattggtatttgggataaaattctgcctcagattgccaagtaccgccaagtccgtctttctgatgctgattatcctggtgtggtggagtttgaaagcacagatttagggacaccagaattaggttatgtagcggaacatcaagcgttactggaacctctacaggagtttgtgcagaattgcccaaatgtgacttatctttgtccggctgaggtggtgagtaccaattaccagccaaatgaagtagtcatcgctgttaaaattgccgatcaattaaacacaattcgtagcaaattactggtagccgcagatggatcgcgatcgcctattcgtcaggcggcggggattaaaactcatggctggaagtattggcaatcttgcattgtggctttcgttaagccagagaaaccccataacgatacagcttacgaaagattttggcctagtggcccctttgcgattttacctctacctgagaaccgttgccgcatcgtttggacggctccccacgatgaagcaaaagccctttgtgccttaaatgacgaagaatttttacgagaacttagccaacgctttgggcagcaaatgggtaagttggaattattaggcgatcgcttcgtttttcaagtacaactaatgcaaagcgatcgttatgtccttccccgtttagctttagttggcgatgcggcacataattgtcatcctgtgggtggacaaggattaaacttgggtattcgagatgtcgccgctttagcccaagtcattcaaaaagcacatcaagctggtgaagatattggtaatattcgggtcttgaaacgttacgaaagctggcgacaaaaagagaacctagccattttagggttcactgatatgttagaccggatgttctctaaccaattccctccgttggtgtttcttcgtcgcttgggtttatggtttttacgcagtgtccctgtgctgaaaacatttatgctcaagttgatgattgggttgaagggaaaaactccagaattggctaaacgttga

SEQ ID NO: 4 - protein, 419 aa, Nostoc sp. PCC 7120
MALTQLTQTISPQPTPPELRKYDYDLVIVGGGIVGLTLASALKDSGLNILLIEAKVASAAVAKGQAYAVHLLSALIYQGIGIWDKILPQIAKYRQVRLSDADYPGVVEFESTDLGTPELGYVAEHQALLEPLQEFVQNCPNVTYLCPAEVVSTNYQPNEVVIAVKIADQLNTIRSKLLVAADGSRSPIRQAAGIKTHGWKYWQSCIVAFVKPEKPHNDTAYERFWPSGPFAILPLPENRCRIVWTAPHDEAKALCALNDEEFLRELSQRFGQQMGKLELLGDRFVFQVQLMQSDRYVLPRLALVGDAAHNCHPVGGQGLNLGIRDVAALAQVIQKAHQAGEDIGNIRVLKRYESWRQKENLAILGFTDMLDRMFSNQFPPLVFLRRLGLWFLRSVPVLKTFMLKLMIGLKGKTPELAKR

SEQ ID NO: 5 - DNA, 1359 bp, Brucella melitensis
  CDS (1)..(1359)
atgatcgcaatttggtttaagtgcggcggaaacgcatctggcaagaatcgcttttgctgccagtatcaagagcggcggcttcacccgaaaccgccatggccgaggatgagcgcgatgaatgacgtggttgtaaacaagcccctcaccgacattgttatcagtggcggcggcccggccggcatgatggcggcgctggcgcttggggtccgcggctaccataccgtgctgctcggccccgaaaccgacaagaccgaccggcgcaccaccgcactgatgatgcccgcgatccgttttctggagcagatcggcgtctgggctgcgatcgagccggaagcggctcccttgcaatccatgcgcatcgtggatgcaaccaggcgccttatccgcagccctgcggtcatgttccgtgcgagcgagattgatgagattgccttcggctacaacatccccaacgccgtgctgaatgcaaagcttgccgaagcggtcgcggccagtcgcaatatccggcgcatcactgtcccggccatcgaatatcgccccaatggcgaccatgtcaccgtgacgctcaaggggggcgatacgctgcacacacgcctgttggtcgccgccgacgggcgcaattccggtgcgcgcgacgccgctggcatccgcacccgccgctggagctatccgcaaacggccgtggttctttccttttcccatatgattgaccacgagaatatttcgaccgaatttcacaccgaagaaggcccgtttacacaagtgccgctcaaggggcggcgatcaagcctcgtctgggtggttaatccggcgcgcgccgaaaagctgctttcaatgagcgatgaggctcttgcggtccatatcgaggagatgatgcaatccatgctgggcaagatcacgctggaggtgcgcccgcaagcctggccgctttccggcctcgtgccccatgtctttgcagcaaagcgcaccatcctgatcggcgaagctgcccatgtctttccgcccatcggcgcgcaagggctgaaccttggcacacgcgacgtggaaacactggtaaaggccattgagagcgattcggtcgatcccggttccgagcgtgtcatgcgcgcttatgaccgcgcgcggcgtcccgatattttcgcgcgtaccggctcggtcgatgcgctcaaccgctcgctgctttcctccatgctgcctgcgcagatcctgcgcggtgtagggctggaaatgcttcgctcctttgcgccgctgcgcgcgttcttcatgcgcgagggccttcgccccggcagcggtttttcgcaccttctgccccggctcccgcgtctgcccggcaaagctgacgacgccgcaagacaatag

SEQ ID NO: 6 - protein, 452 aa, Brucella melitensis
MIAIWFKCGGNASGKNRFCCQYQERRLHPKPPWPRMSAMNDVVVNKPLTDIVISGGGPAGMMAALALGVRGYHTVLLGPETDKTDRRTTALMMPAIRFLEQIGVWAAIEPEAAPLQSMRIVDATRRLIRSPAVMFRASEIDEIAFGYNIPNAVLNAKLAEAVAASRNIRRITVPAIEYRPNGDHVTVTLKGGDTLHTRLLVAADGRNSGARDAAGIRTRRWSYPQTAVVLSFSHMIDHENISTEFHTEEGPFTQVPLKGRRSSLVWVVNPARAEKLLSMSDEALAVHIEEMMQSMLGKITLEVRPQAWPLSGLVPHVFAAKRTILIGEAAHVFPPIGAQGLNLGTRDVETLVKAIESDSVDPGSERVMRAYDRARRPDIFARTGSVDALNRSLLSSMLPAQILRGVGLEMLRSFAPLRAFFMREGLRPGSGFSHLLPRLPRLPGKADDAARQ

SEQ ID NO: 7 - DNA, 1179 bp, Yersinia pestis
  CDS (1)..(1179)
atgagtgtgataattgttggtggtggaatggcgggggtaactctggcactggccatttcatcccttactcacgggcaggtgcccgttgcactggttgaggcgcaacaacccaatgaccggcaacatccgggctttgatgccagagcgattgcgctggcgcaggggacttgccagcagttggcgcgcattggtgcctggtcggcattggccgattgtgccacggccattgatcatgttcatgtcagtgatcgcggtcattctggttttgttaatttgcgggctgaagattacggtgtaccggcgctggggcatgttctcgagctacatgatgctggtgaacggctctttgccttgctgatgaaagcaccgggggtgacgctgcattgtccggccaaagtggttgatgtggttcgtaccgctgaatccgcccgtgtgacgctggatgacgggcaacaactggcggcaaaattgctggtggccgcagacggttctcactcggcattagcccaatcctgcgctatccaatggcagcgacaggattaccaacaggttgcaattattgcgaatatcaccacctccgagctaccgaatggccgtgcttttgagcgttttacccgcaatgggccattagctttactgccgatgtctcaggggcgcagttctttggtttggtgccatgcgaagcatgatcaacaacagatcgatagctgggatgacgcgcgttttttggcagagctacagcaagcctttggttggcggttggggaaaatgcttcaggcgggtaaacgccacagctacccattacagttactgattgcgtcacgtcatatcagccaccgcctggcgttggtggggaatgcggcacaaaccttacatccgatagccggtcaggggtttaatcttggcctgcgggatgtgatgtcactggctgaaacccttgcagaggctgcggccatggggaatgatctcggtgactataccgttcttagccactatcagcagcggcgtcagcaggatcaacaggcgactattggcgttactgatggtttgatccgtttgtttgcgaatcgctatgggccgttagtcgcagggcggaatttggcgctgatggccatggaacagatgcccacaatacgtgatacttttgctcggcgtacattgggctgggtcgagcgctaa

SEQ ID NO: 8 - protein, 392 aa, Yersinia pestis
MSVIIVGGGMAGVTLALAISSLTHGQVPVALVEAQQPNDRQHPGFDARAIALAQGTCQQLARIGAWSALADCATAIDHVHVSDRGHSGFVNLRAEDYGVPALGHVLELHDAGERLFALLMKAPGVTLHCPAKVVDVVRTAESARVTLDDGQQLAAKLLVAADGSHSALAQSCAIQWQRQDYQQVAIIANITTSELPNGRAFERFTRNGPLALLPMSQGRSSLVWCHAKHDQQQIDSWDDARFLAELQQAFGWRLGKMLQAGKRHSYPLQLLIASRHISHRLALVGNAAQTLHPIAGQGFNLGLRDVMSLAETLAEAAAMGNDLGDYTVLSHYQQRRQQDQQATIGVTDGLIRLFANRYGPLVAGRNLALMAMEQMPTIRDTFARRTLGWVER

SEQ ID NO: 9 - DNA, 1203 bp, Salmonella enterica subsp. enterica serovar Typhi
  CDS (1)..(1203)
atgcaaagtgttgatgtagcaatagttggcggaggcatggtgggactggctgtcgcctgcggcttgcaggggagcggtttgcgcgttgcggtactggatcacgttgttccccagcagttggcgaacgatgcgccgcctcagcttcgggtgtcggcgattaatgccgccagcgaaaaactgcttacccgtcttggcgtatggtcaaacattgtggcgcgacgggcaagttgctaccacggtatggaagtctgggataaagacagctttggccgtattacgtttgatgacgcaagcatgggatatagccatctggggcatattgttgaaaacagcgtcattcactatgcactgtggcaaaaagcgcagcaagcggcggatatcaccttaatggcgccagcggagttacagcaggttgcctggggagagaatgacgccttcctgactttaaaagacggcgcgatgttaaccgcgcgtctggtgattgccgcggatggcgccaactcctggctgcgtaacaaagcggatattcccttaactttctgggactaccgtcaccatgcgctggtagcgactatccgcaccgaagagccgcacggcgcggttgctcgccaggtgtttcatggtgaaggtattctggcgtttttgccgttaagcgatccgcatctgtgttccattgtctggtcgctttctccgcaggatgcggagcgtatgcaacagagcggcgacgaggcgtttaaccaggcgttgactatcgccttcgataatcggctgggcttatgccgcctggaaagcgaacggcaggtttttccgctgacgggccgctatgctcgccagtttgccgcgcatcgtctggcgttggtcggcgatgccgcgcacaccatccatccgctggcagggcaaggcgtcaacctcggttttatggacgcggccgaactggtggacgatctgtgccggcttcagcgccagggcaaagacattggccaacatctttatctccgtcgttatgagcgtagccgtaaacatagcgcggcgatgatgcttgccgggatgcaaggttttcgtgacctgtttgccggcgaaaacccggcaaaaaaattgctgcgcgacatcggactgaaactggcggacacgctccccggcgtcaaaccccaactgcttcgccaggcaatggggctaaacgaccttccgcaatggcttcgttaa

SEQ ID NO: 10 - protein, 400 aa, Salmonella enterica subsp. enterica serovar Typhi
MQSVDVAIVGGGMVGLAVACGLQGSGLRVAVLDHVVPQQLANDAPPQLRVSAINAASEKLLTRLGVWSNIVARRASCYHGMEVWDKDSFGRITFDDASMGYSHLGHIVENSVIHYALWQKAQQAADITLMAPAELQQVAWGENDAFLTLKDGAMLTARLVIAADGANSWLRNKADIPLTFWDYRHHALVATIRTEEPHGAVARQVFHGEGILAFLPLSDPHLCSIVWSLSPQDAERMQQSGDEAFNQALTIAFDNRLGLCRLESERQVFPLTGRYARQFAAHRLALVGDAAHTIHPLAGQGVNLGFMDAAELVDDLCRLQRQGKDIGQHLYLRRYERSRKHSAAMMLAGMQGFRDLFAGENPAKKLLRDIGLKLADTLPGVKPQLLRQAMGLNDLPQWLR

SEQ ID NO: 11 - DNA, 1179 bp, Salmonella enterica subsp. enterica serovar Typhi
  CDS (1)..(1179)
atgagcgtcattatcgttggcggcggcatggcaggcgcaacgctggcgctggccatctctcagttcagtcatgggacgttgccggtacacctgattgaagcgaaagcgcctgaagccgacggtcatcccggctttgacgccagagcgattgcgctggcggcgggcacttgccagcaactggcgcgaattggcgtctggcaggcgatttccgattgcgcaacggcaatcaacaccgtacacgtcagcgatcgcggtcatgccggatttgtgactctagacgcgcaggattacagcctggcagcgttgggtcacgttgcggagctgcatgatatcgggctgcgtctgtttgcgctcttgcgtaaagcgccaggcgttacgctgcactgcccggagcgcgtagccagcgtgtcgcgtacccaacagcaggttaacgtcactctggaaaacggcaatgtgatagctggcagcgtgctggtggcggctaacggtacccactccgcgctggcatcagcctgcggcgttgactggcatcaggagccttacgaacagttagcggtgatagcgaatgtcgcgaccgctatcccgcaccagggacgcgcctttgaacgttttacccccaatggcccgctggcgatgttgccgatgtcgcatggccgatgttcgctggtttggtgtcacccgctcgaccagcgcgatgaggtgctgagctggtccgacgcgcagttctgtcatgcgttgcaggccgcgttcggctggcggctggggcgaattactcaggcgggtaagcgcagcgcgtatccgcttgccctgactacggcggcgaaagtgtttactcaccggactgtcgtggtcggcaatgcggcgcagacgttgcatcctatcgccggacaagggtttaatctcggtctgcgcgatgtcatgagcctggcggaaacgctggtcgcggcacaggacgcgggcgaggatattggcgcctggcacgtgttatcgcgctatcagcagcgtcgtcaggttgaccgggatacgacgattggcgtaacgaacggtctggtccatctgtttgcaaatcgttgggcgccgctggttattgggcgcaatatcggtttaatggcgatggaattattaccacctgcgcgcgatgcgctggcacagcgaaccttaggttgggttgcgcgttaa

SEQ ID NO: 12 - protein, 392 aa, Salmonella enterica subsp. enterica serovar Typhi
MSVIIVGGGMAGATLALAISQFSHGTLPVHLIEAKAPEADGHPGFDARAIALAAGTCQQLARIGVWQAISDCATAINTVHVSDRGHAGFVTLDAQDYSLAALGHVAELHDIGLRLFALLRKAPGVTLHCPERVASVSRTQQQVNVTLENGNVIAGSVLVAANGTHSALASACGVDWHQEPYEQLAVIANVATAIPHQGRAFERFTPNGPLAMLPMSHGRCSLVWCHPLDQRDEVLSWSDAQFCHALQAAFGWRLGRITQAGKRSAYPLALTTAAKVFTHRTVVVGNAAQTLHPIAGQGFNLGLRDVMSLAETLVAAQDAGEDIGAWHVLSRYQQRRQVDRDTTIGVTNGLVHLFANRWAPLVIGRNIGLMAMELLPPARDALAQRTLGWVAR

SEQ ID NO: 13 - DNA, 1203 bp, Escherichia coli
  CDS (1)..(1203)
atgcaaagtgttgatgtagccattgttggcggcggcatggtggggctggcggttgcctgtggcttacaggggagcggcttacgcgttgccgtactggagcagcgcgtacaggaacctctggcggcgaatgcaccaccacaactgcgcgtttcggctatcaatgccgccagcgaaaaattactcacccgtcttggcgtctggcaggacattctctctcgtagggccagctgttatcacggtatggaagtgtgggacaaagacagctttggtcacatttcgtttgacgatcaaagcatgggctatagccatcttgggcatatcgttgaaaattcagtgattcactacgcgctgtggaacaaagcgcatcagtcgtcagatatcactctgttagcccccgcagaattacagcaggtcgcctggggagaaaatgaaaccttcctgacgctgaaagatggcagcatgttaacggcgcgtctggtgattggcgcggacggcgctaattcctggttgcgcaacaaagccgatattccgctgactttctgggattatcagcatcacgcgctggtagcgaccattcgcacggaagaaccgcatgatgcggtggcgcggcaggttttccatggcgaaggcattctggcctttttaccgcttagcgatccgcatctttgctcgattgtctggtcactgtcgccagaggaagcgcagcggatgcagcaggcaagtgaagacgaatttaatcgcgcgttaaatatcgcttttgataatcgcctgggcttatgcaaggttgagagcgcgcgtcaggtgttcccactgacggggcgttatgcgcgccagtttgcctcgcaccgtctggcgctggtgggcgacgccgcacataccattcacccgctggcggggcagggggtaaatctcggctttatggatgctgcagagctgattgccgaactgaaacggttgcatcgtcaggggaaagacatcgggcagtacatttatctgcgtcgctatgagcgtagccgcaagcacagtgcggcgttgatgctggctggtatgcagggattccgcgatctgttttccggtaccaatccggcgaaaaaactgctgcgtgatattggtttgaaactggccgacacgcttcctggcgttaagccgcaacttatccgccaggcaatgggattaaacgatttgcctgaatggctgcgttaa

SEQ ID NO: 14 - protein, 400 aa, Escherichia coli [sequence omitted]

SEQ ID NO: 15 - DNA, 1230 bp, Caulobacter crescentus
  CDS (1)..(1230)
atgatcatcgccggcgccggcatggccggctccaccctggccctggctctggcctcgggcggcctgaggccgctgctggtcgatcctgcgcccttcgaggcccagctggccccgaccttcgatggtcgcagctcggcgatcgcctattcctcgttccgtcagtggcgggcgatcggcgcgggccaggcgctggagccgcacgcccagcgcatcgagcagatcctggtcaccgacggccgcacgcccggcgcggcggcccgcaagccgctgccggccttcctgcgcttcgactccagtgagatctccgggcgcatcgagggcgagccgctgggctatctggtcgagaaccgccagatccgcgccgcgctctccaaggccgtcatcgacaagaacatcccggtgattgcgccgatggccgccaaggccttgtcggtcgagcccggcgcggcaaagctgaccctgtcggacggccgagtgctgaccgcgcctctggccgtcagcgccgaggggcggggctcggtgctacgccgcgcagccggtatcggcgacatcggctggagctatggccagagcggcgtggtctgcaccgtcaggctggagcgcccgcacgagggcgtggcccacgaatacttcctgcccagcggccccttcgccatcctgccgctgaccgacaatcgcgcgagcctcgtgtggaccgagagcaccgcgcgcggcgaggccttgcgccaggcgggccccgaggccttccacgcccacctgatgcgccggttcggcgacttcctgggcgcggtgtcgatcgaggggccgatcttcgtctatccgctgtcgctgtccctggccgagcgcatggtcgccccgcgtctggccttgattggtgacgccgctcacggcgtgcacccgatcgcgggtcagggcctgaatctgggcctcaaggacgccgccgccctggccgaagtgctggtcgaggcggtgcgccacggcgaagacatcggggccgaggccgtgctggagcgttacgcccgctggcggcggttcgacaccgtgaccaacgccctggccttcgacgcctttgtgcggatcttctccaacgacaacccgctgctgcggctggcgcggggcgcgggtctggcggtggtcaaccagatcgccccggcgcgccgcttcttcatgcacgaggccggcggcggggtgggtgatctgccgaagcttttgcgggggcaagcgctgtaa

SEQ ID NO: 16 - protein, 409 aa, Caulobacter crescentus
MIIAGAGMAGSTLALALASGGLRPLLVDPAPFEAQLAPTFDGRSSAIAYSSFRQWRAIGAGQALEPHAQRIEQILVTDGRTPGAAARKPLPAFLRFDSSEISGRIEGEPLGYLVENRQIRAALSKAVIDKNIPVIAPMAAKALSVEPGAAKLTLSDGRVLTAPLAVSAEGRGSVLRRAAGIGDIGWSYGQSGVVCTVRLERPHEGVAHEYFLPSGPFAILPLTDNRASLVWTESTARGEALRQAGPEAFHAHLMRRFGDFLGAVSIEGPIFVYPLSLSLAERMVAPRLALIGDAAHGVHPIAGQGLNLGLKDAAALAEVLVEAVRHGEDIGAEAVLERYARWRRFDTVTNALAFDAFVRIFSNDNPLLRLARGAGLAVVNQIAPARRFFMHEAGGGVGDLPKLLRGQAL

SEQ ID NO: 17 - DNA, 1179 bp, Escherichia coli
  CDS (1)..(1179)
atgagcgtaatcatcgtcggtggcggcatggcgggcgcgacgctggcgctggctatttcccggttaagtcacggggcgctgccggtacatttgattgaagcgactgcgccagagtcacatgctcatccgggctttgatggacgagcgatagcgctggcggcgggtacctgtcagcaactggcgcgcatcggcgtctggcaatctctggcggattgcgcaactgccatcaccaccgtgcatgtcagcgatcgtggtcacgctggatttgtcaccctcgccgcagaagattaccaactggcggcgctgggacaggttgtcgaattgcacaatgtcgggcaacggctgtttgcattgctgcgtaaagcacctggcgtaacgctgcattgccctgatcgcgtggctaacgttgcccgtactcagagtcacgttgaagtgacgctggagagtggcgagacgctgacgggccgcgtgctggtagcagctgatggcacccattcagcgttagccaccgcgtgcggcgttgactggcagcaggagccttacgaacaactggccgtgattgccaacgttgctacttccgttgcgcatgaagggcgcgcttttgaacgctttacgcaacatggcccgctggcgatgttgccgatgtctgacggacgctgttcgctggtctggtgtcatccactggaacggcgcgaagaggtgttgtcgtggagtgacgagaagttttgccgtgaactccagtcggcctttggctggcgacttgggaaaattacccacgctggtaaacgcagtgcttatccgctggcgttaacccacgccgccagatctattacccatcgtaccgtgctggtgggcaatgcggcgcaaactctgcacccgattgccgggcaagggtttaacctcggtatgcgagatgtgatgagtcttgcggaaaccctgactcaggcgcaggagcgcggagaagacatgggggattacggcgtattgtgccgttatcagcagcgtcgacagagcgatcgcgaagcaaccattggcgtcacggacagccttgtacatctttttgccaaccgttgggcaccgctggttgtcgggcgcaacatcgggctgatgacgatggaattattcaccccggcacgcgatgtgctggcgcagcgcaccctcggttgggtggcgcgttga

SEQ ID NO: 18 - protein, 392 aa, Escherichia coli [sequence omitted]

SEQ ID NO: 19 - DNA, 1230 bp, Vibrio cholerae
  CDS (1)..(1230)
atgatgcaaagcgttgatgttgtaattatcggtggcggtatggtcggcctagcgttagcggcggctctgaaagagagtgacctacgcattgctgtggttgagaaccaattaccggaagaggcgctaaacccgctgccggatgtgcgcgtttctgccttgagtcgctcaagtgagattgtgctgcgtaatcttaatgcttgggcgggcattgaagcgcgccgcgctgcgccctacatcgcgatggaagtgtgggagcaagatagttttgcgcggattgaatttaaagccaatgagatgacgcagcctaatctgggacacattgttgaaaaccgagtcattcagttggcgctgttcgagcaagttcagcagcaagccaatgtgacactgcatgtgcctgcgacctgtcagagcatcgccgtgggtgaaagcgaagcatggctaaccttgagtaatggccaagccttgagcgcaaaattggtcgtaggggccgatggcgcaaactcttggttgcgtcgacaaatggatattcctttgactcattgggattatggacacagtgctttggtggccaatgtgcgtaccagtgatccgcacaataaagtcgcgcgccagatttttactgcccaaggaccgttagcctttctccccatgtctgagccgcatatgagttcgattgtgtggtcgacagagccttcacgcgctgaagctttgctcaatatgaatgatgtgcagtttaacaaagcgctgaccgcagaattcgatgcacgattaggccgctgtgaagtagtgggcgagcggcaggctttcccacttaagatgcgttatgcccgtgattttgttgcgcctcgggttgctctcgtcggggatgccgcgcacaccattcatccgctggctgggcagggagtgaacttaggtttactggatgctgcctgtttggcacaagagctgctgagcttatggcagcaaaatcgcgacattggtgatgagcgtaatttgcgccattatgagcgctggcggaaagcggaagctgccaaaatgattgcggcgatgcaaggtttccgcgatctgtttgagggggataaccctgctaagaaactgatccgtgggatcggcatgcgtctggttggtcaattgccgggtgccaaagatgaaatcatgaaacgcgcactaggcctgaagggcgatctgcctgagctggcgaagcaggtttggttagagcgtgcctactga

SEQ ID NO: 20 - protein, 409 aa, Vibrio cholerae
MMQSVDVVIIGGGMVGLALAAALKESDLRIAVVENQLPEEALNPLPDVRVSALSRSSEIVLRNLNAWAGIEARRAAPYIAMEVWEQDSFARIEFKANEMTQPNLGHIVENRVIQLALFEQVQQQANVTLHVPATCQSIAVGESEAWLTLSNGQALSAKLVVGADGANSWLRRQMDIPLTHWDYGHSALVANVRTSDPHNKVARQIFTAQGPLAFLPMSEPHMSSIVWSTEPSRAEALLNMNDVQFNKALTAEFDARLGRCEVVGERQAFPLKMRYARDFVAPRVALVGDAAHTIHPLAGQGVNLGLLDAACLAQELLSLWQQNRDIGDERNLRHYERWRKAEAAKMIAAMQGFRDLFEGDNPAKKLIRGIGMRLVGQLPGAKDEIMKRALGLKGDLPELAKQVWLERAY

SEQ ID NO: 21 - DNA, 1209 bp, Vibrio cholerae
  CDS (1)..(1209)
atgacggacagccagcagcccaatatcagtaagcctatcagttttgatgtgatcattgcggggggggcaatggcgggggcaacattagcgctcgcgttgcagcacctcagccaaggtaaactgaaggtcgccgtgatagaggcgtttgcgaccgatcattctgcgcatcccggttttgatgcgcgcagcattgcgctctcctacggtacggtacaaatcctgcaggaattacaactttggcctagcctacagccttttgcgactgcgattaaacatatccatgtctcggatcagtctcatgcagggatgacggatattcactgtgagacgcttggggttagcgctctaggttatgtggttgaactggcggatgtggggcgcgtttacgccgagcgcatggctcagtgttctgccatccaacaatttgtgccaagccgagtggtgaatattacccgtgaacaagagtcggtcacggtccaactcaacactaaagagaccttgcaaggtaagctgcttgtggcggcagatggtgcgctgtcgacgtgttgccaagcgctgggccttgcgatgcaggagcacgattttgaacaagtcgcgctgatcgccaatatcaccagcgcgcaacctcatgcagggcgagcttttgagcgttttacaccgcatggccctgttgccttgctaccaatgagccaagatcgcttgtctttagtttggtgtctgccaccagagcaagttgcgcactggctgcattgcagcgaagctgagttcttacaaggcttacaacaagcctttggttggcggcttggcgccttgacccatgcaggtgagagaagtgtttatccactggttttgcgctatcgtgagcaaacggtctctcaccgttttgctattgtgggcaatgcggcgcaaaccttacacccgattgcaggacaaggttttaaccttggtattcgtgatgtggcgactttagccgaagagattacgcgcagcgacgatgcgggtgagtacgcgctactgcagcgttattttcagcgtcgccaagccgatcgcacggcaaccatcagcctgactacaggattagtacacactttctcgaatgactggttagcgatgcgaatggggcgtaaccttggtctaatggcgatggataatttgccgttattgaaagctccgttattgcgccgcactctcggcatagtgaaccgttaa

SEQ ID NO: 22 - protein, 402 aa, Vibrio cholerae
MTDSQQPNISKPISFDVIIAGGAMAGATLALALQHLSQGKLKVAVIEAFATDHSAHPGFDARSIALSYGTVQILQELQLWPSLQPFATAIKHIHVSDQSHAGMTDIHCETLGVSALGYVVELADVGRVYAERMAQCSAIQQFVPSRVVNITREQESVTVQLNTKETLQGKLLVAADGALSTCCQALGLAMQEHDFEQVALIANITSAQPHAGRAFERFTPHGPVALLPMSQDRLSLVWCLPPEQVAHWLHCSEAEFLQGLQQAFGWRLGALTHAGERSVYPLVLRYREQTVSHRFAIVGNAAQTLHPIAGQGFNLGIRDVATLAEEITRSDDAGEYALLQRYFQRRQADRTATISLTTGLVHTFSNDWLAMRMGRNLGLMAMDNLPLLKAPLLRRTLGIVNR

SEQ ID NO: 23 - DNA, 1218 bp, Pseudomonas aeruginosa
  CDS (1)..(1218)
atgcacgcggatctggtcatcgtcggcgccggcatggtcggtagcgccctggccctggccctggagggcagcggcctggaggtgctgctggtggacggcggctcgctcgacgtggcgccgttcaagccggaggcgccctacgagccgcgggtcagcgcgctgtccgaagccagccggcggattctccagcgcctgcatgcctgggacggcatcgtcgcgcgccgcgccgagccctatcgcgagatgcaggtgtgggatggctccggcaccgggcggatcggcttcagcgccgccagcgtgcacgccgaggtactcggccatatcgtcgagaaccgggtggtgcaggacgccctgctggaacgcctgcacgattccaccaccggcctgctggccaatgcgcgcctggaacagatgcgccactccggcgacgactggctgctgaccctggccgacggtcgccagctgcgtgcgccgctggtggtcgccgccgacggcgccaactcggcggtacgccgcctggccggctgcgccacccgcgaatgggattacctgcaccacgccatcgtcaccagcgtgcgctgcgagaacgcgcaccgcgcaaccgcctggcagcgcttcaccgacgacggtccgctggccttcctgcccctgccggaccgcggcgacgagcactggtgctcgatcgtctggtcgaccaccccggaacaggcagaacgcctgatggcgttggacgaggatggcttccgcgccgccctcggcgaagccttcgaacagcgcctgggcgccatcctgcatgccgaccggcgcctgtgcatcccgctgcgccagcggcacgccaagcgttacgtcgagccgggcctggcgctggtcggcgatgctgcgcacaccatccacccgctggccggacagggcgtgaacctgggcttcctcgatgcggcggtgctgtccgaggtcctgttgcacgccctggagcgcggcgaacggcttgccgacgaacgcgtgctgagtcgcttcgagcggcggcggatgccgcacaacctgggcatgatgacggcgatggaaggcttcgagcgcctgttccaggccgaccggttgccgctgcgctggctgcgcaacgccggcctgcgcctggtcgacggccatcacgaggcgaaggcgctgttcgtccgccaggcgcttggcctcagcggcgacctgccgatgctggcacgagtctga

SEQ ID NO: 24 - protein, 405 aa, Pseudomonas aeruginosa
MHADLVIVGAGMVGSALALALEGSGLEVLLVDGGSLDVAPFKPEAPYEPRVSALSEASRRILQRLHAWDGIVARRAEPYREMQVWDGSGTGRIGFSAASVHAEVLGHIVENRVVQDALLERLHDSTTGLLANARLEQMRHSGDDWLLTLADGRQLRAPLVVAADGANSAVRRLAGCATREWDYLHHAIVTSVRCENAHRATAWQRFTDDGPLAFLPLPDRGDEHWCSIVWSTTPEQAERLMALDEDGFRAALGEAFEQRLGAILHADRRLCIPLRQRHAKRYVEPGLALVGDAAHTIHPLAGQGVNLGFLDAAVLSEVLLHALERGERLADERVLSRFERRRMPHNLGMMTAMEGFERLFQADRLPLRWLRNAGLRLVDGHHEAKALFVRQALGLSGDLPMLARV

SEQ ID NO: 25 - DNA, 1185 bp, Neisseria meningitidis
  CDS (1)..(1185)
atgagtttacacagcgacatcctcgtcgtcggcgcaggcccggcgggtttaagttttgcagccgaacttgccggcagcggtttgaaagttaccctgatcgaacgcagcccactgactgttctgcaaaatcctccatatgacggacgcgaaatcgccctgacccatttttcccgcgaaatcatgcagcgtttgggtatgtgggacaaaattcccgaaaacgaaatctaccctttgcgcgatgccaaagtgctgaacggacgttccgactaccagctccactttccccaaccgactgaagcgcgcggcgaacctgccgactgtttgggctatctgatttccaaccacaatatccgccgcgccgcctatgaagtcgtatcacaactcgacaatgtcagcattctgaccgatacggttgtcaaagaagtcaaaacatctgacaacgaagcacaagtcattttggaaaacggcaaaatactgactgcacgcctgcttttggcggcagacagccgcttctcgcaaacccgtcgacaactcggtatctcctccgatatgcacgattacagccgaaccatgttcgtctgccgtatgaaacataccctttccaaccaacataccgcttacgaatgcttccattacggacgcaccatcgcactgctgccgctggaagagcacctgaccaataccgtcattaccgtcgataccgataaaatcaacagcgttcaaaacctttcgcccgaagaattggcggcaagcgtaaaagaacagctcaagggcaggctcggcgatatggaattggtcagcagcatccaccattacccccttgtcggcatgattgccaaacgtttctacggcaaacgcagcgcgctgattggcgatgccgccgtcggtatgcaccccgttacagcacacggtttcaacttggggctttccagcgcagatattttggcaaaactgatactcgaagccgaacagcgcggtcaagacatcggtgcatcttcattattggaaaaatacagcagcaaacatatgctgcacgcccatccgctttatcacggaaccaatatgatgctgaaactgtttaccaatgagaccgcaccggcaaaactgttgcgcggcttggtattgcgtgccagcaacaatttcccaccgctgaagaaactgatcaccaaacaactgaccggttga

SEQ ID NO: 26 - protein, 394 aa, Neisseria meningitidis
MSLHSDILVVGAGPAGLSFAAELAGSGLKVTLIERSPLTVLQNPPYDGREIALTHFSREIMQRLGMWDKIPENEIYPLRDAKVLNGRSDYQLHFPQPTEARGEPADCLGYLISNHNIRRAAYEVVSQLDNVSILTDTVVKEVKTSDNEAQVILENGKILTARLLLAADSRFSQTRRQLGISSDMHDYSRTMFVCRMKHTLSNQHTAYECFHYGRTIALLPLEEHLTNTVITVDTDKINSVQNLSPEELAASVKEQLKGRLGDMELVSSIHHYPLVGMIAKRFYGKRSALIGDAAVGMHPVTAHGFNLGLSSADILAKLILEAEQRGQDIGASSLLEKYSSKHMLHAHPLYHGTNMMLKLFTNETAPAKLLRGLVLRASNNFPPLKKLITKQLTG

SEQ ID NO: 27 - DNA, 909 bp, Rickettsia prowazekii
  CDS (1)..(909)
atgagtcaaatagaaacagataagatgttaaatatagtaattttagggtgcggtctcagtggtatgctaactgcactttcttttgcacacaaaggtataaaaactactatattagagcgtaaactggtaaaaagccaagattttttaaaagatataagaactactgcgttaacgccgtattctaaaaagtttttattctctattgggatatggaaagagctggaacagtttgtagcagaaatgcaagacgtatatgttgtagataataaggcttcagaaatattagatttatgtaataagaatgatgctgtacttggatatgttgttaagaatagtgattttaaaaagatattattgtcagaaataactaataattcgttgataacattaattgataataatcaatatcaagaagtgataagccataatgattattcgattataaaatttaataatgataaacaaattaagtgtgatttattaattatatgtgacggagcaaattcaaaagtaagatcttattatttcactaatgaaattgataaaccttatcaaactgctctaacttttaatgttaagcatgaaaagccgcatgaaaattgtgcgatggagcattttcttcctcttggtccttttgctttgctacctttaaaagatcaatatagttcttccgtaatatggtccacttctgttgttcaagctgctttaattattaatttgcctacaaaagaagttgattttttaattcaaagaaatgttggtaatttcttaggtcaaattactattgagagtgagattagtagctttccactaaaagcttttatagcaaacagatattttcataatcgtatagtgcttattgccgacactgcacacatcgtacatccgcttgccaggacaaggacttaa

SEQ ID NO: 28 - protein, 302 aa, Rickettsia prowazekii
MSQIETDKMLNIVILGCGLSGMLTALSFAHKGIKTTILERKLVKSQDFLKDIRTTALTPYSKKFLFSIGIWKELEQFVAEMQDVYVVDNKASEILDLCNKNDAVLGYVVKNSDFKKILLSEITNNSLITLIDNNQYQEVISHNDYSIIKFNNDKQIKCDLLIICDGANSKVRSYYFTNEIDKPYQTALTFNVKHEKPHENCAMEHFLPLGPFALLPLKDQYSSSVIWSTSVVQAALIINLPTKEVDFLIQRNVGNFLGQITIESEISSFPLKAFIANRYFHNRIVLIADTAHIVHPLARTRT

SEQ ID NO: 29 - DNA, 1197 bp, Xylella fastidiosa
  CDS (1)..(1197)
atgtcgcaacagcgtatgaaccgaactcaccgacccgatgtactcatcactggcggcggcgtcgtcggtgccagcagcgccctggcattggcgaaaacagggttacacgtcgccttgattgaaaaatgcgaaccgccgcgttggcaagcaacggctccggatctgcgtgtctacgcatttgccccggacagtgccgcactcctgcgcaccttcaacgtatggccgaccgtgtgcgcgacacgcgcccagccataccatcgcatgcggatctgggacagtggcggagggggcgaattgcacttcgacgctgccacattgggccgcgaacaactcggctggatcgtcgagaacgcactcctagtcaaccagttgtggtccgcacttgcggaggccggcgtacaactacattgcccggcaaggatcaccgccctagagcaagacaccgacagagtgcgtttacgcttggaggacggtcgccgactcgaagcacgcctggccatcgctgccgacggcgccgactccaccttgcgtcaattggcacacctgccagtacaccgacatgactatgcacaacgcagcattgtcgcctttgtcgcaaccgaacacccacaccaagccaccgcctggcaatgcttcctaccaagcggaccattggcattgctaccatttactgatgagcgcagctcaatcgtctggacgctccccgatgccgaagcgcaacgtctcctggcactggacgaaacaacattcgcacgcgaactcaccactgccttcggtgggcgcctaggacacatacagctcatctcaccacgcaccgcattcccactgcgccgccaactggccaccgactacatcgccggacgggtactgacactcggtgacgcagcacatgtcgtccacccactggccggacagggcgtcaacctcggcttgcgcgatgtaaccgcattgcaaaccctgatccaacaggcacacacgcgccatgttgactgggccacaccgcaccgcctgcaacgctgggcacggacacgccgcagcgataacaccctcgccgcctacacgttcgatgccattaaccgggtattctccaacgacgcatttcacctcaccctgctacgtggccgtgtactgggcctggtcgaccgcctaccaccgctcgtcaacgccctatggcgtcgcgcttcgggagtgaattga

SEQ ID NO: 30 - protein, 398 aa, Xylella fastidiosa
MSQQRMNRTHRPDVLITGGGVVGASSALALAKTGLHVALIEKCEPPRWQATAPDLRVYAFAPDSAALLRTFNVWPTVCATRAQPYHRMRIWDSGGGGELHFDAATLGREQLGWIVENALLVNQLWSALAEAGVQLHCPARITALEQDTDRVRLRLEDGRRLEARLAIAADGADSTLRQLAHLPVHRHDYAQRSIVAFVATEHPHQATAWQCFLPSGPLALLPFTDERSSIVWTLPDAEAQRLLALDETTFARELTTAFGGRLGHIQLISPRTAFPLRRQLATDYIAGRVLTLGDAAHVVHPLAGQGVNLGLRDVTALQTLIQQAHTRHVDWATPHRLQRWARTRRSDNTLAAYTFDAINRVFSNDAFHLTLLRGRVLGLVDRLPPLVNALWRRASGVN

SEQ ID NO: 31 - DNA, 1245 bp, Synechocystis sp
  CDS (1)..(1245)
atgacctttgtagccgcttccataactgataaccaattcgatgtggcgatcgccgggggaggcgttgtggggctggtactagcggcgggtttgcgtcatacggggctgaaaattgccattatcgaagctttaccgaaggaacaggccctaactaagccccaggcctatgccatttccctgctgtcgggcaaaatcttagcgggactgggggtctgggaaaatattaaggactccatcggtcatttcgaacgcatccaaatttccgataatgactatcggggtaccgttccctttgccaaggaagatgtggacgaactggccctgggccatgtggcggagcatccagtcattctgcaggcgctggaaaattgtgtagagcaatgtccccgcattgcctggtttcgtcccgctgagttgatcagttttacggcgggagagaaccacaaacaggtcaccctacaacaggaaggcagagaaattaccctacaaaccaaattgttggtggcggcggatggagcccgttcccacacccgttccctggcggggattcaaaccaaggggtggaaatattggcaatcctgtgtggctttcaccatccagcatcaagcccctgacaataccactgcctttgagcgtttttgtgacactggtcccatggggattttgcccctacccggcgatcgagcccagattgtctggaccatgccccaccataaggcccataccctagtgaatctaccggaagcggattttattacagaactgcgccaacgcattggcgatcgcctaggggaatttcatttaattaatgcccgccgtttatttccggtgcaactaatgcagagcgattgttatgtgcaaccccgcttggcattagtgggggatgcggcccactgttgccatccggtggggggtcagggtttaaatttgggcattcgggacggagccgccctggcccaggttattgccacggcccacagccaaggggaagattggggttccctagcagtgctgaaacgttatgaacattggcgtaaaccagaaaattggctcattttgggcttcactgacctgctagatcgtttcttttccagtcattggctgccggcgatcgccttgagaaggtttggcctagaggtattgcgcctagtgcctccagcgaaaaagctggccctccgtttgatgaccggtttgctcggtcggaaaccccaattggccacagggcaatccttagtgagtcagtag

SEQ ID NO: 32 - protein, 414 aa, Synechocystis sp
MTFVAASITDNQFDVAIAGGGVVGLVLAAGLRHTGLKIAIIEALPKEQALTKPQAYAISLLSGKILAGLGVWENIKDSIGHFERIQISDNDYRGTVPFAKEDVDELALGHVAEHPVILQALENCVEQCPRIAWFRPAELISFTAGENHKQVTLQQEGREITLQTKLLVAADGARSHTRSLAGIQTKGWKYWQSCVAFTIQHQAPDNTTAFERFCDTGPMGILPLPGDRAQIVWTMPHHKAHTLVNLPEADFITELRQRIGDRLGEFHLINARRLFPVQLMQSDCYVQPRLALVGDAAHCCHPVGGQGLNLGIRDGAALAQVIATAHSQGEDWGSLAVLKRYEHWRKPENWLILGFTDLLDRFFSSHWLPAIALRRFGLEVLRLVPPAKKLALRLMTGLLGRKPQLATGQSLVSQ

SEQ ID NO: 33 - DNA, 1401 bp, Schizosaccharomyces pombe
  CDS (1)..(1401)
atgcctactatcagtccaactttaggaatatacacgaggaagtttgcaagccaaaaaatacttcaacgtcaattcgatgttgttatagtaggatccggtcctgtcggactggctttagctgctggactacagagtaatcccgtaactcaatcactcaaagttgggcttttggacattcaggatacgatgaaattaaaggattggaagtttgaaacgtactctaatcgttgtagctctttaacgaatcatacccgcatgttttttgacaaaattggtgcttgggattttgctcgcaaggatcgcatccaacctttccaacacattcttgcctctgatggtctaactaattcctccatacatcttgatcaaaaaccaggaagtgaacccatggctttcatgtcggaaaacgtcaatttgcaatacgcccttttgaattctatcatcgataaaatgaataacaatattaaaaaacctaatttagaatttttaatgccttgcactattactaagctttctaaaggagaaaatatctatagaacgcatattcatacaacaactcatggtgaattaacaacgaagctcttaattggtgcggatggaagaaattcaattgttcgcaaatacgcaaatatttccatgccagggtggaactatcttactcatgctgtggtcgggacacttaaaattgatccgttaaaaggacctgccgtagctttccagcgatttttacctaccggtcctttagcttaccttcctttacctgacaacaatgctaccttcgtatggagtacgcggccacatattgcatcaaaacttcttcgtcttccagaagaaacttttgttaagtttttgaatgcatctttccgcctggattatcccgatttaagctatttgtatcaaatggatttttctgagccttccaaagttaatgaacagttggattggaggttgcaagttaagagaaattctaatatgcaggtccctcctgttataaccgaaattgtttctggttctagggcggcatttccgttgagacttgcccatgttgatgaatatgtaaaagaaggaattgccctttgcggggacgctgctcataacactcatccattagctggacagggattaaatactggaattcaggatgttgaatctttaatatcagcactctcttttgctatcaagcacggtcaggatattggtagtgttttttcactccaaccgtatttccgtgaccgttacttcaaaaaccatgtttatctaggagtcgttgataagttccacaagctgtacgcaatggaaaatccggtggtcacttctgtacgaacccttggactttcattatttgatcgcagtgctagcttgaaaaacttcattctttctacggtagctaatggaatttag

SEQ ID NO: 34 - protein, 466 aa, Schizosaccharomyces pombe
MPTISPTLGIYTRKFASQKILQRQFDVVIVGSGPVGLALAAGLQSNPVTQSLKVGLLDIQDTMKLKDWKFETYSNRCSSLTNHTRMFFDKIGAWDFARKDRIQPFQHILASDGLTNSSIHLDQKPGSEPMAFMSENVNLQYALLNSIIDKMNNNIKKPNLEFLMPCTITKLSKGENIYRTHIHTTTHGELTTKLLIGADGRNSIVRKYANISMPGWNYLTHAVVGTLKIDPLKGPAVAFQRFLPTGPLAYLPLPDNNATFVWSTRPHIASKLLRLPEETFVKFLNASFRLDYPDLSYLYQMDFSEPSKVNEQLDWRLQVKRNSNMQVPPVITEIVSGSRAAFPLRLAHVDEYVKEGIALCGDAAHNTHPLAGQGLNTGIQDVESLISALSFAIKHGQDIGSVFSLQPYFRDRYFKNHVYLGVVDKFHKLYAMENPVVTSVRTLGLSLFDRSASLKNFILSTVANGI

SEQ ID NO: 35 - DNA, 1479 bp, Debaryomyces hansenii
  CDS (1)..(1479)
atgcttttaaaatcatttgctagatcactagcaacagctgcgtctatcagctctccaaagtttcaggacgtagtagtaataggtgggggaccagctggattatcgttgttagcagctttgaaaaattctcataagacgaaacatttaaaatgtacattggtggaagggtcgagtttagaatctgttcgtgactttggtataaacccaccggatgagtataccaacagagttgtttcattgacccctaaatccgtagaattcatgcaagaaaaaattggaaattgggactacatagaccaggacagaatcaagttctatgataatattgtcgcttatgattcccaagataaagaatcacgtataagatttgatggaagtagcgttggtgttggtgttttggcggcaatgtgtgaaaatgtaaatattcaaagttcattgatatcgaagattgacgacttaaatgacaatattaaggatccaagcattgagcaagaagctgttatattagataatactaaggttgttgaaattattaatccgaaagaagaaaatacccatgaactattggaaaacgacccagaagcaggcaacccagaaatcgactggccaattgtcaagctttcgaatggagatgttttacaaacaagattattagtgggtgcggacggttttaactctcctgttcgtaaattttcccatatcccatctaggggttggtcgtataatagattcggtgtcgtagccactatcaaacatcaatatgaagactaccggtcaattgcatggcaaagattccttacaaccggaccacttgctattttgccattaactgaagacaatgctactattgtttggtccaccacccctgagttgtctgaattatttttaaaggtggatgaagagatcttccctcacttgattaacgcagccatgaccttatctgaggttgatttgaattatatttatgaacaattgaagaaagatccaaatgacaagtcagttcttgaggacatagagtggcgtatgtcgaaaataaagctctctattttggaagaaaaatatccgttacaggttactacagtggtggagaactctagagctagatttccattgaaattatcccatgctgatacatatgcaattcctcgtattgcattaattggagacgctgctcacactgttcatccattagcgggacagggtttgaatatgggacaatcagatgtagcatgtttactcgaggctcttgaagatggggtgaacagaggccttgacattggttcaacattagtgttggaaaattatactgctaatgcatggcctgccaatcatgtattgatgggtgtttgcgataaattgcataaaatattttcaactgattggttccctattgtcttccttagaggttttggtatgaaatcgttaaatatagtcgatactgccaaagatttaatgataaaggctatcagtggtagatag

SEQ ID NO: 36 - protein, 492 aa, Debaryomyces hansenii
MLLKSFARSLATAASISSPKFQDVVVIGGGPAGLSLLAALKNSHKTKHLKCTLVEGSSLESVRDFGINPPDEYTNRVVSLTPKSVEFMQEKIGNWDYIDQDRIKFYDNIVAYDSQDKESRIRFDGSSVGVGVLAAMCENVNIQSSLISKIDDLNDNIKDPSIEQEAVILDNTKVVEIINPKEENTHELLENDPEAGNPEIDWPIVKLSNGDVLQTRLLVGADGFNSPVRKFSHIPSRGWSYNRFGVVATIKHQYEDYRSIAWQRFLTTGPLAILPLTEDNATIVWSTTPELSELFLKVDEEIFPHLINAAMTLSEVDLNYIYEQLKKDPNDKSVLEDIEWRMSKIKLSILEEKYPLQVTTVVENSRARFPLKLSHADTYAIPRIALIGDAAHTVHPLAGQGLNMGQSDVACLLEALEDGVNRGLDIGSTLVLENYTANAWPANHVLMGVCDKLHKIFSTDWFPIVFLRGFGMKSLNIVDTAKDLMIKAISGR

SEQ ID NO: 37 - DNA, 1419 bp, Kluyveromyces lactis
  CDS (1)..(1419)
atgttgtctagccggattttgagcaggtctttttttgcgtctgctgttaaccttcaagctaagttaacagatgtgcttattgttggcggtggtcctgccgggttgacattggctgctgctatcaaacaatctccccacttatcggatctatcaactgtattggtcgatgcaggtgatttgaaggaaaaaataggcggtttctaccatgatccaccagacaatttcaccaatagagtgatcagtttaacaccccaatctaagcacttcttagagaatactgttggggtatcgttgatggaagagagaattcagccctttgatggtctatacgttacagatggatgctctaatggtactttagagatggaacgggattcaatggggtttatggttgaaatcttgaacattcaaagttcgttgttggcgaaactacgttcaagtaatgcaccaaatttggatcttattgacaaaacaaaagtccaaagtattgaatatgaagatcccgaagatactaaatcatggccggtggtgaccctagacagtggggaacaatataagacacgcttgttgataggtgccgatggattcaacagtccagttcggaaattttctgggattgagtcaagaggctggttttacgagagattcggagtcgtagctaccttgaaactagaatatcctccgttcaaaattagaggatggcaaagattcttaccaactggaccagtggctcatcttccattaccaggtacgaactctacgttagtttggagtaccactgaaccattatcaagattgttattatctttggatgacgacgtatttgtggccttggtcaacgcagcgttcatcttggaggacgttgatctcgaatattactataagtccttacaggagggaactattacgggcgaagaattgattcaagatgttgacttcagaatcaatgagaaatttaattcattcaaagacgactctgtcatcgacgaaaaatacccccctaaggtgattgacatcttggataaatcaagagggagattcccactaaaactctctcatgctgacacatatgtcgctgaaagaattgcccttgttggcgatgcagcacatacgacacatccattggcaggtcaaggcttgaatatggggcaaggtgatgtggagtctctcattaaagcattggaaaaggctagacaaagaggattagacattggttctctgttggctttagaaccgtactgggcagaccgctatcctaccaacaacatgttactaggtgtggtagacaagctacataagctatactctacagatttcggtcctctagtttccttgagaacgtttggcttaaatttagtcaacagcttacaacctttgaaagatctgatggtaggaaaagttagcggaccaagtaaatag

SEQ ID NO: 38 - protein, 472 aa, Kluyveromyces lactis
MLSSRILSRSFFASAVNLQAKLTDVLIVGGGPAGLTLAAAIKQSPHLSDLSTVLVDAGDLKEKIGGFYHDPPDNFTNRVISLTPQSKHFLENTVGVSLMEERIQPFDGLYVTDGCSNGTLEMERDSMGFMVEILNIQSSLLAKLRSSNAPNLDLIDKTKVQSIEYEDPEDTKSWPVVTLDSGEQYKTRLLIGADGFNSPVRKFSGIESRGWFYERFGVVATLKLEYPPFKIRGWQRFLPTGPVAHLPLPGTNSTLVWSTTEPLSRLLLSLDDDVFVALVNAAFILEDVDLEYYYKSLQEGTITGEELIQDVDFRINEKFNSFKDDSVIDEKYPPKVIDILDKSRGRFPLKLSHADTYVAERIALVGDAAHTTHPLAGQGLNMGQGDVESLIKALEKARQRGLDIGSLLALEPYWADRYPTNNMLLGVVDKLHKLYSTDFGPLVSLRTFGLNLVNSLQPLKDLMVGKVSGPSK

SEQ ID NO: 39 - DNA, 1179 bp, Erwinia carotovora subsp
  CDS (1)..(1179)
atggcggtcatgattgtcggtggtggaatggcgggcgcgacgctggcgctggcgatatcacggctctcacagggcacaataccggttgaccttatcgaggcatactcaccactcgacaaggaacacccgggttttgacgcgcgtgccctcgcgctgtctgatggcacacgccagcagctagcggcgctgggtatctggcaagcgatgtctggcaatgcaacagcgataaccgacattcacgtcagcgaacgcgggcatgccagcgtagtgaatctgcacgcggcggattatcacgttcaggcattgggccatgtggttgaactgcacgacgtcgggcagcgtctgttttccctgctgcaacaggcgcccggcgtgcgtctgcactgcccagccaaagtggttgccgtcacgcggacgcaagagaacgccacgctaacgttggataatggcactgcgctcacaggccaactgctggttgccgccgatgggtcacattctatgctgtcgcagtcctgcgggattcattggcaacagcatgagtatgatcaggtcgcggtgatcgccaacgtgacaaccggcgaaccccatcgcgggcgcgcatttgagcggtttaccccgcacggtccactggcgctgttaccgatgagtaacggtcgcagctcactcgtctggtgccatgataaacatcgtcaacacgacgtcgatggatggagcgaaaccgagtttcgccaacagctacagctggcttttggctggcgtctggggcaattcacccacatcggcgaacgccatagctatccgctacgcttgctaaccgccagccagcacaccagccatcggctggcgctggtgggcaacgcggcacaaacgctgcatccgattgccggacaaggctttaatctgggaattcgcgatgtcatgtcgctggcagaaacactcgtcgaggcggtgaaaaaccagcaggatatcggccaatacagtgtgctcagccgctatcagcaacgccgcgaacccgatcaacacaccaccgtcgcgatcaccgatggtctggtcaggctatttgctaaccgctataccgcgctggcggtcggccgcaatctgggcctgatcgccatgaataacctgccgctgatgcgcgatgcgtttgcccgtcgcacactgggctgggtagaacgttaa

SEQ ID NO: 40 - protein, 392 aa, Erwinia carotovora subsp
MAVMIVGGGMAGATLALAISRLSQGTIPVDLIEAYSPLDKEHPGFDARALALSDGTRQQLAALGIWQAMSGNATAITDIHVSERGHASVVNLHAADYHVQALGHVVELHDVGQRLFSLLQQAPGVRLHCPAKVVAVTRTQENATLTLDNGTALTGQLLVAADGSHSMLSQSCGIHWQQHEYDQVAVIANVTTGEPHRGRAFERFTPHGPLALLPMSNGRSSLVWCHDKHRQHDVDGWSETEFRQQLQLAFGWRLGQFTHIGERHSYPLRLLTASQHTSHRLALVGNAAQTLHPIAGQGFNLGIRDVMSLAETLVEAVKNQQDIGQYSVLSRYQQRREPDQHTTVAITDGLVRLFANRYTALAVGRNLGLIAMNNLPLMRDAFARRTLGWVER

SEQ ID NO: 41 - DNA, 1212 bp, Erwinia carotovora subsp
  CDS (1)..(1212)
atgcaatcattcgacgtggttattgccggtggcggtatggtcggtctggcgctcgcctgcggcctacagggtagcggcctgcgcatcgccgtgctggaaaaacaggcagccgagcctcagactctcgggaaaggtcatgcgctgcgcgtctctgctatcaatgccgcgagcgaatgccttcttcgtcatattggcgtctgggagaatctcgtggcgcagcgcgtcagtccttacaacgatatgcaagtctgggacaaagacagcttcggcaaaatcagctttagcggtgaagaattcggcttttcccatcttgggcatatcattgaaaacccagtgattcaacaagtactgtggcaacgcgcctcccaattaagcgacatcaccctgctctcccctacgtcattaaaacaggtcgcctggggtgagaacgaagcctttattacgctgcaggacgacagcatgctgactgcccgactggtggtcggcgctgacggtgcacattcatggctgcgtcagcatgcggatattccgctgaccttttgggattacggccaccacgcgctagtcgccaatattcgtaccgaacacccacatcagtccgtagcacgtcaggcattccatggcgacggtattctagcgtttctgccgctggacgatccgcacctctgttcgattgtctggtcactttcgccggagcaggcactggtgatgcaaagcttgccagtggaggaattcaaccgtcaggttgcgatggcgtttgatatgcggttggggctgtgtgaactggaaagcgagcgtcagactttcccgctgatgggacgttatgcacgcagcttcgccgcgcaccggctggtgctggtcggcgacgcagcacacaccatccacccgctggcaggacaaggcgtcaatctaggcttcatggatgtcgccgaactgattgccgagctgaagcgcttgcagacgcagggtaaagatatcggccagcacctttatctgcgacgctatgaacgccgccgcaagcacagcgccgccgtgatgcttgccagcatgcagggattccgtgaactgtttgacggcgacaatccagcaaaaaagctgctgcgtgatgtcggtctggtactggcggacaaactacccggtattaaacccacactggtccgtcaggcaatgggattacacgatctgccagactggcttagtgctgggaagtaa

SEQ ID NO: 42 - protein, 403 aa, Erwinia carotovora subsp
MQSFDVVIAGGGMVGLALACGLQGSGLRIAVLEKQAAEPQTLGKGHALRVSAINAASECLLRHIGVWENLVAQRVSPYNDMQVWDKDSFGKISFSGEEFGFSHLGHIIENPVIQQVLWQRASQLSDITLLSPTSLKQVAWGENEAFITLQDDSMLTARLVVGADGAHSWLRQHADIPLTFWDYGHHALVANIRTEHPHQSVARQAFHGDGILAFLPLDDPHLCSIVWSLSPEQALVMQSLPVEEFNRQVAMAFDMRLGLCELESERQTFPLMGRYARSFAAHRLVLVGDAAHTIHPLAGQGVNLGFMDVAELIAELKRLQTQGKDIGQHLYLRRYERRRKHSAAVMLASMQGFRELFDGDNPAKKLLRDVGLVLADKLPGIKPTLVRQAMGLHDLPDWLSAGK

SEQ ID NO: 43 - DNA, 1233 bp, Acinetobacter sp
  CDS (1)..(1233)
atgacacaaatcgcagatgtggtaattgtaggtggtggattggttggtggcctaacggcattgctgcttgcccaaggtggtgttcaagcgactgtactggatgctgcgcccatacttgatactgcaaaagttgaaagtgtgatgaacccgcgtgtgcttgcactgagtcaggcaacaattcatctgcttaaaaccgttgaggtatgggagcttatttcacggcaaatgccttatacagggatgcaggtgtggaataaaaatggctatggtgatattcaatttggacatcacagcgcctcaacgcctatgattgatcaggcactgggttctatggtcgaacctagtttattgaatcttgcgattcagcaaaaaatgagagccgttattcaggattatcgaaccgaggttcaggttgttcagattgaacaactgccaaatctttggcagatccatctggctgatggtcattgtatccagacacgattattaattggtgccgatggcgcaaattcgttcgtacgcgaaaaggccatgattgatctggatgtacttgactataaacaagcagcaataagctgtgcgataaaaacagcgctctcgcatgagcatgtcgctcgtcaaatttttctgccaacagggcctttggcctttttgcctatggcaagtctcgttccagccgagcagggtttgtggcaatcgattgtttggaccttaccagatgattatgcagatgagtattcagcgctgtcggatcatgaatttaaagcgttgctaactcgtgagagtcagcacatgctaggtgaggttgttgaagtccgatcaagagctcaatttccattaaaagctcgtgcagcaaaacaatatgtgaaagagggtctggcattgattggtgatgccgcgcatgtgatccatcctcttgctggacaaggcgtaaacattggctgtctggatgctgcggttttgtgtgatgcattactgcatgatcgtgcgcgtggtgtctgggctcatgagcaaactttgagacgctatgaacatgagcgtaaaggtcaaaatgatgccatgatgcatggcatgtcgatcattggctggctagaaagtcaggagtttttcccgctcattgcactacgcaacacagggttacgatgggtcgaaaacagtgaaattcttaaaaattcatttttgcaacaagcgacgggattaagcattttaaataagactcggtatgtgtcttga

SEQ ID NO: 44 - protein, 410 aa, Acinetobacter sp
MTQIADVVIVGGGLVGGLTALLLAQGGVQATVLDAAPILDTAKVESVMNPRVLALSQATIHLLKTVEVWELISRQMPYTGMQVWNKNGYGDIQFGHHSASTPMIDQALGSMVEPSLLNLAIQQKMRAVIQDYRTEVQVVQIEQLPNLWQIHLADGHCIQTRLLIGADGANSFVREKAMIDLDVLDYKQAAISCAIKTALSHEHVARQIFLPTGPLAFLPMASLVPAEQGLWQSIVWTLPDDYADEYSALSDHEFKALLTRESQHMLGEVVEVRSRAQFPLKARAAKQYVKEGLALIGDAAHVIHPLAGQGVNIGCLDAAVLCDALLHDRARGVWAHEQTLRRYEHERKGQNDAMMHGMSIIGWLESQEFFPLIALRNTGLRWVENSEILKNSFLQQATGLSILNKTRYVS

SEQ ID NO: 45 - DNA, 1209 bp, Acinetobacter sp
  CDS (1)..(1209)
atgcaacagcaagtcattattgtgggtgggggaatggtcggactgagtctggctttaatgttggcgaagcaaaaaatcgcggtcaaacttttggaagcaatacgttatccagattacgacgatgcgaatctggcgccttatcactccagttttgatgcacgtaatactgcgctttcacgccgtagtgtacaaatttatcaaaaattagagttgtggaatgcacttcagcagcatgctaccccaattttgcaggttcatattacagagcagggaagttttggtaaggcacgcttgactgccgaacaagagaaagtcgaaagttttgggcaagtcattgaaaatgcctggcttggtcgggtgttgcttaccgaggttcgcgagcaaaccttgattgagctgattgatgggattgaagtgacggcattgcatcaagacgctgaaaaggtctttattgaggccaaacgtggtgatgaacagcttagtttaagcagtcagttagtaattgctgcagatggccgtgattccttttgtcgtcaagccttaggtattggtgccgatgtgcatgattatgatcaagttgcaattgtcaccgcagtacagacatctaaaccacatcaacatattggttttgaacgttttagcgagttggggcctttagcattactcccattgccaggagagtatcgtcgatctgtggtatggcctgtgaaaaaaggtacagaaagtgaatggctgggtgaagataacgatcagcattttttgaatgccttgcaacagacttatggcgatcgtgcagggaaatttgaaaaaacgggtaaacgttttagttatccattgtctcaggtactcgcgcacaaacaggcggtgggtcgggtggtattgatgggaaatgcagcacataccattcatcctgttgcagggcagggttttaatttatgtttgcgtgatgcagatgttctggttcgttatttattacaacagttagcgacttcgaatgatatcggtcaaccagaaaacctgttggcgtatgagcaggcgcgtttaaaagatcagcagcgtgtaattcggttttgtgattctgttgtccgtggttttagtcatcaaaatcctattcttaagttattgcgtaatactggtttgattgcttttgatgtgattcctggaatcaagccgttggttgccaattacgctatgggattaaaagcatga

SEQ ID NO: 46 - protein, 402 aa, Acinetobacter sp
MQQQVIIVGGGMVGLSLALMLAKQKIAVKLLEAIRYPDYDDANLAPYHSSFDARNTALSRRSVQIYQKLELWNALQQHATPILQVHITEQGSFGKARLTAEQEKVESFGQVIENAWLGRVLLTEVREQTLIELIDGIEVTALHQDAEKVFIEAKRGDEQLSLSSQLVIAADGRDSFCRQALGIGADVHDYDQVAIVTAVQTSKPHQHIGFERFSELGPLALLPLPGEYRRSVVWPVKKGTESEWLGEDNDQHFLNALQQTYGDRAGKFEKTGKRFSYPLSQVLAHKQAVGRVVLMGNAAHTIHPVAGQGFNLCLRDADVLVRYLLQQLATSNDIGQPENLLAYEQARLKDQQRVIRFCDSVVRGFSHQNPILKLLRNTGLIAFDVIPGIKPLVANYAMGLKA

SEQ ID NO: 47 - DNA, 1434 bp, Candida glabrata
  CDS (1)..(1434)
atgttgaagatgcaattgagttctgtcaggtacttagctaccatagctaaaaactcaacccccaaattgaccgatgtcctcattgtaggtggtggtcctgctggtcttacgcttgctgcagcaatcaagaattctccaactttagccggtctttcaactacgttagtagacgctggggatttgaagaaagttggggaatttcacgaccaaccaccagagcatttcaccaatagagtcgttagtataactccaaagtctctgcatttcattgccgaaagggctggtgctggtgatttcttactaagggacagaatccaaccttatgatggtttatatgtcaccgatggtgtcaccaagtctttgctcgatttggaaaagccctctatgttggaaatgattgaaatcttgaacatccaatcaagtttactcaagaaattatcgcagtatgatgaagtacttgatggatttaagcttgtggaaaaatctaaagtcactaagattgaaaacaccgatcctaaagacccaacttcatggccattagttactcttgataatggtgatgtttacaaaaccagattactagtcggtgctgacggattccaatcaccagtaagaaaatttgcaaatattgaaactcgtgggtggttctatggtacttttggtgttgttgctacaatgaaactacaatacgacacatataagctaaggggctggcaaagatttctaccagatggtccaatcgctcatttaccattaccaggtgaaaatgcaactcttgtgtggactacaactgaaagaatttcaaagttgctattgacattggatccaaaggcatttgcctccttggtcaatgccgcttttgttcttgacaacaccgacttacaatattattttgatgagttggaagccggaaagatttcaacaaatgaactcattgaggatgttaaattcagaatggaccaagaattttcaaaactaagcgatgaaactatgatagacgaactctacccaccccaggttattgacataaagggtgacactagggccaggttcccactgaagatgacgcatgctgacaactactgttcgcatagggtggctttggtaggtgatgcagctcataccactcacccactagctggccaaggtttgaacatgggtcaaggtgatgtcgaagctcttgttgacgccttagagaaagctacacaaagaggtcaagatattggtgctctattgagcctggaaccattctgggctgagcgttacgctactaaccatgtgctactaaatatggccgataaactatacaaactttaccacactgattcagcacctgtagtagcattaagaagtcttggcctcgatttaaccaataacttcccacctgtgaagaactggattgtgaagactctgactgccgacactgaattttga

SEQ ID NO: 48 - protein, 477 aa, Candida glabrata
MLKMQLSSVRYLATIAKNSTPKLTDVLIVGGGPAGLTLAAAIKNSPTLAGLSTTLVDAGDLKKVGEFHDQPPEHFTNRVVSITPKSLHFIAERAGAGDFLLRDRIQPYDGLYVTDGVTKSLLDLEKPSMLEMIEILNIQSSLLKKLSQYDEVLDGFKLVEKSKVTKIENTDPKDPTSWPLVTLDNGDVYKTRLLVGADGFQSPVRKFANIETRGWFYGTFGVVATMKLQYDTYKLRGWQRFLPDGPIAHLPLPGENATLVWTTTERISKLLLTLDPKAFASLVNAAFVLDNTDLQYYFDELEAGKISTNELIEDVKFRMDQEFSKLSDETMIDELYPPQVIDIKGDTRARFPLKMTHADNYCSHRVALVGDAAHTTHPLAGQGLNMGQGDVEALVDALEKATQRGQDIGALLSLEPFWAERYATNHVLLNMADKLYKLYHTDSAPVVALRSLGLDLTNNFPPVKNWIVKTLTADTEF

SEQ ID NO: 49 - DNA, 1281 bp, Bartonella quintana
  CDS (1)..(1281)
atgtattctgatctcaatgaaggtataaaacccaataaaaacacaagagccaataaaaaaaaagaacaatgtgatctcctcattgcaggtggcgcggctgtcggtttaacgctggcagtagcgctcaaacaagctgcccctgatttgaaaattaagatcgtcgatgctgttcctcaaggagatatccctgtttccaatatacgcgcacttgccctttctgctgcctctattcgtatgttgaaacaactgcaatgttgggaacatataaaatctcatgctcaacctattcattcaatgatcatcacagatgcatacacaaatgatcctgtcaaaccaactcttttaacctttgaaggaaatgttacccccaacgagccctttgctgctatggtggaacatagagagctcctcaatgctttaaaaaagcgtgcaaaagatctaggtattcctttcctcgcaaacatgcgtattattgattttcaccaaaaagatcaacacaccactgtcactttaagcaatgaagaaatctggcaaacgaaattgctaattgcagctgacggagcacattcggaattacgcgaaaaagcaggtcttaaaaatttttctcgtccctataaacaaacagcaatcatctgcacgattgaacatgaaaaaccccatcatggtcaagcaatccaacatttcttacctgctggccctttcgctcttctccctctcaaaggaaatcgatcagccgtggtatggaatgaacagaataaaactgcgcaatattatttcaaagctgatgctcttatttttgaaacagaaatcaaaaaacgtattggtcaccgatatggaaagctcacttggaatggggaacgccaagcctttcctttaaagctttctttagcacgccaatgtattaaaccgcgctttgttctcattggtgatgctgcgcatacaatccaccctcttgcaggacaaggcctcaatttaggattacgcgatagtgccgcactcgccgaagtgattattgaaacagcgcggttaggtcttgatattggatctttcattgctctcgaacgctatcaaagctggaggcgttttgaaactgtacgtatggctctgagcaatgactggcttaaccaactcttttctaatgataacctgctcttgcgaatgctccgcgatgttggtcttggaattgtcaatcaaacgccaaaaatgaaaaaatatttcattcaagaagcctccggtctcacccgtcatgccccacgtctgctgcacggattgccactctaa

SEQ ID NO: 50 - protein, 426 aa, Bartonella quintana
MYSDLNEGIKPNKNTRANKKKEQCDLLIAGGAAVGLTLAVALKQAAPDLKIKIVDAVPQGDIPVSNIRALALSAASIRMLKQLQCWEHIKSHAQPIHSMIITDAYTNDPVKPTLLTFEGNVTPNEPFAAMVEHRELLNALKKRAKDLGIPFLANMRIIDFHQKDQHTTVTLSNEEIWQTKLLIAADGAHSELREKAGLKNFSRPYKQTAIICTIEHEKPHHGQAIQHFLPAGPFALLPLKGNRSAVVWNEQNKTAQYYFKADALIFETEIKKRIGHRYGKLTWNGERQAFPLKLSLARQCIKPRFVLIGDAAHTIHPLAGQGLNLGLRDSAALAEVIIETARLGLDIGSFIALERYQSWRRFETVRMALSNDWLNQLFSNDNLLLRMLRDVGLGIVNQTPKMKKYFIQEASGLTRHAPRLLHGLPL

SEQ ID NO: 51 - DNA, 1281 bp, Bartonella henselae
  CDS (1)..(1281)
atgtactctgatctcaatgaaggtgtaaaaccctacagaatgacaaaatctcataaaaatataaaacaatgtgatctcctcattgcagggggtgcagctgttggtttaacattggcaatagcactcaaacaagctgcccctgaactgaaaattaacatcgttgacgctgcgcctcaagaagttatccccgtttccaatatacgcgcacttgcccttgctgcagcttctattcgtatgttaaaacaattacaatgttgggaacatatagccccccatgcccaacccattcattccatgatcataacagatgcatacacaaatgatcctgtcaaaccaactctcttaacctttgaaggagatattactcccaacgagccctttgctgctatggtggaacataaagagctcctcaatgctttaaaaaagcgtgcaaaagatctggatatccccttcatcactaacatgcgtattgttgatttccaccaagaagatcaacacaccactgtcactttaagcaataaagaaatttggcaaacgaagttgctaattgcggccgatggagcacattcgaaattacgcgaaaaagcaggtcttaaaaagttttctcattcttatacacaaacagcaatcatctgcacagtcgaacatgaaaaaccccatcatggtcaagcaatccaacattttttacctgctggacccttcgctcttctccctctcaaaggcaaccgatcagctattgtatggaatgaagaccataaaactgcgcaatattaccttaaagccgatgctcttatttttgaaacagaaatcgaaaaacgcattggtcaccgatatggaaaactctcttggaatggtgaacgccaaggctttcccttgaacctttctttaacacgccaatgtattaaaccgcgctttgctttgattggtgatgcagcgcacacaatccacccccttgccggacaaggtctcaatttaggcttacgcgatagtgctgcacttgccgaagttatcattgaaacagcacgattgggtcttgatattggctcccttactgctttagagcgctatcaaagctggagacgttttgaaattgtccgcatggccttgagcaatgactggcttaataaactcttttctaatgataatcttctcttacgaacgctccgggatgtcggccttggaattgtcaatcaaacaccaaaggtaaaaaaatattttattcaggaagctgccggcctcacccctcatgctccacgtctgctacacggtctccccctctaa

SEQ ID NO: 52 - protein, 426 aa, Bartonella henselae
MYSDLNEGVKPYRMTKSHKNIKQCDLLIAGGAAVGLTLAIALKQAAPELKINIVDAAPQEVIPVSNIRALALAAASIRMLKQLQCWEHIAPHAQPIHSMIITDAYTNDPVKPTLLTFEGDITPNEPFAAMVEHKELLNALKKRAKDLDIPFITNMRIVDFHQEDQHTTVTLSNKEIWQTKLLIAADGAHSKLREKAGLKKFSHSYTQTAIICTVEHEKPHHGQAIQHFLPAGPFALLPLKGNRSAIVWNEDHKTAQYYLKADALIFETEIEKRIGHRYGKLSWNGERQGFPLNLSLTRQCIKPRFALIGDAAHTIHPLAGQGLNLGLRDSAALAEVIIETARLGLDIGSLTALERYQSWRRFEIVRMALSNDWLNKLFSNDNLLLRTLRDVGLGIVNQTPKVKKYFIQEAAGLTPHAPRLLHGLPL

SEQ ID NO: 53 - DNA, 1398 bp, Yarrowia lipolytica
  CDS (1)..(1398)
atgcttcgatccacgaccttgcaacggctgcggccggctgtttttcgagtccagcgatggaactccaccaccacatctgctcccaaaccctccaccacccactcggacattgtggtggttggaggaggtcctgccggcttgaccattgccgctgccctcaaacactaccctgagacggtcaacaagtctgtgactcttgttgagtttgggtctctggacaatctgaagacctggggccccgatatggagcggtttgagaaccgagtcagttctctgaccccctcttcggtcgagtatctgaccaagatcggcgtgtgggaacatgtcaaccgagaccgagttcaggcctacagacacatgacagcgtgggatggagtgtcgggctctaaggtgcagttcaacaccacccaattgatgggcgagggccgagatatcgcctacatgaccgaaaacttcaacctgcagaacggcttgctcaagcagctggcaaataagcccaatctgacgatcctggacaagaccaaggtggagggcgttgagcgaacacccgaatcgcacaacaagccccttgtcaagctctccaatggttctactatctctactgatctgctgatcggtgctgatggagccaactctcctgttcgaaccttttccggtatcgaggcacgaggatgggactacaacacccacggtctggttgccaccgtgcgtctggccaacgagcagcagtcggcatggcagcgattcctccccaccggtcccattgctcttcttcctctgcctaacagattcggctcgctcgtctggtccaccacccccaagatggccgcccagctcaagcagctgactcccgagcagtttgtcatgatggttaactgtgcattcaacctcgagcccaccgacattgagtacctggttgaacatcccgatgaaatcatgactgacgctccttacagactgtctcagcgatcttctaaccccgacgtgccctgccccattgttgctgtccaagacaagtcgcgagcctccttccctcttaagatgaagcatgccgacacttatattgccgagaacgtggctctggttggagatgctgcccacaccacccatcctctagcaggacagggtctcaacatgggccagggagacgcccagagtctggccattgccattcgaaacgctgcggggcgtggagccgatattggatccaccctgaccctggagccctactgggccgaccagtactttaagaaccacaagctgctgggcgtggtcgacaagctgcacaagttgtactcgacccgaaacccgctggtggttggtctgcggtcgttgggtcttgatgcggtcaatagtgtcaagcccgtgaaggatttcttgatgtctcaggcgtcgtaa

SEQ ID NO: 54 - protein, 465 aa, Yarrowia lipolytica
MLRSTTLQRLRPAVFRVQRWNSTTTSAPKPSTTHSDIVVVGGGPAGLTIAAALKHYPETVNKSVTLVEFGSLDNLKTWGPDMERFENRVSSLTPSSVEYLTKIGVWEHVNRDRVQAYRHMTAWDGVSGSKVQFNTTQLMGEGRDIAYMTENFNLQNGLLKQLANKPNLTILDKTKVEGVERTPESHNKPLVKLSNGSTISTDLLIGADGANSPVRTFSGIEARGWDYNTHGLVATVRLANEQQSAWQRFLPTGPIALLPLPNRFGSLVWSTTPKMAAQLKQLTPEQFVMMVNCAFNLEPTDIEYLVEHPDEIMTDAPYRLSQRSSNPDVPCPIVAVQDKSRASFPLKMKHADTYIAENVALVGDAAHTTHPLAGQGLNMGQGDAQSLAIAIRNAAGRGADIGSTLTLEPYWADQYFKNHKLLGVVDKLHKLYSTRNPLVVGLRSLGLDAVNSVKPVKDFLMSQAS

SEQ ID NO: 55 - DNA, 1209 bp, Photobacterium profundum
  CDS (1)..(1209)
atgaatgtgaagcagtatgatgtagtgattgctggtggggcaatggcgggggcgacacttgccattgcactgaacaagcttattagcgaacgagacgttaaacgtcaattacgtgtcgctgtggttgaggctgttgcgccgaatgtagaccaacatccgggatatgatgcgcgcagtattgcggtgtcattcggctcgagccgcttactgagtaaagttggtatttggtcgatgctgtcgtcggttgctacgcctatcgctcacattcacgtttctgatcgtggtcatgccggtattgttcgactagatgcagaagagcaagcgattgatgctctgggttatgttattgaattagcagatgctggaaggttatttcaccaacagttaaatgatttagataacgtagcgctatattgccctgattcgatcattgatatttcacgtactcagcaaaatgttacgctttgtctggattccggcgagcagatccaaacgcaattgttagtgactgctgatggcgcactctcgagttgctgtgagctattaggaataggacggcatgagcatgactttgaacaagtcgcaattattgccaacattaccacagcacaagcacaccaaggtcgggcttttgagcgttttacgccgtatggtcccgtggcgttattgccgatgtcggaagggcggagctcattggtgtggtgcattaaacctgagtaccaatcaacggtgatgagctgggatgacgctcgctttttagctgaattgcaaagcacctttggttggcgtttgggggaattagtgaaaacaggtaagcgtgttgcttacccgttattacttcgtcagtctgaagcgttaacgtctcaccgtgtggctgtggtgggtaatgccgcacagacattacatccgattgcagggcaaggctttaatttaggtctgcgtgatgttatgacattagctgaagaagtggtgaatagcttcgaacgcaacgaagatgttggtgaggcggcattattaagccgttatcgacagcgtcggctgcctgatcgtcaagcaactgtgttgatgacggctgggttagtgagtgtgtttgcgaatgatagttttcctcttgttgctggtcgaaacacggggcttatggctatgaatatttttgatacgttaaaagcaccgctgttaaggcgtgcaatgggacaggtagagcgatga

SEQ ID NO: 56 - protein, 402 aa, Photobacterium profundum
MNVKQYDVVIAGGAMAGATLAIALNKLISERDVKRQLRVAVVEAVAPNVDQHPGYDARSIAVSFGSSRLLSKVGIWSMLSSVATPIAHIHVSDRGHAGIVRLDAEEQAIDALGYVIELADAGRLFHQQLNDLDNVALYCPDSIIDISRTQQNVTLCLDSGEQIQTQLLVTADGALSSCCELLGIGRHEHDFEQVAIIANITTAQAHQGRAFERFTPYGPVALLPMSEGRSSLVWCIKPEYQSTVMSWDDARFLAELQSTFGWRLGELVKTGKRVAYPLLLRQSEALTSHRVAVVGNAAQTLHPIAGQGFNLGLRDVMTLAEEVVNSFERNEDVGEAALLSRYRQRRLPDRQATVLMTAGLVSVFANDSFPLVAGRNTGLMAMNIFDTLKAPLLRRAMGQVER

SEQ ID NO: 57 - DNA, 1209 bp, Photobacterium profundum
  CDS (1)..(1209)
atgatgcagagtgttgatgttgccattattggtggtggtatggtgggtttaactcttgcagctgcattagctgaaacggaattgcgtgttgctgttattgaaggacaattacctgatcctgaattggctttattgccggatgtacgtgtgtcagccttaagccgtgcgagtgagcgtattttacgacgagtaggggcttggcaaggtattgagtctcgccgattcagtccatataaccgaatggaagtatgggagcaagatagctttgccaagattcaatttgatgccgaaaggttatcacaacctgatttaggtcatatcgttgaaaaccgcgttattcaacttgcattactcgatcgcattaagcagcttaataatgtgaccttaatggccccagagcgatgccaaaacattgcttttggtgaaagcgaagcatggttaacgatggagtcgggcaagagcttaacggcaaaattagtggtgggtgctgatggcgcgaactcatgggtgcgtcgtcaattagatatcccattaacgcattgggattatgggcacagtgccattgttgccaatattcgctgtgctgaaccccatgataaaacagcccgccaaattttccgtccgcaaggaccattagctttcttaccgcttgctgaaagcgatttgtgttctatcgtatggtcggtagcaccagatgaagcagaacagctgtgtgggttgtctgatagcgaatttaataaatcactgacagcggcatttgataaccgtttaggcttatgtaaggttgaagggcagcgtcaagcattcccattaaagatgcgatatgcccgtgattttgtgcgtgaacgtgttgcattagtcggcgatgctgctcatacgatccaccccttagcgggtcagggagttaaccttggtttgttagatgccgcgagcctagcgcaagagctaaaagcgttatggcagaaagaacaagatattggtcagaagagcaatctgcgtcattatgagcgttggcgtaaagcagaagccgcgaagatgatcactaccatgcagggcttccgtgatttatttgacggcagtaatccggctaagaaactagtgcgtgatttaggcatgttatttgccgataaagcgccgggtgtgaaagatgaatttatgcgccgtgctttaggcttatcgggtgaattaccggatcttgctaaacgctaa

SEQ ID NO: 58 - protein, 402 aa, Photobacterium profundum
MMQSVDVAIIGGGMVGLTLAAALAETELRVAVIEGQLPDPELALLPDVRVSALSRASERILRRVGAWQGIESRRFSPYNRMEVWEQDSFAKIQFDAERLSQPDLGHIVENRVIQLALLDRIKQLNNVTLMAPERCQNIAFGESEAWLTMESGKSLTAKLVVGADGANSWVRRQLDIPLTHWDYGHSAIVANIRCAEPHDKTARQIFRPQGPLAFLPLAESDLCSIVWSVAPDEAEQLCGLSDSEFNKSLTAAFDNRLGLCKVEGQRQAFPLKMRYARDFVRERVALVGDAAHTIHPLAGQGVNLGLLDAASLAQELKALWQKEQDIGQKSNLRHYERWRKAEAAKMITTMQGFRDLFDGSNPAKKLVRDLGMLFADKAPGVKDEFMRRALGLSGELPDLAKR

SEQ ID NO: 59 - DNA, 1197 bp, Rhodopseudomonas palustris
  CDS (1)..(1197)
atgacccagagcctgatcgagcctaacagctacgacgccatcgttgtcggcggcggccccgccggcctgaccgccgccatcgcgcttgccgaaaccggcgccgtcaccgcattgatcgcgcgacaagtgccctacggcgataatcgcactacggccctgctcggcgattcgatcgacattctcgaccggctcgacgtctggcgccgctgctcgagcaaggccgccgcgctgcgatcgatgcgactggtggacgacaccggccggttgatccgggcgccagaagtgaagttcgcgtccgatgaaatcggcatggacgcgttcggctacaacatcgagaaccgtgccctgctggtcggcctcgaagaacgcgcggccgagctgtcgaacctgcagcgtttcgacgatgaagctgaatcagttgtgccgggcgacgacgaagtgatcgtgcggatgcgcggcggccggaccgtctcggccaagctggtggtcggcgccgacggccggcagtcccaatgccgcgaggccgccggcatcaaggtgagtagccgcgccctgcaccagtcggcgctgaccttcaatgtcaagaccacccgctcccacgacaacatctcgaccgaatttcacaccaaggaaggcccgtgcgtgttcgtgccgctgccgggtcggcggatgagcatcgtctgggtcgcggcgccgaaggaagcgcagcggctgatggcgctatccgacgacgaactgtctgcagcggcggaaaagcagtcacagtcgatctacggtaggatgaccgtcgagcccggccgcaatctgtttccgctggcgatcgagaagcccgccgcttacgcacagcggcgcatcgcgttggttggtgaggccgctcacgtcgtccccccgatcggcgcgcaggggttgaatatggggctgcgggatgccggggacctcgccgagatcgtgcgcgacgcgatggcgaatggcacggacatcggctccgacgctgtgatgacgcgctatggccgtagccgcgggcccgacatcgccagccgcaccgccgcgatcgacatcgccaaccgcaccctgctcagcgatctcttgcccgcgcagatgctgcgggcgacggggatgcatctgatcagctcggtcggcccgatccgccggttcgcgatgcgcgaggggctgtcgccgttctggcgctcgatctga

SEQ ID NO: 60 - protein, 398 aa, Rhodopseudomonas palustris
MTQSLIEPNSYDAIVVGGGPAGLTAAIALAETGAVTALIARQVPYGDNRTTALLGDSIDILDRLDVWRRCSSKAAALRSMRLVDDTGRLIRAPEVKFASDEIGMDAFGYNIENRALLVGLEERAAELSNLQRFDDEAESVVPGDDEVIVRMRGGRTVSAKLVVGADGRQSQCREAAGIKVSSRALHQSALTFNVKTTRSHDNISTEFHTKEGPCVFVPLPGRRMSIVWVAAPKEAQRLMALSDDELSAAAEKQSQSIYGRMTVEPGRNLFPLAIEKPAAYAQRRIALVGEAAHVVPPIGAQGLNMGLRDAGDLAEIVRDAMANGTDIGSDAVMTRYGRSRGPDIASRTAAIDIANRTLLSDLLPAQMLRATGMHLISSVGPIRRFAMREGLSPFWRSI

SEQ ID NO: 61 - DNA, 1167 bp, uncultured bacterium 578
  CDS (1)..(1167)
atgaaagtgttcgatgtaattgtcattggtggtggcatgatcggccttgcttttgctttagagttatcacagaaaaaaaactgctcgatcgccattattgagccaaatacatgtaaccctgcaatcaatgacacgtttcattcacgagtaagtgctattacaccatcttcccatgagtacctagtctctcttaatatttggaataacattaaaagaaaaaaagcatttgtggctacaaaggtatgggatcaaaattcgcatggacatctcaattttcacgctgaggatgagggtatggatcaacttggcttcattgtcgaaaatgatttaatacagtctgcactatttgaagcaattgactccagcaagataacgattattaatgccaagctagatagtttattaaaaactgatattggctatatgttaactctagatgacgagagtaatttgtcatgcaatctagttgtcggggctgatggtcctcaatcaaaagtcagaaacttagtggctattgaggttactgagcgtgactataatcaaaaagctattattgctaatatagttagtgaaaagtcacttgaaaatactacttggcagcgctttttatcagacagtattattgctttattgccactctctgaaaataaagcgtcaattgtatggtcttgcaaaagtaatcttgcagacgagttgatggagttagatatagatgattttaatcaatctttgtctgaagtcgttgagtatcgttttggtaagcttatactggaaagcaaaagaaaagtattcccactagtcgaaagaagtgcaaaggactatactctccctagcctcgctctagttggagatgctgctcacaacatccacccactagcaggtcagggagctaatctaggtttttcagatgcaaaggaactcaatagtcaacttttagaaaatgatgataaacccttgggcgaatatttagtcttaaggaagtatgcgagagcccgtcgattagataatgagttaatggctaaaactatgacaggtttagactggatatataaggaaaataatgagccacttcgatggcttagaggttttggtatgaatcttattgacgattccccaatgattaagtctttttttcaaaaacaggctctcggtaagtctattaaatga

SEQ ID NO: 62 - protein, 388 aa, uncultured bacterium 578
MKVFDVIVIGGGMIGLAFALELSQKKNCSIAIIEPNTCNPAINDTFHSRVSAITPSSHEYLVSLNIWNNIKRKKAFVATKVWDQNSHGHLNFHAEDEGMDQLGFIVENDLIQSALFEAIDSSKITIINAKLDSLLKTDIGYMLTLDDESNLSCNLVVGADGPQSKVRNLVAIEVTERDYNQKAIIANIVSEKSLENTTWQRFLSDSIIALLPLSENKASIVWSCKSNLADELMELDIDDFNQSLSEVVEYRFGKLILESKRKVFPLVERSAKDYTLPSLALVGDAAHNIHPLAGQGANLGFSDAKELNSQLLENDDKPLGEYLVLRKYARARRLDNELMAKTMTGLDWIYKENNEPLRWLRGFGMNLIDDSPMIKSFFQKQALGKSIK

SEQ ID NO: 63 - DNA, 1182 bp, uncultured bacterium 311
  CDS (1)..(1182)
atggatgctgaagttgctttagtcggtgcgggaactgtaggttcatctttagcatgttcattggccaagcaaggaataaaagtaatattatttgatcgagacagcccactagatttatctgaaacttctaggttagaaggtaggacagtagctttaaatttatcttcaatcgatctctttgatgaactaggtatctggagtgagcttaaaaagacaggcacaccctttaaccgcatgtttgtttgggattctaagggtagttcaccccttgaattcttggcccaagagatagaaagggaagagttgggttacgttgtctccaataatttaattttagaatatcttaaaaagattattgaagattctaataatatcagtcttaagcaagaaactgagttatctgaagttaaagtaagtgataaagaagtagtaatctcttgttcgaacggtgacaagattacttcaaaattattaataggagctgatgggcttaattcaactttaagaaagattgcacaaataaaaactagatcttggagctataaccaaaaggcttttgtggcagcattaaaaaccgaaaagcctcatgatcacactgcttggcaagtatttactccaacaggtccaatagccctcctgcctttcgattctttagaaagagctaatatttctctggtatggtcagctgaacttaattactcagaaaaactttcaaatctaagtaaaaaagaatttataaaagaattggaagaaaagacagagttaattttaggaaaaatagagttgaaaacagacataagttcatttccccttaatcaattacactctaaaaattatgttgctgaaagggtagctttggtgggtgacgctgcgcattcttttcatcccctggctggccaaggattaaacttaggcttatcagatgctgctagcttagccagtaagcttataaaagctagaagaagtggagttgatatagggtctgataaaatccttgaagactatgaaagatctagaaaaattcctaatttaactatggctgcaatgatggagttgttcaaacaagggttcgaaacatcagatccctggatcaaattagccagaaatcttgcttttaaaacagcttctgaaagtcagattttaaagaaaacgttaataaaagaagcagcaggaattacttaa

SEQ ID NO: 64 - protein, 393 aa, uncultured bacterium 311
MDAEVALVGAGTVGSSLACSLAKQGIKVILFDRDSPLDLSETSRLEGRTVALNLSSIDLFDELGIWSELKKTGTPFNRMFVWDSKGSSPLEFLAQEIEREELGYVVSNNLILEYLKKIIEDSNNISLKQETELSEVKVSDKEVVISCSNGDKITSKLLIGADGLNSTLRKIAQIKTRSWSYNQKAFVAALKTEKPHDHTAWQVFTPTGPIALLPFDSLERANISLVWSAELNYSEKLSNLSKKEFIKELEEKTELILGKIELKTDISSFPLNQLHSKNYVAERVALVGDAAHSFHPLAGQGLNLGLSDAASLASKLIKARRSGVDIGSDKILEDYERSRKIPNLTMAAMMELFKQGFETSDPWIKLARNLAFKTASESQILKKTLIKEAAGIT

SEQ ID NO: 65 - DNA, 1416 bp, Ashbya gossypii
  CDS (1)..(1416)
atgttgagaagggcatacacgctcttgcaccgccggacactcgcagtatcctctgccgggatagagaagacggatgtactgattgtcgggggcgggcctgctgggctaacgttggctgccggcatcaagaactccccccatctttccgatgtcccagtaactctagtcgaaggtagctcgctaacgaagatcgctgggttctacaaatccccatctgcgaaataccataaccgaatcatcaacctaactccgcagtcgaagaacttcctggagcaaaaagtgggcgtcaagttgctggaagaccgcatacaggcgttcgacgggttctacgtgacggatggctgctcatcaggcgcgctagagatgacacgcgagaacgtgggatacatggcggaaatattcaacatccagagctcagtcctacaccgcatggagcagctgtcgcactccgggctggacttgattgagaacgccaaagtcacgtccatcgagcacagcgatcctgctgatccacagtcctggcctatagtgaccctggacaatggccggcgcatccagacgagactgctggtcggcgcagacggcaaaaactcgcccgtgcgcaggttctcaggcgtccaatcccgcggctggtcatacgggcgctggggcatcgttgcaaacctacagcttgagtaccctccgttcaagacacgcggctggcaacgtttcctccctacgggtcccattgcacacctgccaatgccgggtaccgatgcctgcctcacgtggagcacaacagaaccgctcgcccgtctactgctctctctcgaaccagccgccttcgcgaccctggtgaacgcggcgttcattctcgacgacgcggacatgcagttttactacaagcatttgcaagagggcacgctatcgaccagcgaactgatagccgatgtcgagcaccgcatccaacaagttttcagcaacctacaggacgagggcttaatagacgaaatatacccaccaaaggtcgtcgacgtttacgagggctcgcgcgcccgtttccccctcagcatggctcacgcggacacgtatgtcgcggaccggatcgcgcttgtcggcgatgcagcccactcaacgcatcctctcgcaggtcagggtctgaacatgggtcaaggagacgttgaggcgctgttgtcggcactagaaagggccaaccagcgcggactggatctcggctcgctgctcgcgctcgagccctactgggcagagcgctacccaataaacaacgccctaatcggcggtgcagataaattgcacaagctctactcaaccgattttgcgcccatcgtcgccgccaggactttcggcttgaacctcgtcgacaagcttggaccgctgaaagacctcataatggcaaaggtcagcggcccaaattaa

SEQ ID NO: 66 - protein, 471 aa, Ashbya gossypii
MLRRAYTLLHRRTLAVSSAGIEKTDVLIVGGGPAGLTLAAGIKNSPHLSDVPVTLVEGSSLTKIAGFYKSPSAKYHNRIINLTPQSKNFLEQKVGVKLLEDRIQAFDGFYVTDGCSSGALEMTRENVGYMAEIFNIQSSVLHRMEQLSHSGLDLIENAKVTSIEHSDPADPQSWPIVTLDNGRRIQTRLLVGADGKNSPVRRFSGVQSRGWSYGRWGIVANLQLEYPPFKTRGWQRFLPTGPIAHLPMPGTDACLTWSTTEPLARLLLSLEPAAFATLVNAAFILDDADMQFYYKHLQEGTLSTSELIADVEHRIQQVFSNLQDEGLIDEIYPPKVVDVYEGSRARFPLSMAHADTYVADRIALVGDAAHSTHPLAGQGLNMGQGDVEALLSALERANQRGLDLGSLLALEPYWAERYPINNALIGGADKLHKLYSTDFAPIVAARTFGLNLVDKLGPLKDLIMAKVSGPN

SEQ ID NO: 67 - DNA, 1179 bp, Shigella flexneri
  CDS (1)..(1179)
atgagcgtaatcatcgtcggtggcggcatggcgggcgcgacgctggcgctggctatttcccggttaagtcacggggcgctgccggtacatttgattgaagcgactgcgccagagtcacatgctcatccgggctttgatggacgagcgatagcgctggcggcgggtacctgtcagcaactggcgcgcatcggcgtctggcaatctctggctgattgcgcaaccgccatcactaccgtgcatgtcagcgatcgtggtcatgctggattcgtcaccctcgccgcagaagattaccaactggcggcgctggggcaggttgtcgaattgcataatgtcgggcaacggctgtttgcattgctgcgaaaagcacctggcgtaatgctgcattgccccgatcgcgtagctaacgttgcccgtactcagagtcatgttgaagtgacgctggagagcggcgagatgctgacgggccgcgtgctgatagccgctgatggcacccattcagcgttagccaccgcgtgcggcgttgattggcagcaggagccttacgaacaactggcagtgattgccaacgttgctacttctgttgcgcacgaaggccgcgcttttgaacgcttcacgcaacatggcccgctggcgatgttgccgatgtctgacggacgctgttcgctggtctggtgtcatccactggaacggcgcgaagaggtgctgtcgtggagcgacgagaagttttgccgtgaactccagtctgcctttggctggcgactggggcaaattacccacgccggtaaacgcagtgcttatccgctggcattaacccgcgccgccagaccgattacccatcgcactgtgctggtgggcaatgcggcgcaaactctgcacccgattgccgggcaagggtttaacctcggtatgcgagatgtcatgagccttgcggaaaccctgactcaggcgcatgagcgcggagaagacatcggtgattacggcatattgtgccgctatcagcagcgtcgacagagcgatcgcgaagcaaccatcggcgtcacggacagcctggtacatctttttgccaaccgttgggcaccgctggttgtcgggcgcaacatcggactgatgacgatggaattattcaccccggcacgcgatgtgctggcgcagcgcaccctcggttgggtggcgcgttga

SEQ ID NO: 68 - protein, 392 aa, Shigella flexneri
MSVIIVGGGMAGATLALAISRLSHGALPVHLIEATAPESHAHPGFDGRAIALAAGTCQQLARIGVWQSLADCATAITTVHVSDRGHAGFVTLAAEDYQLAALGQVVELHNVGQRLFALLRKAPGVMLHCPDRVANVARTQSHVEVTLESGEMLTGRVLIAADGTHSALATACGVDWQQEPYEQLAVIANVATSVAHEGRAFERFTQHGPLAMLPMSDGRCSLVWCHPLERREEVLSWSDEKFCRELQSAFGWRLGQITHAGKRSAYPLALTRAARPITHRTVLVGNAAQTLHPIAGQGFNLGMRDVMSLAETLTQAHERGEDIGDYGILCRYQQRRQSDREATIGVTDSLVHLFANRWAPLVVGRNIGLMTMELFTPARDVLAQRTLGWVAR

SEQ ID NO: 69 - DNA, 1176 bp, Vibrio vulnificus
  CDS (1)..(1176)
atgacgcaatatgatgttgtaattgctggcggagcaatggctggggcgacgctcgctttggcactttcgcacctgacggataataaattgaacgtcgcggttgtcgaaccttatcaggttgataccagtcacccggggttcgattctcgctcaatagcactctcatatggcaccgttgatattttgcgtcgtttccaactctggtcatcgatagcgccttgtgccacgccgattacggatattcacgtttctgatcgctctcatctggcaatgaccgatatttccgcgcaacaagttggcgttgacgcactgggttatgtggtggagctggcggatgttgggagcatctatcagtcgttattgcagcgttgtgactccatttccctctacacccctgccgcagtggaacgcgtggagcgattcacggatagcgttgcggtgcatttgaataatggagaaacgctgcaggcaaaactgctggtggccgctgatggggcagtctccaactgttgtcagcaactgggtatgccccttgtgcagcgtgattttgaacaaaccgctgtcattgctaatgttgtgacagaacaggcgcatcgtgggcgtgcgtttgaacgctttactgagcatggtccagtcgcgttactgccgatgtctgacaatcgcatgtctttggtgtggtgcctgcctccggatttagctgagcaggtgatgttgttatctgaagagcaatttttggcacgtttgcagcaagagtttggttggcggttaggtcaaatgcaaaaagtgggcatgagggcgagttatccgctgatattacgtcatcgagaacagaacatctctcatcgctttgctgtggtaggtaacgcggcgcaaaccttacatccgattgctggacaagggtttaatcttggtattcgcgatgtggcctcattggcagaagagatcaccaagcagcttgatgatgttggggcgtattcttctcttatgcgctttaagcagcgccgttgtggtgaccgacaaaacaccatttggatgacgaccagtttggtacaccttttctctaatgattaccttgcactcagagtggctcgcaacctcgggctagtgatgatggataatctttctgggctgaaacagccactattacgccagacattaggtctggtgagccgatag

SEQ ID NO: 70 - protein, 391 aa, Vibrio vulnificus
MTQYDVVIAGGAMAGATLALALSHLTDNKLNVAVVEPYQVDTSHPGFDSRSIALSYGTVDILRRFQLWSSIAPCATPITDIHVSDRSHLAMTDISAQQVGVDALGYVVELADVGSIYQSLLQRCDSISLYTPAAVERVERFTDSVAVHLNNGETLQAKLLVAADGAVSNCCQQLGMPLVQRDFEQTAVIANVVTEQAHRGRAFERFTEHGPVALLPMSDNRMSLVWCLPPDLAEQVMLLSEEQFLARLQQEFGWRLGQMQKVGMRASYPLILRHREQNISHRFAVVGNAAQTLHPIAGQGFNLGIRDVASLAEEITKQLDDVGAYSSLMRFKQRRCGDRQNTIWMTTSLVHLFSNDYLALRVARNLGLVMMDNLSGLKQPLLRQTLGLVSR

SEQ ID NO: 71 - DNA, 1233 bp, Vibrio vulnificus
  CDS (1)..(1233)
atgatacaaagtgtggatgtggcgatcgttggcggtggcatggtgggactggcactggccgcggcatttaaagacagtgatttgcgtgtagcagtgattgaagggcaggctccaaatctgcaaatgaatgaactgccggatgtgagagtttccgcgctcagtcgttccagcgaacatatcttaaaaaatctgggtgcttggcaatccattgtggaaaaacgagcctctccttatgtggcgatggaagtgtgggatcaagacagttttggccacattgactttagtgcggatgcgatggcacagccggatcttggccatattgttgaaaatcgcgtcattcaactggcacttttggagcaggttaacaagctggataatgtgatggtgctgatgccttgtcagtgtcaatcgatgagtgtaggagggagcgaagtgtggttgtcgctcgacaatggtcaggcgctcacggccaaattggtggttggtgctgatggcgccaattcttgggttcgacgtcagcaggatatcccgctaactcattgggattatggccattctgcgatcgtagccaatgttcgcactgtcgagccacattgctcagttgcacgtcaaatttttactcctcaaggacctttggcctttctgccaatgtctgaagagaacatgacctcgattgtgtggtcgactgaatcactgcgcgcaacgtgtttgatggcgatgtcagacagtgagttcaataaggcgctgagtgccgaatttgatatgcgtttgggactgtgcgaagtggttggggagcgttttagcgttccactgaaaatgcgttttgctcgagattttgtcaaagagcgtgtcgccctgattggtgacgcagcacacacaatccatccgttggcggggcaaggtgtgaacttgggcttgctcgacgctgccagtctggcgcaagagatcctcgcgctttggcaacgtggtgaagacattggtaccaagcgcaacctgcgtcgttttgaacgttggcgtaaagcggaagcggcgcaaatgattgccgcgatgcaaggttttcgagagttgtttgccggctctaatccgttgaaaaagttcttacgtggcgttggtttgacaatggcaggacaccttccgggtgctaaagagcaaatcatgagacgtgcgttgggattggatggcgaacttcctgagttggcgaaacgtcgtcaactagagctgattcgctcatag

SEQ ID NO: 72 - protein, 410 aa, Vibrio vulnificus
MIQSVDVAIVGGGMVGLALAAAFKDSDLRVAVIEGQAPNLQMNELPDVRVSALSRSSEHILKNLGAWQSIVEKRASPYVAMEVWDQDSFGHIDFSADAMAQPDLGHIVENRVIQLALLEQVNKLDNVMVLMPCQCQSMSVGGSEVWLSLDNGQALTAKLVVGADGANSWVRRQQDIPLTHWDYGHSAIVANVRTVEPHCSVARQIFTPQGPLAFLPMSEENMTSIVWSTESLRATCLMAMSDSEFNKALSAEFDMRLGLCEVVGERFSVPLKMRFARDFVKERVALIGDAAHTIHPLAGQGVNLGLLDAASLAQEILALWQRGEDIGTKRNLRRFERWRKAEAAQMIAAMQGFRELFAGSNPLKKFLRGVGLTMAGHLPGAKEQIMRRALGLDGELPELAKRRQLELIRS

SEQ ID NO: 73 - DNA, 1179 bp, Photorhabdus luminescens
  CDS (1)..(1179)
atgaacgtgattatcgttggtggaggcatgaccggcgcgacgcttgcgctggcgatatcttccctgagtaaggggcagatccatgtgtccctgattgaagcagcagagccggagcagaaacatcccggctttgatgccagagcgatagcgctggcttacggtacttgtcagcgtttacaacagattggtgtttggtctgctctggaagattatgtgataccaataactcacgttcatgttagtgatcgtggtcatgcagggtttgtgaatctttatgcaaaagaatataacattccagcgctaggtaatgttattgaattgtatgatgcagggcagggtttgttcggattgctgaaaaatgcgcctggtgtaacgctatattgtccatccaaggttatggctgttgaaagaactttgtcatcggttgctgtcattttggacagtggcgaacgattgcaaggtgaattgctggtagcagcagatggcagtcattctgccattggtcacgcttgtaatattcagtggcagcggcatgcttatgagcaggttgccgtgattactaatgtactgacttcagagcatccgcgaggtagggcatttgaacgtttcaccgaatatggcccacttgctttgctgccaatgtctgaggggcggagctcgctggtatggtgccatcagttggcgcggagaaaggagatagcgggttggaataatgagcaatttcttaggcagttacagcaagcatttggctggagactggggaaaatattggaaaccggccagcgttatcgctatccattgacactatctactgcaaatcaacaaattagccaccgattggcgctggtgggaaatgctgcacaaacattacatccgattgcgggtcagggctttaatcttggtatgcgagatgttatgacactggctcagattgtttctgaggcttttgctgctggtcaggatattggtgcttaccaggtcctggctaactatcaacagcaacgggttttagatcgggaaaacaccattgatattaccgatggattgatacgggtatttgccaatcgttattttccattacaaatcgggcgtaactttggcctgatgatgatggaaaaatgccctcctatgcgggatatactggcccgtcagactctaggttgggtcgcccaaagataa

SEQ ID NO: 74 - protein, 392 aa, Photorhabdus luminescens
MNVIIVGGGMTGATLALAISSLSKGQIHVSLIEAAEPEQKHPGFDARAIALAYGTCQRLQQIGVWSALEDYVIPITHVHVSDRGHAGFVNLYAKEYNIPALGNVIELYDAGQGLFGLLKNAPGVTLYCPSKVMAVERTLSSVAVILDSGERLQGELLVAADGSHSAIGHACNIQWQRHAYEQVAVITNVLTSEHPRGRAFERFTEYGPLALLPMSEGRSSLVWCHQLARRKEIAGWNNEQFLRQLQQAFGWRLGKILETGQRYRYPLTLSTANQQISHRLALVGNAAQTLHPIAGQGFNLGMRDVMTLAQIVSEAFAAGQDIGAYQVLANYQQQRVLDRENTIDITDGLIRVFANRYFPLQIGRNFGLMMMEKCPPMRDILARQTLGWVAQR

SEQ ID NO: 75 - DNA, 1221 bp, Photorhabdus luminescens
  CDS (1)..(1221)
atgcaatcatttgatgtggttatcgctggtggcggtatggttggtttagcgcttgcctgtggcttacaaggcagtggcttgcgagtggctgtggtggagagctatccgccgactcaatccgttgttgctggagaagagtacactttgcgggtttctgcgattaatgcagctagtgagcgcttattgcagcatcttggtgtgtggcaagatattttggatatgcgcaccagtccttatcaggaaattgaggtttgggagcgggatagctttggccgtattcggttcagtgcggctgaatatgggctggaatatcttggtcatatcattgaaaaccgagttatccgtgaaacattatggaaaaaagtagatagcttatctgacgtgaccattttggcacccgcggctttgaaacaggtagcttggggtgaaaatgaaacttttatgactttatccgatggtcgcatgttaactgctcgtttagttgttggtgctgatggtgctcattcatggttgcgtcaacatgctgatatccctctcacattctgggattatgaacatcatgcattggtagccactattcgcaccgaagagccgcacggctgggttgctcgtcaggtcttttatggtgagggtattttggcgtttttgccgcttgccgatccccatttatgttctatcgtctggtcactaccgggtgaagtcgcagaacagtacaaacagcttgatcataggcgtttcaaccagcaattggcggtagactttgatctgcgccttggtcaatgtgaactgatgagtgagcgtctgacgattccactgacgggtcgttatgcccgtaattttgcggctcatcgtctggccttgttgggagatgccgcccatactattcacccattggcaggccaaggtgtgaatttgggctttatggatgtcgctgagctgataggtgaattgcgtcgtttgcatggtcagggaaaagatattggtcagcacttttatttacgtcgttatgagcgccgacgtaaacatggtgctgctgtgatgctggccgggatgcaaggttttcgtcaattatttgatggcaataatccggcgaaaaaacttttgcgggatgtcgggttgtctctggcagataatttaccgggaattaaacctaaattacttcgtcaggcaatgggattgaatgacttgccgaattggctctgttcggctgaaaaaatctaa

SEQ ID NO: 76 - protein, 406 aa, Photorhabdus luminescens
MQSFDVVIAGGGMVGLALACGLQGSGLRVAVVESYPPTQSVVAGEEYTLRVSAINAASERLLQHLGVWQDILDMRTSPYQEIEVWERDSFGRIRFSAAEYGLEYLGHIIENRVIRETLWKKVDSLSDVTILAPAALKQVAWGENETFMTLSDGRMLTARLVVGADGAHSWLRQHADIPLTFWDYEHHALVATIRTEEPHGWVARQVFYGEGILAFLPLADPHLCSIVWSLPGEVAEQYKQLDHRRFNQQLAVDFDLRLGQCELMSERLTIPLTGRYARNFAAHRLALLGDAAHTIHPLAGQGVNLGFMDVAELIGELRRLHGQGKDIGQHFYLRRYERRRKHGAAVMLAGMQGFRQLFDGNNPAKKLLRDVGLSLADNLPGIKPKLLRQAMGLNDLPNWLCSAEKI

SEQ ID NO: 77 - DNA, 1170 bp, Chromobacterium violaceum
  CDS (1)..(1170)
atggattctacgatgagtgaacatgccgatgtgctgatcgtcggcggcggcccggtgggcgcgctggccgccttgaggctggcgcggcagggccgcagcgtgctgctgctggaggcgcgcgcgaaagacgccgaggtgcgcgacgcccgcgcgctggcgttgtcctggcatagccgccgcctgctggaagaggccggcgcctggccggccgacctgccggccacggcgatagacaccgtccacgtgtcgcagcagggcggttgcggccgcacccggctggacagcgcggacctgggtctgccgcacctgggcgcggtggtcgattacccggccttggtcgctggcctgggcggcgcgctggaggcggcgggcgtgcaggtgatatggcaatgccgggtgacggcggtgaagagtctgagccagtacgcatgcgccgaggtggaaacgccgcagggcaagcagctgctgaccggcagcctgctggtattggccgagggcggcgcgctggctgagacgctgccgggcatccgccggctgacacatgattaccgtcagtgcgcgctgctggccgaggtggagaccgaactgccgccccagggcgtggcgtacgagcgcttcgcccacgccgggccgttcgcgctgctgccgcacggcgagcgctacatgctggtgtggacccgcagccaggccgatgccgagcggctggccgccgccgacgcggcggtattgcgcgacgagctgcagcaggctttcggagagcgccagggacggatattgtcgatcgggcccagggccagtttcccgctggcgctgcgccaggccaaccgggtgaccagcgggcgggtggcgctgatcggcaatgccgcccagaccatgcacccggtggcggctcagggcctgaatctgggcttgcgggatgcggtcggcctggccgacgcgctggagaacgcagccgacgccggcgacgcgcgcgcgttgaagcgctacgcggattcgcgcaagctcgacagccacgcggtggtcggcttcacccatggcttgatcaagctgttcgacggccatcacccgctgatgagccggctgcgcggcgtcggcatgacggcgctggacgcgctgccgtccttgcggcgcaaattcgccggccacctggtgttcggcgtgcggggataa

SEQ ID NO: 78 - protein, 389 aa, Chromobacterium violaceum
MDSTMSEHADVLIVGGGPVGALAALRLARQGRSVLLLEARAKDAEVRDARALALSWHSRRLLEEAGAWPADLPATAIDTVHVSQQGGCGRTRLDSADLGLPHLGAVVDYPALVAGLGGALEAAGVQVIWQCRVTAVKSLSQYACAEVETPQGKQLLTGSLLVLAEGGALAETLPGIRRLTHDYRQCALLAEVETELPPQGVAYERFAHAGPFALLPHGERYMLVWTRSQADAERLAAADAAVLRDELQQAFGERQGRILSIGPRASFPLALRQANRVTSGRVALIGNAAQTMHPVAAQGLNLGLRDAVGLADALENAADAGDARALKRYADSRKLDSHAVVGFTHGLIKLFDGHHPLMSRLRGVGMTALDALPSLRRKFAGHLVFGVRG

SEQ ID NO: 79 - DNA, 1152 bp, Chromobacterium violaceum
  CDS (1)..(1152)
atgcgttacgacaaatatcacgcggtcgtcgtcggcggcggcctggtcggggccagcctggccctggcgctggcgcgcgccggcaagcgggtggcgctgctggaggccggcgagcccgccgttgatggactggagcagggctgggacgcgcgcgtctacgcggtcagcccggccaaccggcgtttcctggatggcatgggcgcctggcccgacatggcgcggatcggcaccatcgcgtcgatggacgtgcgcggcgacgccggcgggcggatctcgttctcggcccgcgacgccgacgccgacgcgctggcctggatcgtcgagaaccgctggctgctggcctcgctgtgggcgcagctgcgcgacggcggcgcggagctgatcaccggcgcccgcgcccaggcgctggccacgacgcctggcgaagcccggctgaagctggaggatggccgcgaactggcggccgagctgctggtgggggccgacggcgccaactcctgggtaagaggtcagctgggcttgcaggccagcgtcaaaccttatggccagagcggcgtggtggccaatttctcctgcgagcagccgcatcaaggcgtggcgcggcaatggtttttcggcgacagcatcctcgcctggctgccgatggcagggaaccgaatatcgatggtctggtccactcctgatccgcagtcgctgctgcagctgtcgaacgaggaattggccgcgcgcgtggcggaggccggcgggcgccagctgggcgcgtttgcgaccctcacgccggcggcggccttccccttgcggctgatccagcccgaggcggtggtcagcgagcgggtggcgctgataggcgacgccgcccacaccgtccatccgctggccgggcagggcgtcaacctgggtttccaggacgcggcccaactggccgcgctgctgggcgccgcgcccgattgcggcgactggatgctgctgcgccgctaccagcgccagcgccgcgaggcggtggccgcgatgcaactcggctgcgatggcttgtaccggttgttccatgcgaaactgcccggtctgccatggctgcgcaataccggcctgtccctgaccaactgcctgaccccgttgaaacggcagttcgccaggcaggcgattggatactga

SEQ ID NO: 80 - protein, 383 aa, Chromobacterium violaceum
MRYDKYHAVVVGGGLVGASLALALARAGKRVALLEAGEPAVDGLEQGWDARVYAVSPANRRFLDGMGAWPDMARIGTIASMDVRGDAGGRISFSARDADADALAWIVENRWLLASLWAQLRDGGAELITGARAQALATTPGEARLKLEDGRELAAELLVGADGANSWVRGQLGLQASVKPYGQSGVVANFSCEQPHQGVARQWFFGDSILAWLPMAGNRISMVWSTPDPQSLLQLSNEELAARVAEAGGRQLGAFATLTPAAAFPLRLIQPEAVVSERVALIGDAAHTVHPLAGQGVNLGFQDAAQLAALLGAAPDCGDWMLLRRYQRQRREAVAAMQLGCDGLYRLFHAKLPGLPWLRNTGLSLTNCLTPLKRQFARQAIGY

SEQ ID NO: 81 - DNA, 1182 bp, Chromobacterium violaceum
  CDS (1)..(1182)
atggaacaccgcgacatcgtcatcgtcggcggcggcatggtgggcagcgcgctgggcgcggcgctctcgggcaagggcctgtcggtctctgtgctggaacgggaagcccccgcgccgttcgcgccggaacaggcgccggacctgcgggtctcggcgatcagcccggcttccgccgcctttctgcaaaccatcggcgcctggggccaggcgctggcgatgcgcgccgcgccctatcgccgcatgcaggtctgggagcgggacgaggccgccggcacgctgttcgacgccgccgaggccggcgtgcccgaactgggccacatcgtggaaaaccgcgtggtgcagctggccgccaccgaggccttgctggccaagggcgacatcgactaccgctgcccggccgtggtgtcggacatcgtctaccgtccccaagcctcccagttgacgctgtcggacggcagcaggctgcaagccaggctgctgatcgccgccgacggcgcccgctctcaggtgcgcgacgccgccggcatcggcgtcaccggctgggactacccgatgcacgcgctggtcctgtcctgccggatcgacggcggccagcaggacatcacctggcagcgcttcacgccggacggcccgcaggccttcctgccgctaagcggcgacgcggcctccctggtgtggtaccaccggcccgaagaggtgaagcgcttgctgacgctgggcgacgacgagctgatcgccgccgtcagccaagcgtttccgcgcaagctgccgggcatccgggagctggcggcgcgcggcagcttcggcctgacccgccgccacgcccaatgctacgtcaaggacggcgtggcgctggccggcgacgccgcccacaccatccacccgctggcaggccagggcgtcaacctgggcttccaggacgcagcgatgctggcccggaccattctggacgcccatgccaagggagaggattgggcgagcgggaagacgctggtgcgctatcagcgcgcgcgcaagcccgccaacctggcgatgcaggccggcatggacgccttctgctacggctttgccaacgatatcggcccgctgcgcctgctgcgcggcctgggcttgcggctggcagacaaggccgggccgctgaagcgcgaggcgatacgctacgcgctggggctgcgcgcctga

SEQ ID NO: 82 - protein, 393 aa, Chromobacterium violaceum
MEHRDIVIVGGGMVGSALGAALSGKGLSVSVLEREAPAPFAPEQAPDLRVSAISPASAAFLQTIGAWGQALAMRAAPYRRMQVWERDEAAGTLFDAAEAGVPELGHIVENRVVQLAATEALLAKGDIDYRCPAVVSDIVYRPQASQLTLSDGSRLQARLLIAADGARSQVRDAAGIGVTGWDYPMHALVLSCRIDGGQQDITWQRFTPDGPQAFLPLSGDAASLVWYHRPEEVKRLLTLGDDELIAAVSQAFPRKLPGIRELAARGSFGLTRRHAQCYVKDGVALAGDAAHTIHPLAGQGVNLGFQDAAMLARTILDAHAKGEDWASGKTLVRYQRARKPANLAMQAGMDAFCYGFANDIGPLRLLRGLGLRLADKAGPLKREAIRYALGLRA

SEQ ID NO: 83 - DNA, 1473 bp, Neurospora crassa
  CDS (1)..(1473)
atggaagcagtagcaaggagaaaagcagctgcctatgtctgcttgagttgtacccggcaattccaacgacacattcgacgacaataccacaacgccgccccacgacctgatatctacgatgtcgtgtgtgttggtggaggaccggcaggtctgagtctcttgactgccctgcgcgccaaccctgtcacctcccacctccgtgttgccctagtcgaagcccaggatctatccaaagtcaagtcatggaagctaccgccaagcaagtactcgaaccgatgcagctccctcacgcccacatccgctttctatctcgaccagattggtgcctgggaacatctcgatcaaaccagagtccaaccgtaccacgaaatgcaagtctgggatggcgttacggatgcccggatcgaatttgactgggcacccggttcggccctggtagaaggaaccaccatcgcttacatgaacgaaaacctcaacctcacatccggtctactgaagcgactggagcaactgggtggtgtatcggtattcgagggtgctaaagttgagaacatcacctttggcgaggagacggaggacctggatcttaggcaatggcctgtcgtacacatttctggaggcaagcagcttactgcccgccttttggttggagccgacggagcaaacagcccagtccgtgccttcgcgggtatcgatgcgaagggttgggattacaacagacacggcgtggtggccacgctagagatggagggcgagggttggggcggagagcacaccaagattgcctaccagaggttccttcccaccggtcctgtggctatgctgcccatgcctggaaagtattcgacacttgtctggtccacaaccccggagaatgcctcaatactcaagagcctctcgcccaaggattttgtggctatggtcaacgcagcattccgtcttagtccagtggatctggccttcatgcacacacaaggggcgaaccaagactatgagtattcgtggaggttacaacacacatccttcaacccgcgggcaatcccgcagaccgtagttggagttcaggaaggcacgattgcctctttcccattaaaaatgcgccacgctgatacctatattggagagcgtgtcgctttggtaggcgatgccgctcacaccattcatccactggcaggccagggcttgaaccagggccagggcgatgtgcagagcttggccaagacgatcgagcacgccgtcacccatggacaggatattggaagtatcatgtcactcgagtcgtacgtatcggaacgatacacagcaaaccatgtgcttcttggggtcgttgataagctccataagctctattctgccgaaagcggcccgttagtgcccttgaggtcactgggcttgaacgcagtcaatgctcttgggccgttgaagagcttcttcatgaagcaggctgcaggaagcggcaccaagctcttctga

SEQ ID NO: 84 - protein, 490 aa, Neurospora crassa
MEAVARRKAAAYVCLSCTRQFQRHIRRQYHNAAPRPDIYDVVCVGGGPAGLSLLTALRANPVTSHLRVALVEAQDLSKVKSWKLPPSKYSNRCSSLTPTSAFYLDQIGAWEHLDQTRVQPYHEMQVWDGVTDARIEFDWAPGSALVEGTTIAYMNENLNLTSGLLKRLEQLGGVSVFEGAKVENITFGEETEDLDLRQWPVVHISGGKQLTARLLVGADGANSPVRAFAGIDAKGWDYNRHGVVATLEMEGEGWGGEHTKIAYQRFLPTGPVAMLPMPGKYSTLVWSTTPENASILKSLSPKDFVAMVNAAFRLSPVDLAFMHTQGANQDYEYSWRLQHTSFNPRAIPQTVVGVQEGTIASFPLKMRHADTYIGERVALVGDAAHTIHPLAGQGLNQGQGDVQSLAKTIEHAVTHGQDIGSIMSLESYVSERYTANHVLLGVVDKLHKLYSAESGPLVPLRSLGLNAVNALGPLKSFFMKQAAGSGTKLF

SEQ ID NO: 85 - DNA, 1206 bp, Haemophilus ducreyi
  CDS (1)..(1206)
atgataataggcatcatcaaatcagcaagagaagcaacgatgaaaaaagatgtgattattattggtggcggtatggtcggggcagcaactgctttaggattggcaaagttaggcttaaacattgcgttgattgaaaaaaaaccattacccctctttcaatcggattctgcttatgacttacgtatttctgcaattagcattgcttccgtaaatttattagcagaattaggtgtatggcaacagatccaagcaatgcgtgtttgccgttacgatagcttggaaacttgggaagttgaaggctttagcacccgctttactgcggaggaaattggtctagataccttaggttttatggtcgaaaataagctcattcaaatgagtttatggcaggcacttaacctctattccaactgccaacaaatagttggttttgccgaacttactgctgaatatcattcagctggctggacgattacggttgacgatcaaactttctctacctcattaatcattgccgcagatggcgctaactctcaagttcgccattgggcaggtatcggactaactagctggcaatatcggcaacactgtttactcgcaacggttaaaactgctttacccactcaatctgttacttggcaacaattctttccaacaggtccacgtgcttttttaccgcttgcagatcaaaatggttgtgtcgtttggtacgatgcaccacagcggattgccgaactaacacagttatcacctgaacaattagcattaaccattatgcaaaactttcctacgcgcttaggtgaaatagaagtgatacaagctggcagttttccactcactcgccaacatgcgcaacactatactcacaatggggtggtattgattggagacgcggcccacacgattaatccgttagcagggcaaggggtcaatttaggttttaaagacgtaaaagtattacttgaagtgatccgccaagcgctcgaaaaagggcaatcttttgctgatgaacaagtgttaaaacagtatcaacaacaacgcaaagcagataatttgattatgcagactagtatggacttattttacaaagcatttaaaagcgaattattccccgttaaagtgatgcgcaatctggctttaatgttggcagagaaaatcacaccactcaaaaaacaagcattgaaatatgcgattgggcttaaatag

SEQ ID NO: 86 - protein, 401 aa, Haemophilus ducreyi
MIIGIIKSAREATMKKDVIIIGGGMVGAATALGLAKLGLNIALIEKKPLPLFQSDSAYDLRISAISIASVNLLAELGVWQQIQAMRVCRYDSLETWEVEGFSTRFTAEEIGLDTLGFMVENKLIQMSLWQALNLYSNCQQIVGFAELTAEYHSAGWTITVDDQTFSTSLIIAADGANSQVRHWAGIGLTSWQYRQHCLLATVKTALPTQSVTWQQFFPTGPRAFLPLADQNGCVVWYDAPQRIAELTQLSPEQLALTIMQNFPTRLGEIEVIQAGSFPLTRQHAQHYTHNGVVLIGDAAHTINPLAGQGVNLGFKDVKVLLEVIRQALEKGQSFADEQVLKQYQQQRKADNLIMQTSMDLFYKAFKSELFPVKVMRNLALMLAEKITPLKKQALKYAIGLK

SEQ ID NO: 87 - DNA, 1194 bp, Candidatus Blochmannia floridanus
  CDS (1)..(1194)
atgaataaattattttgtgaagtattaatatttggagctggtattgtgggttcatctttagctttaagtttagctaaatctggaatcaaagtaattataacagataataaacaatttgatataaccatgaataatagtattttaccaaatataagagtttctgcaattaattatgcttcagtaagattttttaaaaatattaagatctggaacaatataccttctaaattttgtacatcatattgtcatttaaaggcgtgggagtggccatcagcaacgctaacttttcattctaaatctgtaggattatcagaaatgggatatattgtagaaaataatcgtttaaaattagctttgtggcaaggtatagaagatgtttctacaataacatttttttgtccatccaaattaatttctttagaatatgatggtacatattggaaatgcttgcttagtaatagtattgtaataaatagccgtttattaattggagctgatggtattgattctaagattcgtacgatattgggaattaatattacagaatggaaatataatcaatgttgtatgttaataactacaaaaactatcacacagaaatggaaaaaatgtaatgaaactatctggcaagtttttaccccacaaggtcctataggatttttacctttacatgataactggggttcattaatgtggtttggatccaatgaatacattcaaaggttacaaaaattaccacaatcagcattagaagcaaaaattaaccattgtttttataaacaattaggtaaaattaaattatgtaatacatttgtagtgcctttaattcatagatgtgctcaacgttatatagctgcaggaggagctttagtaggagatgcggcgcatactattcatccactagccggtcaaggattaaatttaggtatccgagatgttctaagtttatctaaattattatccaacagctttgattttagtcaaaatattattaatttagatagagtattattttcttatcaaagtaaccgacaatttgacattaatattatgaaatctagtatagatttcatatattttatttttcataataacttattaccacttaaaataacacgtaatattgctttcatggcaatagaacgattttcttatataaaaagaaaaattttacaatatgctatgggagtatag

SEQ ID NO: 88 - protein, 397 aa, Candidatus Blochmannia floridanus
MNKLFCEVLIFGAGIVGSSLALSLAKSGIKVIITDNKQFDITMNNSILPNIRVSAINYASVRFFKNIKIWNNIPSKFCTSYCHLKAWEWPSATLTFHSKSVGLSEMGYIVENNRLKLALWQGIEDVSTITFFCPSKLISLEYDGTYWKCLLSNSIVINSRLLIGADGIDSKIRTILGINITEWKYNQCCMLITTKTITQKWKKCNETIWQVFTPQGPIGFLPLHDNWGSLMWFGSNEYIQRLQKLPQSALEAKINHCFYKQLGKIKLCNTFVVPLIHRCAQRYIAAGGALVGDAAHTIHPLAGQGLNLGIRDVLSLSKLLSNSFDFSQNIINLDRVLFSYQSNRQFDINIMKSSIDFIYFIFHNNLLPLKITRNIAFMAIERFSYIKRKILQYAMGV

SEQ ID NO: 89 - DNA, 1278 bp, Bartonella tribocorum
  CDS (1)..(1278)
atgtattctgatcaccataaagatgtaaaacccaataaaaaaataaaatctcataaaatcaagcagtgtgaccttctcattgcagggggagcggctgtcggtttaacactcgcaatagcactcaagcaaacagcccctaatctgaaaataaatatcgttgatgctgctccacaaggagatattcctgcttctaatatacgaacaatcgcccttgctgctgctgctgttcgtatgttaaaacaattgcaatgttgggaacctatacaaccctatgcacaacccattcactctatgatcatcacagatacaagcataagtgatcctgtcaaaccaactcttttaacctttgaaggcgacattacccccggtgaaccctttgcaactatggtagaacatagagaactcatcaacactttaaaaaaacgtgtcaaagatcttgatatccctgttatggcaaacacacgtgtcattgattttcatcaagacaaccaatacatagctaccactttaaataatgaagagatttggcaaacaaaattgctcattgcagccgacggagcccattcaaaattacgccaaaaagcaggtcttaaaaacttttctcatgcctataaacaaacagcaatcatctgcacagttgaacatgaaaaaccccatcatggtcaagcaattcaacattttttacccgctggccctttcgctcttctccctctcaaaggcaaccgatccgccattgtatggaatgaagaccataaaactgcgcaatattaccttaaagctgatgcactgatttttgaaacagaactcgaaagacgcattggtcatcgattaggaaaactctcttggaatggtgaacgtcaagcttttcccctaaacctttctttaacacgtcaatgtattaaaccccgttttgccctcattggagatgctgcccataccatccaccccattgcaggacaaggactcaatttaggattacgtgatagcgctgctctcgctgaagtgattattgaaacagcacgattaggtcttgacattggctccctcaccgctttagagcgctatcaaagctggagacgttttgaaattgtccgtatggctttaagcaatgattggcttaataaacttttttctaacgataatcttctcttacggatgcttcgcgataccggtcttggtattgtcaatcaaacgccaaaaataaaaaaatatttcattcaagaagctgctggccttaccccaaatgcgccccgtctcctaaacggcttcccgctttaa

SEQ ID NO: 90 - protein, 425 aa, Bartonella tribocorum
MYSDHHKDVKPNKKIKSHKIKQCDLLIAGGAAVGLTLAIALKQTAPNLKINIVDAAPQGDIPASNIRTIALAAAAVRMLKQLQCWEPIQPYAQPIHSMIITDTSISDPVKPTLLTFEGDITPGEPFATMVEHRELINTLKKRVKDLDIPVMANTRVIDFHQDNQYIATTLNNEEIWQTKLLIAADGAHSKLRQKAGLKNFSHAYKQTAIICTVEHEKPHHGQAIQHFLPAGPFALLPLKGNRSAIVWNEDHKTAQYYLKADALIFETELERRIGHRLGKLSWNGERQAFPLNLSLTRQCIKPRFALIGDAAHTIHPIAGQGLNLGLRDSAALAEVIIETARLGLDIGSLTALERYQSWRRFEIVRMALSNDWLNKLFSNDNLLLRMLRDTGLGIVNQTPKIKKYFIQEAAGLTPNAPRLLNGFPL

SEQ ID NO: 91 - DNA, 1167 bp, Nitrosomonas europaea
  CDS (1)..(1167)
atgaaattcgatattgtagtgatcggaggtgggctggcaggagccagtctgctggctgctctcaaaggtagcgggctcagactggcgctgatcgagtcacggccgcctgcgccattgcccgacgatgatagctgggatgcacgggtgtatgcgatcagcccaggcagtgtggagttcttgcagtcctccggtatctggcaacgaatgaatgcagcgcgtattacgcctgtccatgaaatgcgggtgcatggagacgataatgcggccagaatcgatttcagcgcttatgaaagtggtgtgccggaactggcctgtatcatcgagaatcggcagttgcagcatgccgtttgggaagaattggctggtgcggaaaatgtacagattttttgtcccgcacagtgtgactcacttgcctggcaagattctcatgtcgaactgactttggcagatggcacggttttgcagacagctttgctgatcggtgcagatggtatcaattcccgggtgcgtgagcaggcaggaatcggggttgaccgtcatagttattatcagacgggcgtggttgccaatttcgagacggagcgggtgcatcatcacattgcgtatcagtggtttcgccgtgatggcattctcgcacttctgccattgccggggaaacgagtttccatggtctggtcggcgaatacggcacttgcagatgaactgctcaatctgtccgccgaggcgttatgcgaccgggttgcccgggcagcggagtatgagctggggagcatgcggctcgttaccgcgccactcgggtttccgttgaacttcgtacatgccagatcactcattaaaccaagactggccttgatcggtgatgcggcgcatggcattcacccgcttgccggccagggagtgaatctcggattgcgcgatgttcgtgaactggctcgcctgcagcggcagtttggtggaataggggactgtggtgaattttctttgctgcgttgttatgagcgcaatcgcaaggaggatattctcgccatgggatgggtgacggatggactgcagaaactatttggcagtgaggatgcagcaatcatgcgcatcaggaatgtggggctcgggattaccaaccgtctgccacttctgaaaaacaggttgatgcgccatgcgctgagctga

SEQ ID NO: 92 - protein, 388 aa, Nitrosomonas europaea
MKFDIVVIGGGLAGASLLAALKGSGLRLALIESRPPAPLPDDDSWDARVYAISPGSVEFLQSSGIWQRMNAARITPVHEMRVHGDDNAARIDFSAYESGVPELACIIENRQLQHAVWEELAGAENVQIFCPAQCDSLAWQDSHVELTLADGTVLQTALLIGADGINSRVREQAGIGVDRHSYYQTGVVANFETERVHHHIAYQWFRRDGILALLPLPGKRVSMVWSANTALADELLNLSAEALCDRVARAAEYELGSMRLVTAPLGFPLNFVHARSLIKPRLALIGDAAHGIHPLAGQGVNLGLRDVRELARLQRQFGGIGDCGEFSLLRCYERNRKEDILAMGWVTDGLQKLFGSEDAAIMRIRNVGLGITNRLPLLKNRLMRHALS

SEQ ID NO: 93 - DNA, 1236 bp, Coxiella burnetii
  CDS (1)..(1236)
atgcgatctgagttaaagaaaaaaccgatagccattgttggcgccggcatggtgggattattattggcaaggctattagcaaaagccaaaataaataccgtcattgtcgaggcaaaaaaaccgttattacgttggaataaagaaactttagattcgcgcgtgagcgctattaatgctgtttcaacacggttgttaaaaacggcagacgtttggcaagacattcggaaaccgacttattcgcctttggttaaattaaaagtttgggatggtcttgggggcgctaaaattacttttgatagtgccgaagtgggcgcttgcgcgttaggcgctatcgttgagaatcgtgaaataattcgcgcgttatggcaaaaatgccaagaggatcctttcgtcgaatttatttgtccggcaaaaccgaaacaattgtttcatacgatggatttcgtcgagcttgaattagataacgatcgaaaaattcaaacgccgtgcgtggtaggtgccgacggggggcattcttggttgcgtcaacacatgtccattgaaattaatgagcggccttacgaacaaagcgcagtagtgacggtggtcaaaactgaaaatgcacatcagcaaacgggttggcaagtttttttaccgaaggctgttttagcgttgttacctttggctgatccacaccattgcgccattgtttggtcggtggctacggaaaaagccaatcatttaatggcgttggatgaaactgaatttaacgaagaattaaataatgcgtttggattgcgattaggaagaattcaacgactcactgagcctaaagccattcccctcattatgcgtcatgccaaaaaatacatcggttcacgcatggcattaattggtgatgccgcgcatacgattcatccgttagcgggacaaggcgttaatttaggctttatggatggcgcttgtttagctcaatgttttatcgacgcccatcaaaaaaaccaggatcttggcaacttacgcacattgcgccgttatgagcgttggcgaaaaggcgataatacaataatgctagccgccatgcgtctttttaaagaatgtttcggtgctcagtttccatttatggtacaagcgcgcaatatcggattaaatattacggatcgccttaacccagttaaaaattgttttatgaaaattgcaatgggtgaagtgagcgaattacccaatttaattaaccacatgccgttatttgcttaa

SEQ ID NO: 94 - protein, 411 aa, Coxiella burnetii
MRSELKKKPIAIVGAGMVGLLLARLLAKAKINTVIVEAKKPLLRWNKETLDSRVSAINAVSTRLLKTADVWQDIRKPTYSPLVKLKVWDGLGGAKITFDSAEVGACALGAIVENREIIRALWQKCQEDPFVEFICPAKPKQLFHTMDFVELELDNDRKIQTPCVVGADGGHSWLRQHMSIEINERPYEQSAVVTVVKTENAHQQTGWQVFLPKAVLALLPLADPHHCAIVWSVATEKANHLMALDETEFNEELNNAFGLRLGRIQRLTEPKAIPLIMRHAKKYIGSRMALIGDAAHTIHPLAGQGVNLGFMDGACLAQCFIDAHQKNQDLGNLRTLRRYERWRKGDNTIMLAAMRLFKECFGAQFPFMVQARNIGLNITDRLNPVKNCFMKIAMGEVSELPNLINHMPLFA

SEQ ID NO: 95 - DNA, 1182 bp, Shigella flexneri
  CDS (1)..(1182)
atgaccatgacaaatcaaccaacggaaattgccattgtcggcggaggaatggtcggcggcgcactggcgctggggctggcacagcacggattttcggtaacggtgatcgagcacgcagaacctgcaccgtttgtcgctgacagccaaccggacgtgcggatctcggcgatcagcgcggcttcggtatcattgcttaaagggttaggggtctgggatgcagtacaggctatgcgttgccatccttaccgcagactggaaacctgggagtgggaaacggcacatgtggtatttgacgcagccgaattaaagttgccgttgcttggctacatggtggaaaacacagtcctgcaacaggcgttgtggcaggcgctggaagcgcatccgaaagtaacgttacgtgtgccaacctcgctgattgcattacatcgagataatgatcttcaggagctggaactgaagggcggtgaaacgatccgcgcgaaactggtgattggtgccgacggcgcaaattctcaggtgcggcagatggcgggaattggcgttcatgcctggcagtatgcgcagtcgtgcatgttgattagcgtacagtgtgagaacgatcccggcgacagcacctggcagcaatttaccccggacggaccgcgtgcgtttctgccgttgtttgataactgggcatcgctggtgtggtatgactctccgacgcgtattcgccagttgcagaatatgaatatggcgcaactccaggcggaaatcgcgaagcatttcccgtcgcgtctgggttacgttacaccgcttgccgctggtgcgtttccgctgacgcgccgacatgcgttgcagtatgtgcagccggggcttgcgctggtgggcgatgccgcgcataccatccatccgctggcggggcagggggtgaatcttggttatcgtgatgtcgatgccctgattgatgttctggtgaatgcccgcagctacggtgaagcgtgggccagttatcctgtcctcaagcgttaccagatgcggcgcatggcggataacttcattatgcaaagtggtatggatctgttttatgccggattcagtaataatctgccgccgctgcgttttgtgcgtaatctcgggttaatggcggcagagcgtgctggcgtgttgaaacgtcaggcgctgaaatatgcgttagggttgtag

SEQ ID NO: 96 - protein, 393 aa, Shigella flexneri
MTMTNQPTEIAIVGGGMVGGALALGLAQHGFSVTVIEHAEPAPFVADSQPDVRISAISAASVSLLKGLGVWDAVQAMRCHPYRRLETWEWETAHVVFDAAELKLPLLGYMVENTVLQQALWQALEAHPKVTLRVPTSLIALHRDNDLQELELKGGETIRAKLVIGADGANSQVRQMAGIGVHAWQYAQSCMLISVQCENDPGDSTWQQFTPDGPRAFLPLFDNWASLVWYDSPTRIRQLQNMNMAQLQAEIAKHFPSRLGYVTPLAAGAFPLTRRHALQYVQPGLALVGDAAHTIHPLAGQGVNLGYRDVDALIDVLVNARSYGEAWASYPVLKRYQMRRMADNFIMQSGMDLFYAGFSNNLPPLRFVRNLGLMAAERAGVLKRQALKYALGL

SEQ ID NO: 97 - DNA, 1551 bp, Oryza sativa
  CDS (1)..(1551)
atgctctccagaggaagatgtttcccggcggcgagtcggatccggccgctggtcagggccttctgcgacgtgccgccttcgctccaggatgcggccgccggggtgcccagctcgcaggatcacacagagaaggttgatgatgtgaaagctagacccgacgagctcgacattgctatcgttggtggaggcatggtgggattggctgttgcttgtgcattgtccaatatgccattgactaaacatctgagggttggcatcattgatagcaatcctgcattgaagtcaagaaattatctgaagaaagatggtgtacctgattcaagggtcagtactattactcccgcgaccatatccttcttcagagatattggtgcatgggatcatgttcaacagcaaagacacgctttctttggtaaaatgcaggtatgggattacactggactgggttacacaaggtatagtgcaagggatgtgggaaaagaatatctcggatgcgtggtggagaacaaggtgctttgcaactcactgttgttacgattacaggaggaaaatggagacattgaaaagatgatctaccctactagactgatttctcttgctttgccatcaaagagcagacaagcaccaacaagggaagcaatatccagtggttaccctccagaagaattaaatcgcagcaatttagttaaacttgagctaagtgatggacaaactttatattcaaaactagtggtgggagctgacggttccaagtccaatgtaaggcaaacagcaggcataaaaacaacagggtggaattatcctcaaagtgcaattatttgtacagtggagcatattaccgaaaacgattgtgcatggcagaggtttctcccttctgggccaattgctctacttccaataggtgacaactacagcaatattgtgtggacaatgagcccagaggagtcattgcgccataagtcaatgagtcctgaagattttgtgaagtctgtgaacaatgcattggattttggttacggtccacatccacactctggtagtcttgactattacatggaaaagttattttctgacattggaagtactgctgcatctacaaaggaatgctttgaagtacctccaaaagcaatcggggtagtctgtgagagaatggcatttccattgtcgctgaagcattcacatgattatatttcaaaaaggttagcactagtcggtgatgcagctcatacagtccatcccttagctggccaaggtgtcaacttaggttttggagatgcagctgctttagcaaaagttatcgctgaaggagtttctgtgggtgctgattttggggatatttccttgctcaaaaggtatgagaataatcgcaaagcagccaatgttgcaatggcagcgctgctagatggtttccagaagatgtactctgttgattttggacccctcaatgtgcttagggctgcagcgtttcacggtgcccagtacatatcaccactgaagaagaacataatctcgtatgcaatgggcgacgcgaaatggccgctgttttcatag

SEQ ID NO: 98 - protein, 516 aa, Oryza sativa
MLSRGRCFPAASRIRPLVRAFCDVPPSLQDAAAGVPSSQDHTEKVDDVKARPDELDIAIVGGGMVGLAVACALSNMPLTKHLRVGIIDSNPALKSRNYLKKDGVPDSRVSTITPATISFFRDIGAWDHVQQQRHAFFGKMQVWDYTGLGYTRYSARDVGKEYLGCVVENKVLCNSLLLRLQEENGDIEKMIYPTRLISLALPSKSRQAPTREAISSGYPPEELNRSNLVKLELSDGQTLYSKLVVGADGSKSNVRQTAGIKTTGWNYPQSAIICTVEHITENDCAWQRFLPSGPIALLPIGDNYSNIVWTMSPEESLRHKSMSPEDFVKSVNNALDFGYGPHPHSGSLDYYMEKLFSDIGSTAASTKECFEVPPKAIGVVCERMAFPLSLKHSHDYISKRLALVGDAAHTVHPLAGQGVNLGFGDAAALAKVIAEGVSVGADFGDISLLKRYENNRKAANVAMAALLDGFQKMYSVDFGPLNVLRAAAFHGAQYISPLKKNIISYAMGDAKWPLFS

SEQ ID NO: 99 - DNA, 1998 bp, Neurospora crassa
  CDS (1)..(1998)
atggaccactgcgacgtcctgatagtcggagctggcccagtagggactactctagcccttgaactggctctgcaaggcgtatcattccgtatcatcgacaagagcccagcccgatcagagaaaagcagagccttaatcgttcacccccgtactctggagcttctagatcgccatggaactgttggccagctcatctctagaggtactatcacccgtggcggggtgttgaacatcaaccgaaaactggtagccagaatgaatttggatgatcttgacatcacggacacgagatatcctttgcctctgatggtctctcaagccgaaaccgagcagttcctggatgagtctctggccgactatggcaaggcggttgagcgggcttatactgctacgagcgtcgtccaggacgccaacggagtcaccacaactctagaaaagcccgacggcactcagaccacggttcgatccaagtacgtcgtcggttgtgacggcgcgcacagcttggtccgacattcagcgcagaaccttagctttgacggggacgcctacccacaagactttatcctctgcgacgcccgcctacgcaactccagcgttgcgcgggaccgcttcaccatttgtttcggcgacactggcctactggcattcttccctattcaatcatcccacagcgagagcaagggcgaggaaggtctcatccgcctcattgcatcaggtggccgctccgtcctcaaggactcatcaggatcaggatcagggtcccctgtggtccctgctgctgaacaacagcaacaacagcagcagcggcaacacggtgaacaaacccacgaaccccccaccctcgcgcacttccaatccctcgtggactccatcgcccctcccggctccggcaccgtccactcccccatctggctcgcccgcttccgcttacaccaccggggcgtcaactcgtaccggtccgaccgactctttgtggccggcgacgccgcgcacatccacagtcccgccggcggacagggcatgaacgtggggatccaggacgccatcaatctgggctggaagctggggacggtgctcaagtaccgggactcactgacggaggaggcaagggaggcgttgctggatagctaccacgccgagcgataccccgtggggagggcgctgcttcaggggacggataggatctttagcttcacggcagcggcgacttcgtgggtcctcaaagtgaggaatacggtgctgccgtgggtgatgccgtggctggttgggatgaagtggattaggaagaggttttatgggtttatttcggggtttgggacgacgtattcggggttggcaagtgcgggggagagttgtgtggtcggtggtggtgatggggtgaacacgtcttggtcgtcatggttatggtcatcctcatcctcatcctcatcctcatccttatcattgcggccggagaaggtgagcagcggtgatcgattgccggatggaaaggtaatcgagctagggcggcgatctcatggcgggataacggcttctgacctgttggcaaagagcgaagaaacgagcttgcatcaactttgtcgaggcgcgtcttggcatttgctgttgttctccggaataggtggaacagaaggtcgcgatgcggtgacggtcgagggattgacactggcaggcgagagggtattggcggtggtcaaaaaggaggatcgtggtagtagcgcggggcagcaggggcaacaacgcccgggcgatggtcagctgcagccggtgcagacagctacagctacaactacagctacagctacagctacagggaagagcgccgccgttgcttccacatatacggacccaggtggtcgggtccatggtgtgcttggattggacaatgggcgtgcgggatatgtcatggtgagacctgacggctatgtttctcacgttggatatctgccgtcactgcaggaattcatcaaggagtgggagacgagagtttgtctttga

SEQ ID NO: 100 - protein, 665 aa, Neurospora crassa
MDHCDVLIVGAGPVGTTLALELALQGVSFRIIDKSPARSEKSRALIVHPRTLELLDRHGTVGQLISRGTITRGGVLNINRKLVARMNLDDLDITDTRYPLPLMVSQAETEQFLDESLADYGKAVERAYTATSVVQDANGVTTTLEKPDGTQTTVRSKYVVGCDGAHSLVRHSAQNLSFDGDAYPQDFILCDARLRNSSVARDRFTICFGDTGLLAFFPIQSSHSESKGEEGLIRLIASGGRSVLKDSSGSGSGSPVVPAAEQQQQQQQRQHGEQTHEPPTLAHFQSLVDSIAPPGSGTVHSPIWLARFRLHHRGVNSYRSDRLFVAGDAAHIHSPAGGQGMNVGIQDAINLGWKLGTVLKYRDSLTEEAREALLDSYHAERYPVGRALLQGTDRIFSFTAAATSWVLKVRNTVLPWVMPWLVGMKWIRKRFYGFISGFGTTYSGLASAGESCVVGGGDGVNTSWSSWLWSSSSSSSSSSLSLRPEKVSSGDRLPDGKVIELGRRSHGGITASDLLAKSEETSLHQLCRGASWHLLLFSGIGGTEGRDAVTVEGLTLAGERVLAVVKKEDRGSSAGQQGQQRPGDGQLQPVQTATATTTATATATGKSAAVASTYTDPGGRVHGVLGLDNGRAGYVMVRPDGYVSHVGYLPSLQEFIKEWETRVCL

SEQ ID NO: 101 - DNA, 1182 bp, Xylella fastidiosa
  CDS (1)..(1182)
atgaaccgaactcagcgaccggatgtactcatcactggcggcggcgtcgtcggtgccagcagcgccctggcattggcgaaaacagggttacacgtcgccttgattgaaaaatacgaaccaccgcgttggcaagcaacggttccggatctgcgtgtctacgcatttgccccggacagtgccgcactcctgcgcaccttcaacgtatggccgaccgtgtgcgcgacacgcgcccagccataccatcacatgcggatctgggacagtggcggagcggatgaattgcacttcgacgctgccacattgggctgcgaacaactcggctggatcgtcgagaacgcactcctagtcaaccagttgtggtctgcacttgcggatgccggcgtacaactgcattgccctgcacggatcaccgccctagagcaagacaccgacagagtgcgtttacgcttggaggacggccggcgactcgaagcacgcctggccatcgctgccgacggcgccgactccaccttgcgtcaattggcgcacctgccagtacaccgacatgactatgcacaacgcagcattgtcgcctttgtcgcaaccgaacacccacaccaagccaccgcctggcaatgctttttaccaagcggaccattggcattgctgccatttactgatgagcgcagctcaatcgtctggacgctccccgatgttgaagcgcaacgcctcctgacactggacgaaacaacattcgcacgcgaactcaccactgccttcggtgggcgcctaggacacatacagctcatctcaccacgcaccgcattcccactgcgccgccaactggccaccgactacatcgccggtcgggtactgacactcggtgacgccgcacatgtcgtccacccactggccggacagggcgtcaacctcggtttgcgcgatgtaaccgcattgcaaaccctgatccaacaggcacacacgcgccatgttgactgggccacaccgcaccgcctgcaacgctgggcacggacacgccgcagtgataacaccctcgcggcctacacgttcgatgccattaaccgggtattctccaacgacgcatttcacctcaccctgctacgtggccgggtactgagcttggtcgaccgcctgccaccgctcgtcaacgccctatggcgtcgtgcctcaggggtgaattga

SEQ ID NO: 102 - protein, 393 aa, Xylella fastidiosa
MNRTQRPDVLITGGGVVGASSALALAKTGLHVALIEKYEPPRWQATVPDLRVYAFAPDSAALLRTFNVWPTVCATRAQPYHHMRIWDSGGADELHFDAATLGCEQLGWIVENALLVNQLWSALADAGVQLHCPARITALEQDTDRVRLRLEDGRRLEARLAIAADGADSTLRQLAHLPVHRHDYAQRSIVAFVATEHPHQATAWQCFLPSGPLALLPFTDERSSIVWTLPDVEAQRLLTLDETTFARELTTAFGGRLGHIQLISPRTAFPLRRQLATDYIAGRVLTLGDAAHVVHPLAGQGVNLGLRDVTALQTLIQQAHTRHVDWATPHRLQRWARTRRSDNTLAAYTFDAINRVFSNDAFHLTLLRGRVLSLVDRLPPLVNALWRRASGVN

SEQ ID NO: 103 - DNA, 1179 bp, Vibrio parahaemolyticus
  CDS (1)..(1179)
atgaagcaatatgacgtagtaattgctggtggtgccatggctggggctacactagctttagcgattgagcatttgtctcaaggggctttgcgtgttgccgttgttgaaccgtttaaagcgcaatctgatcagcatccgggctttgattcgcgctcgattgctttgtcttatggtacggttaacctgctgcgtcacttagagttatggtctgcgattgaacctttttcgaccccgattgaacacattcatgtgtccgatcgttctcatgcgggaatgacggacatcactaagcaagacgttggcgttgaagcgttaggttatgtcgtagagttagccgatgttggtcgtgtttaccaagaattgctgactcacagtaccgctatcgatttgtactgcccaaactccgcgaagcacattacccgaactcaagaaaatgtgacgattgagcttgctagcggtgagttgcttaatgcgaaattacttgttgccgccgatggtgcggtttcgcaatgttgtcagcaaattggtttggagctttctgagcatgatttcgaccaagttgccgtaattgccaatattgtgactcaagagccgcatcaaggtcgcgcatttgagcgttttactgaaaacggcccagttgccctgctgccaatgagtgataatcgaatgtcgctcgtgtggtgcttacgtcctgatgaagctcaaattgtaatggaattgtctgaaagcgaatttcttgaacggcttcagcaagattttggttggcgattaggtgcgatgcaaaaagtggggctgcgtgcgagctatccgttgttgcttcgtcaccgtaagcaaaatatttcacaccgttttgcgatagtcggtaacgcagcacaaacgttgcatcctattgctgggcagggcttcaacttggggatccgagacgtggtcactctcgctgaagaactggtcaagcaaggtgaagatgttgggcgttaccaaggcctgattcgctttagtcaacgccgagaagcagaccgcaacgaaaccatttggctaacaagctcgttagtccatgttttttcaaacgatttactcgcgatgcgaattgggcgaaatacagccttagccgcgatggataacctttctatttttaagcagcagctcttgcgccatactcttggtttagtgaaacgatga

SEQ ID NO: 104 - protein, 392 aa, Vibrio parahaemolyticus
MKQYDVVIAGGAMAGATLALAIEHLSQGALRVAVVEPFKAQSDQHPGFDSRSIALSYGTVNLLRHLELWSAIEPFSTPIEHIHVSDRSHAGMTDITKQDVGVEALGYVVELADVGRVYQELLTHSTAIDLYCPNSAKHITRTQENVTIELASGELLNAKLLVAADGAVSQCCQQIGLELSEHDFDQVAVIANIVTQEPHQGRAFERFTENGPVALLPMSDNRMSLVWCLRPDEAQIVMELSESEFLERLQQDFGWRLGAMQKVGLRASYPLLLRHRKQNISHRFAIVGNAAQTLHPIAGQGFNLGIRDVVTLAEELVKQGEDVGRYQGLIRFSQRREADRNETIWLTSSLVHVFSNDLLAMRIGRNTALAAMDNLSIFKQQLLRHTLGLVKR

SEQ ID NO: 105 - DNA, 1209 bp, Vibrio parahaemolyticus
  CDS (1)..(1209)
atgatgcaaagtgtagatatcgccatcatcggcggagggatggttgggttggcgcttgccgccgcattcaaagacagtgacctgcgtatcgccgtgatcgaaggtaacgtgccagatgaaacgttgaatgaactgcctgatgtgcgagtttctgcactgagccgctcaagtgaaaccattttacgtaagctaggagcttggcagggtattgagcaacgccgagcttcaccttactacggtatggaagtgtgggagcaagacagcttcgcaaaaatagagtttgatgcacaaaatatggcgcaacctgatttgggtcacatcgttgaaaatcgcgtgattcagttagcgttgttggaacaagtgcaaaagctagagaacgtaacgttattcatgcctgcgcgctgtgcgacactcgcggtcggtgaacaagagagttggttaacgctcgataacggccaagcgatgacagcgaagctggtggtgggcgcagatggcgcgaattcgtggctgcgtaaccagatggatattcctttgacgcattgggactacggtcaccatgcgttggttgctaatgtgaaaacagcggatccgcaccacagcatcgcgcgtcagatttttacacctcacgggcctttggcattcttgccaatgtctaaaccaaacatgtgttctatcgtttggtcgacagagccgaaccgagcggaagaattgctggtcatgagcgatgaagcgttcaacaaaacgctaaccagcgaattcgatgctcgtttaggcgtgtgtgaagtggtgggagagcgagcggcgtttccgctaaaaatgcgttatgcccgagactttgtagttgagcgtgttgcactggttggcgatgcggctcataccatccacccattagcaggccaaggcgtgaatctcggcttattggatgcagccagtctggcgcaagaagtactgactctttggaaacaagggcaagacattggtagtaaacgcaatctgcgtggctatgagcgttggcgtaaggctgaagcggcgaagatgattgcggcgatgcaaggtttccgtgatttattctctggtggccatccagcgaaaaaactggttcgcggtattggcttgagtttagcgggacaattaccgggtgctaaagatgagatcatgaagcgtgcactgggtttgaaggggcacctaccagaactggctcgtcaatag

SEQ ID NO: 106 - protein, 402 aa, Vibrio parahaemolyticus
MMQSVDIAIIGGGMVGLALAAAFKDSDLRIAVIEGNVPDETLNELPDVRVSALSRSSETILRKLGAWQGIEQRRASPYYGMEVWEQDSFAKIEFDAQNMAQPDLGHIVENRVIQLALLEQVQKLENVTLFMPARCATLAVGEQESWLTLDNGQAMTAKLVVGADGANSWLRNQMDIPLTHWDYGHHALVANVKTADPHHSIARQIFTPHGPLAFLPMSKPNMCSIVWSTEPNRAEELLVMSDEAFNKTLTSEFDARLGVCEVVGERAAFPLKMRYARDFVVERVALVGDAAHTIHPLAGQGVNLGLLDAASLAQEVLTLWKQGQDIGSKRNLRGYERWRKAEAAKMIAAMQGFRDLFSGGHPAKKLVRGIGLSLAGQLPGAKDEIMKRALGLKGHLPELARQ

SEQ ID NO: 107 - DNA, 1176 bp, Vibrio parahaemolyticus
  CDS (1)..(1176)
atgaacaagtatgacatcgccgtaatcggtggcggcatggtcggggcagctgtcgcagttggatttgccaagcaaggtagaagcgtagtggtagttgaaggagcggagcctaaagcattcgatgctgctcaagctctggacgtgcgagtttctgctatttcacatcaatcggtgaaattacttgaatcattagatgcttggtcggcgatcgaagcaatgcgcgtctgtccttatcgtcgtctggaaacgtgggagcatcctgagtgtcgtactcgttttcattctgatgagctttcattggatcaacttggctacatcgttgaaaaccgcctaatccaacttggcctttggcaagctttcgcgcaattcgacaacttaacggtgaagtgtcctgagcgattaaaagatatcgacttcaatgatggaaaccgtatcacgctagaaagcggcgaacagtttgatgcgaactggatcattggcgctgatggtgccaattctaaagtacgtcagctagcgggtattggcgtgactgcttgggattaccgtcaacattgtatgctcatcaatgttaagactgagttgccacaacaagacattacttggcaacagttcacccctagtgggcctcgctctttcctacctttgtgttcattgacagaagatggacaagaagtcgggcaaggatctttagtttggtatgattccccaaaacgaatcaaacagctttgcgcgatgaccaaacctcaattaagagaagagatcgtgcgtcactttcctaaagagcttggagatatcgaagttctgcagtttggttctttccctttgacacgtcgacacgcgcagtcctattcgcatagaggttgtgtgctagttggtgattcagcgcatacaatcaatccattagcggggcagggcgtgaatttaggctttaaagacgttgatgtattgctatcagtgacacaagggcaagatgagttaacggatgctctattagcaaaatatgagcgtactcgtcgcccggataatcttctaatgcagaccggtatggattttttctataaaggctttagcaatgatttggggcctttgaagtttgcacgcaatgcagcattaaagctggctgaaaattcagggccgatcaaagcacaagtattgaagtacgcgttaggtatgtag

SEQ ID NO: 108 - protein, 391 aa, Vibrio parahaemolyticus
MNKYDIAVIGGGMVGAAVAVGFAKQGRSVVVVEGAEPKAFDAAQALDVRVSAISHQSVKLLESLDAWSAIEAMRVCPYRRLETWEHPECRTRFHSDELSLDQLGYIVENRLIQLGLWQAFAQFDNLTVKCPERLKDIDFNDGNRITLESGEQFDANWIIGADGANSKVRQLAGIGVTAWDYRQHCMLINVKTELPQQDITWQQFTPSGPRSFLPLCSLTEDGQEVGQGSLVWYDSPKRIKQLCAMTKPQLREEIVRHFPKELGDIEVLQFGSFPLTRRHAQSYSHRGCVLVGDSAHTINPLAGQGVNLGFKDVDVLLSVTQGQDELTDALLAKYERTRRPDNLLMQTGMDFFYKGFSNDLGPLKFARNAALKLAENSGPIKAQVLKYALGM

SEQ ID NO: 109 - DNA, 1230 bp, Pseudomonas syringae
  CDS (1)..(1230)
atggaaacgcgtgcagatgtgttgattgtcggggccggaatggtcggcagtgctcttgcgctggccttgcagggcagtggccttgatgtgctggtggtcgacggcgggccgctgagcgtcaaaccctttgacccgcaatcgactttcgagccacgggtcagtgccttgtcagcggccagccagcgcattctgcagcggcttggcgtgtgggatggcatcgcgtcgcgacgtaccagcccttacgcgcacatgcacgtctgggatggcagcggcaccgggcagatccacttctcggcctctagtgtgcatgccgacgtgctgggccatatcgtcgagaaccgagtggtgcaggatgcgttgctcgaccgtttgcatgacagcgacatcggcctgctggccaacgcgcggctagagcagatgcgtcactccggcgatgactggttgctgacgctggcggacggtcgtttgctgcgtgcgccgctggtggttgccgccgacggtgctaactcggcagtacgccgcctgaccgaaacgccgacgcgcgagtgggattacctgcaccacgccatcgtcaccagcgtgcgcacggccgattcccacaagaaaaccgcctggcagcgtttcacggatgacggcccgctggcgtttctgccgctggaccgtgagggcgagcactggtgttccattgtctggtcggtcacgccagcagaagccgagcgtttgatggtgctggaagatgatctgttctgccgtgagctggagcaggcgttcgagggccggctgggccaggtcttgtctgccgacgcgcgcctgtgcgtgccgctgcgccagcgtcacgccaagcgctacgtcgccaatggcctcgcgctgattggggacgcggcgcacaccattcacccgttggccgggcagggcgtgaacctgggttttctggatgctgcggtgctggcgcaagtgctgacccacgcagcgcagcgtggcgagcgcgtggcagacctgcgcgtgctgggccgctacgagcgtcgccgcatgccgcacaacctggcattgatggcggcgatggagggctttgaacgcctgttccaggccaacccgctgccactgcgctggctgcgtaataccggcctgaaaatggtcaaccaaatgcccgaggccaaggctctgttcgtgcgcgaagccttaggtttgtcgggcgatctgccggagttggcacggcttgacgctcgttag

SEQ ID NO: 110 - protein, 409 aa, Pseudomonas syringae
METRADVLIVGAGMVGSALALALQGSGLDVLVVDGGPLSVKPFDPQSTFEPRVSALSAASQRILQRLGVWDGIASRRTSPYAHMHVWDGSGTGQIHFSASSVHADVLGHIVENRVVQDALLDRLHDSDIGLLANARLEQMRHSGDDWLLTLADGRLLRAPLVVAADGANSAVRRLTETPTREWDYLHHAIVTSVRTADSHKKTAWQRFTDDGPLAFLPLDREGEHWCSIVWSVTPAEAERLMVLEDDLFCRELEQAFEGRLGQVLSADARLCVPLRQRHAKRYVANGLALIGDAAHTIHPLAGQGVNLGFLDAAVLAQVLTHAAQRGERVADLRVLGRYERRRMPHNLALMAAMEGFERLFQANPLPLRWLRNTGLKMVNQMPEAKALFVREALGLSGDLPELARLDAR

SEQ ID NO: 111 - DNA, 1224 bp, Pseudomonas putida
  CDS (1)..(1224)
atggaaatgcgcgcagatctgttgattgtcggtgccggtatggtgggcagcgccctggccttggcgttgcgccacagtggcctgcaaattttgttgctcgatggtggcccgctgacggtcgtacccttcgatgcccaggccccgttcgagccgcgtgtcagcgcgctatcggcggccagccagcgcatcctcgagcgccttggcgcctgggacggcattgcccagcggcgcgccacgccgtattccgacatgcatgtgtgggatggcagcggcaccgggcagattcacttctcggcggccagtgtgcatgcccaggtgctcggccatatcgtcgagaaccgggtggtgcaggacggcctgctggagcgcctgcacgacagcgacatcggcctgctggccaatgcgaggctggagcaattgcgtcgctcgggcgatgagtggctgctgaccctggcggatggccggcaactgcgggcaccgttggtgatcgctgccgacggtgccaattcggcggtgcggcgtctggccggctgcgaaacccgcgagtgggattacctgcaccatgccattgtcaccagcgtgcgttgcagcgccgggcaccaggccacggcctggcagcgcttcactgacgaaggtccgctggcgttcctgccgttgacccgcgatggccagcaggactggtgctcgatcgtctggtcgaccaccccggagcatgccgagcagttgatggcgatggatgaagcggccttcctgcaggccctggagcgggccttcgaagggcgtctgggcgaggtgcttcaggccgacccacgggtgtgcgtgccgctgcgccagcgacacgccaagcgctacgtggatgaaggcctggtcttgatcggtgatgctgcacacaccattcacccactggccgggcagggtgtgaacctcggcttcctcgacgcggcggtgctggctgaggtgctggtcaatgcttgcgagcgcggtgagaggctggccgatgtgaaggtgctgagccgttacgagcgccggcgtatgccacacaacctggcgttgatggcggcgatggagggcttcgagaggttgttccaggccgatccgctgccgttgcgctggttgcgcaacagcgggttgaagctggtggagcagatgccggaggccaaggcgctgtttgtgcgccaggcgttgggtttgagtggtgacctgccggatctggccaaggcttga

SEQ ID NO: 112 - protein, 407 aa, Pseudomonas putida
MEMRADLLIVGAGMVGSALALALRHSGLQILLLDGGPLTVVPFDAQAPFEPRVSALSAASQRILERLGAWDGIAQRRATPYSDMHVWDGSGTGQIHFSAASVHAQVLGHIVENRVVQDGLLERLHDSDIGLLANARLEQLRRSGDEWLLTLADGRQLRAPLVIAADGANSAVRRLAGCETREWDYLHHAIVTSVRCSAGHQATAWQRFTDEGPLAFLPLTRDGQQDWCSIVWSTTPEHAEQLMAMDEAAFLQALERAFEGRLGEVLQADPRVCVPLRQRHAKRYVDEGLVLIGDAAHTIHPLAGQGVNLGFLDAAVLAEVLVNACERGERLADVKVLSRYERRRMPHNLALMAAMEGFERLFQADPLPLRWLRNSGLKLVEQMPEAKALFVRQALGLSGDLPDLAKA

SEQ ID NO: 113 - DNA, 1185 bp, Bradyrhizobium japonicum
  CDS (1)..(1185)
atgacagacgcatcgacactctttgacgcagccgtgatcggcggcggaccggcgggacttagcgcggccatcgcgctggcgcaggcgggtgcacggaccgcgctggtggcgcgccgcctgccctatgccgacaaccgcaccacggcgctgctaggcgcctccgtcgagctgctggagagcctcgacgtctggccgcgctgcaaggacaaggcggccgcgctcgaaatcatgcgcctcgtcgacgacaccggccggctgttccgggcgccggaggtccgcttctcctgtcacgagatcgggctcgacgccttcggctacaacatcgacaaccgctcgctgatgctggcgctggaagagcgcgcggccgaactgcccgggatcgtccgtttcgacgacgaggccgaaagcgtcgtcattgaagccgacgatgtcgcgatccgcacggcctccgcgcaattcctcgcagcccgcctcgtggtcggcgccgacggccggcattcgctgtgccgggaggctgccggcatcgcggtgacgcggcgcgacctgacgcagaccgcgctcaccttcaacgtcggccatgcgcggccgcatcgcaatgtctcgaccgagttccacacgccccacgggccctgcgtgttcgtgcccctgcccggcaaccgctccagcatcgtctgggtcgcagctcccgcggaagcggaacgcctccgcggcttaagcgacgacgagctgtccgccgcgatcgagaagcagtcgcattccatcctgggacgcatgacggtcgagcccggccgcaacctgtttccgctggcgatcgaacgtccgaaatccttcggccgcgaccgcatcgcgctggtcggcgaagccgcccatgtggttcccccgatcggcgcccagggcctcaaccttggcctgcgcgatgccgccgacattgccagacttgcgggcgatgccatcgcctcgggcgaggatcccggcgcgcccgacgtgctcgagcgctacgaccgcgcccggcggcccgacatcctgagccggacctttgcgatcgacatcgccaaccgctccttgctcaacgatttcctgccgctccagccggtccgcgccgtcggcatgcacctgctcggcgccatcggcccgctccggcgcttcgccatgcgggaggggctgacgcctacctggcggcggtaa

SEQ ID NO: 114 - protein, 394 aa, Bradyrhizobium japonicum
MTDASTLFDAAVIGGGPAGLSAAIALAQAGARTALVARRLPYADNRTTALLGASVELLESLDVWPRCKDKAAALEIMRLVDDTGRLFRAPEVRFSCHEIGLDAFGYNIDNRSLMLALEERAAELPGIVRFDDEAESVVIEADDVAIRTASAQFLAARLVVGADGRHSLCREAAGIAVTRRDLTQTALTFNVGHARPHRNVSTEFHTPHGPCVFVPLPGNRSSIVWVAAPAEAERLRGLSDDELSAAIEKQSHSILGRMTVEPGRNLFPLAIERPKSFGRDRIALVGEAAHVVPPIGAQGLNLGLRDAADIARLAGDAIASGEDPGAPDVLERYDRARRPDILSRTFAIDIANRSLLNDFLPLQPVRAVGMHLLGAIGPLRRFAMREGLTPTWRR

SEQ ID NO: 115 - DNA, 1437 bp, Yersinia pestis
  CDS (1)..(1437)
atgatacttttgctcggcgtacattgggctgggtcgagcgctaactcaatagactcatcgggattaacgcgcctcatcgttgaggtttaccctatggggtggcacaaatgctgttcaaatcgttcccgaccaatttgcttctcgtttgccgcctccctgcatcgagaaatctatagagtaaataaagttcatattttcatggggaaatgtttcggcatgcaatcatttgacatagttatcgccggtggtgggatggtgggtctggcgctggcttgtggtttacaaggcagtggcctgcgtatcgccattatcgagcatcagcctgcaccgatgccattaacggcaccgttgaccggtgagctggcactgcgagtctcggcgatcaacgcagctagtgagcgcttactgcaaaaaatcggggtgtgggaaacgattcaggcactgcgtgctagcccgtaccacggtatggaagtgtgggataaagacagcttcggcaaaattgcctttcatgcggatgaatatggcttcagccatcttggccatatcattgaaaatcaggtcattcaacaagcattgtggcagcgggccagccaactaccagaggtgacggtcttggcacccgccagcttcaaacaagtggcttggggcgagactgaagcgtttatcaccctaaccgatgaccggatgctcagtgctcggctggttgttggggctgatggcgcacactcatggttacgtcagcatgcggatattcctctgaccttctgggattatgcccaccatgccttggtggcaactatccggactgacgagccgcatcaggctaccgcgcgtcaggtattccacggtgacggcattttagctttcctcccctttagcgacccccacctcagttctattgtctggtcattaccgcctgagcgtgccgccgagttagccgtgctgcccgccgagcaatttaaccgtgagttggcgatgacgtttgatatgcgccttgggcaatgtcagcttgagagtgagcggcaaacgttcccgctgaccgggcgttatgcccgtagctttgccgcgcaccggctggtgttggtcggcgatgcggcgcataccgtgcatccattggctgggcagggcgttaatctgggctttatggatgtagccgaattagtgtctgaacttcggcgtttacagcgtcaagggaaggatattggtcagcatctctatctgcgccgttatgaacgccgccgcaaacacagtgctgcgatgatgctggcgagtatgcagggcttccgtgatctgtttgctggcaacaatccggctaaaaaattattacgtgatattgggttaacgctggccgatcacttgccgggggttaaaccgcaattggtacggcaggcgatggggctgaatgatttgccagaatggctggagcgttctcaataa

SEQ ID NO: 116 - protein, 478 aa, Yersinia pestis
MILLLGVHWAGSSANSIDSSGLTRLIVEVYPMGWHKCCSNRSRPICFSFAASLHREIYRVNKVHIFMGKCFGMQSFDIVIAGGGMVGLALACGLQGSGLRIAIIEHQPAPMPLTAPLTGELALRVSAINAASERLLQKIGVWETIQALRASPYHGMEVWDKDSFGKIAFHADEYGFSHLGHIIENQVIQQALWQRASQLPEVTVLAPASFKQVAWGETEAFITLTDDRMLSARLVVGADGAHSWLRQHADIPLTFWDYAHHALVATIRTDEPHQATARQVFHGDGILAFLPFSDPHLSSIVWSLPPERAAELAVLPAEQFNRELAMTFDMRLGQCQLESERQTFPLTGRYARSFAAHRLVLVGDAAHTVHPLAGQGVNLGFMDVAELVSELRRLQRQGKDIGQHLYLRRYERRRKHSAAMMLASMQGFRDLFAGNNPAKKLLRDIGLTLADHLPGVKPQLVRQAMGLNDLPEWLERSQ

SEQ ID NO: 117 - DNA, 1182 bp, Wigglesworthia glossinidia brevipalpis
  CDS (1)..(1182)
atgaaaaaattttttgatattgtaattattggctctggaattttaggaaaaagtttatctataaaattagctaaacatggatttttaataaaattaattgaattagaaaacaaaaaaagtttttcatatgatgaaataccagattttaaaatattagctctaaattattctactataaaatttttatacgatatagacgtatggaataaaattgatctgaaattttgcactaaatataaatatatagaaacttgggaaaattctttttttcctgttaagttttgttctgattcaatagatttatctggattaggttatatcatagaaaatcatagattgaacaaagctttgattgagactgaaaataagtacaaaaaatttataataaaaaattccataggaataagaaatatgtattatgatgatataaaaaaagtatggaaaattatattaaataatggaaaatatatatttagtaatttgataattggagcagatggaaaaaattcttgggtaagaaaaaaatctggaattccttttataaaatttaattatagtcagtcttgcatgttgtttattgtaaaaattagaactaaaaaaaattatactgtatggcaatctatagatttaaatggtccaaaagcatatttgcctttatatgatgattgggcattattaatttggtatgatttaacagaatatttacatgaaataaacaatatgtcttttaatttaatagaaaaattgattatgtctaaatttccaaaaagattaggtccagtcactttacacaaaaaagaaatagtacctttgacttttttatatggatatcagtacgttaaacaagggttagctcttttaggcgatgctgttcatactatacatcctttagctggacaaggaggaaacttaggtttcagagacgtaaaacaactttctgatgtattaattgaatctaaatgcacaaagaaaaattggtatgaattaaatactttaaaaaagtatgaaaataattgcaaaacttataacactattatgcaatttaatatagacttatttcgtttattattttctaatgatatatggattattaaaaaaataagaaatttagctttacattctgtagaatgctctaatttaataaaaaaatttattattaaatatgcttctggtttattttaa

SEQ ID NO: 118 - protein, 393 aa, Wigglesworthia glossinidia brevipalpis
MKKFFDIVIIGSGILGKSLSIKLAKHGFLIKLIELENKKSFSYDEIPDFKILALNYSTIKFLYDIDVWNKIDLKFCTKYKYIETWENSFFPVKFCSDSIDLSGLGYIIENHRLNKALIETENKYKKFIIKNSIGIRNMYYDDIKKVWKIILNNGKYIFSNLIIGADGKNSWVRKKSGIPFIKFNYSQSCMLFIVKIRTKKNYTVWQSIDLNGPKAYLPLYDDWALLIWYDLTEYLHEINNMSFNLIEKLIMSKFPKRLGPVTLHKKEIVPLTFLYGYQYVKQGLALLGDAVHTIHPLAGQGGNLGFRDVKQLSDVLIESKCTKKNWYELNTLKKYENNCKTYNTIMQFNIDLFRLLFSNDIWIIKKIRNLALHSVECSNLIKKFIIKYASGLF

SEQ ID NO: 119 - DNA, 1188 bp, Wigglesworthia glossinidia brevipalpis
  CDS (1)..(1188)
atgaaaataattgtcgtaggtggaggaataattggattagttttttctttagctttgtcaaatttaagcaaaaataaaattaaaattaatttagtagaaattaatgatatttcaaatttaaaaaaaaaaataaataatgatcaatcagttgcaatttcttatcatacaaaaaatatacttaaaaagtttggaatttggaaatatttttcttgtttttccactaaaatcaattctatagagattagtgatcaaaaattttttggaaaaactaaaataaattctagcgaagtttttttatcttctttgggatatgtaatacaattaagaaaaataaaaatattattatttaaaattttaaagaaaaaaagaaatataaaattatattgtccatattatccaaaaaaaataataagagaaaaaaataaaaacattatattattaaataatggaaaaaaattaacatcaaaacttatagttgttgcagatggaatgaattcaaaaatagctaaaaaatgcagtatttaccaaaaaactatattttacaatcaaatagcaatgtctagcaaaatacatgttgatttttttcataaaaattgtgcttttgaaaaattcaataatcatggatctttagcaatattaccattacataaaaatattaattcattaatttggtgttttccgaaaaaattttttgataatattaaatcattaaataaaaaaaaattatctttagaaatacaaaaaatatttggatgggatttgggtaaaatctctttaattgggaaacaaaagtatcatatgcttaagctaagtacttatgaaaatcatatttctcataggttagctcttattggaaatgctgctcaaattatacatcctatagcaggtcaaggattaaatttaggaatgagagatgttatagatctatctaacatattaatagactcttttgaaaaaaagatagattatggaaattatgatgttttaattaagtaccaaaataaaagaaaaaaagatcaaaaaaatacaatttttatgacagaatctcttattaatttattttctagcaaaattcctttaattattataataagaaatttaggattatctataatagaaagatttcctttttttaaaaaaagaataataaaaaacattctgtttaatagatatttaaatattttttaa

SEQ ID NO: 120 - protein, 395 aa, Wigglesworthia glossinidia brevipalpis
MKIIVVGGGIIGLVFSLALSNLSKNKIKINLVEINDISNLKKKINNDQSVAISYHTKNILKKFGIWKYFSCFSTKINSIEISDQKFFGKTKINSSEVFLSSLGYVIQLRKIKILLFKILKKKRNIKLYCPYYPKKIIREKNKNIILLNNGKKLTSKLIVVADGMNSKIAKKCSIYQKTIFYNQIAMSSKIHVDFFHKNCAFEKFNNHGSLAILPLHKNINSLIWCFPKKFFDNIKSLNKKKLSLEIQKIFGWDLGKISLIGKQKYHMLKLSTYENHISHRLALIGNAAQIIHPIAGQGLNLGMRDVIDLSNILIDSFEKKIDYGNYDVLIKYQNKRKKDQKNTIFMTESLINLFSSKIPLIIIIRNLGLSIIERFPFFKKRIIKNILFNRYLNIF

SEQ ID NO: 121 - DNA, 1221 bp, Vibrio vulnificus
  CDS (1)..(1221)
atgtttcgcaaacttgccagtaaaacgtacaatgcaaaaccgtctttgaatcaagttgatcaagagtacaagatgaataaatacgacattgccgtcgtcggtggcggcatggtaggtgcggctgtggccatcggatttgccaaacaaagcagaaaagtcatcgtggttgaagggtttgagccgaaagcgtttgaagcaagccaaccgatggacatccgagtgtccgccatttcccacaactccgtgcgtttgctggaatcgctaggggcctggcaacatattcaagcaactcgagtttgcccctacaaacggttagaaacctgggagcacccagaatgtcgtacacgttttcacagcgatgaactcaatttggagcagctaggttacattgtggaaaaccgtctcattcaattggggttgtggcaagagtttgctcagtacccgaatttgactctgcaatgcccagataaactgaagcgtcttgagttcgatgagttcaacacgttgacgcttgagagtggtttagaaattgaagcctcttgggtcattggcgcagatggtgccaactctcaggtgcgtgagttggctggcattggcattaccgcatgggattatcgccagcattgtatgttgatcaatattgcgacggaatctgcgcaacaggcgatcacttggcagcaatttaccccaagtggcccacgatcttttttgccattgaaaggccagcaaggttctttggtttggtacgattcacccaaacgtattcgcgaattgtcagccatgagcgcagaaaagctgaaacaggaaattattcgtcatttccctgatgaattgggagagtttgacgtgttgtactgggattctttcccattaacccgacgacatgcacaagcctattatcaacaaaattgtttgttgcttggggatgcggcccacacgatcaatccattagccggccaaggcgtcaatcttggttttaaagacgttgaagcgttactcaaggcgacggaaaaccaacctttgacagtggctcaacaagcggcctatcagaaagcacgctatgcggacaacttgctaatgcaaactgggatggatctgttctacaaaggctttagtaacgatatcaccccattaaaattggttcgtaacgcagccctcaagttggctgagcactctgggcctatcaaacatcaagtgttgaaatatgcgctaggaatgtga

SEQ ID NO: 122 - protein, 406 aa, Vibrio vulnificus
MFRKLASKTYNAKPSLNQVDQEYKMNKYDIAVVGGGMVGAAVAIGFAKQSRKVIVVEGFEPKAFEASQPMDIRVSAISHNSVRLLESLGAWQHIQATRVCPYKRLETWEHPECRTRFHSDELNLEQLGYIVENRLIQLGLWQEFAQYPNLTLQCPDKLKRLEFDEFNTLTLESGLEIEASWVIGADGANSQVRELAGIGITAWDYRQHCMLINIATESAQQAITWQQFTPSGPRSFLPLKGQQGSLVWYDSPKRIRELSAMSAEKLKQEIIRHFPDELGEFDVLYWDSFPLTRRHAQAYYQQNCLLLGDAAHTINPLAGQGVNLGFKDVEALLKATENQPLTVAQQAAYQKARYADNLLMQTGMDLFYKGFSNDITPLKLVRNAALKLAEHSGPIKHQVLKYALGM

SEQ ID NO: 123 - DNA, 1275 bp, Synechococcus elongatus
  CDS (1)..(1275)
atgatgacatcggcctttgcaccctcagaacagtcgctggttgcttctcctcaagatctgcccgcggtggatgtggcgattgtcggtgccgggattgtgggtctcagtctggcctgtgcgctacgcaacagtgggctagcgatcgccctcattgaggcaactccctacaggcgggaaaacaccaagggtcaagcctatgccctgcaccaagtgtctcgttacttctttgaggaaatcggggtgtgggataagcttatgccccatgtgcagccctttgaggtggtgcaactctccgatgaacggtttcccttgacagttcacttttccccagcagatctgggcacggaagcccttggttatgtgggtgagcactcagcgatcgccgagaccctgcagagcgttttacagtctgccggcaatgtcacgttctactgcccgtggcgggtagtgaccaacgaagtccacggcgatcgcgctcagttgaccctcatttctggtgaccctggggaacccaaggtggctcacttggcagcccgtttagtggtcgccgcagatggtggcaagtctcccctacggcagcagatggggattgaacctaagggatggcaatatcctcagtcctgtgtggttgccaccctcgatgttgcccatccccaacctgtgattgcctacgagcgcttttggccgacaggaccaatgggcgtgctacccctaccgcggaatcgctatcgagtggtttggacactgccccacccagaggcggaagccgttgctgccctcgacgatcgcagctttttggcaacacttcagccctatcttgatccccagatggcggagattacggctgtgggcgatcgctttgtctttccagcccaattcatgcaagttaactcctacgcggcggatcgctttgtggttattggcgatgcagcccaccgctgccatcccgtggggggacaaggactcaatttgggactacgggatgtatggaatctggcacagcagattttggctagcccccttgaggaaattggcgatcgccgacacctgatgcactttcaccgccaacgctggtggcaaaatgtcttgaccctggcctttaccgacttcctgaaccgtctgttttccaatacagggtggcctttggtggcagtacgccgctgcgggctggggctgttgtgcctcttgccgccgttgaagcgtttgctattgcgctttatggccggtcttctactgcccctaccaggcgatcgtgaattccccagaggccgttaa

SEQ ID NO: 124 - protein, 424 aa, Synechococcus elongatus
MMTSAFAPSEQSLVASPQDLPAVDVAIVGAGIVGLSLACALRNSGLAIALIEATPYRRENTKGQAYALHQVSRYFFEEIGVWDKLMPHVQPFEVVQLSDERFPLTVHFSPADLGTEALGYVGEHSAIAETLQSVLQSAGNVTFYCPWRVVTNEVHGDRAQLTLISGDPGEPKVAHLAARLVVAADGGKSPLRQQMGIEPKGWQYPQSCVVATLDVAHPQPVIAYERFWPTGPMGVLPLPRNRYRVVWTLPHPEAEAVAALDDRSFLATLQPYLDPQMAEITAVGDRFVFPAQFMQVNSYAADRFVVIGDAAHRCHPVGGQGLNLGLRDVWNLAQQILASPLEEIGDRRHLMHFHRQRWWQNVLTLAFTDFLNRLFSNTGWPLVAVRRCGLGLLCLLPPLKRLLLRFMAGLLLPLPGDREFPRGR

SEQ ID NO: 125 - DNA, 1215 bp, Shewanella oneidensis
  CDS (1)..(1215)
atgagccaaacgcagcaatccgcatcgataacatcagagactcaatcctttgatgtgattttagtcggcggcggtatggtgggcgcggcaacggcgattggtcttgcacaacaaggacttcacattgctgtgattgagtcctttgcgcccgaggcttattcccccgagcaggcattagatgtacgtgtgtcggcgataagcgttgcctctgagcatttacttgagcagttaggcgcgttagacagcctccttaagatgcgtaatgtgccttatctgggtttagagacttgggagcttgatggttgcattactcaattccacagctcccaaatcggtgctagccatttaggccatatcgttgaaaaccgtttagtgcagctcgccctttgggagcaaatgcaacaatgggaaaatattcggctcttttgccctgagcgcgttgcccactttgctcgcggggttgatacggtaagcgtgcacttacaatctggttgcctccttgaagcaaagcttttggtcggtgccgatggcgcgaactcacatgtgcgccaatgggcgggcattgggatttcgggttgggactatgctcaatcggccatgctgattaatatccaaaccacccaaggtcaacaagatgtgacttggcagcaatttacccctagcggcccacgttccttattaccgttacccggcaatcatgcctcgttagtttggtatgatgatgccaatcgcatcaaacagttaatgcaactgaacaataagcagttggccgagcaaattcgccagcattttcctgctcggttagatagtgactttatagttgaagccaagggcagttttgcgctcacccgccggcatgctcaggtttatgttaagccaaatgtggtgattttaggggatgcggcgcacactattaatccgcttgcgggccaaggggttaaccttggatttaaagatgttgaagccttgctttcggtcatcaaggcggcattaacggaggataaaccttggtggtcaaccgaggtattagggaaatatcaggcaaaacgttaccttgataatcagctgatgatgaccaccatggatgtgttttacgcaggctttagtaacgatatcttaccgctaaaattgctgcgtaacggcgcattaaagctcgcaaatatcaattctcccctcaaacaaactgtacttaagtatgcgatggggctcaattag

SEQ ID NO: 126 - protein, 404 aa, Shewanella oneidensis
MSQTQQSASITSETQSFDVILVGGGMVGAATAIGLAQQGLHIAVIESFAPEAYSPEQALDVRVSAISVASEHLLEQLGALDSLLKMRNVPYLGLETWELDGCITQFHSSQIGASHLGHIVENRLVQLALWEQMQQWENIRLFCPERVAHFARGVDTVSVHLQSGCLLEAKLLVGADGANSHVRQWAGIGISGWDYAQSAMLINIQTTQGQQDVTWQQFTPSGPRSLLPLPGNHASLVWYDDANRIKQLMQLNNKQLAEQIRQHFPARLDSDFIVEAKGSFALTRRHAQVYVKPNVVILGDAAHTINPLAGQGVNLGFKDVEALLSVIKAALTEDKPWWSTEVLGKYQAKRYLDNQLMMTTMDVFYAGFSNDILPLKLLRNGALKLANINSPLKQTVLKYAMGLN

SEQ ID NO: 127 - DNA, 1224 bp, Shewanella oneidensis
  CDS (1)..(1224)
atgttaagttcacaagcctatgacattgccattgtgggtggcggcatggtgggactcgccaccgcgataggattggcgcaggctgatcttaatgttgtcgttatcgatgcgggccacacagaggccgtgagcggcgagccaaggcttagggtcagcgcgatcaacaaggcgagccagcgtttgctggagcatcttggcgcttggcactatgtcgatgccagccgcgcgacgccctatcaaaaaatggcggtatgggataaagacggctttggcaaaatcgccttcgatgccagcagcatcagtgaacccagtcttggcgcgattatcgaaaacgacgccatcagctatgccctcgccaagcgtgccagtgaatttgacaatatcacccatatcgaaaaccaacgcttagagcgcattgcctttggtgagcgtgaagcttggttgaccctagctaatagtgccgatgctgaaatagaaagtgtgagcgccgcactcgtgattgccgccgatggcgccaactcttgggtgcgtgagcaatgtaagatcccgttaaccttttgggattatggccaccatgcgatcgtggcgactattcgcagcgagatgccgcaccttgccactgcccgccaagtctttttgcaggacggcccgctggccttcttacctttatatgaagacaacctctgctccatcgtctggtcggtgccgcccgagcgcgccactgaattactggcaatggacaaagtgcaatttgagcgcaatctcaccgccgccttcgatggtcgcctcggcatttgcaagctcgagagcgagcgccaagccttcccgctgcggatgcgctacgcccgtcattttgcccgccaccgtttagtgctcgcgggggacgctgcccacaccattcatccattagccggccaaggggtaaaccttggcttcctcgatgccgccagcattatcgaagttatcagcgaattgcagcaagcgggtaaggatattggcgattatgccgagctgcgcgcgttagagcgttggcgcaaggccgatgcgatggagatgattgcggcgatggaaggctttaagcgcctgttcgagggttcaaacccagttaaaaaggcgattcgcgatctgggactcaaccttgtcgataatgtcgctgggctgaaaacagtgttcatgcaacaggccatgggtaataagtcgtcgctgcccaagttatgtcgctag

SEQ ID NO: 128 - protein, 407 aa, Shewanella oneidensis
MLSSQAYDIAIVGGGMVGLATAIGLAQADLNVVVIDAGHTEAVSGEPRLRVSAINKASQRLLEHLGAWHYVDASRATPYQKMAVWDKDGFGKIAFDASSISEPSLGAIIENDAISYALAKRASEFDNITHIENQRLERIAFGEREAWLTLANSADAEIESVSAALVIAADGANSWVREQCKIPLTFWDYGHHAIVATIRSEMPHLATARQVFLQDGPLAFLPLYEDNLCSIVWSVPPERATELLAMDKVQFERNLTAAFDGRLGICKLESERQAFPLRMRYARHFARHRLVLAGDAAHTIHPLAGQGVNLGFLDAASIIEVISELQQAGKDIGDYAELRALERWRKADAMEMIAAMEGFKRLFEGSNPVKKAIRDLGLNLVDNVAGLKTVFMQQAMGNKSSLPKLCR

SEQ ID NO: 129 - DNA, 1224 bp, Shewanella oneidensis
  CDS (1)..(1224)
atgacggtagcagatcacatggataattcagttcaaaacgtcgatatcgccattgtcggtggcgccatggcgggtgcgaccctcgcgttagctttggctcgtttgtctggtactgaaaaacctttatctattgccttaatagaggcgcatcttcccgatcacaatcaccccggctttgacgcccgttctattgccattgcccatggctctatcttcgagttatcccgcttaggtttatggccaaaattggcgcatttaggcacggcgatcaaagatatccatatatccgatcgcggtcattttggtatgacggaactcaacgccagtcagtttcatttagatgcgctgggtcacgttgttgagctggaaagggtcggccaagtgctgtttagcgagcttaacaaaactcaggttaagctctattgcccagccaaactgtcagagttaattcccgatatcgacagccacacgctggtgctggattccggcgagcgtatttgcgccaagctggtggtcgccgccgatggcttgcagtctaaggtgcgcagcagtttttatctgcccattacccaagtggcgtttgagcaaaccgcgattatcgctaatctgcaaaccgataagccgcatcagcattgggcttatgaacgatttactgaaaccggcccgctggcgttattgccgatggctgatagccaaggccagccgcggttatccttagtgtgggcgctcgatcatcaccgcgctcaaacgatgctcaatgccccaaaagccgaatttttagctgagttgcagcaagcctttggttatcgcgccgggcagtttatcgatgtcagcgagcgccatgcttatccgttaaacctgtcctatatgccaaggccaattcaccatagatgtgtgtttattggtaatgcggcgcagacactgcacccgattgcagggcagggatttaacttaggccttcgagatgtggtgagcttgcttgaagtgctcaacactgctcgagagcagggcgaagatatcggctccgccgccgtgacccatgcttatcttcatgtccgcgagcacgacagaaacagcactatccgcaatattgaatttttagtccgtggcttctctaaccaatattggcccttggcccttgggcgtaatctgggattacggctgttatcttggttcccgccactgaaaacccccgtcgctcaaaaagcgatgggctggaaataa

SEQ ID NO: 130 - protein, 407 aa, Shewanella oneidensis
MTVADHMDNSVQNVDIAIVGGAMAGATLALALARLSGTEKPLSIALIEAHLPDHNHPGFDARSIAIAHGSIFELSRLGLWPKLAHLGTAIKDIHISDRGHFGMTELNASQFHLDALGHVVELERVGQVLFSELNKTQVKLYCPAKLSELIPDIDSHTLVLDSGERICAKLVVAADGLQSKVRSSFYLPITQVAFEQTAIIANLQTDKPHQHWAYERFTETGPLALLPMADSQGQPRLSLVWALDHHRAQTMLNAPKAEFLAELQQAFGYRAGQFIDVSERHAYPLNLSYMPRPIHHRCVFIGNAAQTLHPIAGQGFNLGLRDVVSLLEVLNTAREQGEDIGSAAVTHAYLHVREHDRNSTIRNIEFLVRGFSNQYWPLALGRNLGLRLLSWFPPLKTPVAQKAMGWK

SEQ ID NO: 131 - DNA, 1179 bp, Escherichia coli O6
  CDS (1)..(1179)
atgagcgtaatcatcgtcggtggcggcatggcgggcacgacgctggcgctggctatttcccggttaagtcacggggcgctgccagtacatttgattgaagcgaccgcgccagagtcacatgcgcatccgggctttgatggacgagctattgcgctggcggcgggtacctgtcagcaactggcgcgcatcggcgtctggcaatctctggctgattgcgcaactgccatcaccacagtgcatgtcagcgatcgtggtcacgctggatttgtcaccctcgccgcagaagattaccaactggcggcgctggggcaggttgtcgaattgcacaatgtcgggcaacggctgtttgcattgctgcgcaaagcacctggtgtaacgctgcattgccctgatcgcgtggctaacgttgcccgtactcagagccacgttgaagtgacgctggagagtggtgagacgctgacgggccgcgtgctggtagccgctgatggcacccattcagcgttagccaccgtgtgcggcgttgactggcagcaggatccttacgaacaactggctgtgattgcgaacgttgcgacttccgttgcgcatgaagggcgcgcttttgaacgctttacgcaacatggcccgctggcgatgttgccgatgtctgacggacgctgttcgctggtctggtgtcatccactggaacggcgcgaagaggtgctgtcgtggagcgacgagaagttttgccgtgaactccagtcggcctttggctggcgacttgggaaaattactcatgccggtaaacgcagtgcttatccgctagcgctaacccgcgccgccaaacctattacccatcgtaccgtgctggtgggcaatgcggcgcaaactctgcatcccatcgccgggcaaggatttaacctcggtatgcgtgatgtcatgagccttgcggaaaccctgactcaggcgcaggaacgcggagaagacatgggtgattacggcgtattgtgccgttatcagcagcgtcgacagagcgatcgcgaagcaaccatcggcgtcacggacagccttgtacatctttttgccaaccgttggacgccgctggttgtcgggcgcaacatcgggctgatgacgatggaattatttaccccagcacgcgatgtgctggcgcagcgcactcttggttgggtggcgcgttga

SEQ ID NO: 132 - protein, 392 aa, Escherichia coli O6
MSVIIVGGGMAGTTLALAISRLSHGALPVHLIEATAPESHAHPGFDGRAIALAAGTCQQLARIGVWQSLADCATAITTVHVSDRGHAGFVTLAAEDYQLAALGQVVELHNVGQRLFALLRKAPGVTLHCPDRVANVARTQSHVEVTLESGETLTGRVLVAADGTHSALATVCGVDWQQDPYEQLAVIANVATSVAHEGRAFERFTQHGPLAMLPMSDGRCSLVWCHPLERREEVLSWSDEKFCRELQSAFGWRLGKITHAGKRSAYPLALTRAAKPITHRTVLVGNAAQTLHPIAGQGFNLGMRDVMSLAETLTQAQERGEDMGDYGVLCRYQQRRQSDREATIGVTDSLVHLFANRWTPLVVGRNIGLMTMELFTPARDVLAQRTLGWVAR

SEQ ID NO: 133 - DNA, 1203 bp, Escherichia coli O6
  CDS (1)..(1203)
atgcaaagtgttgatgtagccattgttggcggcggcatggtcgggctggcggttgcctgcggcttacagggtagcggcttacgcgttgccgtactggagcagcgcgtaccggaacctctggcggcggatgcaccaccacaactgcgcgtttcggctatcaatgccgccagcgaaaaattactgactcgtcttggcgtctggcaggacattctctctcgtagggccagttgctatcacggtatggaagtgtgggacaaagacagttttggtcacatctcgtttgacgatcaaagcatgggctataaccatcttgggcatatcgttgaaaactcagtgattcactacgcgctgtggaacaaagcgcagcagtcgtcagatatcactctgttggcccccgcagaattacagcaggtcgcctggggagaaaatgaaaccttcctgacgttgaaagatggcagcatgttaacggcgcgtctggtgattggcgcagacggcgctaattcctggttgcgcaacaaagccgatattccgctgactttctgggattatcagcatcacgcgctggtggcgaccattcgcacggaagaaccgcatgatgcggtggcgcggcaggttttccatggcgaaggcattctggcctttttaccgcttagcgatccgtatctttgctcgattgtctggtcactgtcgccagaggaagcgctgcggatgcagcaggctagtgaagacgaatttaatcgcgcgttaaatatcgcttttgataatcgcctgggcttatgcaaggttgaaagtgagcgcctggtgttcccgctaacggggcgttatgcgcgccagtttgccgcgcaccgtctggcgctggtgggcgacgccgcgcataccattcacccgttggcggggcagggggtaaatctcggctttatggatgctgcagagctgattgctgaactgaaacggttgcatcgtcagggtaaagacatcgggcagtacatttacctgcgtcgctatgagcgtagccgcaagcacagcgcggcgctgatgctggctggtatgcagggattccgcgatctgttttccggggctaatccggcgaaaaaattgctgcgtgatattggtctgaaactggctgatacgcttcctggcgttaagccacaacttattcgtcaggcaatgggattaaacgatttgcctgaatggctgcgttaa

SEQ ID NO: 134 - protein, 400 aa, Escherichia coli O6
MQSVDVAIVGGGMVGLAVACGLQGSGLRVAVLEQRVPEPLAADAPPQLRVSAINAASEKLLTRLGVWQDILSRRASCYHGMEVWDKDSFGHISFDDQSMGYNHLGHIVENSVIHYALWNKAQQSSDITLLAPAELQQVAWGENETFLTLKDGSMLTARLVIGADGANSWLRNKADIPLTFWDYQHHALVATIRTEEPHDAVARQVFHGEGILAFLPLSDPYLCSIVWSLSPEEALRMQQASEDEFNRALNIAFDNRLGLCKVESERLVFPLTGRYARQFAAHRLALVGDAAHTIHPLAGQGVNLGFMDAAELIAELKRLHRQGKDIGQYIYLRRYERSRKHSAALMLAGMQGFRDLFSGANPAKKLLRDIGLKLADTLPGVKPQLIRQAMGLNDLPEWLR

SEQ ID NO: 135 - DNA, 1197 bp, Escherichia coli O6
  CDS (1)..(1197)
atgctaacaggattattgaccatgacaaatcaaccaacggaaattgccattgtcggcggaggaatggtcggcggcgcactggcgctgggactggcacagcacgggtttacggtaacggttattgaacatgcccagcctgcgccgtttgttgcggacagccagccggacgtgcggatctcggcgatcagcgcggcttcggtatcattgcttaaaggggtaggggcctgggatgcagtacaggctatgcgttgccatccttaccgcagactggaaacgtgggagtgggaaacggcgcatgtcgtgtttgacgccgctgaacttaagctaccgttgcttggctacatggtggaaaacactgtcctgcaacaggcgttgtggcaggcgctggaagcgcatccgaaagtaacgttacgtgtgccaggctcgctgattgcactgcatcgccataatgatcttcaggagctggaactgaagggcggtgaaacgatcctcgcgaagctggtgattggtgccgacggcgcaaattcgcaggtgcgacagatggcgggaattggcgttcatgcctggcagtatgcgcagtcgtgtatgttaattagcgtacagtgtgagaacgatcccggcgacagcacctggcagcaatttaccccggacggaccgcgtgcgtttctgccgttgtttgataactgggcatcgctggtgtggtatgactctccggcgcgcattcgccagttgcagaatatgaatatggcgcagctacaggcggaaatcgtgaagcatttcccgtcgcgtcttgggtatgtaataccgcttgccgctggcgcgtttccgctgatacgtcgccatgcgttgcagtatgtgcagccggggcttgcgctggtgggcgatgccgcgcataccatccatccgctggcggggcagggggtgaatcttggttatcgtgatgtcgatgccctgattgacgttctggtgaacgcccgcagctacggcgaagcgtgggccagttatcctgtgctcaagcgttaccagatgcggcgtatggcggataacttcatgatgcaaagtggtatggatctgttttatgccggattcagcaataatctgccaccgctgcgttttgtgcgtaatcttggtttgatggcggcggagcgtgctggcgtgttgaaacgtcaggcgctgaaatatgcgttagggttgtag

SEQ ID NO: 136 - protein, 398 aa, Escherichia coli O6
MLTGLLTMTNQPTEIAIVGGGMVGGALALGLAQHGFTVTVIEHAQPAPFVADSQPDVRISAISAASVSLLKGVGAWDAVQAMRCHPYRRLETWEWETAHVVFDAAELKLPLLGYMVENTVLQQALWQALEAHPKVTLRVPGSLIALHRHNDLQELELKGGETILAKLVIGADGANSQVRQMAGIGVHAWQYAQSCMLISVQCENDPGDSTWQQFTPDGPRAFLPLFDNWASLVWYDSPARIRQLQNMNMAQLQAEIVKHFPSRLGYVIPLAAGAFPLIRRHALQYVQPGLALVGDAAHTIHPLAGQGVNLGYRDVDALIDVLVNARSYGEAWASYPVLKRYQMRRMADNFMMQSGMDLFYAGFSNNLPPLRFVRNLGLMAAERAGVLKRQALKYALGL

SEQ ID NO: 137 - DNA, 1245 bp, Brucella suis
  CDS (1)..(1245)
atggctggccagaaaaatacggacgccccacgcaataacgatgtggtgattgcaggcggcggctatgtcggccttgtcacggcggttgcgatcaagtcagccgcgccccacctttccgtcaccgtgatcgatggcgcgcctgcgggcgcgtggaagaacgacccgcgcgcctcctccattgccgccgccgcctcgcggatgctctacaagcttggctgctggcaggaaatcgttcccgaagcccagcccatcaccgaaatggtcattaccgattcgcggacatccgatcccgtgcgccccgtcttcctcaccttcgagggggaggtggaaccgggcgaacccttcgcccatatggtcgagaaccgcgtgctcaacaccgcattgcacaacaaggcggatgcgctcggcatcaccttccttgaagcggtgagcgtggagaattttgaaacccggccggaaggcgtaaccgtcacgctggccaatggcgacaggctggaaacccgccttttgatcgccgccgatggcgctcgctcgcgactgcgcgatctggcaggcatcaagaccgtcaattgggactatggccaatccggcattgtctgcaatgtggcgcatgagcgcccgcatggaggccgcgccgacgagcattttctgcctgccggcccctttgcgatccttccgttgaagggcaatcgctgctcgctcgtctggacggaacgcacggcagacgccgaacggcttatccgcgaggatgatttcgttttcgaggccgaactggaacagcgttttggccaccgcctcggcgccctgcatgtcgaaggcccacgccgcgccttcccgcttggcctgacactggcgcgcgaattcgtaaagccccgctttgcgcttgtgggcgacgccgcccaccgcatccacccgatcgccggtcagggcctcaatctcggcttccgcgatgcggcggcgattgccgaagtggtggtcgaaacggaccgcctcggcctcgatatcggttcctttgcagcccttgagcgctatcaggcctggcgtcgcttcgatacggtgcagatgggcgtcaccaccgacattctgaccaagcttttttccaacgacaatccggcggtgcgttccatccgcgacatcggcctcggccttgttgatcgcgttccaagcctcaaatccttcttcatcaaacaggcggccggtctttccggcgatacgccgcgccttttgaaaggcgagcctatctga

SEQ ID NO: 138 - protein, 414 aa, Brucella suis
MAGQKNTDAPRNNDVVIAGGGYVGLVTAVAIKSAAPHLSVTVIDGAPAGAWKNDPRASSIAAAASRMLYKLGCWQEIVPEAQPITEMVITDSRTSDPVRPVFLTFEGEVEPGEPFAHMVENRVLNTALHNKADALGITFLEAVSVENFETRPEGVTVTLANGDRLETRLLIAADGARSRLRDLAGIKTVNWDYGQSGIVCNVAHERPHGGRADEHFLPAGPFAILPLKGNRCSLVWTERTADAERLIREDDFVFEAELEQRFGHRLGALHVEGPRRAFPLGLTLAREFVKPRFALVGDAAHRIHPIAGQGLNLGFRDAAAIAEVVVETDRLGLDIGSFAALERYQAWRRFDTVQMGVTTDILTKLFSNDNPAVRSIRDIGLGLVDRVPSLKSFFIKQAAGLSGDTPRLLKGEPI

SEQ ID NO: 139 - DNA, 1179 bp, Xanthomonas campestris
  CDS (1)..(1179)
atgcagacggtggatatcgcggtgatcggtgccgggccggttggcctggcgtttgcacggacgctggccggcagcgggttatcggtcacgttgatcgaccagcaatcgcgcgaacaccttgccgatccggccttcgatggacgcgagatcgcgctgacgtatgcatcgcgcgcgctgctggaaacgtgtggcctctggcagcacgtgtcgcccgatgcgatctcgccactgcgcgatgcgcgggtaatggacggccattcaccgtttgcgctgactttcgcatccgccgcgcggcacgccggcgacctgggctggctggtacccaatcatctgatccgccgcgccgcgtggcaggccgtgcaggcgcagccggggctggagatccgctgcggccatcgcgtgcgcgcgctacagcacacgcccacgcgtgtgtgtgtggaactcgccgatggggcgcggctgtcggcgcggctgctggttgcagccgacagccggttttccagcacgcggcggttgcttggcatcggcgcgcagctgcgcgatttcggcaagaccatgttggtgtgccgcgtgcgccatgcagtgccgcaccaccatgcagcctgggagtggtttggctatggcaagacgctggccttgctgccgctgaagggcaaccgcgctggcgccgtgctgaccttgccgccacgccaggtcgaggctttgctggcgatggacgcgcgcgcgttcggcgcggcggtgacggacgccttcgaacaccggctcggcccgatgcagcaggacggcagccgccatgcgtatccgttgatcgcaacctatgcacaacagtttgccggcgagcgtgcggcgttgatcggcgatgcggcggtgggcatgcacccggtcaccgcgcacggcttcaacttcgggttgcaaagccaggcgcgtctggccgagcgcgtgctggccgcggccgcgcgcggtggcgatatcggcgccgcagcggtcgtgcagggatatgcgcgcgcgcatcgtctggcgacgcgcccgctgtatgaagcaaccaatgcactggccgcgctgtacaccgacgatcgtgcaccggcccgcttgctgcgacgtggcgccttgcgtgcggccaatgcggtggcgccgttcaagcaggcgattgcagcgcatctgacccagcggagcgtttga

SEQ ID NO: 140 - protein, 392 aa, Xanthomonas campestris
MQTVDIAVIGAGPVGLAFARTLAGSGLSVTLIDQQSREHLADPAFDGREIALTYASRALLETCGLWQHVSPDAISPLRDARVMDGHSPFALTFASAARHAGDLGWLVPNHLIRRAAWQAVQAQPGLEIRCGHRVRALQHTPTRVCVELADGARLSARLLVAADSRFSSTRRLLGIGAQLRDFGKTMLVCRVRHAVPHHHAAWEWFGYGKTLALLPLKGNRAGAVLTLPPRQVEALLAMDARAFGAAVTDAFEHRLGPMQQDGSRHAYPLIATYAQQFAGERAALIGDAAVGMHPVTAHGFNFGLQSQARLAERVLAAAARGGDIGAAAVVQGYARAHRLATRPLYEATNALAALYTDDRAPARLLRRGALRAANAVAPFKQAIAAHLTQRSV

SEQ ID NO: 141 - DNA, 1170 bp, Pasteurella multocida
  CDS (1)..(1170)
atgaaaacatttgatctggttattgtcggtggtggcatggttgggctcactctcgctgctcgcctcgctaacgcaccactacgcattgcgctgattgaggcatttccgccaacaaccccactagaaacagttactcatcgcgtgagtgcgttaaacctggcgagccagcatttactgactcaacttggtgtctggcaagacatcacccacatacgagcaacggaatacaatgccatgcacgtatgggaaaaagatagctttgctcatattcattttacgaccgcaggattaggcatttctcacttagggcatattgttgaaaaccacgtaattcagcaaacattatggcaaaaagtgaatcaacaaaaaaatatcgaaatactcaccgcacttccacaaacattaggcttaaccgaaagccacgccatgctctcactcaatgatggtcaaatggtcgccaccaaattactagtggctgccgatggtgcaaactcttgggtacgcaaacaagcaaacattccacttgtttttagagattatggacatcatgcattagtttgtaacgtagcaaccacagaaccgcaccaacattgcgcacgccagatattctcaaaagacagtatccttgccttcttacccttacatcaacaacacctttgttcgatagtttggtcacaacctggagaacaagcagagcaccttgcacaatgtgatgaagaagaatttaatcgcgcattatctgtcgcctttgatatgcatctgggattatgtcaagttcaaggggaaagacaagcgattaagttaacagcacgttatgcccgtgattttgctcaaaatagaattgcgctcgtaggtgatgcagcacacactattcatcctctagcaggtttaggggtcaatttaggcttacaagatgttatcgaattggcgcggacaatagaagaaaatataaaagcagatgtggatattggacaatatcgttatttacgccactatgaacgtaaacggaagaaagagaccatgaaaatgttacttgtcatgcaaggcttaaaagatcttttccatggagctcatccaatcaagaaaatgatcaggggcattggattgagtgcaactgataaatttagccttgtcaaaacagaattaatgaaacaagccttaggattataa

SEQ ID NO: 142 - protein, 389 aa, Pasteurella multocida
MKTFDLVIVGGGMVGLTLAARLANAPLRIALIEAFPPTTPLETVTHRVSALNLASQHLLTQLGVWQDITHIRATEYNAMHVWEKDSFAHIHFTTAGLGISHLGHIVENHVIQQTLWQKVNQQKNIEILTALPQTLGLTESHAMLSLNDGQMVATKLLVAADGANSWVRKQANIPLVFRDYGHHALVCNVATTEPHQHCARQIFSKDSILAFLPLHQQHLCSIVWSQPGEQAEHLAQCDEEEFNRALSVAFDMHLGLCQVQGERQAIKLTARYARDFAQNRIALVGDAAHTIHPLAGLGVNLGLQDVIELARTIEENIKADVDIGQYRYLRHYERKRKKETMKMLLVMQGLKDLFHGAHPIKKMIRGIGLSATDKFSLVKTELMKQALGL

SEQ ID NO: 143 - DNA, 1176 bp, Pasteurella multocida
  CDS (1)..(1176)
atggacgtcatacaaaaagacatgatcgtggttggcggtggcatggttggtgcagcctgtgcgcttggcttaggtaaacaaggacatcaagtccagcttatcgaacacgccccactcccacagtttcaacctaattcgccttacgatcttcgcatttctgcgatcagtgttgcttccgttaatctcttaaaacaattaggtgcttggcagtatatcgaaaatactcgtatttgcccgtatcgcgccttagaaacctgggagatcgaaggatttgggaccactttccatagtcaagaattaaacttacctgagctgggttttatgatagaaaataatgttgtacaacttggtttgtggcaggcaatttcaagcattgaaaacatccaaacttgcgtaggatgtactatccaaaaagtcgaaaagtgcggtgaaaattggcaaattttgttagctaatggtacaacttaccaagcccctcttatcattgccgctgatggggcaaattcacagttacgccaaattgctaatattgggacgagtggttggcaatatcgtcaaagctgtttgcttattaccgtcgatactgaacttgaacaacaagatgtcacctggcaacaatttttcccttctggaccaagagcctttctaccattattaggcaaacaagcctgcttagtttggtatgattccccacaacgtatccaaaccctcaaacaactttctcgcgaaaaattagcggcgcaaattgagcaagctttcccggcacgattaggaaaaatcaaagtccaagcagcaaatagctttgagctgactcgaacccatgcgcaagattactttaaacaaggtattgtgctagtaggtgatgctgcacacaccattaatcctcttgctggacaaggtgtgaatctaggttttaaagatgtcaacattctgcttgaagtactacagcaggcgagtcagaaaaaagagcctctcgccagtgatgatgtacttatacgttatcagcgtaaacgtaaacccgataacctattaatgcaaacaggtatggatgtattttataaaacgtttaaagaagatatcttaccgctcaaaatagtacgtaatgcctcattattcctcgccaacaaagcaacgccattgaaaaagcaggcattgaaatatgcattgggtttataa

SEQ ID NO: 144 - protein, 391 aa, Pasteurella multocida
MDVIQKDMIVVGGGMVGAACALGLGKQGHQVQLIEHAPLPQFQPNSPYDLRISAISVASVNLLKQLGAWQYIENTRICPYRALETWEIEGFGTTFHSQELNLPELGFMIENNVVQLGLWQAISSIENIQTCVGCTIQKVEKCGENWQILLANGTTYQAPLIIAADGANSQLRQIANIGTSGWQYRQSCLLITVDTELEQQDVTWQQFFPSGPRAFLPLLGKQACLVWYDSPQRIQTLKQLSREKLAAQIEQAFPARLGKIKVQAANSFELTRTHAQDYFKQGIVLVGDAAHTINPLAGQGVNLGFKDVNILLEVLQQASQKKEPLASDDVLIRYQRKRKPDNLLMQTGMDVFYKTFKEDILPLKIVRNASLFLANKATPLKKQALKYALGL

SEQ ID NO: 145 - DNA, 1161 bp, Gamma
  CDS (1)..(1161)
atggaggttccaattgttatttctggcggagggataataggtaattacatttctcttaggcttgaaaaaaataatatcaaaaccgttattgtcgaaaaagctagtagtttcaaagccctagataagggtataagaacagtcactctcaatgagcattctatgcaaatgctaaaaaatattggtatttgcccatcaattgctcaaatcaacagcatcgacgtattagatggtgagggtacaggcaaaattcaatttctagcaaaggacgtaggcagcgaaaacctttcatatgtaacctatttcaatgaattacaaaaactaatttctgatccatgtaaagaaagaaccttatttaataatgagattgattcagttcagaatcttaatacagaatctgatccagagatcatgcttaaagatggcatgaccataaaaacgaatctaattgctggatgtgatggaagaaattcaaatattgcaaaaattgcttcacttacaagcagcttcgatgactacttacaaacagctttaacttttgtcgttgatattgataatgattcacatggcaaagctcaccaagttttttctgaaaaaggaatatttgcacttatgccactcccagaaggcaagggtgagatgaataaatgcacagtggtttggtcaataaaaaatcaagttttgggagatgagcctgtatctgagtttgtaaaaaataacatttctttttttgaatcaaagcttaatgttagtctcagggttaagtcagaaattttaagttttaaattatcgaaccatcattttgaaaactatattagcggacctattgttcttcttggtgatgctgctcactcaattcaccccttagcaggtcaaggtattaatctaggatttgcagatgcagatactttttgtgaagaggtaattagttcttataaaaaagggattgcctttaatgagaaatcagttttaaaaagatatgagattagaagaaaaagtatgaactttttaatgttgaagtctatggacttttttgtggatttatttggttcagaaaatttatatctaaggctgatcagaaatttaggtatttcttcgttaaataaatcaaagtttgttaaagcattctttataagacatgcctctggaatgaataagttttaa

SEQ ID NO: 146 - protein, 386 aa, Gamma
MEVPIVISGGGIIGNYISLRLEKNNIKTVIVEKASSFKALDKGIRTVTLNEHSMQMLKNIGICPSIAQINSIDVLDGEGTGKIQFLAKDVGSENLSYVTYFNELQKLISDPCKERTLFNNEIDSVQNLNTESDPEIMLKDGMTIKTNLIAGCDGRNSNIAKIASLTSSFDDYLQTALTFVVDIDNDSHGKAHQVFSEKGIFALMPLPEGKGEMNKCTVVWSIKNQVLGDEPVSEFVKNNISFFESKLNVSLRVKSEILSFKLSNHHFENYISGPIVLLGDAAHSIHPLAGQGINLGFADADTFCEEVISSYKKGIAFNEKSVLKRYEIRRKSMNFLMLKSMDFFVDLFGSENLYLRLIRNLGISSLNKSKFVKAFFIRHASGMNKF

SEQ ID NO: 147 - DNA, 1149 bp, Haemophilus ducreyi
  CDS (1)..(1149)
atgaaatctgctgatcttattattattggtggtggaatggttggtttggcgcttgctggcttattaaaagatagcccttgccaaattaaaatcattgaaaaatccgcaccaaaaacccaaaaatactacgccaatcgcgtcagtgcaattaataccgccagtgaaaaaatgttacaacaactaggcgtgtttgagcatataccaaccgatgcttatactgattatcaaaaaataattgtcagtgaaaaagatagctttgcgaaaattgaatttgataacaatgacttagctattaaacaactaggacttacacaattagggcttattattgccaatagccaactacaacaagcattatggcaacaagtcagtcaacaaaagaatgttgaaataatactcagcacacccaaaacgattggcattagtgaaagtggtgcttttcttaccttagaaaatggtgaaatgctggctggcaaactagtagtaggcgctgatggtgcacattcttggctacgtaaccaaattaatatcccattgatcagccaagattatcaacaaactgcactagtctgttgcgttgaaacggcagaaccgcataacaacatcgcccgccaaatttttgggcctgatagcatcttagcttttttacccttagccgataaaaatcagtgttcaattgtgtggtcattaccccccgaccaagccaacaaactaaccacttgtgatgaacaacaatttaaccaagcacttacgattgcttttgactatcaacttggattagtcaaattacaagactcacgaaaaatttacccgcttactgcccgttatgcacgcgatttcgcacaaatgcgaatagcgctaattggtgatgcagcgcatactatccacccactagctggcttaggcgttaatttaggctttgccgacgctatcacactagcagaacaaatcaaattacacttagccgccgcacatgatattggtgaatatcgacatttacgttactttgaacgtacacgtaaaacagaaacaatcaaattattagctgcaatggaaggcttaaaacaattatttagtggaaataatccgcttaaaaaattaataagaggcatcggtttagttggtacaaaccacttttccggctattaa

SEQ ID NO: 148 - protein, 382 aa, Haemophilus ducreyi
MKSADLIIIGGGMVGLALAGLLKDSPCQIKIIEKSAPKTQKYYANRVSAINTASEKMLQQLGVFEHIPTDAYTDYQKIIVSEKDSFAKIEFDNNDLAIKQLGLTQLGLIIANSQLQQALWQQVSQQKNVEIILSTPKTIGISESGAFLTLENGEMLAGKLVVGADGAHSWLRNQINIPLISQDYQQTALVCCVETAEPHNNIARQIFGPDSILAFLPLADKNQCSIVWSLPPDQANKLTTCDEQQFNQALTIAFDYQLGLVKLQDSRKIYPLTARYARDFAQMRIALIGDAAHTIHPLAGLGVNLGFADAITLAEQIKLHLAAAHDIGEYRHLRYFERTRKTETIKLLAAMEGLKQLFSGNNPLKKLIRGIGLVGTNHFSGY

SEQ ID NO: 149 - DNA, 1461 bp, Arabidopsis thaliana
  CDS (1)..(1461)
atgtctaaggacagggtgctcgcaaggaatcttaggacaagtgtctgtggaacaaggattttgcagaggacttgttcgactgttgtgacacatgatgtttctacttcttgttccaatatggttggaatcgctttagctgcttcattggccagcaagccattgacaaagcacttgaatgtcgctattattgacaataatcctcttttggggagaagaaatatcatagagaaagggcatcaacctgatcccagagtcagtacagtcacacctgcaacaatatccttcctcaaagatattggtgcctggaaatacattgagcaacagcgacatgcgtattttgataagatgcaggccttggatatacaagatacaatgctaatgatgtacatcaagatgttttggggtaagcatattgctatatacatctgcatccttgatgatgttaatagctgtgtactcattgttgacatgatccaggaatcagatctccagaagactgtttatcccgcgaggttaaatgcgatggatatgctacctagctcttcgttgacaggtcttggtgaagtaccatccacaacagacttgttcatgcgaggacgccttgctaagctggagctaagcgatggaaatcgcgtctacgcaaaactggtggtaggcgctgatgggtctaagtcgcgagtaagggagttggctgggatcaaaacgactggatggaactactcacagaacgctataatttgtactgttgagcatacagccgaaaactacacagcatggcaacggtttttacccaatggcccaatcgcacttcttcccattggtgacaagtttagcaacatagtatggaccatggacccaaaagaggcatcagatcgaaaattgatgaacgaggatgacttcatcaaagctgtaaatgatgctctggattctggatatggtcctaatccagagactacaagttcacgggatagtctctcttggcttacaggagatgcgaccatatctgccaaagagaggtttgaaactcctcccaaggttgtgaagctttcttcagagagaatgatgttccctttgtctttaaggcacgcaaaagactatgtgtcaaaacgtgtggctcttgttggtgactcagctcatacagttcacccgttggctggtcaaggagtaaatctaggatttgcagatgcgtgtgctctctccaaagctatagcagagggcattgctcttggtactgatataggcgaggcgaatctgctcaaacgttatgaagcagagagaaaacctgcaaatatagcaatgatggcggttttagacggaatccagaagatgtactcgttggatttcggaccgctgaatgctctaagagcagctgcattccacggggctcactacatttcgccgcttaaaaagcgtatcatatcttatgcttcaggagagcaatctttgccgctattttcttga

SEQ ID NO: 150 - protein, 486 aa, Arabidopsis thaliana
MSKDRVLARNLRTSVCGTRILQRTCSTVVTHDVSTSCSNMVGIALAASLASKPLTKHLNVAIIDNNPLLGRRNIIEKGHQPDPRVSTVTPATISFLKDIGAWKYIEQQRHAYFDKMQALDIQDTMLMMYIKMFWGKHIAIYICILDDVNSCVLIVDMIQESDLQKTVYPARLNAMDMLPSSSLTGLGEVPSTTDLFMRGRLAKLELSDGNRVYAKLVVGADGSKSRVRELAGIKTTGWNYSQNAIICTVEHTAENYTAWQRFLPNGPIALLPIGDKFSNIVWTMDPKEASDRKLMNEDDFIKAVNDALDSGYGPNPETTSSRDSLSWLTGDATISAKERFETPPKVVKLSSERMMFPLSLRHAKDYVSKRVALVGDSAHTVHPLAGQGVNLGFADACALSKAIAEGIALGTDIGEANLLKRYEAERKPANIAMMAVLDGIQKMYSLDFGPLNALRAAAFHGAHYISPLKKRIISYASGEQSLPLFS

SEQ ID NO: 151 - DNA, 1356 bp, Caenorhabditis elegans
  CDS (1)..(1356)
atgaaacttccgggtggaactattatttgtgccagaaacgcttcttcttactatgatacggttatcgttggtggcggaatggttggaaatgcaatggcatgttcacttggggccaacaaatcgttccaatcgaaaagtgttctccttcttgacgcgggccgatctccatctctggcatcttttaaaccaggagcaccattcaacaatcgagtcgttgcgacaagtccaacatcaattgatacgttcaaaaaattgggagtttgggatcaaataaattcgcatcgaacaaaaaaagtcaaccgactttttgttttcgatagttgttcaacttcggagattgaattcgaaagaggtcagcaggaagaagttgcgttcattattgaaaatgatttaattgttggatccctctatgaaaaacttgctgaatacaaaaatgtcgatgtgaagactggagcaaaagttgaagactgctccattccgaatgctcttgagaatatggcgacaatcaagttagaaaatggtgatgtgattgaaacgagtcttttgattggtgctgatggtgtcaactcaaaagtgagacatgcttcaaatctggactatactacatttaattataaccagcatggacttgttgctatagttaatatcgagactgcaaacggaaagaatgaaacagcttggcaacggtttacaacactcggaccagttgcacttctgcctctttctgatactgtgtccggtttgacgtggtcaacaagtcccgaagaagctcaacgattgaaacaacttccttctgatcaatttgttgatgaactgaattccgcattgttttcacaaaacaatcaaattcctttggtgaatcagaccattttcgcactgaatcgtatgaatcctttccgaacggaaacttttgggaggaaagctgaaggaacaactccaccacatgtgattactgttcaggacaaaagtcgagcctcatttcctcttggtttcggaaatgctcatagttatatcaccacacgatgcgctttgattggagatgctgctcacagaatgcatccacttgccgggcaaggagtaaaccttggctggagtgatgtgcaaattctagataaagtactcggtgacgctgtgcgtgaaggtgcagacatcggaagcataacatatctgcgagaatatgattcggcggcacaaaaacacaatcttcctgtaatggtgtctgttgatctgctcaatcgtctctaccgtaccgatgctccagctattgttgccgcaagagcttttggcctaaatgcattcaattctttaggacctgtcaaaaactttctgatgaattatttgtccgcacatcgataa

SEQ ID NO: 152 - protein, 451 aa, Caenorhabditis elegans
MKLPGGTIICARNASSYYDTVIVGGGMVGNAMACSLGANKSFQSKSVLLLDAGRSPSLASFKPGAPFNNRVVATSPTSIDTFKKLGVWDQINSHRTKKVNRLFVFDSCSTSEIEFERGQQEEVAFIIENDLIVGSLYEKLAEYKNVDVKTGAKVEDCSIPNALENMATIKLENGDVIETSLLIGADGVNSKVRHASNLDYTTFNYNQHGLVAIVNIETANGKNETAWQRFTTLGPVALLPLSDTVSGLTWSTSPEEAQRLKQLPSDQFVDELNSALFSQNNQIPLVNQTIFALNRMNPFRTETFGRKAEGTTPPHVITVQDKSRASFPLGFGNAHSYITTRCALIGDAAHRMHPLAGQGVNLGWSDVQILDKVLGDAVREGADIGSITYLREYDSAAQKHNLPVMVSVDLLNRLYRTDAPAIVAARAFGLNAFNSLGPVKNFLMNYLSAHR

SEQ ID NO: 153 - DNA, 1579 bp, Drosophila melanogaster
  CDS (49)..(1482)
ataatgaaataatcgtggaattacgagaaacttttgaaatttcggaagatgttgggtgttctacgtatccaaggagcgttggcttcggcggggcaggcgcgtcttctgtccgtccgcctgctggccagcaaatccaccactgacatgaccacaaaccgcggtgaatccacacaatcgacgtccaccgaacactttgatataatcatcggaggcggcggactggtgggcaccacattggccgcagctctggccaagaactcgacgttggcggacaagaaggtactgctgctggaaggtgcgcccgagttccggggatttaatcccactgggccataccagaatcgcgtatccgccatcaatcacaactccatcgagctgttcaagtccattgatgcgtggaagcacatcgagtcggcgcgctacaagcccgtcaagcagatgcaggtgtgggagtccaacacggacgcactgatccagttccagcacgataactttgccagcgacgtggcctgcatcattgagaacgatttgatcctggatgcggtctatgcgctggccaaggaatcacccaatgtggagatcctcaacaaggccagaatccagtgcgttcgcctgcccagggactccaactccaatcactccgagctgcagctagaggatggacgcaacttttcctgcgatttgctgatcggagcggatggcgccaattccgtggtcagaaaggagatgaacgtggatgtattttccctgaactacgaccgcatgggcctggtggctacgctggaactcggcgaagatgcctgtgataattccgtggcgtggcagaggtttctgcccaatggaccagtggcactgctaccactaacggacaggctgagctccctggtctggagcaccaccaacgagcaagcgaaaatgctgcaagccctaccacccacagaattcgtagacgccctcaacgaagccttctgccggcagtatccgcgcgttgagctcgcagacaaggctgtccaggcgctgaactccttgtttggacacaacggcagccagcaccaggtgcaatatccgccacgggtgtgcggcgtgctggacaagtcgcgtgccacgtttccattgggtttcctgcacgcctcgtcgtacgtgtgcaatggagcagctctggtcggtgatgccgcccatcgagtgcatccgctcgccggccagggcgtcaatctgggcttcagcgatgtgcggtatctggtggaatcgctggccgccggtgcatacgccggtttcaagctcggcgacaagcagcatctcatcaaatacgagcgcaagtgtctggcgaagaacgtgcccattatgctgggcgtgcatggactgcacacgctctacgccacgcagttcagtccggtggtcttgctgcgcagcttgggtctgcagctgacccagaacttgccgcccgtcaagaatctgttcatgcgcggagcgatgggtcagtagaacagggacaataaatggggaaatggaaattaaattttaagtgtttactgtttgcacatcacttgtgagcggaataaagtcagagagtttatataac

SEQ ID NO: 154 - protein, 477 aa, Drosophila melanogaster
MLGVLRIQGALASAGQARLLSVRLLASKSTTDMTTNRGESTQSTSTEHFDIIIGGGGLVGTTLAAALAKNSTLADKKVLLLEGAPEFRGFNPTGPYQNRVSAINHNSIELFKSIDAWKHIESARYKPVKQMQVWESNTDALIQFQHDNFASDVACIIENDLILDAVYALAKESPNVEILNKARIQCVRLPRDSNSNHSELQLEDGRNFSCDLLIGADGANSVVRKEMNVDVFSLNYDRMGLVATLELGEDACDNSVAWQRFLPNGPVALLPLTDRLSSLVWSTTNEQAKMLQALPPTEFVDALNEAFCRQYPRVELADKAVQALNSLFGHNGSQHQVQYPPRVCGVLDKSRATFPLGFLHASSYVCNGAALVGDAAHRVHPLAGQGVNLGFSDVRYLVESLAAGAYAGFKLGDKQHLIKYERKCLAKNVPIMLGVHGLHTLYATQFSPVVLLRSLGLQLTQNLPPVKNLFMRGAMGQ

SEQ ID NO: 155 - DNA, 1609 bp, Homo sapiens
  CDS (81)..(1487)
gggattggagtgctctgctccggacgcactacgtaggtgggcctgcgggagttctgagtgcgacggcgcaggtctgcaccatggcggcccggcttgtcagccgatgcggggctgtgcgtgcagctccccacagcggcccgctggtgtcctggcgcaggtggtccggcgcctcaacagacaccgtgtatgacgtggtggtgtcgggtggaggcctggtgggcgctgccatggcctgtgccttgggatatgatattcactttcatgacaagaaaatcctgttgctcgaagcaggtccaaagaaagtactggagaaattgtcagaaacttacagcaacagggtcagctccatttcccctggctctgcaacgcttctcagtagttttggtgcctgggaccatatctgcaacatgagatacagagcctttcggcgaatgcaggtgtgggacgcctgctcagaggccctgataatgtttgataaggataatttagatgacatgggctatatcgtggagaatgatgtcatcatgcatgctctcactaagcagttggaggctgtgtctgaccgagtgacggttctctacaggagcaaagccattcgctatacctggccttgtccatttcctatggccgactccagcccttgggttcatattaccctaggtgatggcagcaccttccagaccaaattgttgataggtgcagatggtcacaactccggagtacggcaggctgttggaatccagaatgtgagctggaactatgaccagtctgctgttgtggctactctgcatttatcagaggccacagaaaacaacgtagcctggcagagatttcttccctctgggcctattgctctgctcccgctctcagacaccttgagttccttggtttggtccacgtcccatgaacatgcagcagagctagttagcatggatgaggaaaaatttgtggatgccgttaactctgccttttggagtgatgctgaccacacggacttcatcgacacagctggtgccatgctgcagtatgctgtcagccttctgaagcccactaaggtctcggctcgccagctgcccccaagcgtagccagggtggatgccaaaagccgagttctgtttcctcttgggttgggacatgctgctgagtacgtcaggcctcgggtggcgctcattggggatgcagcccacagagtccatccgcttgcaggacagggtgtcaacatgggctttggggatatctccagcttggcccatcacctcagtacggcagccttcaatgggaaggacttaggttccgtgagccacctcacaggttatgaaacagaaagacagcgtcacaacactgctcttctggctgctacagacttactaaaaaggctctattctaccagtgcctccccgcttgtgttgctcaggacgtggggcttgcaggccacaaatgcagtgtctccactcaaagaacagattatggcctttgcaagcaaatgagtactcctctcctaaagaaagattacgttgatgaaaaagaacatcctgcccaggacccatcatacatattttcaagatcttatttaatttaataaacttactttacattaaaaaaaaaaaaa

SEQ ID NO: 156 - protein, 468 aa, Homo sapiens
MAARLVSRCGAVRAAPHSGPLVSWRRWSGASTDTVYDVVVSGGGLVGAAMACALGYDIHFHDKKILLLEAGPKKVLEKLSETYSNRVSSISPGSATLLSSFGAWDHICNMRYRAFRRMQVWDACSEALIMFDKDNLDDMGYIVENDVIMHALTKQLEAVSDRVTVLYRSKAIRYTWPCPFPMADSSPWVHITLGDGSTFQTKLLIGADGHNSGVRQAVGIQNVSWNYDQSAVVATLHLSEATENNVAWQRFLPSGPIALLPLSDTLSSLVWSTSHEHAAELVSMDEEKFVDAVNSAFWSDADHTDFIDTAGAMLQYAVSLLKPTKVSARQLPPSVARVDAKSRVLFPLGLGHAAEYVRPRVALIGDAAHRVHPLAGQGVNMGFGDISSLAHHLSTAAFNGKDLGSVSHLTGYETERQRHNTALLAATDLLKRLYSTSASPLVLLRTWGLQATNAVSPLKEQIMAFASK

SEQ ID NO: 157 - DNA, 1512 bp, Mus musculus
  CDS (6)..(1415)
gctccatggcaggcttgctctgcgttcgctggtggagttccgcgcagctcgcagccagaggaggcccgctagttgccagccagcgatgggcgggctcctcggcagacaccgtgtacgacgtggtggtgtcaggaggaggcctagtgggctctgccatggcttgtgccttaggacatgatattcactttcatgacaagaaaatcctgttgctggaggcgggtccaaagaaagccctggagaaactgtcagagacttacagcaacagagtcagctccatatcccctggctccacaaccctgctcagcagttttggtgcatgggaccacatctgcaatatgcgctgcaaagccttccggaggatgcaggtgtgggactcctgctcagaggccttgataatgttcgacagggacaacctggatgacatgggctatatagtggaaaatgacgtcatcatgtatgccctcaccaaacagctggaggctgtggcagatcgagtgaaggttctctatgagagcaaagctgttggctattcctggcctggtgcattttccatggcagactccagcccttgggtccatattaccctaggtgatggcagtaccctccagaccaaactgttgattggtgctgatgggcacaagtcaggagtgaggcaagctgctgggatccagaatgtcagctggaagtacgaccagtctgctgtggtggccactctccacttatcagaggccacagaaaacaatgtagcctggcagagatttcttccctctgggcctattgctctgctcccgctctcggataccttgagctccttggtctggtccacatcacacgagcatgcagcagagctggtcagcatggatgaggaagaattcgtggatgccatcaactctgccttttggagtgatgttcaccacacagacttcgtcgactctgccagcgccatggtgcgccatgctgtcgcccttctgaagcccactaaggtctcagcccgtcagctgcccccaagtatagccaaggtggatgctaaaagcagagccctctttcctctggggctgggacatgctgctgagtacgtccggcctcgggtggccctcattggtgatgcagcccacagaatccatccactcgcgggacaaggtgtcaacatgggcttcggggatatttccagcttggttcatcatctcagtacagcagccttcaatgggaaggacttaggctccatgagccacctcacaggttatgagacagacagacagcgtcataacactgctctcctggctgctactgacctgttgaaaaggctctactctaccagtgccactcccctcgtgctgctcaggacctggggcttgcaggccacgaacgcagtgtctcctctcaaagaacagattatggcctttgcgagcaaatgagtgcttctcttctggagaccgtgatgacaaagaacacctagccctggggccttcccaatgtggtttaataaatttacactagaaaaaaaaaaaaaaa

SEQ ID NO: 158 - protein, 469 aa, Mus musculus
MAGLLCVRWWSSAQLAARGGPLVASQRWAGSSADTVYDVVVSGGGLVGSAMACALGHDIHFHDKKILLLEAGPKKALEKLSETYSNRVSSISPGSTTLLSSFGAWDHICNMRCKAFRRMQVWDSCSEALIMFDRDNLDDMGYIVENDVIMYALTKQLEAVADRVKVLYESKAVGYSWPGAFSMADSSPWVHITLGDGSTLQTKLLIGADGHKSGVRQAAGIQNVSWKYDQSAVVATLHLSEATENNVAWQRFLPSGPIALLPLSDTLSSLVWSTSHEHAAELVSMDEEEFVDAINSAFWSDVHHTDFVDSASAMVRHAVALLKPTKVSARQLPPSIAKVDAKSRALFPLGLGHAAEYVRPRVALIGDAAHRIHPLAGQGVNMGFGDISSLVHHLSTAAFNGKDLGSMSHLTGYETDRQRHNTALLAATDLLKRLYSTSATPLVLLRTWGLQATNAVSPLKEQIMAFASK

SEQ ID NO: 159 - DNA, 27 bp, artificial sequence
  Artificial sequence
  Primer
atgttcttttcaaaagttatgcttact

SEQ ID NO: 160 - DNA, 25 bp, artificial sequence
  Artificial sequence
  Primer
tcatttctcatttcctcctaatgtg

SEQ ID NO: 161 - DNA, 1851 bp, Saccharomyces cerevisiae
  CDS (1)..(1851)
atgaaaaatatcatttcattggtaagcaagaagaaggctgcctcaaaaaatgaggataaaaacatttctgagtcttcaagagatattgtaaaccaacaggaggttttcaatactgaagattttgaagaagggaaaaaggatagtgcctttgagctagaccacttagagttcaccaccaattcagcccagttaggagattctgacgaagataacgagaatgtgattaatgagatgaacgctactgatgatgcaaatgaagctaacagcgaggaaaaaagcatgactttgaagcaggcgttgctaaaatatccaaaagcagccctgtggtccatattagtgtctactaccctggttatggaaggttatgataccgcactactgagcgcactgtatgccctgccagtttttcagagaaaattcggtactttgaacggggagggttcttacgaaattacttcccaatggcagattggtttaaacatgtgtgtcctttgtggtgagatgattggtttgcaaatcacgacttatatggttgaatttatggggaatcgttatacgatgattacagcacttggtttgttaactgcttatatctttatcctctactactgtaaaagtttagctatgattgctgtgggacaaattctctcagctataccatggggttgtttccaaagtttggctgttacttatgcttcggaagtttgccctttagcattaagatattacatgaccagttactccaacatttgttggttatttggtcaaatcttcgcctctggtattatgaaaaactcacaagagaatttagggaactccgacttgggctataaattgccatttgctttacaatggatttggcctgctcctttaatgatcggtatctttttcgctcctgagtcgccctggtggttggtgagaaaggatagggtcgctgaggcaagaaaatctttaagcagaattttgagtggtaaaggcgccgagaaggacattcaagttgatcttactttaaagcagattgaattgactattgaaaaagaaagacttttagcatctaaatcaggatcattctttaattgtttcaagggagttaatggaagaagaacgagacttgcatgtttaacttgggtagctcaaaatagtagcggtgccgttttacttggttactcgacatatttttttgaaagagcaggtatggccaccgacaaggcgtttactttttctctaattcagtactgtcttgggttagcgggtacactttgctcctgggtaatatctggccgtgttggtagatggacaatactgacctatggtcttgcatttcaaatggtctgcttatttattattggtggaatgggttttggttctggaagcagcgctagtaatggtgccggtggtttattgctggctttatcattcttttacaatgctggtatcggtgcagttgtttactgtatcgttgctgaaattccatcagcggagttgagaactaagactatagtgctggcccgtatttgctacaatctcatggccgttattaacgctatattaacgccctatatgctaaacgtgagcgattggaactggggtgccaaaactggtctatactggggtggtttcacagcagtcactttagcttgggtcatcatcgatctgcctgagacaactggtagaaccttcagtgaaattaatgaacttttcaaccaaggggttcctgccagaaaatttgcatctactgtggttgatccattcggaaagggaaaaactcaacatgattcgctagctgatgagagtatcagtcagtcctcaagcataaaacagcgagaattaaatgcagctgataaatgttaa

SEQ ID NO: 162 - protein, 616 aa, Saccharomyces cerevisiae
MKNIISLVSKKKAASKNEDKNISESSRDIVNQQEVFNTEDFEEGKKDSAFELDHLEFTTNSAQLGDSDEDNENVINEMNATDDANEANSEEKSMTLKQALLKYPKAALWSILVSTTLVMEGYDTALLSALYALPVFQRKFGTLNGEGSYEITSQWQIGLNMCVLCGEMIGLQITTYMVEFMGNRYTMITALGLLTAYIFILYYCKSLAMIAVGQILSAIPWGCFQSLAVTYASEVCPLALRYYMTSYSNICWLFGQIFASGIMKNSQENLGNSDLGYKLPFALQWIWPAPLMIGIFFAPESPWWLVRKDRVAEARKSLSRILSGKGAEKDIQVDLTLKQIELTIEKERLLASKSGSFFNCFKGVNGRRTRLACLTWVAQNSSGAVLLGYSTYFFERAGMATDKAFTFSLIQYCLGLAGTLCSWVISGRVGRWTILTYGLAFQMVCLFIIGGMGFGSGSSASNGAGGLLLALSFFYNAGIGAVVYCIVAEIPSAELRTKTIVLARICYNLMAVINAILTPYMLNVSDWNWGAKTGLYWGGFTAVTLAWVIIDLPETTGRTFSEINELFNQGVPARKFASTVVDPFGKGKTQHDSLADESISQSSSIKQRELNAADKC

SEQ ID NO: 163 - DNA, 1575 bp, Homo sapiens (man)
  CDS (1)..(1575)
atgacagaagataaggtcactgggaccctggttttcactgtcatcactgctgtgctgggttccttccagtttggatatgacattggtgtgatcaatgcacctcaacaggtaataatatctcactatagacatgttttgggtgttccactggatgaccgaaaagctatcaacaactatgttatcaacagtacagatgaactgcccacaatctcatactcaatgaacccaaaaccaaccccttgggctgaggaagagactgtggcagctgctcaactaatcaccatgctctggtccctgtctgtatccagctttgcagttggtggaatgactgcatcattctttggtgggtggcttggggacacacttggaagaatcaaagccatgttagtagcaaacattctgtcattagttggagctctcttgatggggttttcaaaattgggaccatctcatatacttataattgctggaagaagcatatcaggactatattgtgggctaatttcaggcctggttcctatgtatatcggtgaaattgctccaaccgctctcaggggagcacttggcacttttcatcagctggccatcgtcacgggcattcttattagtcagattattggtcttgaatttatcttgggcaattatgatctgtggcacatcctgcttggcctgtctggtgtgcgagccatccttcagtctctgctactctttttctgtccagaaagccccagatacctttacatcaagttagatgaggaagtcaaagcaaaacaaagcttgaaaagactcagaggatatgatgatgtcaccaaagatattaatgaaatgagaaaagaaagagaagaagcatcgagtgagcagaaagtctctataattcagctcttcaccaattccagctaccgacagcctattctagtggcactgatgctgcatgtggctcagcaattttccggaatcaatggcattttttactactcaaccagcatttttcagacggctggtatcagcaaacctgtttatgcaaccattggagttggcgctgtaaacatggttttcactgctgtctctgtattccttgtggagaaggcagggcgacgttctctctttctaattggaatgagtgggatgtttgtttgtgccatcttcatgtcagtgggacttgtgctgctgaataagttctcttggatgagttatgtgagcatgatagccatcttcctctttgtcagcttctttgaaattgggccaggcccgatcccctggttcatggtggctgagtttttcagtcaaggaccacgtcctgctgctttagcaatagctgcattcagcaattggacctgcaatttcattgtagctctgtgtttccagtacattgcggacttctgtggaccttatgtgtttttcctctttgctggagtgctcctggcctttaccctgttcacattttttaaagttccagaaaccaaaggaaagtcttttgaggaaattgctgcagaattccaaaagaagagtggctcagcccacaggccaaaagctgctgtagaaatgaaattcctaggagctacagagactgtgtaa

SEQ ID NO: 164 - protein, 524 aa, Homo sapiens (man)
MTEDKVTGTLVFTVITAVLGSFQFGYDIGVINAPQQVIISHYRHVLGVPLDDRKAINNYVINSTDELPTISYSMNPKPTPWAEEETVAAAQLITMLWSLSVSSFAVGGMTASFFGGWLGDTLGRIKAMLVANILSLVGALLMGFSKLGPSHILIIAGRSISGLYCGLISGLVPMYIGEIAPTALRGALGTFHQLAIVTGILISQIIGLEFILGNYDLWHILLGLSGVRAILQSLLLFFCPESPRYLYIKLDEEVKAKQSLKRLRGYDDVTKDINEMRKEREEASSEQKVSIIQLFTNSSYRQPILVALMLHVAQQFSGINGIFYYSTSIFQTAGISKPVYATIGVGAVNMVFTAVSVFLVEKAGRRSLFLIGMSGMFVCAIFMSVGLVLLNKFSWMSYVSMIAIFLFVSFFEIGPGPIPWFMVAEFFSQGPRPAALAIAAFSNWTCNFIVALCFQYIADFCGPYVFFLFAGVLLAFTLFTFFKVPETKGKSFEEIAAEFQKKSGSAHRPKAAVEMKFLGATETV

SEQ ID NO: 165 - DNA, 1764 bp, Kluyveromyces marxianus var. lactis, Candida sphaerica
  CDS (1)..(1764)
atggcagatcattcgagcagctcatcttcgctgcagaagaagccaattaatactatcgagcataaagacactttgggcaatgatcgggatcacaaggaagccttgaacagtgataatgataatacttctggattgaaaatcaatggtgtccccatcgaggacgctagagaggaagtgctcttaccaggttacttgtcgaagcaatattacaaattgtacggtttatgttttataacatatctgtgtgctactatgcaaggttatgatggggctttaatgggttctatctataccgaagatgcatatttgaaatactaccatttggatattaactcatcctctggtactggtctagtgttctctattttcaacgttggtcaaatttgcggtgcattctttgttcctcttatggattggaaaggtagaaaacctgctattttaattgggtgtctgggtgttgttattggtgctattatttcgtctttaacaacaacaaagagtgcattaattggtggtagatggttcgtggcctttttcgctacaatcgctaatgcagcagctccaacatactgtgcagaagtggctccagctcacttaagaggtaaggttgcaggtctttataacaccctttggtctgtcggttccattgttgctgcctttagcacttacggtaccaacaaaaacttccctaactcctccaaggcttttaagattccattatacttacaaatgatgttcccaggtcttgtgtgtatatttggttggttaatcccagaatctccaagatggttggttggtgttggccgtgaggaagaagctcgtgaattcattatcaaataccacttaaatggcgatagaactcatccattattggatatggagatggcagaaataatagaatctttccatggtacagatttatcaaaccctctagaaatgttagatgtaaggagcttattcagaacgagatcggataggtacagagcaatgttggttatacttatggcttggttcggtcaattttccggtaacaatgtgtgttcgtactatttgcctaccatgttgagaaatgttggtatgaagagtgtctcattgaatgtgttaatgaatggtgtttattccatcgtcacttggatttcttcaatttgcggtgcattctttattgataagattggtagaagggaaggtttccttggttctatctcaggtgctgcattagcattgacaggtctatctatctgtactgctcgttatgagaagactaagaagaagagtgcttccaatggtgcattggtgttcatttatctctttggtggtatcttttcttttgctttcactccaatgcaatccatgtactcaacagaagtgtctacaaacttgacgagatctaaggcccaactcctcaactttgtggtttctggtgttgcccaatttgttaatcaatttgctactccaaaggcaatgaagaatatcaaatattggttctatgtgttctacgttttcttcgatattttcgaatttattgttatctacttcttcttcgttgaaactaagggtagaagcttagaagaattagaagttgtctttgaagctccaaacccaagaaaggcatccgttgatcaagcattcttggctcaagtcagggcaactttggtccaacgaaatgacgttagagttgcaaatgctcaaaatttgaaagagcaagagcctctaaagagcgatgctgatcatgtcgaaaagctttcagaggcagaatctgtttaa

SEQ ID NO: 166 - protein, 587 aa, Kluyveromyces marxianus var. lactis, Candida sphaerica
MADHSSSSSSLQKKPINTIEHKDTLGNDRDHKEALNSDNDNTSGLKINGVPIEDAREEVLLPGYLSKQYYKLYGLCFITYLCATMQGYDGALMGSIYTEDAYLKYYHLDINSSSGTGLVFSIFNVGQICGAFFVPLMDWKGRKPAILIGCLGVVIGAIISSLTTTKSALIGGRWFVAFFATIANAAAPTYCAEVAPAHLRGKVAGLYNTLWSVGSIVAAFSTYGTNKNFPNSSKAFKIPLYLQMMFPGLVCIFGWLIPESPRWLVGVGREEEAREFIIKYHLNGDRTHPLLDMEMAEIIESFHGTDLSNPLEMLDVRSLFRTRSDRYRAMLVILMAWFGQFSGNNVCSYYLPTMLRNVGMKSVSLNVLMNGVYSIVTWISSICGAFFIDKIGRREGFLGSISGAALALTGLSICTARYEKTKKKSASNGALVFIYLFGGIFSFAFTPMQSMYSTEVSTNLTRSKAQLLNFVVSGVAQFVNQFATPKAMKNIKYWFYVFYVFFDIFEFIVIYFFFVETKGRSLEELEVVFEAPNPRKASVDQAFLAQVRATLVQRNDVRVANAQNLKEQEPLKSDADHVEKLSEAESV

SEQ ID NO: 167 - DNA, 2655 bp, Saccharomyces cerevisiae
  CDS (1)..(2655)
atggatcctaatagtaacagttctagcgaaacattacgccaagagaaacagggtttcctagacaaagctcttcagagggtgaagggcatagcactgcgacgaaacaatagtaacaaagatcatacaacagatgatacgacaggtagcatacgaacccctacgagcttgcagcggcaaaattctgacaggcaatctaatatgacatccgtgtttacggatgacatttctaccatagacgacaactcaattttattttcagagcctcctcagaaacaatctatgatgatgtctatatgcgtaggtgtttttgttgcagttggcggatttttatttggttatgatacaggtctgatcaacagtattacatctatgaactatgtgaagtcacacgtagcacctaatcacgattcatttaccgcccaacaaatgtccattttggtgtcatttttgtcattgggaactttttttggggctttaactgcaccatttatatctgattcgtatggcaggaagcctactatcattttcagtacaattttcatcttctctatcggaaattctttacaggtaggtgctggaggaatcacattattgattgtgggaagggtcatttcaggtatcggtataggcgcaatttcagcggttgttccattataccaagcagaagctacacataaatcattaagaggtgctattatttctacttaccaatgggccattacctggggcttgctcgtgtcaagtgcagtgtcgcaagggacacacgcaagaaacgacgcatcttcgtatcggattcccatagggttgcaatatgtctggtcgtcatttctcgctatcgggatgttctttctccctgagagtccacgctattacgttttgaaagacaagctagatgaagcagctaaatctttatcgtttttaagaggtgtaccagtccatgattctgggttactggaagaactagttgaaataaaggcaacatatgattacgaggcatcttttggttcttcgaacttcattgattgttttatttcaagtaaaagtagaccaaagcaaactctaaggatgtttacgggaattgcccttcaagcatttcaacaattttcaggtatcaactttatattttactacggtgtcaatttcttcaataagacaggagtcagtaatagttatctggtttcatttataacctatgctgttaatgttgtctttaatgttcctggtttgttttttgtggaattttttggtagacgtaaggtgctggttgttgggggtgttatcatgactatagccaactttattgtggccattgttgggtgttccttaaagactgtagcggccgcaaaagttatgatagcatttatatgtctattcatagctgccttttctgctacatggggtggtgttgtttgggttatttcagcagaactgtacccattgggtgtgagatctaaatgtacggctatatgcgctgctgctaactggcttgtaaactttatttgtgctttaattaccccttatattgtagatactgggtcgcatacatcatcattaggtgcaaaaatattcttcatttggggctccttaaatgcgatgggggtgatagttgtttacttgaccgtttatgaaacgaagggtttgacattagaagagattgatgaattatatattaagtcatccactggtgtcgtgtcaccaaaatttaataaagatattagggaacgcgcacttaaattccaatacgatcctttgcaaagattagaagacggaaagaacacttttgttgctaaaagaaataattttgacgatgaaacaccaagaaatgattttcgaaatacgatatcgggcgaaatagatcatagtcccaatcaaaaagaagttcattctatcccagaacgtgttgatattcctactagtacagaaattcttgaaagcccgaacaaaagtagtggtatgacagtccctgtgtcaccttctctgcaagacgttccaatcccgcaaacaacagagcctgctgaaattcgaaccaaatatgtggacctaggaaatgggcttggtcttaatacgtataatagagggcctccctcactctcaagcgactcaagcgaagattacacagaagatgaaataggcgggccctcatctcaaggcgaccaaagtaatagaagtactatgaatgatattaatgattatatggcacgtctcattcacagtacttctactgcaagtaacacgacagataagttctccggtaaccaaagtacccttcgttaccacacggcttcctcacattcggatacaactgaagaggacagcaatttgatggacctgggaaacgggcttgccttgaatgcttataacagaggtccaccttcaattttaatgaattccagtgatgaagaggcaaatggtggtgagacgtctgataatttgaacacagctcaagacttggctggtatgaaggaacgaatggcgcagtttgcgcagagctatattgacaagagaggcggtctggaacctgaaactcaatctaatattttgagcacttctctctccgtgatggctgacactaatgaacataataatgaaatcctccactcaagcgaagaaaacgccactaatcaacctgtaaatgaaaataatgatttgaaataa

SEQ ID NO: 168 - protein, 884 aa, Saccharomyces cerevisiae
MDPNSNSSSETLRQEKQGFLDKALQRVKGIALRRNNSNKDHTTDDTTGSIRTPTSLQRQNSDRQSNMTSVFTDDISTIDDNSILFSEPPQKQSMMMSICVGVFVAVGGFLFGYDTGLINSITSMNYVKSHVAPNHDSFTAQQMSILVSFLSLGTFFGALTAPFISDSYGRKPTIIFSTIFIFSIGNSLQVGAGGITLLIVGRVISGIGIGAISAVVPLYQAEATHKSLRGAIISTYQWAITWGLLVSSAVSQGTHARNDASSYRIPIGLQYVWSSFLAIGMFFLPESPRYYVLKDKLDEAAKSLSFLRGVPVHDSGLLEELVEIKATYDYEASFGSSNFIDCFISSKSRPKQTLRMFTGIALQAFQQFSGINFIFYYGVNFFNKTGVSNSYLVSFITYAVNVVFNVPGLFFVEFFGRRKVLVVGGVIMTIANFIVAIVGCSLKTVAAAKVMIAFICLFIAAFSATWGGVVWVISAELYPLGVRSKCTAICAAANWLVNFICALITPYIVDTGSHTSSLGAKIFFIWGSLNAMGVIVVYLTVYETKGLTLEEIDELYIKSSTGVVSPKFNKDIRERALKFQYDPLQRLEDGKNTFVAKRNNFDDETPRNDFRNTISGEIDHSPNQKEVHSIPERVDIPTSTEILESPNKSSGMTVPVSPSLQDVPIPQTTEPAEIRTKYVDLGNGLGLNTYNRGPPSLSSDSSEDYTEDEIGGPSSQGDQSNRSTMNDINDYMARLIHSTSTASNTTDKFSGNQSTLRYHTASSHSDTTEEDSNLMDLGNGLALNAYNRGPPSILMNSSDEEANGGETSDNLNTAQDLAGMKERMAQFAQSYIDKRGGLEPETQSNILSTSLSVMADTNEHNNEILHSSEENATNQPVNENNDLK

SEQ ID NO: 169 - DNA, 1491 bp, Homo sapiens (man)
  CDS (1)..(1491)
atggggacacagaaggtcaccccagctctgatatttgccatcacagttgctacaatcggctctttccaatttggctacaacactggggtcatcaatgctcctgagaagatcataaaggaatttatcaataaaactttgacggacaagggaaatgccccaccctctgaggtgctgctcacgtctctctggtccttgtctgtggccatattttccgtcgggggtatgatcggctccttttccgtcggactcttcgtcaaccgctttggcaggcgcaattcaatgctgattgtcaacctgttggctgtcactggtggctgctttatgggactgtgtaaagtagctaagtcggttgaaatgctgatcctgggtcgcttggttattggcctcttctgcggactctgcacaggttttgtgcccatgtacattggagagatctcgcctactgccctgcggggtgcctttggcactctcaaccagctgggcatcgttgttggaattctggtggcccagatctttggtctggaattcatccttgggtctgaagagctatggccgctgctactgggttttaccatccttcctgctatcctacaaagtgcagcccttccattttgccctgaaagtcccagatttttgctcattaacagaaaagaagaggagaatgctaagcagatcctccagcggttgtggggcacccaggatgtatcccaagacatccaggagatgaaagatgagagtgcaaggatgtcacaagaaaagcaagtcaccgtgctagagctctttagagtgtccagctaccgacagcccatcatcatttccattgtgctccagctctctcagcagctctctgggatcaatgctgtgttctattactcaacaggaatcttcaaggatgcaggtgttcaagagcccatctatgccaccatcggcgcgggtgtggttaatactatcttcactgtagtttctctatttctggtggaaagggcaggaagaaggactctgcatatgataggccttggagggatggctttttgttccacgctcatgactgtttctttgttattaaaggataactataatgggatgagctttgtctgtattggggctatcttggtctttgtagccttctttgaaattggaccaggccccattccctggtttattgtggccgaactcttcagccagggcccccgcccagctgcgatggcagtggccggctgctccaactggacctccaacttcctagtcggattgctcttcccctccgctgctcactatttaggagcctacgtttttattatcttcaccggcttcctcattaccttcttggcttttaccttcttcaaagtccctgagacccgtggcaggacttttgaggatatcacacgggcctttgaagggcaggcacacggtgcagatagatctggaaaggacggcgtcatggagatgaacagcatcgagcctgctaaggagaccaccaccaatgtctaa

SEQ ID NO: 170 - protein, 496 aa, Homo sapiens (man)
MGTQKVTPALIFAITVATIGSFQFGYNTGVINAPEKIIKEFINKTLTDKGNAPPSEVLLTSLWSLSVAIFSVGGMIGSFSVGLFVNRFGRRNSMLIVNLLAVTGGCFMGLCKVAKSVEMLILGRLVIGLFCGLCTGFVPMYIGEISPTALRGAFGTLNQLGIVVGILVAQIFGLEFILGSEELWPLLLGFTILPAILQSAALPFCPESPRFLLINRKEEENAKQILQRLWGTQDVSQDIQEMKDESARMSQEKQVTVLELFRVSSYRQPIIISIVLQLSQQLSGINAVFYYSTGIFKDAGVQEPIYATIGAGVVNTIFTVVSLFLVERAGRRTLHMIGLGGMAFCSTLMTVSLLLKDNYNGMSFVCIGAILVFVAFFEIGPGPIPWFIVAELFSQGPRPAAMAVAGCSNWTSNFLVGLLFPSAAHYLGAYVFIIFTGFLITFLAFTFFKVPETRGRTFEDITRAFEGQAHGADRSGKDGVMEMNSIEPAKETTTNV

SEQ ID NO: 171 - DNA, 1770 bp, Arabidopsis thaliana (mouse-ear cress)
  CDS (108)..(1589)
agtaagacctaactcttaacgaacttttagataaaagcttataactgagagagacatagatcgacaaaagtctctataccttcttgtaacgtggtggttaattaatcatggccgatcaaatctccggcgagaagccggccggagttaatagattcgctcttcaatgtgctatcgtcgcctccatcgtctccatcatctttggttacgatactggtgttatgagtggagcgatggtgtttatagaagaagatttgaagacaaacgacgttcaaatagaagttctcactggaattctcaacctttgtgcccttgtcggatcattgctcgccggaagaacgtcggacataatcggacggcgttacacaatcgtcttggcctcaatactattcatgttaggctcaatattgatgggttggggtccgaattatccggttctcctatccggtagatgcaccgctggactcggagtcggttttgctctgatggttgctccggtttactctgccgagatcgcaactgcttcacatagaggactcttagcttctcttcctcacctttgtatcagtatagggattttactaggttatatcgtgaattacttcttctccaagttacctatgcatatcggttggagactcatgctcggtatagccgcggttccgtccctagtgctagcgttcgggatcttgaaaatgccggaatctccacggtggttgattatgcaaggccgtcttaaggaaggcaaggagatattggaattggtatctaattcccctgaagaagcagaactccgctttcaagacatcaaagctgctgcgggaatcgacccgaaatgcgtagacgatgttgtgaaaatggagggtaagaagactcatggtgaaggagtgtggaaagagctcattctaagaccaactcctgcagtgagacgtgttcttttaactgctcttgggattcatttcttccaacacgcctccggaatcgaagcagtgcttttatacggtccgaggatctttaagaaagcaggaatcacgactaaagacaagcttttcttggttactatcggtgtcggaatcatgaaaacgacgtttattttcactgcgactttattgttagacaaggtaggtcgaaggaagcttttgttgaccagcgttggaggaatggtcattgcgttgacaatgttgggatttgggcttacaatggcccaaaatgctggcgggaaattagcgtgggctttagtactgagcatagttgcggcttatagtttcgtggcgtttttctctattgggctcggcccaataacttgggtctacagttctgaggttttcccgttgaagcttagggcacaaggagcgagtctcggcgttgcggtgaacagagtaatgaacgccaccgtgtcgatgtcgtttttgtcgttgactagtgcgataaccaccggtggagctttctttatgttcgccggagttgcggcagtggcgtggaatttcttcttcttcctcttgccggagacgaaaggaaaatcacttgaagaaatcgaagcgctttttcaaagagacggtgataaagtacgcggcgaaaacggtgcagcttagcatgatgaatataatgttatcattaaatgaaacgacagcgtttggggtttctcactcattacacgacgtcgtttagttgtacttttgtgtggcttttatcaaattataaatcaacggtcaagattgacgcacgctttagtatttttttcattaacaatttaagatcaacggctaatacatc

SEQ ID NO: 172 - protein, 493 aa, Arabidopsis thaliana (mouse-ear cress)
MADQISGEKPAGVNRFALQCAIVASIVSIIFGYDTGVMSGAMVFIEEDLKTNDVQIEVLTGILNLCALVGSLLAGRTSDIIGRRYTIVLASILFMLGSILMGWGPNYPVLLSGRCTAGLGVGFALMVAPVYSAEIATASHRGLLASLPHLCISIGILLGYIVNYFFSKLPMHIGWRLMLGIAAVPSLVLAFGILKMPESPRWLIMQGRLKEGKEILELVSNSPEEAELRFQDIKAAAGIDPKCVDDVVKMEGKKTHGEGVWKELILRPTPAVRRVLLTALGIHFFQHASGIEAVLLYGPRIFKKAGITTKDKLFLVTIGVGIMKTTFIFTATLLLDKVGRRKLLLTSVGGMVIALTMLGFGLTMAQNAGGKLAWALVLSIVAAYSFVAFFSIGLGPITWVYSSEVFPLKLRAQGASLGVAVNRVMNATVSMSFLSLTSAITTGGAFFMFAGVAAVAWNFFFFLLPETKGKSLEEIEALFQRDGDKVRGENGAA

SEQ ID NO: 173 - DNA, 1449 bp, Bacillus subtilis
  CDS (1)..(1449)
atgagtacaaaaaagaaagaggctgtaataggaaaagaaagcttagctcataaagggcttttacgaacgattacattggtatctacattcggcggcctgttgttcggttatgatacgggtgtcattaatggggcacttccttttatggcaactgcaggtcagctgaatcttacacctgttacagaaggactggttgcgagttccctgcttctcggggcagccttcggggcgatgtttggaggacgtctgtccgatcggcacggccgccgaaaaacgatcctttatttagccttactcttcatcgcagccacacttggctgtaccttttcaccaaacgcgtccgtgatgattgcctttcgttttctgcttggactggcggttggctgcgcttctgtaacggttccaacctttttagcggaaatttcgccggcagaacgcaggggacgaatcgtgacacaaaatgaactgatgatcgtaattggccagcttctggcatacacctttaacgccattattggcagcacaatgggggagagcgcaaatgtatggcggtatatgctggtcatcgcgacacttccggctgttgtgttatggttcggaatgctcatcgtgcctgaaagcccgcgctggctggcagctaaaggcagaatgggtgacgccctgcgggtgcttcggcaaatccgtgaagacagtcaggcacagcaggaaataaaagaaatcaaacatgcgattgagggcacagcaaaaaaggccggctttcatgattttcaagagccgtggataaggcgcattctattcattgggattggaatcgccatcgtacagcaaattaccggtgtcaattcgattatgtactatgggacagaaattctgagagaagccggttttcaaacagaagctgcattaatcggcaatattgcaaacggtgttatttcagttattgcggtcatttttgggatatggcttctcggcaaagtccgtcgccggcccatgctgatcatcggacagattggcacgatgacagcccttctgctgatcgggattttatccattgtccttgaaggaacacccgccctgccgtatgttgtgctgagtttgaccattttgtttcttgcgtttcagcagactgccatttctacggtgacgtggctgatgctctcggaaatctttcctatgcatgtgcgggggcttggcatggggatcagcaccttctgcttgtggacagctaactttctcattggattcacctttcccattttgctcaatcatattgggatgtcggcgacattttttatctttgtcgctatgaatatcctagcgattctatttgtgaaaaaatatgtgcctgagacaaaagggcggtcacttgaacagcttgagcattcctttcgccagtatggccgccgcgctgatcaggaaatccaaaatcaaacaactcacttatcgtaa

SEQ ID NO: 174 - protein, 482 aa, Bacillus subtilis
MSTKKKEAVIGKESLAHKGLLRTITLVSTFGGLLFGYDTGVINGALPFMATAGQLNLTPVTEGLVASSLLLGAAFGAMFGGRLSDRHGRRKTILYLALLFIAATLGCTFSPNASVMIAFRFLLGLAVGCASVTVPTFLAEISPAERRGRIVTQNELMIVIGQLLAYTFNAIIGSTMGESANVWRYMLVIATLPAVVLWFGMLIVPESPRWLAAKGRMGDALRVLRQIREDSQAQQEIKEIKHAIEGTAKKAGFHDFQEPWIRRILFIGIGIAIVQQITGVNSIMYYGTEILREAGFQTEAALIGNIANGVISVIAVIFGIWLLGKVRRRPMLIIGQIGTMTALLLIGILSIVLEGTPALPYVVLSLTILFLAFQQTAISTVTWLMLSEIFPMHVRGLGMGISTFCLWTANFLIGFTFPILLNHIGMSATFFIFVAMNILAILFVKKYVPETKGRSLEQLEHSFRQYGRRADQEIQNQTTHLS

SEQ ID NO: 175 - DNA, 1644 bp, Arabidopsis thaliana (mouse-ear cress)
  CDS (1)..(1644)
atgatgaagaatcttccggaggttggtaatggcggtggctcgggttttccggcggtctctgtcggaaataagaagaataagtatcagagaatggactccgacgcggaggaatcgcagaatcatcgtgaagcagaggctagaaacagtagaaccagaaaatacgttatggcttgtgccttttttgcatccttgaacaatgttcttctcggctacggtcggttttacttatataatcggattcttcttcttcttctttactttgttgacttacaaaaagatgttggggtaatgagcggtgcggtgttgttcatacagcaggatctcaaaataacggaggtgcagacggaagtgctcattggtagccttagcatcatctcactctttggcagcttagccggcggcagaacctctgactctatcggtagaaaatggaccatggccttggctgctctcgtcttccagactggtgctgccgtgatggctgtcgctccgtctttcgaggttttgatgatagggagaactttagccggcattgggattgggcttggtgtcatgatcgctcctgtctacatcgccgagatatcccccaccgtagctagaggatttttcacttcgttccctgagatcttcataaatctagggatcttgctgggctatgtttcgaactacgctttctcggggctttccgtgcatatcagctggaggatcatgcttgcagttgggattcttccttcggtgttcataggatttgcgctgtgtgtgatccctgagtcgccgaggtggctggtgatgaaaggccgagtggacagtgcacgagaggtgctcatgaaaacgaatgagcgagatgacgaagcggaagagcggcttgcagagatacaactggcggctgcacatacagaaggcagcgaggacaggcccgtgtggcgtgagcttcttagcccatctcctgttgtacggaaaatgctgattgttggatttggaatccagtgtttccagcagatcacaggaattgacgccacagtctactatagtccagagatcctgaaagaggctgggatacaagacgagaccaaactgctcgctgcaactgtcgctgttggtgtcacgaaaacagtgttcatactatttgccaccttcctgattgatagtgttggccggaaaccgctgctttatgtgagcacaataggaatgactctgtgtctcttttgtctaagctttacgctcacattcctcggccaaggaacgcttgggataaccttggcgcttctctttgtttgtggaaacgttgccttcttctccataggaatgggacctgtttgctgggtcttgacatcagagatctttccattacgattaagagcccaggcatctgcgcttggggcggttgggaacagggtgtgcagcggtctggtggccatgtccttcctctctgtgtcacgtgccatcactgttggaggaaccttcttcgttttctccctcgtgtctgcactctcagttatcttcgtgtatgtgctagtccccgagacaagcgggaagtcactggagcagatagagttgatgtttcagggtgggctggaaagaaaagacggtgaagttgagcttggagatgctgagcgtcttgtgcgcaaggaacaggagttttga

SEQ ID NO: 176 - protein, 547 aa, Arabidopsis thaliana (mouse-ear cress)
MMKNLPEVGNGGGSGFPAVSVGNKKNKYQRMDSDAEESQNHREAEARNSRTRKYVMACAFFASLNNVLLGYGRFYLYNRILLLLLYFVDLQKDVGVMSGAVLFIQQDLKITEVQTEVLIGSLSIISLFGSLAGGRTSDSIGRKWTMALAALVFQTGAAVMAVAPSFEVLMIGRTLAGIGIGLGVMIAPVYIAEISPTVARGFFTSFPEIFINLGILLGYVSNYAFSGLSVHISWRIMLAVGILPSVFIGFALCVIPESPRWLVMKGRVDSAREVLMKTNERDDEAEERLAEIQLAAAHTEGSEDRPVWRELLSPSPVVRKMLIVGFGIQCFQQITGIDATVYYSPEILKEAGIQDETKLLAATVAVGVTKTVFILFATFLIDSVGRKPLLYVSTIGMTLCLFCLSFTLTFLGQGTLGITLALLFVCGNVAFFSIGMGPVCWVLTSEIFPLRLRAQASALGAVGNRVCSGLVAMSFLSVSRAITVGGTFFVFSLVSALSVIFVYVLVPETSGKSLEQIELMFQGGLERKDGEVELGDAERLVRKEQEF

SEQ ID NO: 177 - DNA, 1395 bp, Bacillus subtilis
  CDS (1)..(1395)
atgaagaatactccaactcaattagaaccaaatgttcctgtaacaagaagccattcaatgggatttgtcattttgatctcatgtgcggcggggcttggcggcttattgtatggctatgacacggcagtgatttctggcgccatcggttttctgaaagatttatacagcctgagtccgtttatggagggacttgtcatttcaagcattatgattggaggagttgtgggcgtcgggatatccggatttttaagtgacagattcggccggagaaaaattttaatgacagccgctttgttatttgcgatatcagcaatcgtttcagcgctttctcaagacgtgtccaccttaatcattgcaaggattatcggggggctgggaatcgggatgggctcatcgctctctgttacgtatattacagaagcggcaccgcccgctatacgcggaagtttatcttcgttatatcagctctttacgatactgggtatttccgcaacatactttattaatctagctgtgcagcggtccggaacatacgaatggggcgtgcacaccggctggagatggatgcttgcttatggaatggtgccatccgtcatttttttccttgtcctgctcgtcgtcccggaaagtccgagatggctggcgaaagcgggcaaaacaaatgaagctttaaagatcctgacacgtattaatggagaaactgttgcaaaagaagaattaaagaacattgagaactctttaaaaatagaacaaatggggtcgctctcccagctgtttaagccgggtctcagaaaggcgcttgtcattggaatcctgctggcgctgtttaaccaagtcatcggcatgaacgcgattacttactacgggccggaaatctttaaaatgatgggattcgggcaaaacgccggatttgtgacgacttgtatcgtcggggttgtagaagttatttttaccgttattgcggtgttgctgattgataaagtcggacgaaaaaaactgatgtccatcggttctgcttttatggctatttttatgattttaatcgggacgtcgttttattttgagttaacaagcgggatcatgatgatcgtccttatattaggttttgtcgctgctttctgtgtctcggtcggaccgatcacatggattatgatttctgaaatcttcccgaaccatctgcgtgcgcgggccgcgggcattgcgaccatctttttatggggagcaaactgggcgatcggacagtttgtgccaatgatgatcgattctttcgggctcgcctatacattttggatctttgcggtgattaacatcctttgtttcctgtttgtcgttacgatctgtccagaaacgaagaacaaatcgctcgaggaaattgaaaagctttggataaaatga

SEQ ID NO: 178 - protein, 464 aa, Bacillus subtilis
MKNTPTQLEPNVPVTRSHSMGFVILISCAAGLGGLLYGYDTAVISGAIGFLKDLYSLSPFMEGLVISSIMIGGVVGVGISGFLSDRFGRRKILMTAALLFAISAIVSALSQDVSTLIIARIIGGLGIGMGSSLSVTYITEAAPPAIRGSLSSLYQLFTILGISATYFINLAVQRSGTYEWGVHTGWRWMLAYGMVPSVIFFLVLLVVPESPRWLAKAGKTNEALKILTRINGETVAKEELKNIENSLKIEQMGSLSQLFKPGLRKALVIGILLALFNQVIGMNAITYYGPEIFKMMGFGQNAGFVTTCIVGVVEVIFTVIAVLLIDKVGRKKLMSIGSAFMAIFMILIGTSFYFELTSGIMMIVLILGFVAAFCVSVGPITWIMISEIFPNHLRARAAGIATIFLWGANWAIGQFVPMMIDSFGLAYTFWIFAVINILCFLFVVTICPETKNKSLEEIEKLWIK

SEQ ID NO: 179 - DNA, 1527 bp, Arabidopsis thaliana (mouse-ear cress)
  CDS (1)..(1527)
atggttcatgctgatggtcataattttcccggttcggatccaaaccctcatatgaacaagttcgctttcgggtgtgccattgttgcttccatcatttctatcatctttggatatgatacgggagttatgagcggagctcagatatttataagagatgatctaaaaataaacgacactcagattgaagttttggccggaatcttgaatctttgtgcactcgtcggatcactaacggcggggaaaacgtctgacgtcatcggccgacgttacaccatagctctctccgccgtgatattcttagtgggctcagttcttatgggttacggcccaaactatcctgttttgatggtcggacgatgtattgccggagttggtgtagggtttgctctcatgatagctccggtttactctgccgagatatcctctgcgtcacatagaggctttctcacttctctacctgagctttgtattagtcttgggattttactaggctatgtctcgaattactgttttgggaaactgacgttgaaacttggatggagattgatgcttggaatcgcagcgttcccgtctttgatattggcttttgggattacaagaatgcccgagtcgccgaggtggcttgtgatgcaaggtaggttagaagaagccaagaaaataatggttttggtatccaatacggaagaagaagctgaagaacggttcagagacatcttaaccgctgcggaagtagatgtgacagagataaaagaagttggtggcggcgttaagaagaagaatcacggtaaaagtgtttggagggagttggtgataaaaccgcgacctgcggtgcgtttgatcttgatagcggccgttgggatacactttttcgagcatgcgacggggattgaggccgtcgtgttgtacagcccgagaattttcaagaaagccggagttgtttcgaaagacaagctcttactagccacggtcggtgtaggtttaactaaggcctttttcataataatagccactttcttgctcgacaaggtaggtcgtagaaagctcctgttgaccagtacgggtgggatggtcttcgcattgaccagtttagcggttagtctcacgatggttcagcgatttgggcggttagcgtgggcattgagtttaagcatcgtctctacgtatgcatttgtagcttttttctccatagggcttggacctatcacatgggtgtacagctccgagatattcccgttgagacttagggctcagggagcgagtataggtgttgcggttaataggatcatgaacgcgacggtctcaatgagttttctgtcgatgacgaaggcgatcacgacagggggcgtgttcttcgtattcgccggaatagcggtggcggcatggtggttcttcttctttatgttgccggagacgaaaggattgccattggaggagatggagaagctttttggtggtgggggtcctcgtggtgatcgtgacggacttgagattcaaactaaaaccatctctattgggggtttctcataa

SEQ ID NO: 180 - protein, 508 aa, Arabidopsis thaliana (mouse-ear cress)
MVHADGHNFPGSDPNPHMNKFAFGCAIVASIISIIFGYDTGVMSGAQIFIRDDLKINDTQIEVLAGILNLCALVGSLTAGKTSDVIGRRYTIALSAVIFLVGSVLMGYGPNYPVLMVGRCIAGVGVGFALMIAPVYSAEISSASHRGFLTSLPELCISLGILLGYVSNYCFGKLTLKLGWRLMLGIAAFPSLILAFGITRMPESPRWLVMQGRLEEAKKIMVLVSNTEEEAEERFRDILTAAEVDVTEIKEVGGGVKKKNHGKSVWRELVIKPRPAVRLILIAAVGIHFFEHATGIEAVVLYSPRIFKKAGVVSKDKLLLATVGVGLTKAFFIIIATFLLDKVGRRKLLLTSTGGMVFALTSLAVSLTMVQRFGRLAWALSLSIVSTYAFVAFFSIGLGPITWVYSSEIFPLRLRAQGASIGVAVNRIMNATVSMSFLSMTKAITTGGVFFVFAGIAVAAWWFFFFMLPETKGLPLEEMEKLFGGGGPRGDRDGLEIQTKTISIGGFS

SEQ ID NO: 181 - DNA, 1566 bp, Arabidopsis thaliana (mouse-ear cress)
  CDS (1)..(1566)
atgacattgacgatcccaaacgcacctgggagctccgggtacttggatatgttcccagagagaaggatgtcgtattttgggaattcttacattctgggtttgactgtcactgccggaatcggtggccttctgttcggttatgatacaggtgtaatttccggtgcccttttgtacattaaggatgatttcgaagttgttaagcagagcagtttcttacaggtatataatgtttctagctttacctcttccaagctggaaactattgtaagtatggctttagttggtgccatgattggtgctgcagctggaggttggatcaatgactactacggtcgtaaaaaggcgactctttttgcagatgttgtctttgcagctggagctatcgttatggctgctgctcctgatccgtatgttttgatatcgggtcgtctcttggtcggtttaggagttggtgttgcttctgtgactgctccggtttatatagcggaagcatctccatcggaagttagaggtggacttgtgagcaccaacgtattgatgatcactggtggacagtttctttcatatctcgttaattctgctttcacacaggttccaggaacatggagatggatgcttggtgtttcaggcgttcccgctgtgattcagttcatcctcatgcttttcatgccagaatcccctcgatggcttttcatgaaaaatcgtaaagcggaagccatccaagtgctcgccagaacctatgacatctcgcggttagaagacgagattgatcatctttcagcggctgaagaggaagaaaaacaaaggaagcgcactgttggctacttggatgttttcagatccaaagaattgagacttgcatttcttgccggagcaggacttcaggcgtttcagcagttcactggtatcaatacagttatgtactacagccctacgatagtccaaatggctggatttcactcaaaccagctcgctttgttcctgtctctcattgttgctgccatgaatgctgctggaacagtcgtggggatttacttcatcgatcattgtggaaggaaaaagctagctctctcaagtttatttggcgtcattatatcactcttaatcctctcagtctcgtttttcaaacaatctgagacatcatctgatggagggctctatggttggctcgctgtgcttggcttagctctatacattgttttctttgcaccgggaatgggaccagtcccatggacggtgaactcagagatataccctcaacaataccgaggcatatgcggaggcatgtcagctacagttaactggatcagcaatttgattgtggcacaaacattcttgacaatcgcggaagctgctggaacaggaatgactttcttgattttggcgggaattgcggttcttgctgtaatctttgtgattgtgtttgtccctgagactcaagggctaacgttttcggaagttgaacagatttggaaagaaagagcttatggaaatatcagtggctggggcagtagcagtgatagcaacaacatggaagggttactcgagcagggatctcaatcttaa

SEQ ID NO: 182 - protein, 521 aa, Arabidopsis thaliana (mouse-ear cress)
MTLTIPNAPGSSGYLDMFPERRMSYFGNSYILGLTVTAGIGGLLFGYDTGVISGALLYIKDDFEVVKQSSFLQVYNVSSFTSSKLETIVSMALVGAMIGAAAGGWINDYYGRKKATLFADVVFAAGAIVMAAAPDPYVLISGRLLVGLGVGVASVTAPVYIAEASPSEVRGGLVSTNVLMITGGQFLSYLVNSAFTQVPGTWRWMLGVSGVPAVIQFILMLFMPESPRWLFMKNRKAEAIQVLARTYDISRLEDEIDHLSAAEEEEKQRKRTVGYLDVFRSKELRLAFLAGAGLQAFQQFTGINTVMYYSPTIVQMAGFHSNQLALFLSLIVAAMNAAGTVVGIYFIDHCGRKKLALSSLFGVIISLLILSVSFFKQSETSSDGGLYGWLAVLGLALYIVFFAPGMGPVPWTVNSEIYPQQYRGICGGMSATVNWISNLIVAQTFLTIAEAAGTGMTFLILAGIAVLAVIFVIVFVPETQGLTFSEVEQIWKERAYGNISGWGSSSDSNNMEGLLEQGSQS

SEQ ID NO: 183 - DNA, 1536 bp, Arabidopsis thaliana (mouse-ear cress)
  CDS (1)..(1536)
atgaattcctcgggagttgaacaaggtgttgtgattgcggagtcagagccaccgagggggaatagaagccgatatgcttttgcttgtgcaatcttagcctccatgacttctatcatccttggttacgacattggagtgatgagtggagcttcaattttcataaaagacgatttgaaactgtctgatgtacaacttgagattcttatgggaattctaaacatctactctctggtcggttccggcgcagctggtagaacttctgattggctcggaagacgatatacaatagtgttggcaggagccttcttcttttgcggagccctactaatgggctttgccacaaactaccctttcataatggttggccgttttgtagccggtatcggtgttggttatgctatgatgattgcgcctgtttacaccgctgaagtcgctcccgcctcttcccgaggcttccttacctctttccctgagatttttatcaatattggtatacttttgggatacgtatccaattacttcttctccaagcttcccgagcacctcggatggaggttcatgttaggtgtaggagcggttccctcggtgttcctagccattggagtgttggcaatgccggagtctcctcggtggctcgtccttcagggtcgtctcggggatgcttttaaagtccttgacaaaacctccaacaccaaagaagaagctatctctaggctcgatgacatcaaacgcgcagttggaatccccgatgatatgacagacgatgttatagtcgttccgaataaaaagagcgctggaaaaggcgtgtggaaggaccttctcgttcgaccaaccccgtccgttcgacacatcctcatagcatgccttggtattcatttcgcccagcaagcctctggaattgatgcggttgtgctttactctccgacaatcttctcaaaggctggactgaagtccaagaatgaccagctcttggctacggtcgctgtcggagttgtcaagactctcttcatcgtggtagggacttgtgtggtggatcggttcggacgtcgtgccttgttgcttacgagtatgggcggaatgtttctttccttgaccgcacttggaactagtctcacggtgatcaacaggaaccccgggcaaacactcaagtgggctatagggctcgccgttacgacggtgatgacttttgtggcaacattctcaataggtgcaggccccgtgacgtgggtctactgctcagagatattccctgtgaggctaagagctcaaggggcaagtttaggagtgatgttgaatagactaatgagtggtattattggaatgacattcctatctctttctaaaggtctcaccatcggcggtgcgttccttctattcgccggagttgctgccgccgcatgggtcttcttcttcactttcctcccggagacacgtggtatacctctagaggagatggagactctcttcgggagctacaccgcaaacaagaagaataattctatgagcaaagacaatgaagttgtggatggacaatga

SEQ ID NO: 184 - protein, 511 aa, Arabidopsis thaliana (mouse-ear cress)
MNSSGVEQGVVIAESEPPRGNRSRYAFACAILASMTSIILGYDIGVMSGASIFIKDDLKLSDVQLEILMGILNIYSLVGSGAAGRTSDWLGRRYTIVLAGAFFFCGALLMGFATNYPFIMVGRFVAGIGVGYAMMIAPVYTAEVAPASSRGFLTSFPEIFINIGILLGYVSNYFFSKLPEHLGWRFMLGVGAVPSVFLAIGVLAMPESPRWLVLQGRLGDAFKVLDKTSNTKEEAISRLDDIKRAVGIPDDMTDDVIVVPNKKSAGKGVWKDLLVRPTPSVRHILIACLGIHFAQQASGIDAVVLYSPTIFSKAGLKSKNDQLLATVAVGVVKTLFIVVGTCVVDRFGRRALLLTSMGGMFLSLTALGTSLTVINRNPGQTLKWAIGLAVTTVMTFVATFSIGAGPVTWVYCSEIFPVRLRAQGASLGVMLNRLMSGIIGMTFLSLSKGLTIGGAFLLFAGVAAAAWVFFFTFLPETRGIPLEEMETLFGSYTANKKNNSMSKDNEVVDGQ

SEQ ID NO: 185 - DNA, 1410 bp, Clostridium acetobutylicum
  CDS (1)..(1410)
atgggggaaaacaattcacataagcattctttattattcatagttctaatttcttgtgctgctggacttggtggcttattatatggatacgacactgcagtaatctctggtgctataggctttttaaagaagctttataatctttcacctgctatgcagggctttgttatttcaagtatcatggtcggtggtgtactaggcgttggtttttctggtttcttgggcgatgctattggtaggagaaaagttttaatgcttgctgctgcactatttgctatttccgctgtaatatcttctatatccacttctgcatttatgctcatttttgctcgtatagtaggaggtcttggtataggaatggcttctgccctatctgtaacatatataactgaatgtgcgccgccatctattcgcggtaggctgtcctcactttaccaactatttaccatacttggtatttcaattaccttctttgtaaacttgggaattgtaaatatgggcagcgaaacctggagagtttcaacaggttggagatatatgttagcttgtggaactgttccagccatagtattcttaattacattattctttgttccagaaagtcctcgttttcttgttaaatcaggaaatataaaaaaggctgctgctgttttaaccaaaatcaacggtgctgaaattgcaaagcaggaactagattccatttctaagtctcttgctaccgaaaacgattcttcattaggtcaacttcttcaacctggtcttagaagagctttattaattggtattttcttagctatatttaatcaagctattggaatgaattcaattacttattatggtcctgaaatatttcaaatgataggtttcaaaaataattctagctttcttgcaaccagtgttattggtgttgttgaagttttctcaacaattttagcaatgtttttaatagataaacttggacgtaaaaaattaatggaaataggatctgctgctatggcagtattcatgctattaatcggaacttctttctatataaaattatcaaatggttttgtaatattaatcttcataatatgttttgttgtttccttctgtatttcaatgggacctataccttggattatgattcctgaaatattccctaaccatttgagagctcgtgcaacaggcatagcaactatcttcctttggggtgctaactgggcaattggacaatttactccaatgcttttaaacggcattggtggagcatatactttttggatattctgtggaattaacgtaatatgcttcttagtagttacaactaaggttcctgagacaaaaaacaaaagtctggaagaaatagaaaagttttggattccaaaatcaaaacaaaatgccaaaggaagttcagtaggagcaaaataa

SEQ ID NO: 186 - protein, 469 aa, Clostridium acetobutylicum
MGENNSHKHSLLFIVLISCAAGLGGLLYGYDTAVISGAIGFLKKLYNLSPAMQGFVISSIMVGGVLGVGFSGFLGDAIGRRKVLMLAAALFAISAVISSISTSAFMLIFARIVGGLGIGMASALSVTYITECAPPSIRGRLSSLYQLFTILGISITFFVNLGIVNMGSETWRVSTGWRYMLACGTVPAIVFLITLFFVPESPRFLVKSGNIKKAAAVLTKINGAEIAKQELDSISKSLATENDSSLGQLLQPGLRRALLIGIFLAIFNQAIGMNSITYYGPEIFQMIGFKNNSSFLATSVIGVVEVFSTILAMFLIDKLGRKKLMEIGSAAMAVFMLLIGTSFYIKLSNGFVILIFIICFVVSFCISMGPIPWIMIPEIFPNHLRARATGIATIFLWGANWAIGQFTPMLLNGIGGAYTFWIFCGINVICFLVVTTKVPETKNKSLEEIEKFWIPKSKQNAKGSSVGAK

SEQ ID NO: 187 - DNA, 2234 bp, Saccharomyces cerevisiae
  CDS (1)..(1845)
atgaagggattatcctcattaataaacagaaaaaaagacaggaacgactcacacttagatgagatcgagaatggcgtgaacgctaccgaattcaactcgatagagatggaggagcaaggtaagaaaagtgattttgatctttcccatcttgagtacggtccaggttcactaataccaaacgataataatgaagaagtccccgaccttctcgatgaagctatgcaggacgccaaagaggcagatgaaagtgagaggggaatgccactcatgacagctttgaagacatatccaaaagctgctgcttggtcactattagtttccacaacattgattcaagagggttatgacacagccattctaggagctttctatgccctgcctgtttttcaaaaaaaatatggttctttgaatagcaatacaggagattatgaaatttcagtttcctggcaaatcggtctatgtctatgctacatggcaggtgagattgtcggtttgcaagtgactgggccttctgtagattacatgggcaaccgttacactctgatcatggcgttgttctttttagcggctttcattttcattctgtatttttgcaagagtttgggtatgattgccgtgggacaggcattgtgtggtatgccatggggttgtttccaatgtttgaccgtttcttatgcttctgaaatttgtcctttggccctaagatactatttgacgacttattctaatttatgttggacgttcggtcaacttttcgctgctggtattatgaaaaattcccagaacaaatatgccaactcagaactaggatataagctaccttttgctttgcagtggatctggccccttcctttggcggtaggtatttttttggcaccagagtctccatggtggctggttaaaaaaggaaggattgatcaggcgaggagatcacttgaaagaatattaagtggtaaaggacccgagaaagaattactagtgagtatggaactcgataaaatcaaaactactatagaaaaggagcagaaaatgtctgatgaaggaacttactgggattgtgtgaaagatggtattaacaggagaagaacgagaatagcttgtttatgttggatcggtcaatgctcctgtggtgcatcattaattggttattcaacttacttttatgaaaaagctggtgttagcactgatacggcttttactttcagtattatccaatattgtcttggtattgctgcaacgtttgtatcctggtgggcttcaaaatattgtggcagatttgacctttatgcttttgggctggcttttcaggctattatgttcttcattatcggtggtttaggatgttcagacactcatggcgctaaaatgggtagtggtgctcttctaatggttgtcgcgttcttttacaacctcggtattgcacctgttgttttttgcttagtgtctgaaatgccgtcttcaaggctaagaaccaaaacaattattttggctcgtaatgcttacaatgtgatccaagttgtagttacagttttgatcatgtaccaattgaactcagagaaatggaattggggtgctaaatcaggctttttctggggaggattttgtctggccactttagcttgggctgttgtcgatttaccagaaaccgctggcaggacttttattgagataaatgaattgtttagacttggtgttccagcaagaaagttcaagtcgactaaagtcgacccttttgcagctgccaaagcagcagctgcagaaattaatgttaaagatccgaaggaagatttggaaacttctgtggtagatgaagggcgaagcaccccatctgttgtgaacaaatgatttttttagccagtaggtagatacggcgttatttaattttattttatataactagtacttaacacatcgagtttatttttactcgacattatgacttttttttggttttgttgcggctttgaagttttttcaactagaggttattattttgttctgaaaaaacgttaatgatttaaatgaatcattgtgatgagggtcctaggtttaaatatcttgcaaaaagaagtactaatatacaattttttcattcccgttaatgaaaatgcttgaatctttatattgtatattgatacactctattcatgttccggcaacaattattttttttaattctgtaaatttactttttgacgtattctttcagcatttatatgcttatgttagaattc

SEQ ID NO: 188 - protein, 614 aa, Saccharomyces cerevisiae
MKGLSSLINRKKDRNDSHLDEIENGVNATEFNSIEMEEQGKKSDFDLSHLEYGPGSLIPNDNNEEVPDLLDEAMQDAKEADESERGMPLMTALKTYPKAAAWSLLVSTTLIQEGYDTAILGAFYALPVFQKKYGSLNSNTGDYEISVSWQIGLCLCYMAGEIVGLQVTGPSVDYMGNRYTLIMALFFLAAFIFILYFCKSLGMIAVGQALCGMPWGCFQCLTVSYASEICPLALRYYLTTYSNLCWTFGQLFAAGIMKNSQNKYANSELGYKLPFALQWIWPLPLAVGIFLAPESPWWLVKKGRIDQARRSLERILSGKGPEKELLVSMELDKIKTTIEKEQKMSDEGTYWDCVKDGINRRRTRIACLCWIGQCSCGASLIGYSTYFYEKAGVSTDTAFTFSIIQYCLGIAATFVSWWASKYCGRFDLYAFGLAFQAIMFFIIGGLGCSDTHGAKMGSGALLMVVAFFYNLGIAPVVFCLVSEMPSSRLRTKTIILARNAYNVIQVVVTVLIMYQLNSEKWNWGAKSGFFWGGFCLATLAWAVVDLPETAGRTFIEINELFRLGVPARKFKSTKVDPFAAAKAAAAEINVKDPKEDLETSVVDEGRSTPSVVNK

SEQ ID NO: 189 - DNA, 2890 bp, Saccharomyces cerevisiae
  CDS (818)..(2443)
aaaaagaaatattattcattactatcaagataccgtagaaaagaaaaagaaccggggatgaataataacaaaacgggctgctttttctttttctctttctttttcatttggtccctctccactctttctccacgtggctttgcttcccgtatttttcttcgtcagagagactacatgatagtccaaagaaaagaaacaggggggacgaagaagaggagaggaaaaaccaaaatataattttccgtgaaatagattctttttctccactgcacgacttcttctcctcccacaaaaaatgacgcctcatagacagccccgcagcttcacttttaagtttctttttctcctcacggcgcaaccgctaacttaagctaatccttatgaatccggagaaaagcggggtcttttaactcaataaaattttccgaaatcctttttcctacgcgttttcttcgggaactagataggtggctcttccacctgtttttccatcattttagtttttcgcaagccatgcgtgccttttcgtttttgcgatggcgaacgagggctggaaaaattaacggtacgccgcctaacgatagtaataggccacgcaactggcgtggacgacaacaataagtcgcccattttttatgttttcaaaacctagcaacccccaccaaacttgtcatcgttcccggattcacaaatgatataaaaagcgattacaattctacattctaaccagatttgagatttcctctttctcaattcctcttatattagattataagaacaacaaattaaattacaaaaagacttataaagcaacataatgtctgaattcgctactagccgcgttgaaagtggctctcaacaaacttctatccactctactccgatagtgcagaaattagagacggatgaatctcctattcaaaccaaatctgaatacactaacgctgaactcccagcaaagccaatcgccgcatattggactgttatctgtttatgtctaatgattgcatttggtgggtttgtctttggttgggatactggtaccatctctggttttgttaatcaaaccgatttcaaaagaagatttggtcaaatgaaatctgatggtacctattatctttcggacgtccggactggtttgatcgttggtatcttcaatattggttgtgcctttggtgggttaaccttaggacgtctgggtgatatgtatggacgtagaattggtttgatgtgcgtcgttctggtatacatcgttggtattgtgattcaaattgcttctagtgacaaatggtaccaatatttcattggtagaattatctctggtatgggtgtcggtggtattgctgtcctatctccaactttgatttccgaaacagcaccaaaacacattagaggtacctgtgtttctttctatcagttaatgatcactctaggtattttcttaggttactgtaccaactatggtactaaagactactccaattcagttcaatggagagtgcctttgggtttgaactttgccttcgctattttcatgatcgctggtatgctaatggttccagaatctccaagattcttagtcgaaaaaggcagatacgaagacgctaaacgttctttggcaaaatctaacaaagtcaccattgaagatccaagtattgttgctgaaatggatacaattatggccaacgttgaaactgaaagattagccggtaacgcttcttggggtgagttattctccaacaaaggtgctattttacctcgtgtgattatgggtattatgattcaatccttacaacaattaactggtaacaattacttcttctattatggtactactattttcaacgccgtcggtatgaaagattctttccaaacttccatcgttttaggtatagtcaacttcgcatccactttcgtggccttatacactgttgataaatttggtcgtcgtaagtgtctattgggtggttctgcttccatggccatttgttttgttatcttctctactgtcggtgtcacaagcttatatccaaatggtaaagatcaaccatcttccaaggctgccggtaacgtcatgattgtctttacctgtttattcattttcttcttcgctattagttgggccccaattgcctacgttattgttgccgaatcctatcctttgcgtgtcaaaaatcgtgctatggctattgctgttggtgccaactggatttggggtttcttgattggtttcttcactcccttcattacaagtgcaattggattttcatacgggtatgtcttcatgggctgtttggtattttcattcttctacgtgtttttctttgtctgtgaaaccaagggcttaacattagaggaagttaatgaaatgtatgttgaaggtgtcaaaccatggaaatctggtagctggatctcaaaagaaaaaagagtttccgaggaataagagattatacttaaactagcactgatttttttaaggctaatggctactaatactttaatagatgatcttcatacttttttatttaacgatttttaatgatgtttttatttgtaccactcatttatctagatttttttaatactgatcaaatcttacggactcgacgttaaaaagttcctacatacgtctggtacttgaaacgctgcttcgaggtattgacactataagaatacgatccaaatacttacaccgcatgtaaaaatatgccgacaatatgaatacttgttgatgaatgatatttgattttaatccggcaatttacctcctttatataatccaataattgttgataattagtggttaggttgcagtactaataagaattaagacaaatattcttctactatataaaaggtgcaaacaaaacacacgccgatcggccatact

SEQ ID NO: 190 - protein, 541 aa, Saccharomyces cerevisiae
MSEFATSRVESGSQQTSIHSTPIVQKLETDESPIQTKSEYTNAELPAKPIAAYWTVICLCLMIAFGGFVFGWDTGTISGFVNQTDFKRRFGQMKSDGTYYLSDVRTGLIVGIFNIGCAFGGLTLGRLGDMYGRRIGLMCVVLVYIVGIVIQIASSDKWYQYFIGRIISGMGVGGIAVLSPTLISETAPKHIRGTCVSFYQLMITLGIFLGYCTNYGTKDYSNSVQWRVPLGLNFAFAIFMIAGMLMVPESPRFLVEKGRYEDAKRSLAKSNKVTIEDPSIVAEMDTIMANVETERLAGNASWGELFSNKGAILPRVIMGIMIQSLQQLTGNNYFFYYGTTIFNAVGMKDSFQTSIVLGIVNFASTFVALYTVDKFGRRKCLLGGSASMAICFVIFSTVGVTSLYPNGKDQPSSKAAGNVMIVFTCLFIFFFAISWAPIAYVIVAESYPLRVKNRAMAIAVGANWIWGFLIGFFTPFITSAIGFSYGYVFMGCLVFSFFYVFFFVCETKGLTLEEVNEMYVEGVKPWKSGSWISKEKRVSEE

SEQ ID NO: 191 - DNA, 1602 bp, Emericella nidulans, Aspergillus nidulans
  CDS (1)..(1602)
atgtccatcctcgccttggtcgaagaccgcccaactccccgcgaggtttacaactggcgcgtctacctcctggccgcagtcgcctccttcacatcatgcatgatcggctacgacagcgccttcatcggcacaacgctgtctctgcaatcctttcaaaatgaatttaattgggaatcgctcaatacggatctcatcagcgcgaatatcgtctcgctatatcaacgaggtgccttcttcggcgctcttttcgcgtaccccatcggccacttctggggccgccgttggggtcttatgttctctgctcttattttcttccttggtgccggcatgatgctcggtgcgaatggggatcgagggctagggctgatctatggtggccgagtgcttgcgggcattggcgtcggcgccgggtcgaacatctgtcctatctacatctcagaaatggcaccctccgctattcggggtcgccttgttggggtttatgagctgggttggcagattggtggcgtcgttgggttctggatcaattacggcgtggacgaaacccttgccccaagccacaaacaatggatcatcccctttgccgtgcaattgattcctgctggcctgctcattatcggcgccctcttgatccgcgaatctcctcgttggctcttcctgcgcggtaaccgtgaaaagggcattgagaccctggcctggatccgcaacctgccagccgaccatatctatatggtcgaggaaatcaacatgatcgagcagtcgctcgaacaacagcgtgtcaaaattgggcttggtttctggaaaccctttaaagcagcctggacgaacaagcgtattctctaccgcctctttttggggtctatgttgttcctctggcagaacgggtcaggcatcaatgcgatcaactattacagcccgcgcgtcttcaagagtattggcgtatcgggtggcaatacctcactcttgacaacgggcattttcggtgtcgtcacggcggtcattacctttgtttggctgttgtatttgatcgatcattttggacgacggaacttgctgcttgttggtgcggcgggcggttcagtctgcctttggattgtgggcggatacatcaagatcgcgaagccagagaacaaccccgagggaacgcagcttgatagcggtggcattgcggctatattcttcttctacctgtggacggccttctatacaccatcttggaacggcacgccttgggtcatcaactcggaaatgttcgatcccaccgtccgctcccttgcacaagcctgtgctgccgcctcaaactggctctggaactttctgatctctcgctttacgccccagatgttcacgtccatgggatacggagtctacttcttctttgcatcgttgatgatcctctcgatcgtgtttgttttcttcctcattcccgagacgaagggcgtgccgctggagagcatggagactctatttgacaagaaaccggtttggcacgcccattcgcagctaatcagggagctgagggagaatgaggaggcgttccgggcggatatgggtgcgagtgggaagggaggtgtgacgaaggagtatgtcgaggaggcttaa

SEQ ID NO: 192 - protein, 533 aa, Emericella nidulans, Aspergillus nidulans
MSILALVEDRPTPREVYNWRVYLLAAVASFTSCMIGYDSAFIGTTLSLQSFQNEFNWESLNTDLISANIVSLYQRGAFFGALFAYPIGHFWGRRWGLMFSALIFFLGAGMMLGANGDRGLGLIYGGRVLAGIGVGAGSNICPIYISEMAPSAIRGRLVGVYELGWQIGGVVGFWINYGVDETLAPSHKQWIIPFAVQLIPAGLLIIGALLIRESPRWLFLRGNREKGIETLAWIRNLPADHIYMVEEINMIEQSLEQQRVKIGLGFWKPFKAAWTNKRILYRLFLGSMLFLWQNGSGINAINYYSPRVFKSIGVSGGNTSLLTTGIFGVVTAVITFVWLLYLIDHFGRRNLLLVGAAGGSVCLWIVGGYIKIAKPENNPEGTQLDSGGIAAIFFFYLWTAFYTPSWNGTPWVINSEMFDPTVRSLAQACAAASNWLWNFLISRFTPQMFTSMGYGVYFFFASLMILSIVFVFFLIPETKGVPLESMETLFDKKPVWHAHSQLIRELRENEEAFRADMGASGKGGVTKEYVEEA

SEQ ID NO: 193 - DNA, 1704 bp, Kluyveromyces marxianus var. lactis, Candida sphaerica
  CDS (1)..(1704)
atgtctaatcaaatgacagatagtacgagtgctggaagtggcactgaacattccgtcgacactaataccgcattaaaagccggtagtcccaatgaccttaaggtatcgcatgaagaggatttgaatgaccttgaaaagacagccgaagaaaccttacaacaaaagccagcaaaggaatacatatttgtttcattatgttgtgttatggttgcctttggtggtttcgttttcggttgggatactggtaccatttctggttttgttaaccaaactgatttccttagaagattcggtcaagaaaaggccgatggttctcactacttgtccaatgttagaactggtttgattgtttccattttcaatattggttgtgccgttggtggtattgttttgtctaacatcggtgatagatggggtcgtagaattggtttgattaccgttattataatctatgttattggtatcattattcaaattgcatctgtggacaaatggtaccaatatttcattggtagaattatttctggtttaggtgttggtggtatcacagttttgtcgccaatgttgatttcggaaaccgctcctaaacatttaagaggtactttggtctcatgttaccaattgatgattacttttggtattttcttgggttactgtactaactacggtaccaagaactactctaactctgtccaatggagagttccattaggtctatgtttcgcttgggccatctttatggttcttggtatgatgtttgttccagaatctgcaagattcttggttgaaactgatcaaattgaagaggccagaaaatctttggcaaagaccaacaaagtttctattgacgatcctgttgtgaaatatgagctcctaaagatccaatccagtatcgaattggaaaaggctgcaggtaacgcatcatggggtgaattgattaccggtaagccaagtatgttcagacgtactttaatgggtattatgattcaatctctgcaacaattgactggtgataactatttcttctattacggtaccacaattttccaatctgtcggtatggacgattctttcgaaacttcgatcgtcttgggtatcgtgaacttcgcttctaccttctttgctttatacacagttgatcatttcggtcgtcgtaactgtctattatacggttgtgttggtatggttgcatgttacgttgtttatgcatctgttggtgttacaagattatggccagacggtccagatcatcctgatatttcttccaagggtgctggtaactgtatgattgtctttgcgtgcttttatatcttctgtttcgctactacttgggctccaatcgcatacgtggttatctccgaatcctatccacttagagttaagggtaaggcaatggctatcgcttccgcctcgaactggatctggggtttcctgattgggttcttcacaccatttattacatctgctattcacttctactacggttacgtctttatgggttgtatggtattcgccttcttctacgtctacttcttcgttcctgaaaccaagggtctaactttggaagaagttaatgaaatgtactctgaaggtgtcctaccatggaaatcttcatcatgggtcccatcttcaagaagaggtgcagagtacgatgtcgatgctttgcaacatgacgacaagccatggtacaaggctatgttgtaa

SEQ ID NO: 194 - protein, 567 aa, Kluyveromyces marxianus var. lactis, Candida sphaerica
MSNQMTDSTSAGSGTEHSVDTNTALKAGSPNDLKVSHEEDLNDLEKTAEETLQQKPAKEYIFVSLCCVMVAFGGFVFGWDTGTISGFVNQTDFLRRFGQEKADGSHYLSNVRTGLIVSIFNIGCAVGGIVLSNIGDRWGRRIGLITVIIIYVIGIIIQIASVDKWYQYFIGRIISGLGVGGITVLSPMLISETAPKHLRGTLVSCYQLMITFGIFLGYCTNYGTKNYSNSVQWRVPLGLCFAWAIFMVLGMMFVPESARFLVETDQIEEARKSLAKTNKVSIDDPVVKYELLKIQSSIELEKAAGNASWGELITGKPSMFRRTLMGIMIQSLQQLTGDNYFFYYGTTIFQSVGMDDSFETSIVLGIVNFASTFFALYTVDHFGRRNCLLYGCVGMVACYVVYASVGVTRLWPDGPDHPDISSKGAGNCMIVFACFYIFCFATTWAPIAYVVISESYPLRVKGKAMAIASASNWIWGFLIGFFTPFITSAIHFYYGYVFMGCMVFAFFYVYFFVPETKGLTLEEVNEMYSEGVLPWKSSSWVPSSRRGAEYDVDALQHDDKPWYKAML

SEQ ID NO: 195 - DNA, 2211 bp, Saccharomyces cerevisiae
  misc_feature (2)..(4): n is a, c, g, or t
  misc_feature (6)..(7): n is a, c, g, or t
  CDS (508)..(2211)
snnndnntcttagctatattcttccagcttcgcctgctgcccggtcatcgttcctgtcacgtagtttttccggattcgtccggctcatataataccgcaataaacacggaatatctcgttccgcggattcggttaaactctcggtcgcggattatcacagagaaagcttcgtggagaatttttccagattttccgctttccccgatgttggtatttccggaggtcattatactgaccgccattataatgactgtacaacgaccttctggagaaagaaacaactcaataacgatgtgggacattgggggcccactcaaaaaatctggggactatatccccagagaatttctccagaagagaagaaaagtcaaagttttttttcgcttgggggttgcatataaatacaggcgctgttttatcttcagcatgaatattccataattttacttaatagcttttcataaataatagaatcacaaacaaaatttacatctgagttaaacaatcatgaattcaactccagatttaatatctccacaaaagtcaagtgagaattcgaatgctgacctgccttcgaatagctctcaggtaatgaacatgcctgaagaaaaaggtgttcaagatgatttccaagctgaggccgaccaagtacttaccaacccaaatacaggtaaaggtgcatatgtcactgtgtctatctgttgtgttatggttgccttcggtggtttcgttttcggttgggatactggtaccatttctggtttcgtcgcccaaactgatttcttgagaagattcggtatgaagcataaagatggtagttattatttgtctaaggttagaactggtttaattgtctccattttcaacattggttgtgccattggtggtattattttggctaaattgggtgatatgtacggtcgtaaaatgggtttgattgtcgttgttgttatctacatcatcggtattattattcaaattgcatccatcaacaaatggtaccaatatttcatcggtagaattatttccggtttgggtgttggtggtattgccgttttatctcctatgttgatttctgaagtcgctcctaaggaaatgagaggtactttagtctcctgttaccaactgatgattaccttgggtattttcttgggttactgtaccaacttcggtactaagaactactccaactctgtgcaatggagagttccattaggtttgtgttttgcctgggctttgtttatgatcggtggtatgactttcgttccagaatccccacgttatttggttgaagctggtcaaattgacgaagcaagagcatctctttccaaagttaacaaggttgccccagaccatccattcattcaacaagagttggaagttattgaagctagtgttgaagaagctagagctgctggttcagcatcatggggtgagttgttcactggtaagccggccatgtttaagcgtactatgatgggtatcatgatccaatctctacaacaattgactggtgataactatttcttctactatggtactaccgtttttaacgctgttggtatgagtgattctttcgaaacttctattgttttcggtgtcgtcaacttcttctctacttgttgttctttgtacactgtcgatcgttttggacgtcgtaactgtttgttatatggtgccattggtatggtctgctgttatgtagtttacgcttctgttggtgtcaccagactatggccaaatggtgaaggtaatggttcatccaagggtgctggtaactgtatgattgtctttgcctgtttctatattttctgttttgctaccacttgggctccaattgcttatgttgttatttctgaaactttcccattgagagtcaagtctaaggctatgtctattgctacagctgctaattggttgtggggtttcttgattggtttcttcactccatttattactggtgctattaacttctactacggttacgttttcatgggctgtatggttttcgcctacttctacgttttcttctttgtgccagaaactaagggtttgactttggaagaagtcaatgatatgtacgctgaaggtgttctaccatggaagtctgcttcatgggttccaacatctcaaagaggtgctaactacgatgctgatgcattgatgcatgatgaccagccattctacaagaaaatgttcggcaagaaataa

SEQ ID NO: 196 - protein, 567 aa, Saccharomyces cerevisiae
MNSTPDLISPQKSSENSNADLPSNSSQVMNMPEEKGVQDDFQAEADQVLTNPNTGKGAYVTVSICCVMVAFGGFVFGWDTGTISGFVAQTDFLRRFGMKHKDGSYYLSKVRTGLIVSIFNIGCAIGGIILAKLGDMYGRKMGLIVVVVIYIIGIIIQIASINKWYQYFIGRIISGLGVGGIAVLSPMLISEVAPKEMRGTLVSCYQLMITLGIFLGYCTNFGTKNYSNSVQWRVPLGLCFAWALFMIGGMTFVPESPRYLVEAGQIDEARASLSKVNKVAPDHPFIQQELEVIEASVEEARAAGSASWGELFTGKPAMFKRTMMGIMIQSLQQLTGDNYFFYYGTTVFNAVGMSDSFETSIVFGVVNFFSTCCSLYTVDRFGRRNCLLYGAIGMVCCYVVYASVGVTRLWPNGEGNGSSKGAGNCMIVFACFYIFCFATTWAPIAYVVISETFPLRVKSKAMSIATAANWLWGFLIGFFTPFITGAINFYYGYVFMGCMVFAYFYVFFFVPETKGLTLEEVNDMYAEGVLPWKSASWVPTSQRGANYDADALMHDDQPFYKKMFGKK

SEQ ID NO: 197 - DNA, 2160 bp, Saccharomyces cerevisiae
  CDS (216)..(1928)
gaaactccaccattatctaatgtagcaaaatatttcttaacacccgaagttgcgtgtccccctcacgtttttaatcatttgaattagtatattgaaattatatataaaggcaacaatgtccccataatcaattccatctggggtctcatgttctttccccaccttaaaatctataaagatatcataatcgtcaactagttgatatacgtaaaatcatgaattcaactcccgatctaatatctcctcagaaatccaattcatccaactcatatgaattggaatctggtcgttcaaaggccatgaatactccagaaggtaaaaatgaaagttttcacgacaacttaagtgaaagtcaagtgcaacccgccgttgcccctccaaacaccggaaaaggtgtctacgtaacggtttctatctgttgtgttatggttgctttcggtggtttcatatttggatgggatactggtaccatttctggttttgttgctcaaactgattttctaagaagatttggtatgaagcaccacgacggtagtcattacttgtccaaggtgagaactggtttaattgtctctatttttaacattggttgtgccattggtggtatcgtcttagccaagctaggtgatatgtatggtcgtagaatcggtttgattgtcgttgtagtaatctacactatcggtatcattattcaaatagcctcgatcaacaagtggtaccaatatttcattggtagaattatctctggtttaggtgtcggtggtatcacagttttatctcccatgctaatatctgaggtcgcccccagtgaaatgagaggcaccttggtttcatgttaccaagtcatgattactttaggtattttcttaggttactgtaccaattttggtaccaagaattactcaaactctgtccaatggagagttccattaggtttgtgtttcgcctgggccttatttatgattggtggtatgatgtttgttcctgaatctccacgttatttggttgaagctggcagaatcgacgaagccagggcttctttagctaaagttaacaaatgcccacctgaccatccatacattcaatatgagttggaaactatcgaagccagtgtcgaagaaatgagagccgctggtactgcatcttggggcgaattattcactggtaaaccagccatgtttcaacgtactatgatgggtatcatgattcaatctctacaacaattaactggtgataactatttcttctactacggtaccattgttttccaggctgtcggtttaagtgactcttttgaaacttctattgtctttggtgtcgtcaacttcttctccacttgttgttctctgtacaccgttgaccgttttggccgtcgtaactgtttgatgtggggtgctgtcggtatggtctgctgttatgttgtctatgcctctgttggtgttaccagattatggccaaacggtcaagatcaaccatcttcaaagggtgctggtaactgtatgattgttttcgcatgtttctacattttctgtttcgctactacctgggccccaattgcttacgttgttatttcagaatgtttcccattaagagtcaaatccaagtgtatgtctattgccagtgctgctaactggatctggggtttcttgattagtttcttcaccccatttattactggtgccatcaacttctactacggttacgttttcatgggctgtatggttttcgcttacttttacgtctttttcttcgttccagaaactaaaggtttatcattagaagaagttaatgatatgtacgccgaaggtgttctaccatggaaatcagcttcctgggttccagtatccaagagaggcgctgactacaacgctgatgacctaatgcatgatgaccaaccattttacaagagtttgtttagcaggaaataaactaaacaagctcaatatgcatattttaatgacttatacagtatttaatttctcagtaaattttataaaggtgatattatattggtgttaaaacaaaattcttgtcaaattcataaacagatgttcttttctttgctagttcttgaccttcaccaaggaacaagaaatttcattctggcactcttccgaggaaaaattttatatgatatagtatgggttaataccacatagg

SEQ ID NO: 198 - protein, 570 aa, Saccharomyces cerevisiae
MNSTPDLISPQKSNSSNSYELESGRSKAMNTPEGKNESFHDNLSESQVQPAVAPPNTGKGVYVTVSICCVMVAFGGFIFGWDTGTISGFVAQTDFLRRFGMKHHDGSHYLSKVRTGLIVSIFNIGCAIGGIVLAKLGDMYGRRIGLIVVVVIYTIGIIIQIASINKWYQYFIGRIISGLGVGGITVLSPMLISEVAPSEMRGTLVSCYQVMITLGIFLGYCTNFGTKNYSNSVQWRVPLGLCFAWALFMIGGMMFVPESPRYLVEAGRIDEARASLAKVNKCPPDHPYIQYELETIEASVEEMRAAGTASWGELFTGKPAMFQRTMMGIMIQSLQQLTGDNYFFYYGTIVFQAVGLSDSFETSIVFGVVNFFSTCCSLYTVDRFGRRNCLMWGAVGMVCCYVVYASVGVTRLWPNGQDQPSSKGAGNCMIVFACFYIFCFATTWAPIAYVVISECFPLRVKSKCMSIASAANWIWGFLISFFTPFITGAINFYYGYVFMGCMVFAYFYVFFFVPETKGLSLEEVNDMYAEGVLPWKSASWVPVSKRGADYNADDLMHDDQPFYKSLFSRK

SEQ ID NO: 199 - DNA, 2037 bp, Saccharomyces cerevisiae
  CDS (157)..(1869)
ctcgagaaaagacatatggtttgtaactatcttcttcttttttccaatttttctgttttaataataaaaaaacaagaacaaacaagctcaacttgtcttttctaagaacaaagaataaacacaaaaacaaaaagtttttttaattttaatcaaaaaatgtcacaagacgctgctattgcagagcaaactcctgtggagcatctctctgctgttgactcagcctcccactcggttttatctacaccatcaaacaaggctgaaagagatgaaataaaagcttatggtgaaggtgaagagcacgaacctgtcgttgaaattccaaagagaccagcttctgcctatgtcactgtctctattatgtgtatcatgatcgcctttggtggtttcgttttcggttgggatactggtaccatttctggtttcatcaatcaaaccgatttcatcagaagatttggtatgaagcataaagatggtactaattatttgtctaaggttagaactggtttgattgtctccattttcaacattggttgtgccattggtggtattattctttccaaattgggtgatatgtacggtcgtaaggtgggtttgattgtcgttgttgtcatctacatcatcggtattattattcaaattgcatctatcaacaaatggtaccaatatttcatcggtagaattatttccggtttgggtgttggtggtattgccgttttatctcctatgttgatttctgaagtatccccaaagcatttaaggggtactttagtctcttgctaccaattgatgattactgccggtattttcttgggttactgtaccaacttcggtactaagaactactccaactctgtgcaatggagagttccattaggtttgtgttttgcctgggctttgtttatgattggtggtatgacatttgttccagagtctccacgttatttggctgaagtcggtaagatcgaagaagccaaacgttctattgccgtttctaacaaggttgctgttgatgatccatctgttttggctgaaatcgaagctgtcttggctggtgtagaggcagagaaattagctggtaatgcatcctggggtgaattgtttagtagcaagacaaaggtccttcaacgtttgatcatgggtgctatgattcaatctctacaacaattgacaggtgataactatttcttctactatggtactactattttcaaggctgttggtttgagtgactctttcgaaacctctattgtcttgggtattgttaactttgcttccacctttgttggtatttacgttgttgagagatatggtcgtcgtacttgtttgctatggggtgctgcatccatgactgcttgtatggttgtctatgcttccgtgggtgtcaccagattatggccaaatggtcaagaccaaccatcttccaagggtgctggtaactgtatgattgtctttgcctgtttctatattttctgttttgctactacatgggctccaattccttatgtcgttgtttctgaaactttcccattgagagtcaagtctaaggctatgtctattgctacagctgctaattggttgtggggtttcttgattggtttcttcactccatttattactggtgctattaacttctactacggttacgttttcatgggctgtttggtcttcatgttcttctatgttttgttagttgttccagaaactaagggtttgactttggaagaagtcaacaccatgtgggaagaaggtgttctaccatggaagtctgcctcatgggttccaccatctagaagaggtgccaactacgacgctgaagaaatggctcacgatgataagccattgtacaagagaatgttcagcaccaaataatttgcgaacatttttattaattcatgatcacgctctaatttgtgcatttgaaatgctctctaattctgattttatattttttaatgaacccttacgatttatattgtatggcaagatgttgccaatagaagtataattttttattaattttttttcttttctaagctt

SEQ ID NO: 200 - protein, 570 aa, Saccharomyces cerevisiae
MSQDAAIAEQTPVEHLSAVDSASHSVLSTPSNKAERDEIKAYGEGEEHEPVVEIPKRPASAYVTVSIMCIMIAFGGFVFGWDTGTISGFINQTDFIRRFGMKHKDGTNYLSKVRTGLIVSIFNIGCAIGGIILSKLGDMYGRKVGLIVVVVIYIIGIIIQIASINKWYQYFIGRIISGLGVGGIAVLSPMLISEVSPKHLRGTLVSCYQLMITAGIFLGYCTNFGTKNYSNSVQWRVPLGLCFAWALFMIGGMTFVPESPRYLAEVGKIEEAKRSIAVSNKVAVDDPSVLAEIEAVLAGVEAEKLAGNASWGELFSSKTKVLQRLIMGAMIQSLQQLTGDNYFFYYGTTIFKAVGLSDSFETSIVLGIVNFASTFVGIYVVERYGRRTCLLWGAASMTACMVVYASVGVTRLWPNGQDQPSSKGAGNCMIVFACFYIFCFATTWAPIPYVVVSETFPLRVKSKAMSIATAANWLWGFLIGFFTPFITGAINFYYGYVFMGCLVFMFFYVLLVVPETKGLTLEEVNTMWEEGVLPWKSASWVPPSRRGANYDAEEMAHDDKPLYKRMFSTK

SEQ ID NO: 201 - DNA, 3025 bp, Saccharomyces cerevisiae
  CDS (510)..(2288)
ctgcagttgatccgcattccccgtggctgtgcacattaggggacagtaagtaattcactttctgatcccgcactcatagcgatggaataatataccggatttcacaccttgttattgagtgaagtactgcttggtgaaatgatatctttatgttcaatattaatggtcgtgtggatgaatatatgggcatgggttaattagttttaggggcacggagtaaacaagaaaggagggccagaatcattagtagagtacctcaagtttggtttctttttgatttcacgtataaaagagtctctctcttttcttttcatgctagtcgaacggttctccctctaagaataagaaactatcaaaagaaagagaaaagtcgattgaataatttttctatatataatatacgcaaacaagattcgctttcactttgcaattttacttcatagctttgttaaaaccagcaaaaaatattatttttctagaaaaaagaatatattagaggtaaagaaagaatgtcggaacttgaaaacgctcatcaaggccccttggaagggtctgctactgtgagcacaaattctaactcatacaacgagaagtcaggaaactcgactgctcctggtaccgccggttacaacgataatttggcacaagctaaacccgtctcaagttacatttcccatgaaggccctcccaaagacgaactggaagagcttcagaaggaggttgacaaacaactagagaagaaatcgaagtcggatttactatttgtatccgtctgctgtttgatggttgcttttggtgggttcgtgtttgggtgggatactggtactatatctggttttgtcaggcaaacagacttcattaggcgatttggcagcacccgtgcaaacgggactacctatctttccgatgtcagaaccggtttgatggtttctattttcaacatcggctgcgctatcggaggtatagttttgtcaaagctcggtgatatgtatggacgtaagattggtctgatgactgttgtcgtcatttactcaattgggatcatcatccaaatcgcctccattgacaaatggtatcaatatttcattggaagaatcatctcaggactgggcgttggtggtattacagttttggcgcctatgctaatttctgaagtgtcgcctaagcagttgcgtggtactctggtttcatgttaccaattaatgatcactttcggtatctttttgggatattgtactaattttggtaccaagaattactcaaactctgtccaatggagggtaccattaggcttatgctttgcatggtctatttttatgattgttggtatgacgttcgttcctgaatccccacgttatctggtagaagtgggaaaaattgaagaggccaagcggtccttagcaagagctaacaaaaccactgaagactctcctttagtaactttagaaatggagaactatcagtcttctattgaagctgagagattggcgggctctgcttcttggggggaattggttactggtaagccccagatgttcagacgtacactaatgggtatgatgattcaatctttacaacagctgacaggtgacaattacttcttttactatggtactacaattttccaggctgttggtttggaagattcatttgaaactgctattgttttgggtgttgttaattttgtttcgacttttttctcgctatataccgtcgatcgttttggtcgtcgtaattgtttgttatggggctgtgtaggtatgatttgttgctatgtcgtctatgcctctgttggtgttaccagattatggccaaacggtcaagatcaaccatcttcaaagggtgctggtaactgtatgattgttttcgcatgtttctacattttctgtttcgctaccacttgggcccccgttgcctatgtccttatctctgagtcgtatcccttaagagtacgtggtaaagcaatgtcgattgcaagtgcctgtaactggatttgggggttcttgatcagttttttcactccatttattacttcagcaatcaatttctattatggctatgtctttatgggttgtatggtgttcgcatacttttatgtgttcttctttgttccagagacaaagggcttaacattagaagaagtcaacgaaatgtatgaagaaaatgtgctaccttggaagtctaccaaatggatcccaccatctaggagaacaacagattatgacctagacgctactagaaatgatccgagaccattttataaaaggatgttcactaaagaaaaataatctcttgtagtgtaggatcaactattttcgcatacttgcaatgttcagcattgcaccatttcaaattttaatattaatattaatcgttttcgttcatatgttcattcatagtttacaaataatgcaatcatatgcagagatattttgtccgtggttaatagggctgcctgttattcctttaattcaactaaattacgtatgtctaataatatcaaaatcatcatgacgtttttgttttttttctttattttaagtaggatcaaaccaggggagaaagggttgctacgcctaacaacaagaacttgtatatcgtttcttgttacttatacttttctgcccacttctctcttacaactgctcgagctcatccttggtaataaaacagtgaggacggttactcgaggtttcaacaggggaaaataaatttatatgatgaatcaagagccccgttcttttaccgtattatccttcatactacatactagggaaagaactgaaaactccgctacctgctgtaacagcgcataataaaaagcaagaatatagacagttactgttgtttacgttctttgatgacatcattctcatcagacatacagaaacacatcctttttgtctaccccgtatttattccaacttcaaagtataggtaccgtccggttatactctcatatactttgtggcagtttgcttctttaaaccttgttaacccagaatattttcagtgcaaaaagctt

SEQ ID NO: 202 - protein, 592 aa, Saccharomyces cerevisiae
MSELENAHQGPLEGSATVSTNSNSYNEKSGNSTAPGTAGYNDNLAQAKPVSSYISHEGPPKDELEELQKEVDKQLEKKSKSDLLFVSVCCLMVAFGGFVFGWDTGTISGFVRQTDFIRRFGSTRANGTTYLSDVRTGLMVSIFNIGCAIGGIVLSKLGDMYGRKIGLMTVVVIYSIGIIIQIASIDKWYQYFIGRIISGLGVGGITVLAPMLISEVSPKQLRGTLVSCYQLMITFGIFLGYCTNFGTKNYSNSVQWRVPLGLCFAWSIFMIVGMTFVPESPRYLVEVGKIEEAKRSLARANKTTEDSPLVTLEMENYQSSIEAERLAGSASWGELVTGKPQMFRRTLMGMMIQSLQQLTGDNYFFYYGTTIFQAVGLEDSFETAIVLGVVNFVSTFFSLYTVDRFGRRNCLLWGCVGMICCYVVYASVGVTRLWPNGQDQPSSKGAGNCMIVFACFYIFCFATTWAPVAYVLISESYPLRVRGKAMSIASACNWIWGFLISFFTPFITSAINFYYGYVFMGCMVFAYFYVFFFVPETKGLTLEEVNEMYEENVLPWKSTKWIPPSRRTTDYDLDATRNDPRPFYKRMFTKEK

SEQ ID NO: 203 - DNA, 1641 bp, Saccharomyces cerevisiae
  CDS (1)..(1641)
atggttagttcaagtgtttccattttggggactagcgccaaggcatccacttctctaagtagaaaggatgaaattaaactaacccctgaaacaagggaagctagcttggacattccatacaaacccattattgcatactggacggtgatgggtctctgtctgatgattgcctttggtggattcatttttggttgggatacaggaaccatttcagggtttattaaccaaacagatttcaagagaaggtttggtgagttacaaagggacggcagttttcaactatcagatgtcaggacagggctaattgtcggtatcttcaacataggttgtgctttaggtggcctaacgctgggacgcctgggcgatatttatgggcgtaaaatcggcttaatgtgtgttatactggtgtatgttgttggtatcgtgatccagattgcttcctctgacaaatggtatcaatattttattggtagaattgtttctggaatgggtgttggaggtgttgctgtgctgtcgccaactttgatctcagaaatttccccaaagcacctaagaggcacttgtgtctctttttaccagctaatgattacccttggaattttcttgggctactgtaccaattatggtacaaagaaatattcaaattcaatacagtggcgggttcccttgggtttgtgttttgcgtgggcaatctttatggtgattggaatggttatggttccggaatcgcccagatatttagtagaaaaaggtaagtatgaagaagctagaaggtctttggccaaatcaaacaaggtcacagttactgatccaggcgttgtttttgagtttgatactatagttgcaaatatggaattagaaagggctgttggaaatgccagttggcacgaactcttctcaaataaaggagcaattctaccaagggtaataatgggaatcgttatccagtcactgcaacagcttactggctgtaattattttttctactacggcacgaccattttcaatgctgttggaatgcaagactctttcgagacttccattgtccttggggctgttaattttgcttctacatttgttgcactatacattgtggataaatttgggcgtcgaaaatgtttattgtgggggtctgcctcgatggcaatttgtttcgtcatattcgccaccgttggcgtcactagattatggccacaagggaaagaccaaccttcttcgcaaagtgctggtaatgttatgatcgtttttacttgtttcttcattttctcttttgccattacttgggctcctatcgcctatgtcattgtggcagaaacttatccattaagagttaaaaatcgtgccatggccattgcggttggtgcgaactggatgtggggtttcttgattggatttttcacaccctttatcactagatccataggattttcttatggctatgttttcatgggttgcttaatcttttcgtacttctacgttttcttctttgtttgcgaaacaaagggattaactctggaggaagttaatgaaatgtacgaagaaagaataaagccatggaagtccggaggttggattcccagttctagaagaacaccacaaccaacaagcagtacaccattagttattgttgatagtaaataa

SEQ ID NO: 204 - protein, 546 aa, Saccharomyces cerevisiae
MVSSSVSILGTSAKASTSLSRKDEIKLTPETREASLDIPYKPIIAYWTVMGLCLMIAFGGFIFGWDTGTISGFINQTDFKRRFGELQRDGSFQLSDVRTGLIVGIFNIGCALGGLTLGRLGDIYGRKIGLMCVILVYVVGIVIQIASSDKWYQYFIGRIVSGMGVGGVAVLSPTLISEISPKHLRGTCVSFYQLMITLGIFLGYCTNYGTKKYSNSIQWRVPLGLCFAWAIFMVIGMVMVPESPRYLVEKGKYEEARRSLAKSNKVTVTDPGVVFEFDTIVANMELERAVGNASWHELFSNKGAILPRVIMGIVIQSLQQLTGCNYFFYYGTTIFNAVGMQDSFETSIVLGAVNFASTFVALYIVDKFGRRKCLLWGSASMAICFVIFATVGVTRLWPQGKDQPSSQSAGNVMIVFTCFFIFSFAITWAPIAYVIVAETYPLRVKNRAMAIAVGANWMWGFLIGFFTPFITRSIGFSYGYVFMGCLIFSYFYVFFFVCETKGLTLEEVNEMYEERIKPWKSGGWIPSSRRTPQPTSSTPLVIVDSK

SEQ ID NO: 205 - DNA, 1695 bp, Saccharomyces cerevisiae
  CDS (1)..(1695)
atgtctagtgcgcaatcctctattgatagcgatggagatgttcgagatgctgatattcatgtcgcaccacccgtggaaaaagagtggtcagatggatttgatgacaacgaagtcataaacggggataacgttgagccaccaaaaagagggctcataggttatcttgtcatttacttactgtgttatccaatatcctttgggggtttcctgcctggttgggatagtggtatcacagcaggtttcattaacatggacaactttaaaatgaacttcggttcttacaagcatagcactggtgaatattatttgagcaacgtgcgtatgggtcttcttgtggctatgttcagtattggatgtgccataggtggccttatttttgcccgtcttgctgatactttaggtagaaggctggcaattgtgatcgtggtgttggtatatatggttggtgcaattattcagatcagttcaaatcacaaatggtaccagtactttgtcggtaagatcatctacggtcttggtgctggtggctgttcggtgttgtgtccaatgcttttgtctgaaatagcccccacagatttgagaggtggactggtctcattgtaccaactgaacatgacgttcggtattttcttgggttattgtagcgtttatggtacgagaaaatacgataacactgcacaatggagagtcccccttgggctttgctttttatgggctttgattatcatcattggtatgttattggttccagagtccccaagatatctgattgaatgtgagagacacgaagaggcccgtgcttccattgccaaaatcaacaaggtttcaccagaggatccatgggtactcaaacaggctgatgaaatcaacgccggtgtccttgcccaaagggaactaggagaagcttcatggaaagaacttttctctgtaaaaactaaagtccttcaacgtttgatcacaggtattcttgtgcaaacctttttgcaacttactggtgaaaactacttcttcttctacggaactaccatttttaaatcagtcggtcttactgatgggtttgagacgtcgatcgtcctaggtacagtgaacttcttctccactattattgctgttatggtcgtagacaaaattggccgtcgtaaatgtctgttatttggtgcagctgggatgatggcttgtatggtcatatttgcaagtatcggggtgaaatgtctttaccctcatggccaggacggtccttcttcgaaaggtgcaggtaatgccatgattgtgttcacttgtttctatatattctgctttgcaacgacatgggctcctgttgcttatattgtggttgccgagtcgttcccttcgaaggtcaagtctagagccatgtcgatttcaactgcatgcaactggttatggcaatttttgatcggttttttcacaccattcattactgggtctatccacttctattatggttatgtgttcgtaggttgtttggttgctatgtttttgtacgttttcttctttttaccagaaacgattggtctatctttggaggaaatccaattactatacgaagaaggtataaaaccatggaaatctgcatcttgggtcccaccttctaggagaggtatttcttccgaagaaagtaagaccgagaagaaggattggaagaaatttttgaagttctcaaagaattctgattga

SEQ ID NO: 206 - protein, 564 aa, Saccharomyces cerevisiae
MSSAQSSIDSDGDVRDADIHVAPPVEKEWSDGFDDNEVINGDNVEPPKRGLIGYLVIYLLCYPISFGGFLPGWDSGITAGFINMDNFKMNFGSYKHSTGEYYLSNVRMGLLVAMFSIGCAIGGLIFARLADTLGRRLAIVIVVLVYMVGAIIQISSNHKWYQYFVGKIIYGLGAGGCSVLCPMLLSEIAPTDLRGGLVSLYQLNMTFGIFLGYCSVYGTRKYDNTAQWRVPLGLCFLWALIIIIGMLLVPESPRYLIECERHEEARASIAKINKVSPEDPWVLKQADEINAGVLAQRELGEASWKELFSVKTKVLQRLITGILVQTFLQLTGENYFFFYGTTIFKSVGLTDGFETSIVLGTVNFFSTIIAVMVVDKIGRRKCLLFGAAGMMACMVIFASIGVKCLYPHGQDGPSSKGAGNAMIVFTCFYIFCFATTWAPVAYIVVAESFPSKVKSRAMSISTACNWLWQFLIGFFTPFITGSIHFYYGYVFVGCLVAMFLYVFFFLPETIGLSLEEIQLLYEEGIKPWKSASWVPPSRRGISSEESKTEKKDWKKFLKFSKNSD

SEQ ID NO: 207 - DNA, 3277 bp, Saccharomyces cerevisiae
  CDS (802)..(2505)
gaaaagaacaaagtaaatttaggatctggaaggagtgctgtatgtaaacgaagctttcagttttaggtaatgtttgcacaacctacatgatataagatggtatgttctgcaacagcgtgcctgtcacttggcccgttatagcagattataccatctgcaagcagaccccattattgcattgcctccgcagccttgcgtatacatagccctaagacaaaatacggagcgtaaacaaccctcgatccccgcaacaattacataaccatttctccgcggaattacataatcatttctccgggaaaattacataatcatttctccgtgcgagttataagtgcttttctcgtgcatttccctgacacttcacaaaaccttctttttcttttttctttatttcaggggaaatcagtgcaaaactaaaaagaaagaaattttgtgaaatgtaaactccaggtgtcaaaaaataaattatatccgtggaaaatcaggcgtcggaaattgtagatgaatccgcctcctccacaataaaaatgctgaccacacgagcaatgcatacactcggacaccttcgttcaaagtatcagtagcagttcgacacaccctatactacttagctcttaaggtctaggctcatctttctcagttcctctttttcgctaaataaaggtatataatgtcacagctgtgtaactaaagaacactgttgttcctatctttttcttcttctttttttggtatgagttggaaaaaataatcattgcacaattgagtactaaaagctttcgtatcttacccaatatcatgtccggtgttaataatacatccgcaaatgatttatccactaccgagtctaactctaactcagtagcaaatgcaccatctgtaaaaactgagcataatgactctaaaaactccctcaacctggatgccactgaaccacctattgacttacctcaaaaacccctctctgcatataccaccgtcgcaatcctgtgtttgatgattgcatttggcggcttcatctttggttgggataccggtaccatttctggttttgttaacctttctgatttcatcagaaggttcggtcaaaaaaatgacaagggaacctactacttatcgaaagtaagaatgggtttgatcgtctcaatattcaacattggctgcgccataggcggaattgtcttgtcaaaagtcggtgatatatatggtcgtcgtattggattgattacagttactgccatttacgttgtaggcatcctaatccaaataacttccataaacaagtggtaccaatacttcattggaagaattatttctggcctaggagtgggaggcattgctgtcctttccccaatgttgatatctgaagttgctcccaaacaaatcagaggaaccctggtccaattgtaccagctgatgtgtacgatgggtatttttctaggatactgtaccaattacggtaccaagaactatcacaacgccactcaatggagagtcggccttggtctttgctttgcctggactacattcatggttagtggaatgatgtttgtaccagaatcaccacgttacctgattgaggttggtaaagatgaggaagcgaaacgttcactttcgaaatccaacaaagtctcagtcgacgatccagccttgttagcagaatatgacactataaaggcgggaatcgaacttgaaaagctggcaggtaacgcatcatggtctgaactactctccactaaaacaaaggtctttcagcgtgttctcatgggagtgatgatccaatcgctgcagcaattaaccggtgataactacttcttttactacggcaccaccatcttcaaatctgtcggtctaaaggactcctttcagacttcgatcattatcggtgtggttaattttttctcttcattcatagcggtatacaccattgagaggtttggacgccgtacgtgtctattgtggggtgctgcttctatgctatgctgctttgctgtgtttgcctccgtcggtgtgacaaagttgtggcctcaaggaagcagtcaccaagacattacttctcagggcgccggtaactgtatgattgtgtttactatgttcttcattttttcgttcgccaccacttgggcaggcggctgttacgttattgtctcagagacgtttcctcttagggtcaaatcaagaggaatggcaatcgcaacagctgcaaactggatgtggggtttcctgattagtttctttaccccattcattaccggggcaatcaacttttactacggttatgtattcttaggctgtctggtttttgcatacttttatgtctttttctttgtcccagaaacaaaaggcctgacgctggaggaggtgaatactatgtggctggaaggtgtgccagcatggaaatcagcctcatgggtgccaccagaaagaagaaccgcagattacgatgctgacgccatagaccatgacgatagaccaatctacaagaggttcttttccagctaatcttccggtttttagtaactggaaaaaaatacatgaacttaattatttattatatacaatatttacttttttacgccttaatccttaacggactatttgttatgccttatagaactagaaattatatgataaacatgagctacacgagttgacagggtgaacagattactatagcatctttctctcatgaataatttttaaaatgtataaattttgtaacgttccgaagggtggagtgaaattccattcaagaaaccaagcattgagacagaacagtacagagttcagttgttgcggaccgagaattgtaacaagtagccccagaaacattcatatgacgtctgtttcaaattaagcttagtaaaagtacacatttaccataaaaaaatagtaccaagtcggtggcctgatatccttattttccttctgccaattgggcaagttggtactaatattttaggtgacactgccactttattgttatggattgaaatttcttaaatgttctcacaatcggccataacgctatttctccgacgtaacctcctgtcatagtgtgccgtgcctgaataacttaaaaaattaaagttttcaatgtgcccaaaaaaattcacaaatagtacgcgctcgttaaacaccctgtgacgctgggccaggcactatttagcattacttcgaaaagacgcaagtataaagagtgagatctcacgtactacaacaagaacatagagaagcattctaataagcatataaacaaggcttctagagaaaa

SEQ ID NO: 208 - protein, 567 aa, Saccharomyces cerevisiae
MSGVNNTSANDLSTTESNSNSVANAPSVKTEHNDSKNSLNLDATEPPIDLPQKPLSAYTTVAILCLMIAFGGFIFGWDTGTISGFVNLSDFIRRFGQKNDKGTYYLSKVRMGLIVSIFNIGCAIGGIVLSKVGDIYGRRIGLITVTAIYVVGILIQITSINKWYQYFIGRIISGLGVGGIAVLSPMLISEVAPKQIRGTLVQLYQLMCTMGIFLGYCTNYGTKNYHNATQWRVGLGLCFAWTTFMVSGMMFVPESPRYLIEVGKDEEAKRSLSKSNKVSVDDPALLAEYDTIKAGIELEKLAGNASWSELLSTKTKVFQRVLMGVMIQSLQQLTGDNYFFYYGTTIFKSVGLKDSFQTSIIIGVVNFFSSFIAVYTIERFGRRTCLLWGAASMLCCFAVFASVGVTKLWPQGSSHQDITSQGAGNCMIVFTMFFIFSFATTWAGGCYVIVSETFPLRVKSRGMAIATAANWMWGFLISFFTPFITGAINFYYGYVFLGCLVFAYFYVFFFVPETKGLTLEEVNTMWLEGVPAWKSASWVPPERRTADYDADAIDHDDRPIYKRFFSS

SEQ ID NO: 209 - DNA, 1710 bp, Saccharomyces cerevisiae
  CDS (1)..(1710)
atgactgatcgtaaaaccaacttgccagaagaaccgattttcgaagaggcagaagatgatggctgcccttcgatagaaaattcttcacatctgtcagtacctacagtggaggaaaacaaggacttttccgagtataatggggaagaggcagaggaagttgttgttccagaaaagcctgcttcagcctatgctactgtttctatcatgtgtttatgtatggctttcggtggatttatgtccggttgggacacaggtacgatttctggtttcgtcaatcagactgattttttaagaagatttggtaattatagccattccaagaacacttactacttatctaatgtgagaactgggttgattgtgtccatcttcaatgtgggaagcgccattggctgtcttttcttgtctaaattgggtgatatttacggccgctgcatgggtttgattatagttattgtcgtttatatggttggtattgtcattcaaattgcctctatagataagtggtatcagtattttattggaagaattatcgctggtataggtgctggttccattagtgttcttgccccgatgcttatttcggaaactgcgccaaagcatatcagaggtacgttgctagcttgttggcaattgatggtgactttcgcaattttcttgggttattgtaccaattatggtaccaagacttactcgaattctgtccagtggcgtgttccgcttggtctatgttttgcatgggctattattatgattggtggtatgacgtttgttccggaatctcctcggtttttggtgcaagtcggtaagattgagcaagctaaagcttcttttgccaagtcgaacaagcttagtgttgacgatcctgctgtggttgcagagattgatcttcttgttgctggtgtggaggcagaagaagcaatgggaactgcttcatggaaggaattattttcgagaaagactaaagtttttcaacgtttaacgatgacagtcatgattaactctctgcagcaactaaccggtgacaactatttcttctactacggtactactatcttcaaatctgtcggtatgaatgactcttttgagacttcaattgtcttgggtattgtgaattttgcttcttgcttcttttcactttattctgttgataagttgggccgtcgtagatgtcttttacttggagcagccaccatgacggcgtgcatggttatttacgcctccgttggcgtcacaagactatatccgaacggtaaaagtgaaccatcatctaaaggtgctggtaattgtacgattgttttcacgtgtttttacattttctgcttttcctgcacctggggacctgtatgttatgtgattatttctgaaacatttccattaagggtgagatccaagtgtatgtccgttgcaacagcggccaacttattgtgggggttcctaatcgggtttttcactccttttattacttcggcaattaatttctactacggttacgttttcatgggttgcttagcgttttcatatttttacgtctttttctttgttccagaaacaaaaggtctaactttagaagaagttgatgagatgtggatggacggtgtattaccttggaaatctgaatcctgggtaccagcttctagaagggatggtgattatgataacgaaaaattacagcatgacgagaaacccttctacaaaagaatgttttag

SEQ ID NO: 210 - protein, 569 aa, Saccharomyces cerevisiae
MTDRKTNLPEEPIFEEAEDDGCPSIENSSHLSVPTVEENKDFSEYNGEEAEEVVVPEKPASAYATVSIMCLCMAFGGFMSGWDTGTISGFVNQTDFLRRFGNYSHSKNTYYLSNVRTGLIVSIFNVGSAIGCLFLSKLGDIYGRCMGLIIVIVVYMVGIVIQIASIDKWYQYFIGRIIAGIGAGSISVLAPMLISETAPKHIRGTLLACWQLMVTFAIFLGYCTNYGTKTYSNSVQWRVPLGLCFAWAIIMIGGMTFVPESPRFLVQVGKIEQAKASFAKSNKLSVDDPAVVAEIDLLVAGVEAEEAMGTASWKELFSRKTKVFQRLTMTVMINSLQQLTGDNYFFYYGTTIFKSVGMNDSFETSIVLGIVNFASCFFSLYSVDKLGRRRCLLLGAATMTACMVIYASVGVTRLYPNGKSEPSSKGAGNCTIVFTCFYIFCFSCTWGPVCYVIISETFPLRVRSKCMSVATAANLLWGFLIGFFTPFITSAINFYYGYVFMGCLAFSYFYVFFFVPETKGLTLEEVDEMWMDGVLPWKSESWVPASRRDGDYDNEKLQHDEKPFYKRMF

SEQ ID NO: 211 - DNA, 1701 bp, Kluyveromyces marxianus var. lactis, Candida sphaerica
  CDS (1)..(1701)
atgtctgaattagagacaggaacagccgctcacggcactcctgtggagaacaagtctgtttccagttcgcaagcgtccactccaaccaatgtcggttccagagacgacttgaaggttgatgacgacaaccattctgttgacgccattgagcttccaaagaaaccacgttccgcttacatcaccgtttccatcttatgtttgatggttgcctttggtggtttcgttttcggttgggatactggtaccatttccggtttcgttaaccaaactgattttattagaagattcggtcaagaaaaggccgatggttctcactacttgtccaatgttagaactggtttgattgtttccattttcaatattggttgtgctatcggtggtattatcttgtccaagctaggtgacatgtacggtcgtcgtattggtttgatgattgttgtgttgatttacgttgttggtatcattattcaaattgcttccatcgacaaatggtaccaatacttcattggtagaattatctctggtctaggtgttggtggtatctctgtgttatccccaatgttgatttctgaaaccgctccaaaacatatcagaggtactttggtctctttctaccaattgatgattactttcggtattttcttgggttactgtactaactacggtaccaagacttactctaactctgttcaatggagagttccattaggtctatgtttcgcttgggccatctttatgatcactggtatgttgttcgttccagaatctccaagattcttggttgaaaaggacagaattgatgaggccaagagatccattgctaagtctaacaaggtttcctacgaagatccagctgttcaagctgaagtcgatttgatttgcgccggtgtcgaagctgaaagattggctggtagtgcttccatcaaagaattgttctctactaagaccaaggttttccaacgtttaatcatgggtatgttaatccaatctttccaacaattgactggtaacaattatttcttctactatggtaccaccattttcaactctgtcggtatggatgattctttcgaaacttccattgtcttgggtattgttaactttgcttctactttcgttgccatttatgtcgttgataagtttggtcgtcgtaaatgtttgttgtggggtgccgctgctatgactgcttgtatggttgtttttgcttctgtcggtgtcaccagattatggccagatggtgcaaaccatcctgaaactgcttccaagggtgctggtaactgtatgattgtcttcgcttgtttctacattttctgtttcgctacgtcgtgggctccaattgcttacgtcgtcgtcgctgaatcttacccattgagagttaaggctaagtgtatggctattgctactgcttccaactggatctggggtttccttaacggtttcttcacaccatttattacatctgctattcacttctactacggttacgtctttatgggttgtttggttgccatgttcttctacgtcttcttctttgttcctgaaactaagggtctaactttggaagaagtccaagaaatgtgggaagaaggtgtcctaccatggaaatcttcatcctgggtcccatcttccagaagaaacgctggttatgatgttgatgctttgcaacatgacgaaaagccatggtacaaggctatgttgtaa

SEQ ID NO: 212 - protein, 566 aa, Kluyveromyces marxianus var. lactis, Candida sphaerica
MSELETGTAAHGTPVENKSVSSSQASTPTNVGSRDDLKVDDDNHSVDAIELPKKPRSAYITVSILCLMVAFGGFVFGWDTGTISGFVNQTDFIRRFGQEKADGSHYLSNVRTGLIVSIFNIGCAIGGIILSKLGDMYGRRIGLMIVVLIYVVGIIIQIASIDKWYQYFIGRIISGLGVGGISVLSPMLISETAPKHIRGTLVSFYQLMITFGIFLGYCTNYGTKTYSNSVQWRVPLGLCFAWAIFMITGMLFVPESPRFLVEKDRIDEAKRSIAKSNKVSYEDPAVQAEVDLICAGVEAERLAGSASIKELFSTKTKVFQRLIMGMLIQSFQQLTGNNYFFYYGTTIFNSVGMDDSFETSIVLGIVNFASTFVAIYVVDKFGRRKCLLWGAAAMTACMVVFASVGVTRLWPDGANHPETASKGAGNCMIVFACFYIFCFATSWAPIAYVVVAESYPLRVKAKCMAIATASNWIWGFLNGFFTPFITSAIHFYYGYVFMGCLVAMFFYVFFFVPETKGLTLEEVQEMWEEGVLPWKSSSWVPSSRRNAGYDVDALQHDEKPWYKAML

SEQ ID NO: 213 - DNA, 1809 bp, Saccharomyces cerevisiae
  CDS (1)..(1809)
atgaaaaacttatcttttctcataaacagaagaaaggaaaatacaagtgactcgaatgtatacccaggaaaggctaagtcgcatgaacccagctggatagaaatggatgatcaaactaagaaggacggcttagatattgttcatgttgagttcagtccggatacaagagcgccaagcgatagcaataaagtaataacagagatatttgacgctactgaggatgccaaggaggcagacgaaagtgaaagaggaatgccacttgcgacagcattgaatacatatcccaaggcagcagcttggtcactattggtctctacaactttaatcatggaagggtacgacacagctattcttggagctttctacgccttgcctatttttcagagaaagtttggctcacaaaatgacaaaactggagaatgggaaatttcagcgtcatggcaaatcgggctgaccttatgttatatggcaggtgaaattgtggggctacagctaacggggccctccgtggatcttgttggaaatcgttacacattgattattgcattgttttttttagctgccttcacttttatactgtacttttgcaatagtttaggcatgattgctgtgggacaagcattgtgcgggatgccatggggttgttttcagtgtttgacggtgtcttacgcttctgaaatatgcccattggctctgagatattaccttacaacctattcaaacttgtgctggttatttggacaactttttgcagctggaatcatgaaaaattctcaaaaaaaatatgcggattcagaattaggatataaactaccatttgccctacagtggattttgccagttcctttagcactgggaattttttttgcacctgaatctccatggtggctagttaaaaaaggaaggtttgatgaggcaaggagatcacttagaagaactttaagcggcaagggacctgaaaaagaaatactagtaactctggaggtggacaaaataaaagtgactatagataaggaaaagagactcacaagtaaagaaggctcctatagtgattgttttgaagacaagattaatcgaagaagaacgagaattacttgtctctgctgggctggtcaagccacttgtggttcaatactaataggttattcaacttacttttacgaaaaggctggcgttagtactgaaatgtccttcacttttagtattattcaatactgtctcggtatttgtgctacatttctatcttggtgggcgtcaaagtattttggtagatatgacctttacgcttttggactagccttccaaaccattgtttttttcattattggcggtttggggtgctcaagtacgcacggttccaaaatgggaagtggttctcttttaatggctgtagcatttttttacaatttaggaattgccccggtcgttttttgcctagtctctgaaatgccatcttcaagactaagaacgaaaacaatcattctagcacgtaacacttataatgtggtcagtatcatatgtagcgttctcatcttataccaactgaactctaagaagtggaactggggcgctaagtcaggctttttctggggtgtcttatgcttttgtactttaatctgggctgtggttgacctaccagaaactgccggaaagactttcgtggaaataaatgagttatttaaacttggagtttctgcaagaaagttcaaatcgacgaaagtagatccgtttgttgtcaaaaccccccctaaagacgtctctcataacgaccccaagggagatatcgaagcttccattgcagaggaatag

SEQ ID NO: 214 - protein, 602 aa, Saccharomyces cerevisiae
MKNLSFLINRRKENTSDSNVYPGKAKSHEPSWIEMDDQTKKDGLDIVHVEFSPDTRAPSDSNKVITEIFDATEDAKEADESERGMPLATALNTYPKAAAWSLLVSTTLIMEGYDTAILGAFYALPIFQRKFGSQNDKTGEWEISASWQIGLTLCYMAGEIVGLQLTGPSVDLVGNRYTLIIALFFLAAFTFILYFCNSLGMIAVGQALCGMPWGCFQCLTVSYASEICPLALRYYLTTYSNLCWLFGQLFAAGIMKNSQKKYADSELGYKLPFALQWILPVPLALGIFFAPESPWWLVKKGRFDEARRSLRRTLSGKGPEKEILVTLEVDKIKVTIDKEKRLTSKEGSYSDCFEDKINRRRTRITCLCWAGQATCGSILIGYSTYFYEKAGVSTEMSFTFSIIQYCLGICATFLSWWASKYFGRYDLYAFGLAFQTIVFFIIGGLGCSSTHGSKMGSGSLLMAVAFFYNLGIAPVVFCLVSEMPSSRLRTKTIILARNTYNVVSIICSVLILYQLNSKKWNWGAKSGFFWGVLCFCTLIWAVVDLPETAGKTFVEINELFKLGVSARKFKSTKVDPFVVKTPPKDVSHNDPKGDIEASIAEE

SEQ ID NO: 215 - DNA, 2064 bp, Saccharomyces cerevisiae
  CDS (290)..(1912)
aacgtgtctatgttgagcttcttaatatctacccagcaacctgtatatcagtgctttctttaattatacttcccttgacaaatcgatacgtcggccctcaaaagaagaggaaaaaaaatagaaaaaaaaatagaaaataaaaatgtcagtaattctaatgatgacacaaattcaaatagcaacattgaatactgtttaacagaacaattaaccacttttaattagaaatactaacaaagaatttgttaacgtattcttaggaagtaaagtacttcaattattgctagaaatgactgctcagattccgtatcaacatagctcgggatacatctctcattttcacaataatgagcttgatgcaggcaggggaagggattataatgtaaccattaagtatctagatgataaagaagaaaatatagaaggccaagcagcaaagattagtcacaatgcgagtctgcatattcccgttttattgtgcttggtaatctcgcttggtggctttatttttggatgggacattggaaccatcggtggaatgacaaatatggttagctttcaagaaaaatttggcacaactaatattatccatgacgatgaaacaatttttgtatctactaagaaacttactgatctgcaaataggcctaattatcagtatttttaacatcagttgtggcgtaggggctttaactctgtcaaaaatcggtgattggattggtaggaaaggtggtatatggtttgccttagtagtgtactgcatcggtataaccattcaaattctctcctatggaaggtggtattttttgacattgggaagagccgtaacgggaatcggtgtgggagtaaccactgtcttggtgccaatgtttctctccgagaattctccactaaaaatcagaggctccatggtatctacgtatcaattgattgtaacatttggcatactaatgggaaacattttaaatttcatatgcgaaagatgttataaagatcctacacaaaatatagcctggcaattgccattgttcttgggatacatttgggcaattataattggaatgtcacttgtttacgttcctgaatctccacagtacttggcaaaaatcaaaaatgatgtgccctctgctaaatactcttttgcgaggatgaatggcatccctgcgacggatagcatggtaattgaattcatcgatgatttgctggaaaataactataataatgaggaaactaacaacgaatcaaaaaagcaaagcttagttaaaagaaacacatttgaatttattatgggaaagccaaagttatggttgagactgattattggtatgatgataatggcatttcaacagctgtccggaataaattatttcttttattacggaacgtctgttttcaaaggtgtcgggattaaggatccttatattacttcaatcatactgtcaagtgttaacttcctttctacgatattaggcatatattacgtggagaaatggggccacaagacatgtttattatatggttcaacaaatttattattttatatgatgacatatgctactgtggggacatttggaagagaaacggacttctcaaatattgttttaattatcgtgacttgttgttttattttttggtttgcaataacattgggcccagttacatttgtactagtgtccgaattgttccctctaagaacgagggccatatcaatggctatttgcacatttatcaattggatgttcaatttcttaatatcacttttaacaccaatgattgtatccaaaattgatttcaaactaggatacatatttgctgcttgcctattagcgttgataatattcagttggatactagttcctgaaacgaggaaaaagaatgagcaagagatcaataaaatatttgaaccggagtagatattacataatataaatagaagaagtagcaaagtgcagtttttttttccataataaataaccatcagtaactaagtggccgtgaggactgaccacattttctttacatacagtaaagtaaataaatctatcaaatattttgattattactt

SEQ ID NO: 216 - protein, 540 aa, Saccharomyces cerevisiae
MTAQIPYQHSSGYISHFHNNELDAGRGRDYNVTIKYLDDKEENIEGQAAKISHNASLHIPVLLCLVISLGGFIFGWDIGTIGGMTNMVSFQEKFGTTNIIHDDETIFVSTKKLTDLQIGLIISIFNISCGVGALTLSKIGDWIGRKGGIWFALVVYCIGITIQILSYGRWYFLTLGRAVTGIGVGVTTVLVPMFLSENSPLKIRGSMVSTYQLIVTFGILMGNILNFICERCYKDPTQNIAWQLPLFLGYIWAIIIGMSLVYVPESPQYLAKIKNDVPSAKYSFARMNGIPATDSMVIEFIDDLLENNYNNEETNNESKKQSLVKRNTFEFIMGKPKLWLRLIIGMMIMAFQQLSGINYFFYYGTSVFKGVGIKDPYITSIILSSVNFLSTILGIYYVEKWGHKTCLLYGSTNLLFYMMTYATVGTFGRETDFSNIVLIIVTCCFIFWFAITLGPVTFVLVSELFPLRTRAISMAICTFINWMFNFLISLLTPMIVSKIDFKLGYIFAACLLALIIFSWILVPETRKKNEQEINKIFEPE

SEQ ID NO: 217 - DNA, 3323 bp, Saccharomyces cerevisiae
  CDS (1189)..(2883)
ttcgctgtttgttatctgttttgattttttttttcactgcttatcatacaaactgatcaattgagctatcaaacttcaacttatctctgtatttatatgctgaaagtatagagtgtacataaaaatgtatcacatgtctattacatattacgacacccccacaatattttaactgatcttaataacacggggtaggaagtttatttcatcataccactcaatgagctaagctgccaaaggctcctgttcacttccttgtggttcgtaggctattcagtggcaacgtaataaacaagaaaagaaaaaatttcaacacctttattctaaatgttgtcagaagtaattatagtgggggtattgcagatgtaaatgaaatacgacgtactgtggggggcttttctttttcaagaatcctaaactattccaatgggattgcgtgattatgtttcgttagagtttttttctatatctccgttcttatttcttaagtccgccccttgctgtaaccagcccggctattatttgacgaatttttcacatcttcattccttgccgagaaagaagcttttgcctccctggggttattataaaatatatctgacgtcactggtttgcagccaaaaagtttaattattttaacttcaagggttcgtttcggagtaaatagtcaatgcacaaaataggaaggtggaggtggggtatgcatttttgtgcatagagtggcggggtattaagaataatgcacatataggcacataggcacaaatgcgtgggatgacttgactgtgcaaagaccgttagcaacctagaatgtggaatagtatcccaaatgatgacgtaaacgttcgaggataatattagataatataatattagtatcctcgtctaaaaacaggcaaaatagcacggaatctattcaaaagaaggcggcaagcagtatcaattgagataagtgtatacgaacggtgaaacctccttggcacagaattttatcgttcaagtggtaggatagcattgctgccataacaccctccttaatcacaggataatatggtgaacgagatatataaagcgataagtttaggtgtgatatttttctttcgttgtgcaagtgttgtgtaaattctttctcatttgataaatcaaaaaaaaaaaaaaaaaaaagaaaagaaaagaaaaattaataaaatgcaatcatccactgaaagtgatagagatattcaggatggtcctgatgctgatattcacgtcgcaccacccgtggaaaaagagtggtcagatggatttgatgacaacgaagtcataaacggggataacgttgagccaccaaaaagagggctcataggttatcttgtcatttacttattgtgttatccaatatccttcgggggtttcctgcctggttgggatagtggtatcacagcaggtttcattaacatggacaactttaaaatgaacttcggttcttacaagcatagcactggtgaatattatttgagcaacgtgcgtatgggtcttcttgtggctatgttcagtattggatgtgccataggtggtcttatttttgcccgtcttgctgatactttaggtagaaggctggcaattgtaatcgtggtgttggtatatatggttggtgcaattattcagatcagttcgaatcacaaatggtaccaatacttcgttggtaagattatctatggtcttggtgctggtggctgttcggtgttgtgtccaatgcttttgtctgaaatagctcctacagatttgagaggtggacttgtctcattgtaccaacttaacatgaccttcggtattttcttgggttattgtagcgtttatggtacgagaaaatacgataacactgcacaatggagagtcccacttgggctttgctttttatggactttgattatcatcattggtatgttattggttccagagtccccaagatatcttattgaatgtgagagacacgaagaggcccgtgcttccattgccaaaatcaacaaggtttcaccagaggatccatgggtactcaaacaggctgatgaaatcaacgccggtgtccttgcccaaagagaactaggagaagcttcatggaaagaacttttctccgtcaaaactaaagtccttcaacgtttgatcacaggtattcttgtgcaaacctttttgcaacttactggtgaaaactactttttcttctacggaactaccattttcaaatcagtcggtcttactgatgggtttgagacgtcgatcgttctaggtacagtgaacttcttttccactattattgctgttatggtcgtagacaaaattggccgtcgtaaatgtcttttatttggtgcagctgggatgatggcttgtatggtcatatttgcaagtatcggggtgaaatgtctttaccctcatggccaggatggtccatcctcaaaaggtgcaggtaatgccatgattgtgttcacttgcttctatatattttgctttgcaacgacatgggctcctgttgcttatattgtggttgccgagtcgttcccttcgaaggtcaaatctagggccatgtcgatttcgactgcatgcaactggttgtggcaatttttgatcgggtttttcacaccattcattactgggtctatccacttctattatggttatgtgttcgtaggttgtttggttgcaatgtttctgtacgttttcttctttttaccagaaacgattggtctatctttggaggaaatccaattactatatgaagaaggtataaaaccatggaaatctgcatcttgggtcccaccttctaggagaggtattccttccgaagaaagtaagaccgagaagaaggattggaagaaatttttgaagttctcaaagggttctgattgatcatagagtgcatatgcttgtcttgataggcaacattgtatattatattttacataataatgtgtaattctaatttgtcacgaatttatgaagattcttggagctatgaagatcaacatatgtagaaactggtatgtgtcataggtaaaaagtattcattaagacaaaattgtgtctaattcttagtcatttattcaattttttttttttttttttacgtaaagcggggtggagtgacatgatatggtgatggtgatgagaaactctaaatggatccatttgactatcgattgaaaatcatgaaagatgcgcttgaaggaacataacacgttactatttgtctaaataaaacaatatacaaaaatacgacattatatatactctacccaagatatttagtcattactatcgagggcgcgtagatcagatcacctttaaaa

SEQ ID NO: 218 - protein, 564 aa, Saccharomyces cerevisiae
MQSSTESDRDIQDGPDADIHVAPPVEKEWSDGFDDNEVINGDNVEPPKRGLIGYLVIYLLCYPISFGGFLPGWDSGITAGFINMDNFKMNFGSYKHSTGEYYLSNVRMGLLVAMFSIGCAIGGLIFARLADTLGRRLAIVIVVLVYMVGAIIQISSNHKWYQYFVGKIIYGLGAGGCSVLCPMLLSEIAPTDLRGGLVSLYQLNMTFGIFLGYCSVYGTRKYDNTAQWRVPLGLCFLWTLIIIIGMLLVPESPRYLIECERHEEARASIAKINKVSPEDPWVLKQADEINAGVLAQRELGEASWKELFSVKTKVLQRLITGILVQTFLQLTGENYFFFYGTTIFKSVGLTDGFETSIVLGTVNFFSTIIAVMVVDKIGRRKCLLFGAAGMMACMVIFASIGVKCLYPHGQDGPSSKGAGNAMIVFTCFYIFCFATTWAPVAYIVVAESFPSKVKSRAMSISTACNWLWQFLIGFFTPFITGSIHFYYGYVFVGCLVAMFLYVFFFLPETIGLSLEEIQLLYEEGIKPWKSASWVPPSRRGIPSEESKTEKKDWKKFLKFSKGSD

SEQ ID NO: 219 - DNA, 3143 bp, Saccharomyces cerevisiae
  CDS (962)..(2686)
gctcttgtgtctttgttatatgggtacaagatataagaaacataactattacatacgaaaatgtgcatgttatctatatccttctttatatagatgctgttaacttctttttttttttttgggaaaatcaactgttaaacgcgacagtaaaagcagcaaaacattaattttgcttccaagacgacagtaatatgtctcctacaataccagtttcgctgcagaaggcacatctattacatttactgagcataacgggctgtactaatccaaggaggtttacggaccaggggaactttccagattcagatcacagcaatataggactagaaaatatcaggtagccgcactcaacttgtaactggcaactactttgcatcaaactccaattaaatgcggtagaatcttttcacaaaaggtactcaacgtcaattcggaaagcttccttccggaatggcttaagtaggttgcaatttctttttctattagtagctaaaaatgggtcacgtgatctatattcgaaaggggcggttgcctcaggaaggcaccggcggtctttcgtccgtgcggagatatctgcgccgttcaggggtccatgtgccttggacgatattaaggcagaaggcagtatcggggcggatcactccgaaccgagattagttaagcccttcccatctcaagatggggagcaaatggcattatactcctgctagaaagttaactgtgcacatattcttaaattatacaacattctggagagctattgttcaaaaaacaaacatttcgcaggctaaaatgtggagataggataagttttgtagacatatataaacaatcagtaattggattgaaaatttggtgttgtgaattgctcttcattatgcaccttattcaattatcatcaagaatagtaatagttaagtaaacacaagattaacataataaaaaaaataattctttcataatggcagttgaggagaacaatatgcctgttgtttcacagcaaccccaagctggtgaagacgtgatctcttcactcagtaaagattcccatttaagcgcacaatctcaaaagtattctaatgatgaattgaaagccggtgagtcagggtctgaaggctcccaaagtgttcctatagagatacccaagaagcccatgtctgaatatgttaccgtttccttgctttgtttgtgtgttgccttcggcggcttcatgtttggctgggataccggtactatttctgggtttgttgtccaaacagactttttgagaaggtttggtatgaaacataaggatggtacccactatttgtcaaacgtcagaacaggtttaatcgtcgccattttcaatattggctgtgcctttggtggtattatactttccaaaggtggagatatgtatggccgtaaaaagggtctttcgattgtcgtctcggtttatatagttggtattatcattcaaattgcctctatcaacaagtggtaccaatatttcattggtagaatcatatctggtttgggtgtcggcggcatcgccgtcttatgtcctatgttgatctctgaaattgctccaaagcacttgagaggcacactagtttcttgttatcagctgatgattactgcaggtatctttttgggctactgtactaattacggtacaaagagctattcgaactcagttcaatggagagttccattagggctatgtttcgcttggtcattatttatgattggcgctttgacgttagttcctgaatccccacgttatttatgtgaggtgaataaggtagaagacgccaagcgttccattgctaagtctaacaaggtgtcaccagaggatcctgccgtccaggcagagttagatctgatcatggccggtatagaagctgaaaaactggctggcaatgcgtcctggggggaattattttccaccaagaccaaagtatttcaacgtttgttgatgggtgtgtttgttcaaatgttccaacaattaaccggtaacaattattttttctactacggtaccgttattttcaagtcagttggcctggatgattcctttgaaacatccattgtcattggtgtagtcaactttgcctccactttctttagtttgtggactgtcgaaaacttgggacatcgtaaatgtttacttttgggcgctgccactatgatggcttgtatggtcatctacgcctctgttggtgttactagattatatcctcacggtaaaagccagccatcttctaaaggtgccggtaactgtatgattgtctttacctgtttttatattttctgttatgccacaacctgggcgccagttgcctgggtcatcacagcagaatcattcccactgagagtcaagtcgaaatgtatggcgttggcctctgcttccaattgggtatgggggttcttgattgcatttttcaccccattcatcacatctgccattaacttctactacggttatgtcttcatgggctgtttggttgccatgtttttttatgtctttttctttgttccagaaactaaaggcctatcgttagaagaaattcaagaattatgggaagaaggtgttttaccttggaaatctgaaggctggattccttcatccagaagaggtaataattacgatttagaggatttacaacatgacgacaaaccgtggtacaaggccatgctagaataatgcgtttgaagtgagacgctccatcatctctcttaatttttcatgactgacgttttttcttcattttaattatcatagtatttgtttgaaaaaaaaaaaaaaaaatttcccttatcaatgatatccttacgattatataaattccttacctaaacctattatttgtgtacatatatcagagtattattacatatataacctttttctctaaaacaggaaaaaaaaaagaaaacgataacatgctctgccatcctttgttcaccgagcaaaattaaaaacgcaaaatgaattgtccctatgaaattattaaaggaccacatcaccagacttatctctggggggtcctctagaaaataagtcaggtacttgcctggactttcttccagttgaattcctgagctaacatacaattaatggagtgagaatgttcgaacgatccaggagttgcttttttcag

SEQ ID NO: 220 - protein, 574 aa, Saccharomyces cerevisiae
MAVEENNMPVVSQQPQAGEDVISSLSKDSHLSAQSQKYSNDELKAGESGSEGSQSVPIEIPKKPMSEYVTVSLLCLCVAFGGFMFGWDTGTISGFVVQTDFLRRFGMKHKDGTHYLSNVRTGLIVAIFNIGCAFGGIILSKGGDMYGRKKGLSIVVSVYIVGIIIQIASINKWYQYFIGRIISGLGVGGIAVLCPMLISEIAPKHLRGTLVSCYQLMITAGIFLGYCTNYGTKSYSNSVQWRVPLGLCFAWSLFMIGALTLVPESPRYLCEVNKVEDAKRSIAKSNKVSPEDPAVQAELDLIMAGIEAEKLAGNASWGELFSTKTKVFQRLLMGVFVQMFQQLTGNNYFFYYGTVIFKSVGLDDSFETSIVIGVVNFASTFFSLWTVENLGHRKCLLLGAATMMACMVIYASVGVTRLYPHGKSQPSSKGAGNCMIVFTCFYIFCYATTWAPVAWVITAESFPLRVKSKCMALASASNWVWGFLIAFFTPFITSAINFYYGYVFMGCLVAMFFYVFFFVPETKGLSLEEIQELWEEGVLPWKSEGWIPSSRRGNNYDLEDLQHDDKPWYKAMLE

SEQ ID NO: 221 - DNA, 4409 bp, Saccharomyces cerevisiae
  CDS (1233)..(3524)
tagctgaaaaatcgcggtactgaagcttttttcatggcgcccttgaaactttctccttccgcctgcgcattatataaaatacgttacaataggaaaagatgacagttacttaaagtaaagcttcacagcttcagacaaaaaaagtatgaaacttgtgaagatgtttttatgctgatccggcagacggccattccattatttagttctgattttagtggaaaaactttcgaaacttaaaataataatagcccattcttggactgaggtacattttcttcttattggatttcgtttattagctgtttaacatatttctgtagggtttttttttttttttttgtacagattagaaaccatacagtgtaaaccattatataggtcaattaatatatttatagatcatcctgtcaatttttttttatttttttttgcaaagctccctttttcctgaaaccaacaacaaaatataaaaaaaaaatgataagcaggattttttcttttaataattccttaaaattaactaacaagctgaagcccttacaacaaagtaagtcaaacccaattcacaaaaaaaaaatctgttttatttcagatatgcagggtatatacatggcacagataaccttttaatgaaaagtagcaattgtgatactagcgcctttttccttgcaagaaaagggttccctgttcctgcatcgtccatcggcatagagatgtcgccgctaccctatccaattctaccgcatgcctaacaaaatgatttccgattttttcaatctaactccgtcatttcttatctgagttttcctccccgagataaattgaacaaagaatttaatcggctcatatgtgaaaaagtgtgatacttaccgcaatgggcaaaaattattaaaaaaaatctaattccgcgcttggctattatctcattaccgactcaacggtgactacctgccgtacacgcttcccctttgcttcttcctccacctcgaaagtagaacatatacatggaacagacataagctcttcagcgtatctatttcataagtggagagcatcgaacaataaacctttgcctaatttcatataacatccagtattcattttttttagttgacgctaaggcattcgcttgtgaaattaaagagcagatcaggaatagtatcaatagtctaaaccatcaagttgcacagaaaccactatatatatatggaaatatctcgaatattgcttgtatgaacgatagccaaaactgcctacgacagagggaagaaaatagtcatctgaatcctggaaatgacttcggccaccaccagggtgcagaatgtacgataaatcataacaacatgccacaccgcaatgcatacacagaatctacgaatgacacggaagcaaagtccatagtgatgtgcgacgatcctaacgcataccaaatttcctacacaaataatgagccggcgggagatggagctatagaaaccacgtccattctactatcgcaaccgctgccgctgcgatcgaatgtgatgtctgtcttggtaggcatatttgttgccgtggggggcttcttgtttgggtatgacactggacttataaacagtatcacggatatgccgtatgttaaaacctacattgctccgaaccattcatatttcaccactagccaaatagccatactcgtatcattcctctccctaggaacatttttcggtgcgttaatcgctccctatatttcagattcatatggtaggaagccaacaattatgtttagtaccgctgttatcttttccatcggaaactcattacaggtggcatccggtggcttggtgctattaatcgtcggaagagtgatctcaggtatcgggatcgggataatctctgctgtggttcctctttatcaagctgaagctgcgcagaagaaccttagaggtgccatcatttccagttatcagtgggctatcactattgggttactcgtgtccagtgcagtatcgcaaggaactcattccaaaaatggcccgtcttcatatagaataccaattggtttgcagtacgtttggtcaagtattttagctgtgggcatgatattccttccagagagtccaagatattacgtcttgaaggatgaactcaataaagctgcaaaatcgttatcctttttaagaggcctcccgatcgaagatccaagactcttagaggagcttgttgaaataaaagccacttacgattatgaagcatcgttcggcccgtcaacacttttagattgtttcaaaacaagtgaaaatagacccaaacagattttacgaatatttactggtatcgccatacaagcttttcaacaggcatctggtatcaattttatattctactatggagttaattttttcaacaacacaggggtggacaactcttacttggtttcttttatcagctatgccgtcaacgtcgccttcagtataccgggtatgtatttagtggatcgaattggtagaagaccagtccttcttgctggaggtgtcataatggcaatagcaaatttagtcattgccatcgttggtgtttccgagggaaaaactgttgttgctagtaaaattatgattgcttttatatgccttttcattgctgcattttcggcgacatggggtggtgtcgtgtgggtggtatctgctgaactgtacccacttggtgtcagatcgaaatgtaccgccatatgcgctgccgcaaattggctagttaatttcacctgtgccctgattacaccttacattgttgatgtcggatcacacacttcttcaatggggcccaaaatattcttcatttggggcggcttaaatgtcgtggccgttatcgttgtttatttcgctgtttatgaaacgaggggattgactttggaagagattgacgagttatttagaaaggccccaaatagcgtcatttctagcaaatggaacaaaaaaataaggaaaaggtgcttagcctttcccatttcacaacaaatagagatgaaaactaatatcaagaacgctggaaagttggacaacaacaacagtccaattgtacaggatgacagccacaacataatcgatgtggatggattcttggagaaccaaatacagtccaatgatcatatgattgcggcggataaaggaagtggctcgttagtaaacatcatcgatactgcccccctaacatctacagagtttaaacccgtggaacatccgccagtaaattacgtcgacttggggaatggtttgggtctgaatacatacaatagaggtcctccttctatcatttctgactctactgatgagttctatgaggaaaatgactcttcttattacaataacaacactgaacgaaatggagctaacagcgtcaatacatatatggctcaactaatcaatagctcatctactacaagcaacgacacatcgttctctccatcacacaatagcaatgcaagaacgtcctctaattggacgagtgacctcgctagtaagcacagccaatacacttccccccaataaaaaccaatagcatcttacgatcgttcgaggtcttataaaccgttttatataaattattcttatacacgcactcttgagtttcttttaacattccaacatgatagacatagaaaagaattatagataacacataacattactcacaagtagcccatgagtttgatttttcctcgttaattcggtgtcaagtggaatacaaaatgggtcaactgatcataactattacccggataatctacatcatgtggtacgttaacgatgtatggtttcctaaatcaccgggttccagatgcgggttgttgttgttcgatcttgcacctccacgtactccttttgaatagtacacatataccttacaggagatcggacgtgtgcgattattgttacctcgtcacctgttatcggttgaactgttttagctctttccattccctttgttaatagtagtttaattcttcggaaactttctacgcagactcaagttgcaataggctaaagataaggcagacactttgtatgtaacgagtttcattaggagggatagacgcacgacactatctggtactacgtgttatatcatacccagaaggaaggactctctccactgaacggtgggatgagttcctaaaggcgcccctttatttgatcaggaagccgtattgattatctaatagggcctagttatcctaattgtggggagtcgagcagtacggctctgatgtttttcgaacgaagataaggagttgacatacaaagtcaacagaagttcttcttgttagcgtctctgtgctcaatatctctctttttttctttaagtagtaattactaacatcagccaaccaatagagataaaaaaaaaaggaattaagatttcatagagaaaag

SEQ ID NO: 222 - protein, 763 aa, Saccharomyces cerevisiae
MNDSQNCLRQREENSHLNPGNDFGHHQGAECTINHNNMPHRNAYTESTNDTEAKSIVMCDDPNAYQISYTNNEPAGDGAIETTSILLSQPLPLRSNVMSVLVGIFVAVGGFLFGYDTGLINSITDMPYVKTYIAPNHSYFTTSQIAILVSFLSLGTFFGALIAPYISDSYGRKPTIMFSTAVIFSIGNSLQVASGGLVLLIVGRVISGIGIGIISAVVPLYQAEAAQKNLRGAIISSYQWAITIGLLVSSAVSQGTHSKNGPSSYRIPIGLQYVWSSILAVGMIFLPESPRYYVLKDELNKAAKSLSFLRGLPIEDPRLLEELVEIKATYDYEASFGPSTLLDCFKTSENRPKQILRIFTGIAIQAFQQASGINFIFYYGVNFFNNTGVDNSYLVSFISYAVNVAFSIPGMYLVDRIGRRPVLLAGGVIMAIANLVIAIVGVSEGKTVVASKIMIAFICLFIAAFSATWGGVVWVVSAELYPLGVRSKCTAICAAANWLVNFTCALITPYIVDVGSHTSSMGPKIFFIWGGLNVVAVIVVYFAVYETRGLTLEEIDELFRKAPNSVISSKWNKKIRKRCLAFPISQQIEMKTNIKNAGKLDNNNSPIVQDDSHNIIDVDGFLENQIQSNDHMIAADKGSGSLVNIIDTAPLTSTEFKPVEHPPVNYVDLGNGLGLNTYNRGPPSIISDSTDEFYEENDSSYYNNNTERNGANSVNTYMAQLINSSSTTSNDTSFSPSHNSNARTSSNWTSDLASKHSQYTSPQ

SEQ ID NO: 223 - DNA, 1704 bp, Saccharomyces cerevisiae
  CDS (1)..(1704)
atggcaagcgaacagtcctcaccagaaattaatgcagataatctaaacagtagtgcagctgacgttcatgtacagccacccggagagaaagaatggtcagacgggttttatgacaaagaagtcattaatggaaatacgccagacgcaccgaagagaggctttttaggttaccttattatctacttactatgctatcctgtatcctttggcggttttttacctggttgggatagtggtattactgcaggcttcatcaatatggataactttaaaatgaattttggttcttacaagcacagtactggtgagtattatttgagcaacgtgcgtatgggtcttctcgtggccatgttcagtgtaggatgttccattggcggtgttgcttttgcgagacttgctgatactttaggtagaaggctagcaattgtaatcgtggttttggtatatatggttggtgcaattattcagatcagttcgaatcacaaatggtaccaatactttgtcggtaagatcatctacggtcttggtgctggtggctgttcggtgttgtgtccaatgcttttatctgaaatagcccccacagatttgagaggtggacttgtctcattgtaccaacttaacatgaccttcggtattttcttgggttattgtagcgtttatggaacaaggaagtatagtaatactgcgcaatggaggattcctgtgggactatgctttctgtgggctctaattatcatcgttggcatgttattagttccagagtccccaagatatctgattgaatgtgagagacatgaagaggcctgtgtctccatcgccaagatcaacaaggtttcaccagaggatccatgggtactcaaacaggctgatgaaatcaacgccggtgtccttgcccaaagagaactaggggaagcctcatggaaagaacttttctccgtcaaaacaaaagtccttcaacgtttgatcacaggtattcttgtgcaaacctttttgcaacttactggtgaaaactacttcttcttctacggaactaccattttcaaatcagttgggcttactgatgggtttgagacttcgatcgtcctaggtacagtgaatttcttctccactattattgctgttatggtcgtagacaaaataggccgtcgtaaatgtctgttattcggagcggcttcaatgatggcttgtatggtcatatttgcaagtatcggggtaaaatgtctttaccctcatggccaggatggtccatcctcgaaaggtgcaggtaatgccatgattgtgttcacatgcttctatatattctgctttgcaacgacatgggcccctgttgcttatattgtggttgccgagtcattcccttcgaaggtcaaatctaaagcaatgtcaatttcgactgcattcaactggttatggcaattcttgattggttttttcacaccattcattactgggtctatccacttctattatggttatgtgttcgtaggttgtttggttgctatgtttttgtacgttttcttctttttaccagaaacaattggtctatctttggaggaaatccagttactatatgaagaaggtataaaaccatggaaatctgcatcttgggtaccaccctcaaggagaggagcttcttccagggaaactgaggctaagaagaaaagctggaaagaagttttgaagttcccaaagagttttaattga

SEQ ID NO: 224 - protein, 567 aa, Saccharomyces cerevisiae
MASEQSSPEINADNLNSSAADVHVQPPGEKEWSDGFYDKEVINGNTPDAPKRGFLGYLIIYLLCYPVSFGGFLPGWDSGITAGFINMDNFKMNFGSYKHSTGEYYLSNVRMGLLVAMFSVGCSIGGVAFARLADTLGRRLAIVIVVLVYMVGAIIQISSNHKWYQYFVGKIIYGLGAGGCSVLCPMLLSEIAPTDLRGGLVSLYQLNMTFGIFLGYCSVYGTRKYSNTAQWRIPVGLCFLWALIIIVGMLLVPESPRYLIECERHEEACVSIAKINKVSPEDPWVLKQADEINAGVLAQRELGEASWKELFSVKTKVLQRLITGILVQTFLQLTGENYFFFYGTTIFKSVGLTDGFETSIVLGTVNFFSTIIAVMVVDKIGRRKCLLFGAASMMACMVIFASIGVKCLYPHGQDGPSSKGAGNAMIVFTCFYIFCFATTWAPVAYIVVAESFPSKVKSKAMSISTAFNWLWQFLIGFFTPFITGSIHFYYGYVFVGCLVAMFLYVFFFLPETIGLSLEEIQLLYEEGIKPWKSASWVPPSRRGASSRETEAKKKSWKEVLKFPKSFN

SEQ ID NO: 225 - DNA, 1830 bp, Saccharomyces cerevisiae
  CDS (1)..(1830)
atgaaaaacttatcttttctcataaacagaagaaaggaaaatacaagtgactcgaatgtatacccaggaaaggctaagtcgcatgaacccagctggatagaaatggatgatcaaactaagaaggacggcttagatattgttcatgttgagttcagtccggatacaagagcgccaagcgatagcaataaagtaataacagagatatttgacgctactgaggatgccaaggaggcagacgaaagtgaaagaggaatgccacttgcgacagcattgaatacatatcccaaggcagcagcttggtcactattggtctctacaactttaatcatggaagggtacgacacagctattcttggagctttctacgccttgcctatttttcagagaaagtttggctcacaaaatgacaaaactggagaatgggaaatttcagcgtcatggcaaatcgggctgaccttatgttatatggcaggtgaaattgtggggctacagctaacggggccctccgtggatcttgttggaaatcgttacacattgattattgcattgttttttttagctgccttcacttttatactgtacttttgcaatagtttaggcatgattgctgtgggacaagcattgtgcgggatgccatggggttgttttcagtgtttgacggtgtcttacgcttctgaaatatgcccattggctctgagatattaccttacaacctattcaaacttgtgctggttatttggacaactttttgcagctggaatcatgaaaaattctcaaaaaaaatatgcggattcagaattaggatataaactaccatttgccctacagtggattttgccagttcctttagcactgggaattttttttgcacctgaatctccatggtggctagttaaaaaaggaaggtttgatgaggcaaggagatcacttagaagaactttaagcggcaagggacctgaaaaagaaatactagtaactctggaggtggacaaaataaaagtgactatagataaggaaaagagactcacaagtaaagaaggctcctatagtgattgttttgaagacaagattaatcgaagaagaacgagaattacttgtctctgctgggctggtcaagccacttgtggttcaatactaataggttattcaacttacttttacgaaaaggctggcgttagtactgaaatgtccttcacttttagtattattcaatactgtctcggtatttgtgctacatttctatcttggtgggcgtcaaagtattttggtagatatgacctttacgcttttggactagccttccaaaccattgtttttttcattattggcggtttggggtgctcaagtacgcacggttccaaaatgggaagtggttctcttttaatggctgtagcatttttttacaatttaggaattgccccggtcgttttttgcctagtctctgaaatgccatcttcaagactaagaacgaaaacaatcattctagcacgtaacacttataatgtggtcagtatcatatgtagcgttctcatcttataccaactgaactctaagaagtggaactggggcgctaagtcaggctttttctggggtgtcttatgcttttgtactttaatctgggctgtggttgacctaccagaaactgccggaaagactttcgtggaaataaatgagttatttaaacttggagtttctgcaagaaagttcaaatcgacgaaagtagatccgtttgttgtcaaaacccccctaaagacgtctctcataacgaccccaagggagatatcgaagcttccattgcagaggaatagcaatgtatcccatcacctatga

SEQ ID NO: 226 - protein, 609 aa, Saccharomyces cerevisiae
MKNLSFLINRRKENTSDSNVYPGKAKSHEPSWIEMDDQTKKDGLDIVHVEFSPDTRAPSDSNKVITEIFDATEDAKEADESERGMPLATALNTYPKAAAWSLLVSTTLIMEGYDTAILGAFYALPIFQRKFGSQNDKTGEWEISASWQIGLTLCYMAGEIVGLQLTGPSVDLVGNRYTLIIALFFLAAFTFILYFCNSLGMIAVGQALCGMPWGCFQCLTVSYASEICPLALRYYLTTYSNLCWLFGQLFAAGIMKNSQKKYADSELGYKLPFALQWILPVPLALGIFFAPESPWWLVKKGRFDEARRSLRRTLSGKGPEKEILVTLEVDKIKVTIDKEKRLTSKEGSYSDCFEDKINRRRTRITCLCWAGQATCGSILIGYSTYFYEKAGVSTEMSFTFSIIQYCLGICATFLSWWASKYFGRYDLYAFGLAFQTIVFFIIGGLGCSSTHGSKMGSGSLLMAVAFFYNLGIAPVVFCLVSEMPSSRLRTKTIILARNTYNVVSIICSVLILYQLNSKKWNWGAKSGFFWGVLCFCTLIWAVVDLPETAGKTFVEINELFKLGVSARKFKSTKVDPFVVKTPLKTSLITTPREISKLPLQRNSNVSHHL

SEQ ID NO: 227 - DNA, 1710 bp, Saccharomyces cerevisiae
  CDS (1)..(1710)
atgaaggatttaaaattatcgaatttcaaaggcaaatttataagcagaaccagtcactggggacttacgggtaagaagttgcggtatttcatcactatcgcatctatgacgggcttctccctgtttggatacgaccaagggttgatggcaagtctaattactggtaaacagttcaactatgaatttccagcaaccaaagaaaatggcgatcatgacagacacgcaactgtagtgcagggcgctacaacctcctgttatgaattaggttgtttcgcaggttctctattcgttatgttctgcggtgaaagaattggtagaaaaccattaatcctgatgggttccgtaataaccatcattggtgccgttatttctacatgcgcatttcgtggttactgggcattaggccagtttatcatcggaagagtcgtcaccggtgttggaacagggttgaatacatctactattcccgtttggcaatcagaaatgtcaaaagctgaaaatagagggttgctggtcaatttagaaggttccacaattgcttttggtactatgattgcttattggattgattttgggttgtcttataccaacagttctgttcagtggagattccccgtgtcaatgcaaatcgtttttgctctcttcctgcttgctttcatgattaaactacctgaatcgccacgttggctgatttctcaaagtcgaacagaagaagctcgctacttggtaggaacactagacgacgcggatccaaatgatgaggaagttataacagaagttgctatgcttcacgatgctgttaacaggaccaaacacgagaaacattcactgtcaagtttgttctccagaggcaggtcccaaaatcttcagagggctttgattgcagcttcaacgcaatttttccagcaatttactggttgtaacgctgccatatactactctactgtattattcaacaaaacaattaaattagactatagattatcaatgatcataggtggggtcttcgcaacaatctacgccttatctactattggttcattttttctaattgaaaagctaggtagacgtaagctgtttttattaggtgccacaggtcaagcagtttcattcacaattacatttgcatgcttggtcaaagaaaataaagaaaacgcaagaggtgctgccgtcggcttatttttgttcattacattctttggtttgtctttgctatcattaccatggatatacccaccagaaattgcatcaatgaaagttcgtgcatcaacaaacgctttctccacatgtactaattggttgtgtaactttgcggttgtcatgttcaccccaatatttattggacagtccggttggggttgctacttattttttgctgttatgaattatttatacattccagttatcttctttttctaccctgaaaccgccggaagaagtttggaggaaatcgacatcatctttgctaaagcatacgaggatggcactcaaccatggagagttgctaaccatttgcccaagttatccctacaagaagtcgaagatcatgccaatgcattgggctcttatgacgacgaaatggaaaaagaggactttggtgaagatagagtagaagacacctataaccaaattaacggcgataattcgtctagttcttcaaacatcaaaaatgaagatacagtgaacgataaagcaaattttgagggttga

SEQ ID NO: 228 - protein, 569 aa, Saccharomyces cerevisiae
MKDLKLSNFKGKFISRTSHWGLTGKKLRYFITIASMTGFSLFGYDQGLMASLITGKQFNYEFPATKENGDHDRHATVVQGATTSCYELGCFAGSLFVMFCGERIGRKPLILMGSVITIIGAVISTCAFRGYWALGQFIIGRVVTGVGTGLNTSTIPVWQSEMSKAENRGLLVNLEGSTIAFGTMIAYWIDFGLSYTNSSVQWRFPVSMQIVFALFLLAFMIKLPESPRWLISQSRTEEARYLVGTLDDADPNDEEVITEVAMLHDAVNRTKHEKHSLSSLFSRGRSQNLQRALIAASTQFFQQFTGCNAAIYYSTVLFNKTIKLDYRLSMIIGGVFATIYALSTIGSFFLIEKLGRRKLFLLGATGQAVSFTITFACLVKENKENARGAAVGLFLFITFFGLSLLSLPWIYPPEIASMKVRASTNAFSTCTNWLCNFAVVMFTPIFIGQSGWGCYLFFAVMNYLYIPVIFFFYPETAGRSLEEIDIIFAKAYEDGTQPWRVANHLPKLSLQEVEDHANALGSYDDEMEKEDFGEDRVEDTYNQINGDNSSSSSNIKNEDTVNDKANFEG

SEQ ID NO: 229 - DNA, 2020 bp, Beta vulgaris (beet)
  CDS (190)..(1662)
tttttaaaaaaaaagaagagaaaagcacgtagaaggcaccaaacaaacattacaatttacagtacagctgcaaaaattagctgaggcgaagagaagactgagtagtgactggttgaaaacacccaaaagactaagaagtgctgacactttgccactttgttttgattgttgacaccccaaaaaaaaaaaatgagttcagattcagaagcaggtttaggaggaggaggaggagatctgcggaaaccatttttgcatacaggaagttggtatagaatgggttccagacaatcaagtttgatgggttcttctcaagttattcgagaaagctccatctctgtccttgcttgtgttcttattgttgctcttggtcctattcagtttggttttactgctggttattcatctccaactcaatcagcaattacaaatgaacttggtctttctgttgcagagtactcatggtttggttctctatccaatgtgggtgccatggttggggcaattgcaagtggtcaaatatctgagtatattggaagaaaagggtctttgatgattgctgctatccccaacataattggatggcttgctatatcatttgccaaagattcttcatttctgtatatgggaaggatgttggaaggttttggcgtgggaataatatcttacacggttcctgtgtacatttctgaaatagcaccacagaatttgaggggagctttgggttcagtaaaccagctatccgttacaatcggtataatgctatcgtatatgctggggctttttgtcccgtggaggatacttgcagttttaggaattttaccatgcactatattgatacctggcttattcttcataccggaatctcctaggtggttggcgaaaatgggtatgatggaagaatttgaggtttccttgcaagttctccggggctttgacactgatatatctcttgaagttaatgaaatcaagagatctgttgcttcaagtagcaaaagaaccaccataagatttgcagaactacgacaaagaagatattggttacccttgatgatagggaatggtttacttattttgcaacaactcagtggaatcaatggtgtcctgttctattctagtaccatctttaaagaggctggggtcacatcaagcaacgctgcaacatttggccttggtgctgttcaggttatcgcaactgttgtgactacctggttggtggataaatcaggacgcagacttcttctaattgtctcttcttctgggatgacattgagtcttctagtggtcgcaatgtccttctttttaaaggaaatggtatcagacgaatctacatggtacagtgtattctccatcctttcagttgttggagttgtggctatggtggttactttctcactaggaattggagcaattccgtggattataatgtcagagattcttccaattaacatcaaggggctggctggaagtattgctacacttgccaactggtttgtagcatggattgtgacaatgactgcaaacataatgttgtcatggaatagtggaggtactttctctatttacatggttgtttgtgctttcactgtggcctttgtggtcatttgggtccccgagacaaaggggagaacattggaggagattcagtggtccttcagaagataaagaattttctgataacttgtccatggtgtcgtgcagtgggctagattcagtccaagctaacatttacagcttggtggatctagcaatgctgggtagataatgtacattcgaggtgtatcttttatcataagaggactcttgccttatggaagaattgtgcattacaacagagcttccccctcaaccccttcatttatttttgtttatattgtcccatttcctttacccgttgccagccaaaagctgttaagattcattatattttaggacaacagttgcaccaatgttcgtagaacttgacattgattgggtttatagttcaatttgttattgccatgtaaaaaaaaaaaaaaaaaaa

SEQ ID NO: 230 - protein, 490 aa, Beta vulgaris (beet)
MSSDSEAGLGGGGGDLRKPFLHTGSWYRMGSRQSSLMGSSQVIRESSISVLACVLIVALGPIQFGFTAGYSSPTQSAITNELGLSVAEYSWFGSLSNVGAMVGAIASGQISEYIGRKGSLMIAAIPNIIGWLAISFAKDSSFLYMGRMLEGFGVGIISYTVPVYISEIAPQNLRGALGSVNQLSVTIGIMLSYMLGLFVPWRILAVLGILPCTILIPGLFFIPESPRWLAKMGMMEEFEVSLQVLRGFDTDISLEVNEIKRSVASSSKRTTIRFAELRQRRYWLPLMIGNGLLILQQLSGINGVLFYSSTIFKEAGVTSSNAATFGLGAVQVIATVVTTWLVDKSGRRLLLIVSSSGMTLSLLVVAMSFFLKEMVSDESTWYSVFSILSVVGVVAMVVTFSLGIGAIPWIIMSEILPINIKGLAGSIATLANWFVAWIVTMTANIMLSWNSGGTFSIYMVVCAFTVAFVVIWVPETKGRTLEEIQWSFRR

SEQ ID NO: 231 - DNA, 2340 bp, Schizosaccharomyces pombe
  CDS (55)..(1722)
actctttttcatccttttttgctaatattctcctgatctttgaattcgttaaatatgaataggtttattacatcaattctcgtggtgtttatctcaatgtccggatggttgcaaggcgccgatactggttccattagcggcatcttgggcatgcgagattttcaatctcgttttgctgatcgttacaatcccatttcaaattcctacagttactcagcatggagacaagctttgttgactggtacaatcaatgctggctgtttatttggtgctatgctttcttcgccgtttaccgaaagaattggtaagaaatactctatttgctttttcagcggggtatatattattgcagagcttcttttagtcacagcagtcccttcttggattcaagtattggttggtaaaatccttgctggtgttggtatcggagctttgtcagtcttgagtcctggataccaatctgaagtagcaccaccacaaattcgtggtgcagttgttgcaacctatcaaattttctcgacaggtgctgctttagttgcagcctgtatcaatatgggaactcataaactgcgtaagactgcatcatggagaacttcttttggcataaatatgctttggggaatcctgttaatggttggtgtactctttttgcctgaatcaccgcgttatcttatttacaaaggacgagatgaagaagctcttcgaattatgtgcaatatggcggaactaagtcctgaaagtgaaattattcaaactaattttaataccattaagagtgatattgaaatagaaatggctggaggtaaagcaagatggatagaaattttcggtaaggatattcgataccgtacctgcttaggatttcttgtcatgttgttcagagagttgattggtaacaattattatttctattatgctacacaagttttcaagggaactggtatgacggatatattcttaccagccgttattttaggtgctattaattttggtacaacgtttggtgctttatacacaattgataacttaggacgtcgtaacccactaatttttggagctgctttccaatcgatatgcttctttatatatgccgctgtaggcgatcgaaagctcatatataagaatggtactagtgatcacagagcaggatctgtaatgattgtgttttcttgtttgtttcttttctcttactgctgttcttggggcccaatgggctgggtaattgtgggtgaaacttttcccattcgttatcgcagtaaatgcgcttctgtagccacatcgggaaactggctgggtaatttcatgatttctttttttactcctttcattaacaatgcgatcggattcaagcttggttacatttacgcctgcattaatttgtttagttcatttatgattttctttttggctaaagaaactaaaggtcttactttggaggaagtcaatgacttatacatgtccaacattaagccatgggaatcttacaaatatgtaagagaaattgaatctcatcgtatacactttagtaaagaagaagaaaagcgtgaaagagagaaatcgaaaggtattcgcggccaagaagaagaattcattgaaaatgctgatgaagacaataacgatagtagttcttcttcaggatctgtcgtgtctgctgtcaagccacggagatccgctgtttccaacgatcgcttttcagaggattcacaccctacgtatatctaaacaaattttaaaattaaaattctaaatgttcctgtatttctttacatttattttgtttttatattgatagcgaggcagttctagatttattatcatgaggccgaatattctaaattttaaaaaatgaataagagctttgaaatttctgtttttgtattgtttaatgaaatattgttgctatgattttctaattttgaggtatttgtttgttattcgaagtatggcaattagtatttatccctgtgatgcgaaatgataccaaatttccagtattttttttaaaatccttcctattcataataattttttctctacataacgttgtcgttaatatattgttaaaaaaaattttttaaggcgcaaagaagtaatgcatacattggaaattcaaaacttacagaaagtccttctaagtagaaagaaaccgcattgccccattaagatgtaaagcagtttaaaagattaccaatgatttatgtaaagttaaaaacaatactttctttttagtggtagaaggaatgagctcctcctcttttttttactacccaagggagggcgatcacttgtgaatttttttctcaaaactaaacttatttagagtaccatttgataaaaatt

SEQ ID NO: 232 - protein, 555 aa, Schizosaccharomyces pombe
MNRFITSILVVFISMSGWLQGADTGSISGILGMRDFQSRFADRYNPISNSYSYSAWRQALLTGTINAGCLFGAMLSSPFTERIGKKYSICFFSGVYIIAELLLVTAVPSWIQVLVGKILAGVGIGALSVLSPGYQSEVAPPQIRGAVVATYQIFSTGAALVAACINMGTHKLRKTASWRTSFGINMLWGILLMVGVLFLPESPRYLIYKGRDEEALRIMCNMAELSPESEIIQTNFNTIKSDIEIEMAGGKARWIEIFGKDIRYRTCLGFLVMLFRELIGNNYYFYYATQVFKGTGMTDIFLPAVILGAINFGTTFGALYTIDNLGRRNPLIFGAAFQSICFFIYAAVGDRKLIYKNGTSDHRAGSVMIVFSCLFLFSYCCSWGPMGWVIVGETFPIRYRSKCASVATSGNWLGNFMISFFTPFINNAIGFKLGYIYACINLFSSFMIFFLAKETKGLTLEEVNDLYMSNIKPWESYKYVREIESHRIHFSKEEEKREREKSKGIRGQEEEFIENADEDNNDSSSSSGSVVSAVKPRRSAVSNDRFSEDSHPTYI

SEQ ID NO: 233 - DNA, 1674 bp, Schizosaccharomyces pombe
  CDS (1)..(1674)
atggatttcaacaatattccccttgcgaccattaagtccagcgatgataagggtaaagactttatcgtggaaatgaccactcgtccttctgaaaccaagaagaaggttcctttttctgaggacatgcgtgaaatcccttctttaccgaacgaggaagaagcgaatgcaacggatccacaagccaacgaggtcgctgatgaaaacggtgaaggatttgaagctgaaaaaatcagtagttggatttgggtgctgtcggctgttgcaggtatttctggtttgctgttcggttatgacactggtgttatttcaggcgctctcgctgtcctcggtagcgatcttggtcacgtccttagctctggccaaaaagaattgattacctctgccacttccttcgccgcccttatatctgcaaccacttcaggatggcttgctgattgggtcggtcgcaaacggcttttgctatgtgcagatgcaatttttgtcatcggatctgttattatggctgcttcgcggaatgttgcaatgatggttgttggtcgttttattgtaggttatggaattggtcttacttctcttattgtcccaatgtatattactgagttggctcctgctcgtttgcgcggacgacttgtcatcatttacgtggtcttcattaccggtgggcagctgattgcctactcacttaatgctgcttttgaacatgtacatcaaggttggagaattatgtttggaattggtgcggcccccgccttaggtcagcttatttcgcttttctggactccggagtctccaaggtatttgcttagacataaccatgttgaaaaagtctacaagattttgtctcgaatccatcccgaagcaaagccagctgaaattgcatataaagtctcattgattcaagagggcgtcaaagttgattttcctgaagggaataagtttcaacatttctttcattctttaaaagtacttttcacggttccttcaaatagaagatccctttttattggttgcttccttcaatggttccaacaattttctggcactaatgcaattcaatatttctctgcaatcattttccaaagtgttggatttaaaaattctatctctgtcagtattgttgtcggtgctactaactttgttttcacaatagtcgcattcatgtttattgaccgtattggaagaagacgaattttgctttgtacttcagccgtgatgattgcaggtttggcgctttgtgcaatcgcttatcattttcttcctgcagacaccacccaaaacacaaacagtggttggcaatatgtcgtattagcatccatcattattttccttgctagctatgcttctggaatcggaaatattccctggcaacaagccgaattgtttcctatggaagtcagagcccttggtgctggattctcaactgctatcaactgggttggaaatctcatcattagtgcttcctttttgacaatgatggagtctatcacaccaacgggtacatttgcattgtttgctggattttgttttgttggactcgtgacaagctactttacttatcccgaacttgcaggaatgtctattgaaaatatacacaagctgcttgaaaaaggtttttggcaagctgtaaaggaaagtactaaacgcgttagaaaaggaagaatagatgaagcttga

SEQ ID NO: 234 - protein, 557 aa, Schizosaccharomyces pombe
MDFNNIPLATIKSSDDKGKDFIVEMTTRPSETKKKVPFSEDMREIPSLPNEEEANATDPQANEVADENGEGFEAEKISSWIWVLSAVAGISGLLFGYDTGVISGALAVLGSDLGHVLSSGQKELITSATSFAALISATTSGWLADWVGRKRLLLCADAIFVIGSVIMAASRNVAMMVVGRFIVGYGIGLTSLIVPMYITELAPARLRGRLVIIYVVFITGGQLIAYSLNAAFEHVHQGWRIMFGIGAAPALGQLISLFWTPESPRYLLRHNHVEKVYKILSRIHPEAKPAEIAYKVSLIQEGVKVDFPEGNKFQHFFHSLKVLFTVPSNRRSLFIGCFLQWFQQFSGTNAIQYFSAIIFQSVGFKNSISVSIVVGATNFVFTIVAFMFIDRIGRRRILLCTSAVMIAGLALCAIAYHFLPADTTQNTNSGWQYVVLASIIIFLASYASGIGNIPWQQAELFPMEVRALGAGFSTAINWVGNLIISASFLTMMESITPTGTFALFAGFCFVGLVTSYFTYPELAGMSIENIHKLLEKGFWQAVKESTKRVRKGRIDEA

SEQ ID NO: 235 - DNA, 1596 bp, Schizosaccharomyces pombe
  CDS (1)..(1596)
atggggttcaagcgtggaaagaattttacccttgttatgttaattttcgtctccatggccggttggatgtttggtgctgataccggttccattggtggtgttactagtatgcgcgattttcgtgagcgttatgctgatagatatgacccgatcaccgaccagtattctttgtcttcggctcgtcaaggtcttttaactggtatggttaacgttggttccttgtttggatgtatcatttcttctcccattgccgatcgttttggtaagagactttctatcattggtttttgtgctgtttatatcattggtatcatcgttcaagttaccgctgttccctcttgggtacaaatcatggttgccaagatttggactggtattggtattggcgctctttctgtcttggctcctggatatcaatcagagactgctcctcccagtattcgtggtaccgtcgtcgtcacttatcagttgtttgtcactggtggaattttcattgccgcttgtatcaatatgggtactcacaaacttcataaaactgcccagtggcgtgtttcaattggtattaatctcctttggggtatcattaccatgattggaattctcttccttcccgaatcccctcgttatcttattcaagttggcaaggatgaagaggctgttagagttctttctgaaagtgctgagctttttcctgatagtgaggaagttcaaaatgaatatcaccgtctcaaatcatctattgacgaagaatttgctggtggcccttgcagctgggcaagcattttcggtaaagacattcgttatcgtactttccttggtatgtttgttatgtcgcttcaacaattgaccggtaacaactatttcttctactatggtttctcagttatgcaaggagctggtattaattctccttacctatctgctatgattcttgatgcagttaattttggctgcacttttggtggtatgtatgtattggaaaggtttggtcgtcgtaaccctcttatcattggtggtatttggcagtcaatttgctttttcatttattcagctgtcggttctcgtgctttatatcataagaacggtacttcaaatacccgtgctggtgccgttatgattgtcatggcatgtcttttcatttttggatttgctcaaacttgggctcctgccgcatacgttattgttggtgagtcataccctgttcgttaccgctctaagtgtgctgccgtcgctactgctagcaactggctctggaatttcctaatttcattctttactccattcattcaagcttctattggattcaagtacggttacgtttttgcttcttgtaatttgaccggtgcaattgttattttcttgtttgctaaagagactaaaggtcttactttggaagaaattaatgagttgtatatgtctgtcatcaagccctgggaatctggtaactttaagcttaactattctgagcaaaagaaagttgagaaagagaaatccagaaagggcggtgcccgtggtgagtctgttgagtatgttgagcgtgcttcaaacactgactcatctccacaatactcttcccatgaggaagattacgcataa

SEQ ID NO: 236 - protein, 531 aa, Schizosaccharomyces pombe
MGFKRGKNFTLVMLIFVSMAGWMFGADTGSIGGVTSMRDFRERYADRYDPITDQYSLSSARQGLLTGMVNVGSLFGCIISSPIADRFGKRLSIIGFCAVYIIGIIVQVTAVPSWVQIMVAKIWTGIGIGALSVLAPGYQSETAPPSIRGTVVVTYQLFVTGGIFIAACINMGTHKLHKTAQWRVSIGINLLWGIITMIGILFLPESPRYLIQVGKDEEAVRVLSESAELFPDSEEVQNEYHRLKSSIDEEFAGGPCSWASIFGKDIRYRTFLGMFVMSLQQLTGNNYFFYYGFSVMQGAGINSPYLSAMILDAVNFGCTFGGMYVLERFGRRNPLIIGGIWQSICFFIYSAVGSRALYHKNGTSNTRAGAVMIVMACLFIFGFAQTWAPAAYVIVGESYPVRYRSKCAAVATASNWLWNFLISFFTPFIQASIGFKYGYVFASCNLTGAIVIFLFAKETKGLTLEEINELYMSVIKPWESGNFKLNYSEQKKVEKEKSRKGGARGESVEYVERASNTDSSPQYSSHEEDYA

SEQ ID NO: 237 - DNA, 1800 bp, Schizosaccharomyces pombe
  CDS (50)..(1657)
tttggtcattactttttctttttaaaaaaactagcatttattaagaacaatggcgaaaatcttaaccattgtcatgttggtcttcgtgtccatggccggatggatgttcggtgctgacacgggttccattggtggtatcactaatatgcgggactttcaatctcgatacgcagacaggtatgatcctgtcacagatacgtattcgtattcttctgctcgccaaggtcttttggttggtatggttaacactggaactactgttggatgtttactttcttcacctcttggagatcgattcggtaaacgtaagtgtatcatgggatggacattggtttacattaccggtgttatcgttcaactcaccacaattccatcttgggttcaaatgatggtagctaaaatttggactggtcttggcattggtgctttgtcagtcattgctcctggttaccaatccgaatcttctcccccccatattcgtggtgccattgtaactacttatcaattgttcattactcttggtatttttattgccgcctgtatcaacatgggtactcacaaatacaccactcatcctgaagctcaatggcgtgttcccatcggtattaacttactttggggtattctcatgttctttggaatgcttttcctccctgaatccccacgttaccttgcagttaaaggaagaaatgaagaatgtatgaaaattcttactcgtaatgctggcctcccagccgatcatcccatcatgcaaaaagaatacaatgccattcaagctgacgttgaggcagaattggctggtggtccttgctcctggcctcagatctttagcaacgaaattcgttacagaacacttttgggaatgggtgtcatggcattccaacaattgaccggtaacaattacttcttctactatggtactcaggtattccgcggtactggcttgaactcccccttcctcgcagctttgattcttgatgctgtcaactttggatgtacgtttggtgctatctttgttcttgaatactttggtcgtcgtggtcccctcatcgttggtggtgtttggcaatctatttgtttctttatttatgcttctgtaggtgatcgtgcacttacccgccccaatggtacttcgaatcatcgtgctggtgccgttatgattgtgttctcatgtcttttcattttcagttttgctcaaacttgggctcctgccgcatacgttatcgttggtgaatcgtatcccattcgttatcgttccaagtgtgctgccgtcgctactgctagcaactggttctggaactttatgatttccttcttcactccctttattagcaactcaattggtttcaagtatggttatgtgtttgcagcttgcaacttgtgtgccgctattattattttcctattcgccaaggaaaccaaaggtcttaccttggaagagattaaccaactttatttgtcgaatattaagccctggaacactggtgcttaccagcgtgatcgggaagatattaagcaaagcgactcagaaaaggagcgtggacctacttctaagttacatgaatacgttgagcatgctcccaactcgtatgcttcaacacactctacagagagtgagaattatcctcaacaagtcaccaatccggttggcttatgaaactagtgagggaattcaattcttgatggctttatgaatcaagcacactagatagaggatttcaagtcccaatatgaagacacttagattttaagtccagataaaattggatttccgccgaaaagccacctcaactttttaca

SEQ ID NO: 238 - protein, 535 aa, Schizosaccharomyces pombe
MAKILTIVMLVFVSMAGWMFGADTGSIGGITNMRDFQSRYADRYDPVTDTYSYSSARQGLLVGMVNTGTTVGCLLSSPLGDRFGKRKCIMGWTLVYITGVIVQLTTIPSWVQMMVAKIWTGLGIGALSVIAPGYQSESSPPHIRGAIVTTYQLFITLGIFIAACINMGTHKYTTHPEAQWRVPIGINLLWGILMFFGMLFLPESPRYLAVKGRNEECMKILTRNAGLPADHPIMQKEYNAIQADVEAELAGGPCSWPQIFSNEIRYRTLLGMGVMAFQQLTGNNYFFYYGTQVFRGTGLNSPFLAALILDAVNFGCTFGAIFVLEYFGRRGPLIVGGVWQSICFFIYASVGDRALTRPNGTSNHRAGAVMIVFSCLFIFSFAQTWAPAAYVIVGESYPIRYRSKCAAVATASNWFWNFMISFFTPFISNSIGFKYGYVFAACNLCAAIIIFLFAKETKGLTLEEINQLYLSNIKPWNTGAYQRDREDIKQSDSEKERGPTSKLHEYVEHAPNSYASTHSTESENYPQQVTNPVGL

SEQ ID NO: 239 - DNA, 1641 bp, Schizosaccharomyces pombe
  CDS (1)..(1641)
atgggaaaaaatttgaccattgtcatgttggtcttcgtgtccatggccggatggatgtttggcgccgataccggttccattggtggtatcaccaacatgagagatttccaatctcgtttcgcagatcggtataatccggtaacagattcgtattcgtattcttcggcgcggcaaggtctaattactggtatggttaacgttggttctttctttggttgtttcctttcttcccctcttatggatcgcattggtaagcgtacctctattatgttttggactattgtttatttgattggtattattcttcaagttaccgctgtcccatcttgggtccaaatcatggttgctaagatttggactggtctttccattggcgccttgtctgtgcttgcccccggtttccaatctgaggttgctcccgccgatcttcgtggtaccattgtcaccacctatcaattggctgtcactggtggtattttcattgccgcttgtatcaacatgggtactcacaagttgcacaagactgctcaatggcgtgtatccatgggtattaacttgctttggggtatcatcaccttcatcggtatttctttccttcctgaatcccctcgttatttgatctctgttggtagagatgaagaggctcttcaaattatggccaagaacaacgatcttcctatcgaacacgaagttatccaaacggaataccatgttattaagtctgattgtgaagctgaattggctggtggtcccgctacttggcccgaaatttttggtcccgacattcgttatcgtaccttccttggtcttggtgtcatgtctcttcaacaacttaccggtgataactactacttctactatggtttcgaggtgtttgagggtactggtatgaactctccttatctttctgctttgattcttgatgccgttaactttggatgtacgtttggtggtcttttcgtcctagagttctttggtcgtcgtatgccattgattattggtgctctttggcaatccattactttcttcatttacgcagctgttggtaatcgtgctcttactcgtaagaatggtacctcaaaccatcgtgccggtgccgttatgattgtgttctcatgtcttttcattttcagttttgctcaaacttggggtcctgccgcatacgttatcgttggtgaatcgtatcccattcgttatcgttccaagtgtgctgccgtcgctaccactggtaactggttgtggggtttccttatttcctttttcactcccttcattaccaactccattggattcaagtatggttacattttcgctgcttgtaacttgtgtgctgcttgtattattttcttgtttgctcatgaaaccaaaggtcttaccttggaagagattaacgaactatatatctctggtgctaagccctggatgcctagacctaagaaccttggtaacttcaccaagcaacaagaagaggttcgtgaaaaatcccgtggtgttcaaggcgaaagtgccgctcatcttgaaaacgttgacggtgaggaaggtattgaggactctagcaatgacattagttccacaacatcttcggatggccgtgccaagcccgaatctagctaccacgatcaggaagaacaattcgcatag

SEQ ID NO: 240 - protein, 546 aa, Schizosaccharomyces pombe
MGKNLTIVMLVFVSMAGWMFGADTGSIGGITNMRDFQSRFADRYNPVTDSYSYSSARQGLITGMVNVGSFFGCFLSSPLMDRIGKRTSIMFWTIVYLIGIILQVTAVPSWVQIMVAKIWTGLSIGALSVLAPGFQSEVAPADLRGTIVTTYQLAVTGGIFIAACINMGTHKLHKTAQWRVSMGINLLWGIITFIGISFLPESPRYLISVGRDEEALQIMAKNNDLPIEHEVIQTEYHVIKSDCEAELAGGPATWPEIFGPDIRYRTFLGLGVMSLQQLTGDNYYFYYGFEVFEGTGMNSPYLSALILDAVNFGCTFGGLFVLEFFGRRMPLIIGALWQSITFFIYAAVGNRALTRKNGTSNHRAGAVMIVFSCLFIFSFAQTWGPAAYVIVGESYPIRYRSKCAAVATTGNWLWGFLISFFTPFITNSIGFKYGYIFAACNLCAACIIFLFAHETKGLTLEEINELYISGAKPWMPRPKNLGNFTKQQEEVREKSRGVQGESAAHLENVDGEEGIEDSSNDISSTTSSDGRAKPESSYHDQEEQFA

SEQ ID NO: 241 - DNA, 1913 bp, Schizosaccharomyces pombe
  CDS (240)..(1913)
actttacacattttttggccctcctttcatttgtcaagtcgtgtttgcaatcacgaattcttttaaaatctttttgtttcttgtactaagcataccttatttttcaggcaagttttccttcttataaatctgcgtttccttgccaaacatttgtatcttaatttgctcctttttttgtcgatacacccttaaaaatttatatcatctgcaaaatttgttaattatttttctattctattatgggaagaacacttacatctgtcctcgtggtcttcatttctatggccggatggctaggaggtgctgataccggttccattagtggtatcttgggaatgcgtgattttcaatctcgttttgctgaccggtataatcctatcacgaactcttatagttactcagcctggcgacaagcactgttgacaggaaccgttaacgctggttgcttatttggtgctatgctttcctctccatttactgaagccattggcaaaaaatactccattgccttctttagcggttgttacattattggtcaaattcttttggtaactgctgttccttcttgggttcagattatggttggtaagttatttacaggtttaactattggtgctttgtcggtgttgagtcctggataccaatctgaagttgctcctccgcaaattcgtggtgcagttgtttcgacctatcaactatttcaaacttgcggtactttaatcgctgcttgtatcaatatgggaactcataaacttcgtaaaacagcgtcctggagaacttcctttggcattaacatactttggggtatctttttgatggtgggtgtactgtttttacctgaatcaccgcgttacctcatctataagggaagagatgaagaggctcttcgaatcatgtgtcaaactgctgaactagatcctgagagtgaaatcattcaaaccaattttaataccattaagagtgatattgaaatggaaatggctggaggtaaggcaagatggcctgaggtttttggaaaagaagttcgctatcgtactgtcttgggattccttactatgttactgagagaattgattggtaataactattacttttattatgctacacaagttttcaagggaactggtatgacggatatattcttaccagccgttattttaggtgctattaattttggtacaacgtttggtgctttatacacaattgataacttaggacgtcgtaacccactaatttttggagctgctttccaatcgatatgcttctttatatatgccgctgtaggcgatcgaaagctcatatataagaatggtactagtgatcacagagcaggagctgtaatgattgtgttttcttgtttgtttcttttctcttactgctgttcttggggcccaatgggctgggttattgtcggcgaaacctttccaatacggtatcgtagcaaatgtgctgctgtagccacatcgggtaattggctgggcaactttatggtttcattcttcactcctttcatctcaaattctattgggttcaaacttggatatatttatgcttgtatcaatatgacttctgcgtttcaaatatttttgatggccaaagaaactaaaggccttaccttggaagaagttaatgaattatacgagtctgacattaagccatgggattcctataagtacgtgagacaaattgaatctcgtcgtatacacttcagtaaagaagaagaaaagcgagaaagagagaagtcaaaaggataccgcggtcaagaagaacgttttatcgaaaatgcagatggtgcggataatgacgatagcagcgcttcttcagaatcctttgcatctgctggcgcacactccagatcggtttttcctaggaggtcaaacgtgtcagaagaatcacacccgacttgggtataa

SEQ ID NO: 242 - protein, 557 aa, Schizosaccharomyces pombe
MGRTLTSVLVVFISMAGWLGGADTGSISGILGMRDFQSRFADRYNPITNSYSYSAWRQALLTGTVNAGCLFGAMLSSPFTEAIGKKYSIAFFSGCYIIGQILLVTAVPSWVQIMVGKLFTGLTIGALSVLSPGYQSEVAPPQIRGAVVSTYQLFQTCGTLIAACINMGTHKLRKTASWRTSFGINILWGIFLMVGVLFLPESPRYLIYKGRDEEALRIMCQTAELDPESEIIQTNFNTIKSDIEMEMAGGKARWPEVFGKEVRYRTVLGFLTMLLRELIGNNYYFYYATQVFKGTGMTDIFLPAVILGAINFGTTFGALYTIDNLGRRNPLIFGAAFQSICFFIYAAVGDRKLIYKNGTSDHRAGAVMIVFSCLFLFSYCCSWGPMGWVIVGETFPIRYRSKCAAVATSGNWLGNFMVSFFTPFISNSIGFKLGYIYACINMTSAFQIFLMAKETKGLTLEEVNELYESDIKPWDSYKYVRQIESRRIHFSKEEEKREREKSKGYRGQEERFIENADGADNDDSSASSESFASAGAHSRSVFPRRSNVSEESHPTWV

SEQ ID NO: 243 - DNA, 1767 bp, Neurospora crassa
  CDS (1)..(1767)
atgatctcggcatacccttccacatatgcttccgatcgctctgttgtgttcttacatacctctcgaaataaaacaagctttacaacgagcagtgtcgccatgaagccatttctggggctcagaggtcagcccctcaacctggccgtgggcgcagttgccggatgtgattttcttcttttcggatacgatcagggtgttatgggcggaattctgactctccccgagttcctcggttactttgaacaaatcaatccagacgcaccgggcctcacaccacacgaatcttctatgcgatctacttaccaaggcatctccgtcgcttcctacaacctgggatgttttatcggcgccatcatcactatcttcattggcaatccctggggccgtaagaaaataatattgctcgggacttctatcatgattgtcggtgccattcttcaggccagcgctactactctaggccatttcatcattgggcgtatcattaccggcattggaaacggaggaaacacatctacttcgcaggtccctacttggcaatccgagacttcgaaagcacacaagcgaggcaagatggtcatgatcgaaggatctctcgtcaccgccggcatcatgttgagttactggattgacctcgggttaagttttgcccctggctcagttgcttggcgcttccctcttgccttccagatcatcttctgcatcctcatcctcatctttattcccttcctgcccgaatcacctcgttggttggttttcaaaggccgcgacgcggaagccaaggaaatcctggccgccctcaacgacgtggaacttgacgatcccattgtcgacaccgagttccatttcatccacgatacggttgtcgagatgtccaaaggcagcttcaaggacctcttcaccatggacaaggaccgcaacttccaccgcactctgctggcatacctcaaccaggttttccagcagatctctggtataaacctcatcacctactatgccgccgtcatctacagcggacttggcatgtccgacttcctggcccgtctcctcgccgccctcaacggcaccgagtacttcattgcctcgtggccagccgtcttccttgtcgagcgcgtcggccgccgcaagctcatgttgtttggtgccatcggccaagcggccaccatggccatcctggcaggcgtcaactcccggccagacgacaagccataccaaattgcgggaatcgtctttctgttcgtcttcaacacggttttcgcggtcggctggctcggcatgtcctggctctacccagccgagatcgtgccgctccgcatccgcgccccggctaacgcgctatccacgtcggcgaactggatcttcaactttatggttgtcatgatcactccggttgcgttcaacaaaatcaagtatcagacgtacatcatcttcgccgtcatcaacgcctttattgttccagtcgtctatttcttctatccggaaacggcgtgccggtcactagaggaaatggatatgatcttccacaaggttgatgggtggaaggggtacttcacggtagtgcaccaggccaaggttgagcctaaatggtacgacaaggatggccagcgcattggcggggctgactttgagaagactgctgggtaccagagccactcgattccggagtcgtctggatttgaaaagccgacgaaggcgcatgttgagtcgcctagggcggatgacgggatcacttcgtcgagtagtgatggaggtaatcgggagtcgtag

SEQ ID NO: 244 - protein, 588 aa, Neurospora crassa
MISAYPSTYASDRSVVFLHTSRNKTSFTTSSVAMKPFLGLRGQPLNLAVGAVAGCDFLLFGYDQGVMGGILTLPEFLGYFEQINPDAPGLTPHESSMRSTYQGISVASYNLGCFIGAIITIFIGNPWGRKKIILLGTSIMIVGAILQASATTLGHFIIGRIITGIGNGGNTSTSQVPTWQSETSKAHKRGKMVMIEGSLVTAGIMLSYWIDLGLSFAPGSVAWRFPLAFQIIFCILILIFIPFLPESPRWLVFKGRDAEAKEILAALNDVELDDPIVDTEFHFIHDTVVEMSKGSFKDLFTMDKDRNFHRTLLAYLNQVFQQISGINLITYYAAVIYSGLGMSDFLARLLAALNGTEYFIASWPAVFLVERVGRRKLMLFGAIGQAATMAILAGVNSRPDDKPYQIAGIVFLFVFNTVFAVGWLGMSWLYPAEIVPLRIRAPANALSTSANWIFNFMVVMITPVAFNKIKYQTYIIFAVINAFIVPVVYFFYPETACRSLEEMDMIFHKVDGWKGYFTVVHQAKVEPKWYDKDGQRIGGADFEKTAGYQSHSIPESSGFEKPTKAHVESPRADDGITSSSSDGGNRES

SEQ ID NO: 245 - DNA, 1596 bp, Aspergillus parasiticus
  CDS (1)..(1596)
atggcggtccttcattctggggttgtgtgtctcgatgggtggttttatcttcggttactccaccggtatgtcaacttccctgtggggtacctaccatgcttcgtgctgactttcacctcaggtcaaattgctggctttacgactatgaatgatttcaagatgcgctttgcggaacaacatgcggatggaacatacgctttcagcaacgtgcgcaatggtttgattgtcggtctgttgtccattggtactatgattggcgccctcgtcgccgctcctatcgccgatcgcattggtcgcaaatactctatctccttctggtctgtgattcacatggttggtatcatcattcagatcgccaccgacgacaactgggtccaagttgctatgggtcgttgggtggccggtctggttgtcggcgctctgtccagcatcgtccctatgtaccagagtgaatctgctcctcgtcaggtccgtggtgccatggtcagcgccttccagctgttcgttgcttcggtattttcatctcttatctcgtcaacttcggtaccgaatccatcaacggtaccgcttcctggcgtatcactatgggacatgtgtgcctggcccttgatcttgggtgttggcactctgttccttcccgagtctccccgttatgcctaccgtaacggtcgtgtcgaagaagcccgtgaggttatgtgcaagctttacggcgttggccccaaccaccggtgcatcgcccaggagatgaaggacatgaaggacaagctcgatgaggagaaagctgccggacaggcttggcatttcgaagtcttcactggtcctcgtatgttctaccgtgtagctggaattgctttacagtcactgcagcagctcactggcgccaacttcctcttctactatggtaacaccatcttcacttctaccggtctgaacaacagctacgtcacccagattattctgggtgccgttaacttcggcatgacccttcctggtctctatgttgttgagcacttcggtcgtcgtaatagtctgatggtcggtgcctcctggatgtttatctgcttcatgatctgggcctccatcggtcacttcgccttggacttggagaaccctcccaacacccctcaggcgggtactgccatgattgtcttcacttgcttcttcatcggtggcttcgccaccacctggggacctattgtgtgggctatctgtggtgagatgtaccctgctcgctaccgtgctgtctgcattggtcttgccactgccgccaactggagcctgaacttcctgatctctttcttcaaccccattcatctccagcgctatcgactttgctacggttacgtctttgcaggctgctgcttcgccgccgtgcttgtggtcttcttcttcgtcaacgagacccagggtcgcacccttgaggaagtcgacaccatgtacgtcctccacgtcaagccctggaagagtgccagctggacgccccggagggtatcgtccgtgatctccacggaccccccgcttcccccaagcaggagggtcgggctgagcacagcgagcccgccaccgagatccgcgagtaaatggtatcatgtctga

SEQ ID NO: 246 - protein, 531 aa, Aspergillus parasiticus
MAVLHSGVVCLDGWFYLRLLHRYVNFPVGYLPCFVLTFTSGQIAGFTTMNDFKMRFAEQHADGTYAFSNVRNGLIVGLLSIGTMIGALVAAPIADRIGRKYSISFWSVIHMVGIIIQIATDDNWVQVAMGRWVAGLVVGALSSIVPMYQSESAPRQVRGAMVSAFQLFVASVFSSLISSTSVPNPSTVPLPGVSLWDMCAWPLILGVGTLFLPESPRYAYRNGRVEEAREVMCKLYGVGPNHRCIAQEMKDMKDKLDEEKAAGQAWHFEVFTGPRMFYRVAGIALQSLQQLTGANFLFYYGNTIFTSTGLNNSYVTQIILGAVNFGMTLPGLYVVEHFGRRNSLMVGASWMFICFMIWASIGHFALDLENPPNTPQAGTAMIVFTCFFIGGFATTWGPIVWAICGEMYPARYRAVCIGLATAANWSLNFLISFFNPIHLQRYRLCYGYVFAGCCFAAVLVVFFFVNETQGRTLEEVDTMYVLHVKPWKSASWTPRRVSSVISTDPPLPPSRRVGLSTASPPPRSASKWYHV

SEQ ID NO: 247 - DNA, 1711 bp, Amanita muscaria
  CDS (38)..(1600)
ataacctgccccccccaaattttctggcccttgaaccatgcctccagctgctacggggaatggcggcatagatcccaaaaacaaatttactggcatagccatgacagcattcagtgcttttggtggtatcctctacggttacgacactggcattatcagcggtatccttgcgatggacgatttcaagcgtacctttggtcaacaggcttctgatggcacatgttcccttccgctctcaagccaatccctgtttgtctctattctctcagctggaaccttcgtcggagctctctttggtgctcccatgggtgacattatcggcagaaaatggggtatcgtcatagctgctgcgatattctcgatcggtattgccttgcaaacagcctcagtaacggcagctcccttcgtcgttggtcgtgtcttcgccggtcttggtgtcggtctggtttcttgcctggttcctatgtatcagtccgaatgctcaccaaaatggatccgcggtgccgtagtatcattgtaccaatgggccattacgattggaatcttgcttgctgccgtcatcaacaacgccacccaaggccgtagcaaccactctgcctatcaaatccccatttctattcagtttgtctgggcatttatccttgggtttggcatgatgcttttgccggaatccccccgttttctcgttaggcaaggtcgcgacgaagatgctgccctgtccttgtcccgtcttacgaggctctcgcctgatgaccccgttgtcagaaatgaattggccgagattcgcaccaattttgaggctgaactggccctcggtgaaagctcgtacttggattgcttcagaccctcgcacaacaaaattttgttgcgtaccctgactggtattttcattcaagcttggcaacaacttacgggcatcaactttattttctactatggtacacaatacttccagaacgctggcatcaatcaagcattcctcattaccattgccaccggtatcgtcaacgtattcatgacattaccgggcttgtatggtgtcgaacgctatggtcgccgttccctcctccttattggtgcactaggcatgacgatttgcgagtttattgttgctatcgttggtgtcacgatccccgcctcgaatctagcaggtcagagagtgctaattgcattcgtttgcatttacatcgctttcttcgcatctacctggggtcctatgctttgggttatcgttggtgaaatctttcctctacaagtccgtgccaagggcatttcgctttctgttgccagcaactggttgtggaacttcggtattgcctttgctacaccttaccttgtaaatacccaagcgggatcagccggtctcgggtcaaaagtgttcttcatctggggcacaacatgtgcttgctgtcttgtctttacgtacttctgcgtgcccgagaccaagggcttgtctctcgaacagattgacgagatgtatcaggaagtaatgccattaaaatcctaccaataccgccgacgcctcgcgatagaaggcggatttaggacagaaaaggctgatatcatacacgaggaaacggcagaaaaggaaagcgggtaacagtttctacccttgtatcatgtttttctccacgtaattagttcttcagacttgtgatacaaaatgtcatcgtaagttacttgaagccgcccaaaaaaaaaaaaaaaaaaa

SEQ ID NO: 248 - protein, 520 aa, Amanita muscaria
MPPAATGNGGIDPKNKFTGIAMTAFSAFGGILYGYDTGIISGILAMDDFKRTFGQQASDGTCSLPLSSQSLFVSILSAGTFVGALFGAPMGDIIGRKWGIVIAAAIFSIGIALQTASVTAAPFVVGRVFAGLGVGLVSCLVPMYQSECSPKWIRGAVVSLYQWAITIGILLAAVINNATQGRSNHSAYQIPISIQFVWAFILGFGMMLLPESPRFLVRQGRDEDAALSLSRLTRLSPDDPVVRNELAEIRTNFEAELALGESSYLDCFRPSHNKILLRTLTGIFIQAWQQLTGINFIFYYGTQYFQNAGINQAFLITIATGIVNVFMTLPGLYGVERYGRRSLLLIGALGMTICEFIVAIVGVTIPASNLAGQRVLIAFVCIYIAFFASTWGPMLWVIVGEIFPLQVRAKGISLSVASNWLWNFGIAFATPYLVNTQAGSAGLGSKVFFIWGTTCACCLVFTYFCVPETKGLSLEQIDEMYQEVMPLKSYQYRRRLAIEGGFRTEKADIIHEETAEKESG

SEQ ID NO: 249 - DNA, 1425 bp, Tetragenococcus halophilus
  CDS (1)..(1425)
atgaagtcacacccgcttacgcttactcaaaatattatgaataataaaggattaaatcgctatgttattacaattaccttaattgcaactttgggaggtctattattcggttatgatactgctgttatatctggtgctgaacaatctatccagaataatctagttaatggagtaggtttaggttcctttgctcacgggttaacagtttctagcgcacttattggttgtgtttttggaggtctattatctggaatattttcaaataatttggggagaagaaactctttaaaattagcaggtagcctctttttaatttccgcattggggtctgcgtacccagaatttttgttctttcaagccggtgatgcatcagttggtcttctaattgtatttaatttataccgcgttcttggtggtatcggtgttggaatggcttccggtatatctcccacatatattggtgaaattgctcctggaaaagttcgtggcagcctagtttcgtggtatcagtttgctattatttttggacaattagttgtatatttcgtaaattggggaattgccaccggacaatcaccagaatgggtgaatgatattggatggagatttatgtttgcttcagaagcaataccggctattttattttttgctttgttgttttatgtacctgaaacacctagatacttagtgttaaaaaataacgaagaaaaagcttttgacgttttatctaaaattaacaactctaaagaagaggcaaaagatatattaactgatattaaaggctctctaaatacaacagaaacgagtggtaagttattttcttatggtaaaactgtagtcattgtaggtgttttactctcaatatttcagcaattcataggtattaacgttgctttatattatgcaccaagaatatttgaaagtatgggcgccggccaaaatgcctcgatggtacagacaatcattatgggaattgttaacgtgacatttacctatgttgcgataagaactgtagataaatgggggagaagaccgttgttgttagttggatcaatagggatggctattggtatgttcgctgttgcgttgcttgcgaaaaatggtgtgttgggtatttggacgttagtctttatcatagtttatacggcctcctatatgatgtcgtggggaccgattgtttgggtgttactttctgaaatattccctaacaaaatcagaggacaagcaatggcatttgcagttgctgctcaatggctatcaaacttctttatttcatcaacctatcctgcaatgatagactttagtggaccgctaacttatggattttatggtttgatgtgtgttatttccgcaatttttgtatggaagatggtcccagaaacaaaaggaaagacgcttgaacaattagaaaatacttggttataa

SEQ ID NO: 250 - protein, 474 aa, Tetragenococcus halophilus
MKSHPLTLTQNIMNNKGLNRYVITITLIATLGGLLFGYDTAVISGAEQSIQNNLVNGVGLGSFAHGLTVSSALIGCVFGGLLSGIFSNNLGRRNSLKLAGSLFLISALGSAYPEFLFFQAGDASVGLLIVFNLYRVLGGIGVGMASGISPTYIGEIAPGKVRGSLVSWYQFAIIFGQLVVYFVNWGIATGQSPEWVNDIGWRFMFASEAIPAILFFALLFYVPETPRYLVLKNNEEKAFDVLSKINNSKEEAKDILTDIKGSLNTTETSGKLFSYGKTVVIVGVLLSIFQQFIGINVALYYAPRIFESMGAGQNASMVQTIIMGIVNVTFTYVAIRTVDKWGRRPLLLVGSIGMAIGMFAVALLAKNGVLGIWTLVFIIVYTASYMMSWGPIVWVLLSEIFPNKIRGQAMAFAVAAQWLSNFFISSTYPAMIDFSGPLTYGFYGLMCVISAIFVWKMVPETKGKTLEQLENTWL

SEQ ID NO: 251 - DNA, 2846 bp, Pichia stipitis
  CDS (175)..(1836)
gcatgcatcaccagacagcataaaaaaataaaaagtttttccgaaatgcaatgaggcagttttagcagcttatttttgttaggctcaaattataacttctataaatacaacagcatttctccccaagaaagattttttgaatacttgtctacataagttaaataactaattaaaatgtcttctcaagatattccttcaggtgttcaaacaccttcaaatgcttcctttttagaaaaggatgaagataagattgaagaagtaccccaaaaccatgatgcaaccttggtagccttggagtccaagggtatttctgaatatcttttgatttgtttcttctgtttgttagttgcttttggtggttttgtctttggtttcgacactggtaccatttctggatttgttaacatgtctgacttcttggaaaggtttggtcaaaccagagctgacggcactcactacttgtccaatgtcagagttggtttgcttgtgtctatcttcaatattggctgtgctattggtggtattttcttgtccaagattggtgacgtctacggtagaagagtcggtattatggcttccatggttatctacgtcgttggtatcatcgtccaaattgcttctcaacacgcttggtaccaagttatgattggtcgtgccattactggtttggctgttggtaccgtttctgtattgtctccattgttcattggtgaaagttctccaaagcacttaagaggtaccttggtttactgtttccaattgtgcattactttgggtatcttcattggttactgtgtcacctacggtactaaaagattatccgactctagacagtggagagtgccattaggcttgtgcttcctctgggctattttcttggttgttggtatgttggccatgccagaatctccaagatacttggttgaaaagaagagaatcgaagatgccaagaagtctgtcgctagatccaacaaattatccccagaagacccaagtgtctacactgaaatccaattgattcaagctggtattgacagagaggctattgctggatccgcttcctggactgaattgattaccggtaagcctgccattttcagaagagttgttatgggtatcatcatgcaatccttacaacaattgactggtgtcaactactttttctactacggaactaccattttccaagctgtcggattgaaggactctttccaaacctctattatcttgggtgttgtcaactttgctgctaccttcattggtatctgggccattgaaagatttggtagaagatcttgtttgttagttggttctgctggtatgtttgtttgtttcatcatttactctaccattggaagtttccacttgtacaaggatggtgaatacaacaacgacaacacctataaaccatccggtaacgctttgatcttcattacctgtttgttcattgttttctttgcctccacttgggccggtggtgtctacaccatcatctctgaaagttacccattgagaatcagatccaaggctatggccattgccactgctgctaactgggttttcggtttcttgatctcatttttcactccattcattgttagtgccattcatttcaagttcggttacgttttcagtggatgtttattattctccttcttctacgtctacttcttcgttgttgaaaccaagggtttgtccttggaagacgtagacgaattgtacgcttccaacgtggttccatggaaatccagcaagtgggttccaccatcgactgctgccatggctaccgaagctggttacgctgctgatgaaaagcctgttgacgaacatgtttaaatccctaatgtcttatgcatagcattctcacgataaaaaagttatagatagtttcccttaatgtttcatagacctaatgttataaaagattgaaatcgtacgtagttcttctatgctgactctattttgcttctagcgtaatgcaaaaattatttctcttggaacccagatatgcctctttctttgtaaatacctgaagtttctggtgccttttcccctgccagtcaaatagccaataggctaccttttttgcctcgtagtaaaacacttgcttgaatccaagacttgccattatcttttggaggatctcgttgtcaaagtaccgagagttggatatacatggcaatggtagaacaagaaacaaagaacttaaggtgtcctttgtaggctctctgaggaacttggttattcgaagaagcatgtctcctctttctttaggagatggcacaaaatttatcaccaacgaacacgatataagattgaatttttcagagttgtttctgggcaatggtctttccatgaagttctgttctagtataagaggactctgggagtttaaatctattctaacaatgctatcaaatatcccacatgtcgatatgagattgttgggacttaagcatccaatctctaaagcactattttggttcaatctagatttgtactcctctgtcttaagccattccaccaaccgtttagaagaatctcctcctctttttgcagtctggccctgagtcgaagcactctggtaggcttcgattccaccacgggcttcaatttcactatctatttctgccaaaagttgaaccaattgcgttgtggagagtgagtcgtctactttgacaaaggtggaattgttcttgactgacgaaagatcaaatttgtcaaaactttcttggaaaaccttctccaagttctttacatctttgattattgccttgtaattttcgatattaacttcagacaataccctactctttgtcgcctggagttttcgtattatagcatgc

SEQ ID NO: 252 - protein, 553 aa, Pichia stipitis
MSSQDIPSGVQTPSNASFLEKDEDKIEEVPQNHDATLVALESKGISEYLLICFFCLLVAFGGFVFGFDTGTISGFVNMSDFLERFGQTRADGTHYLSNVRVGLLVSIFNIGCAIGGIFLSKIGDVYGRRVGIMASMVIYVVGIIVQIASQHAWYQVMIGRAITGLAVGTVSVLSPLFIGESSPKHLRGTLVYCFQLCITLGIFIGYCVTYGTKRLSDSRQWRVPLGLCFLWAIFLVVGMLAMPESPRYLVEKKRIEDAKKSVARSNKLSPEDPSVYTEIQLIQAGIDREAIAGSASWTELITGKPAIFRRVVMGIIMQSLQQLTGVNYFFYYGTTIFQAVGLKDSFQTSIILGVVNFAATFIGIWAIERFGRRSCLLVGSAGMFVCFIIYSTIGSFHLYKDGEYNNDNTYKPSGNALIFITCLFIVFFASTWAGGVYTIISESYPLRIRSKAMAIATAANWVFGFLISFFTPFIVSAIHFKFGYVFSGCLLFSFFYVYFFVVETKGLSLEDVDELYASNVVPWKSSKWVPPSTAAMATEAGYAADEKPVDEHV

SEQ ID NO: 253 - DNA, 2054 bp, Beta vulgaris subsp
  CDS (94)..(1731)
atcaatccaaaaaaatcaaaaggaaacaaattcccatctttccttactttctctctctttttctctctcttattggtgagaaataagtgagccatgagtgaaggaactaataaagccatgtcagacccaccaccaacaactgcaagcaaagtaatagcagattttgatcctttaaagaagcctcctaagagaaacaagtttgcttttgcttgtgctactttggcttctatgacttctgttttacttggttatgacattggagtaatgagtggtgcaataatctacctcaaagaagactggcacattagtgacacacaaataggagttctagtcggaatcttaaacatctactgcctcttcggctctttcgcagctggtcgaacttccgattggatcggacgacgttacaccatcgtattagctggtgcaatcttcttcgttggcgcactactcatgggtttcgccacaaactacgcatttctcatggtaggccgttttgtaacaggaataggtgttggttatgcacttatgatcgcacctgtttacactgcagaggtttctcctgcttcttcaagaggatttcttacctcttttcctgaggttttcatcaatgcaggaattttgcttggatatatatctaaccttgcattttcaagcctcccaactcatttgagctggaggtttatgctcggaatcggggcgattccgagcatatttttggctattggagtgcttgctatgcctgagtcaccgcggtggcttgttatgcagggaaggcttggagatgctaagaaggtgcttaatcgcatatctgactcgcctgaggaggctcaacttaggctcagtgagattaagcagacagcaggaatcccagctgagtgtgatgaagacatctataaggttgaaaaaacaaagataaaatcagggaatgcagtttggaaagagctcttcttcaaccctactcccgcagtgaggcgtgcagtgattgcaggtatcggaattcactttttccagcaagcttccggcatcgacgccgtggttttatacagtccaaggatctttcagagtgctggaatcacaaatgcacgtaaacagttacttgcaacagtagctgtaggagttgttaagacacttttcatattagttgctacatttcaattagacaagtatggtagaaggcctttactattaacaagtgttggtggtatgatcatagccatcttaaccttagccatgtctttaactgttattgatcactctcatcacaagattacatgggctatagccttgtgtataaccatggtttgtgctgtcgttgcgtcgttttcgattggtttaggaccaattacatgggtatatagttcagaggttttccccttaaggttaagggctcaaggtactagcatgggtgtggctgttaatagagttgtaagtggtgttatttcaatatttttcttgcctttgtcacataagattacaacaggtggtgccttctttttgttcggagggattgctattattgcttggttcttcttcttgacgtttcttcctgagactagagggcgtacacttgagaatatgcatgagttgtttgaagattttagatggagggagtcatttccaggcaacaagtcaaataatgatgagaatagcacaagaaaacaaagtaatggtaatgacaagagtcaagtacaattgggagaaactactactagtagtgtacaagtatagttatgtacggatgttatgtcatgtatagctgttcgacttttaatgacgataattaatctcaaatcgaacaagtttctaagatgtgtgtgtataagatgtgcgtgatgtacgtacttgttatacacatgttgttcttagaatgtgatcctctttattttcgcaaatacattgtagcaaattaaagtaatctaattataggataccaaatggttcaaaaaacaatgtcttttgtgtgattttgtatgatgcttcatcatttgtcagtttaccctttttttggtaatgaagacaaaataaattcatgagtttagctttaaaaaaaa

SEQ ID NO: 254 - protein, 545 aa, Beta vulgaris subsp
MSEGTNKAMSDPPPTTASKVIADFDPLKKPPKRNKFAFACATLASMTSVLLGYDIGVMSGAIIYLKEDWHISDTQIGVLVGILNIYCLFGSFAAGRTSDWIGRRYTIVLAGAIFFVGALLMGFATNYAFLMVGRFVTGIGVGYALMIAPVYTAEVSPASSRGFLTSFPEVFINAGILLGYISNLAFSSLPTHLSWRFMLGIGAIPSIFLAIGVLAMPESPRWLVMQGRLGDAKKVLNRISDSPEEAQLRLSEIKQTAGIPAECDEDIYKVEKTKIKSGNAVWKELFFNPTPAVRRAVIAGIGIHFFQQASGIDAVVLYSPRIFQSAGITNARKQLLATVAVGVVKTLFILVATFQLDKYGRRPLLLTSVGGMIIAILTLAMSLTVIDHSHHKITWAIALCITMVCAVVASFSIGLGPITWVYSSEVFPLRLRAQGTSMGVAVNRVVSGVISIFFLPLSHKITTGGAFFLFGGIAIIAWFFFLTFLPETRGRTLENMHELFEDFRWRESFPGNKSNNDENSTRKQSNGNDKSQVQLGETTTSSVQV

SEQ ID NO: 255 - DNA, 1758 bp, Debaryomyces hansenii
  CDS (1)..(1758)
atgtctataaaatcgagctcttggaacccccatttctcagattcctgctacagaaagcaagagaattctatatggaatatgagcgaagtgaaaccagagacggagcacgtagaacataggaaggatgaaaaaaatgtccatgttggcatccagtcgattccttcattagatgctgatgggaagcctatagaggtttcagaagtagagcgacctaagttgctcagtaagcatttgataccactttattgttgttgccttattgtgtacttttgttctactatgaatggattcgatggtagtttaatgggtagtatttatactttaccagactaccttgagtattatgacttagatatgagttctactggaactggactcattgtctctatatattatgttggacaaatagttggcgcattcttttgctctttgatggattggaagggaagaaaagtagctattcttacgggttgttttggtgcttgtattggtgcggtgattactgcagttgcaaaagacactaaaacgttaattggcggtagattctttctttctttctgtactacgattgctgttgctgctgctccagcatactgtgttgaaatttccccatcccatcttagaggtactgttgccggtctttataatactctctggtatgtgggctctcttgttgctgcattcacggcttatggtgcagatttgaattatcgtgggtccaccaaatcgtttaagcttcctctttggttgcaaataatttttcctgctatagtagtattatttgggtggcttatacctgagtctccaagatggttggttggggttaaaagaattgatgaggctagaaaaattattgccaaataccattgtaacggtgacgaaaatcatccattagtagatcttgaaatagcagaaatgattgactccttcaacgatgtaaaactttctgatcctattaaggtgcttgacatgaggccattagtcacaaaacgttctgatagatacaggctcggtttagtgattgcaatgtcttggtttggacagttctcaggaaacaatgttgcttcttactatcttccaacaatgctcaataaagtcggtatgacttcagcttcaactaatgtactcatgaatggtatatattctctcgtttgttggtttgcctcaatattggggtctttttcacatgataaggtcggtagaagaaagatgttcatgttttctactataggtgcatccttaatgttatcggggcttgctatatgtacagccagatataacatcacaccaacgcaagctgcttcaactggtacacttgttttcatatatctctttggtgtgatcttctcatttgcattcacaccaatgcaaccaatttacccatccgaagtttcatctaatatcttgagatctcgtagtatgatcgtcctctatgttacatcaggtatcgcatcgttcgttaaccaattttcagcaccgaaggcgatggaaaatataggatattggtattatgtttttttcgtcttctgggatatttttgaatttgttattatctatttcttttttgttgaaactaggcataaatctcttgaagagttagaaaaaatattcgaagcaaaaaatccaaggaaggtttctgttggaaattacagcgatgaagacgagaaaattgaagaggtagaggttgcaaggcaaaagcatgttatagccctcacgaatcaattcgttaacgaaagattggctaaccaagatgtataa

SEQ ID NO: 256 - protein, 585 aa, Debaryomyces hansenii
MSIKSSSWNPHFSDSCYRKQENSIWNMSEVKPETEHVEHRKDEKNVHVGIQSIPSLDADGKPIEVSEVERPKLLSKHLIPLYCCCLIVYFCSTMNGFDGSLMGSIYTLPDYLEYYDLDMSSTGTGLIVSIYYVGQIVGAFFCSLMDWKGRKVAILTGCFGACIGAVITAVAKDTKTLIGGRFFLSFCTTIAVAAAPAYCVEISPSHLRGTVAGLYNTLWYVGSLVAAFTAYGADLNYRGSTKSFKLPLWLQIIFPAIVVLFGWLIPESPRWLVGVKRIDEARKIIAKYHCNGDENHPLVDLEIAEMIDSFNDVKLSDPIKVLDMRPLVTKRSDRYRLGLVIAMSWFGQFSGNNVASYYLPTMLNKVGMTSASTNVLMNGIYSLVCWFASILGSFSHDKVGRRKMFMFSTIGASLMLSGLAICTARYNITPTQAASTGTLVFIYLFGVIFSFAFTPMQPIYPSEVSSNILRSRSMIVLYVTSGIASFVNQFSAPKAMENIGYWYYVFFVFWDIFEFVIIYFFFVETRHKSLEELEKIFEAKNPRKVSVGNYSDEDEKIEEVEVARQKHVIALTNQFVNERLANQDV

SEQ ID NO: 257 - DNA, 1608 bp, Debaryomyces hansenii
  CDS (1)..(1608)
atgccagttagcattgaaaaacctgaaaatttagaaaaccccacgttaaactcgagtagcttagaaagcttaaaccagtcacgaaagacattcgttggtttacgtggggaggcattatataaaatggtggcattcgttgcgagtattgcatttatgctattcggatatgatcaaggtgttatgagctcgttactaacgctaccatcgtttttggaaacgtttcccgaaatcaatgttttcgaaaataagtcgaactccacattacaagggttggtggtggctatatatgaaataggctgtatgtgtggtgcactttttgcgatggtttatggagacaattttggtagaagaaagatgatttggatcggtgctgcaacaatgacagtcggagcagtgttgcaatgctcggcatttggactacctcatttaatcgttggaagaattgtaacaggtatcgggaatggtttcctgactgcaacaattccaatgtggttgtctgaatgtgcaaaaccagagagacgtggtgctcttaacatgattagcgcagctctaaatatatttggtgttgcattatcttactgggtcgatttcggcttctattttgttaagggcagtgccagttggagatttccaattgccttccaaattgtatttgctttgttcatgatgtccgtcatcttcttaatgccagaatccccccgttggttagtcaaaaagaatagaattgaggaagcaaaggaagtatttgcggtgtttgctgaagttgaaaccaatcacacttttgtgttagcaaaaattaaagaaatcaaagatctttctatgaaagaagatgcagaattcagtttgaaacgcctaatttcatttggaccaaacaaacattttcacagaacaatgttggctgcattttgccaaattatgcaacaaatttgcggaataaatctaattacctattatgcaggtactatttatgaagactatttaaatatggatcctattcctgcaagaattttagctgcttgtaacggtacggaatatttccttgctgcttgtctttcatactttcttattgaaagagtagggagaagaaatttgatgttaatttgtgctgcaggacaaagtgctactatggctattttgtgtgggtcaggatgggcagctgataacggggatacaaaggctgcaatatcagctgcagtattcctcttcgtgtttaatagtttttttgcagttggatggttgggtgttctgtggctttaccctgctgaaattgctccattggaaataagagcagcagtgaatgggttatcgacagcttgcaactgggcgtttacgttcttaatcgttatgattacacctatatgcttcgcacatatcggtgcatatacttatgctatattcgcatgcgttaatttcgctatggttccagctgtttatattttttatcctgaaacctctggtaggtcactcgaagacatagacataatttttgaacattccaaccctaagactccttgggacgttatctcactttccagaaactataaaaaattggactataaagaatcagacctctacgaaagaaaagttttagtcgaatcgatagaataa

SEQ ID NO: 258 - protein, 535 aa, Debaryomyces hansenii
MPVSIEKPENLENPTLNSSSLESLNQSRKTFVGLRGEALYKMVAFVASIAFMLFGYDQGVMSSLLTLPSFLETFPEINVFENKSNSTLQGLVVAIYEIGCMCGALFAMVYGDNFGRRKMIWIGAATMTVGAVLQCSAFGLPHLIVGRIVTGIGNGFLTATIPMWLSECAKPERRGALNMISAALNIFGVALSYWVDFGFYFVKGSASWRFPIAFQIVFALFMMSVIFLMPESPRWLVKKNRIEEAKEVFAVFAEVETNHTFVLAKIKEIKDLSMKEDAEFSLKRLISFGPNKHFHRTMLAAFCQIMQQICGINLITYYAGTIYEDYLNMDPIPARILAACNGTEYFLAACLSYFLIERVGRRNLMLICAAGQSATMAILCGSGWAADNGDTKAAISAAVFLFVFNSFFAVGWLGVLWLYPAEIAPLEIRAAVNGLSTACNWAFTFLIVMITPICFAHIGAYTYAIFACVNFAMVPAVYIFYPETSGRSLEDIDIIFEHSNPKTPWDVISLSRNYKKLDYKESDLYERKVLVESIE

SEQ ID NO: 259 - DNA, 1764 bp, Debaryomyces hansenii
  CDS (1)..(1764)
atgagcaaatctcaactgtttatttcactgcaatcttcacaaaaattggatacatcttctatgacacagtcagtagtaagtgaaccacgtcgcctggtattgaataagattattggcggctttaagttcgaaaaagttgaagatagacccaccccttcggaagtctataattggagagtatatggaacggctcttcttgcatcatcggcagctataattattggttatgatggtggatttattggaggcactgttgccttaccatcttttaaatctgagtttggccttgataaaatgtcagagagtgaagcaggagatataatttctaatgttatttcagtttttcatgcgggatgtttcttcggagcattaatttcatatcccttttcattctatttgggtagaaggctttcgttgatcataagtgccacagcaatcacaatagggtcggctattatgttggcagctctgtcaaaaaatggacttgggccaatttatgcaggtagagtaatagctggtttggcagttggtttttctacaaacctaacaccagtgtatttgagtgagatttcaccacctgcgattagaggtagagtgattgcgttatatgaaattggttggagagttggtgatttagtgggtttttggattaactatgggattgattctcatatgggtccttccaaaacgcaatggtttattccttttgctgtccaattaattccaagtggtattttttttgctggtagtgttattatgaaagagagtccaagatggttatacagtgtaggcaaacatgatcaagctattaagaatttaaaatggtttagaaatttgccagaagatgatgaatatatggtttatgaggttaatcaagttaaggaatcaatagaatcacaaaagctccatattggtctcaaattatgggacccatttaaacaagtattcttcaaagatcacaaaattttatttagattgctcatcacctgttcgttatttttgtttcaaaatttcttgggaatccaatctatcaattattactcccctattatctttgctaatttaggggtcaaaggaacaaatgccacattattctcaacaggtatgtttggtgtcgtcaaatttgtttgtacctttatctatattttgtttattgttgatacttttggcagaagaaaagcattcatggtttcgtccacagtgtgttctatttgtttctggtacatcggtgcttatttgaaggttaatgatccttctcaaccaggagttcaagctggcccaggtggcactgctgcgattgttatgatgtacttctggattgcgtcttttattttagcttggtctggtggtccatttgttgtcggaagtgaagtattcgatcagaatattagatcatttgtccaggcaatcaatgctgctatttcttggattcctattttcataatgtcaaggtttacaaccaaaatgattgacaaaatggaatacggcatttactttttctttgcatctttggcagcattgtctgttccattcgtatttttctgtgttcctgagactaaaggtattgcattggaggatatggataaaatattcgacagatcattaccagctcgtaaggcgcacaaggtcgtccttggtcaagttagagccaatgcaattagtcaattagagggacatagaggactttacaaaatggacactaacaaatcaaatgaaattcaaaatattgaggatttagagttaatggtcaaaaacgagaagtga

SEQ ID NO: 260 - protein, 587 aa, Debaryomyces hansenii
MSKSQLFISLQSSQKLDTSSMTQSVVSEPRRLVLNKIIGGFKFEKVEDRPTPSEVYNWRVYGTALLASSAAIIIGYDGGFIGGTVALPSFKSEFGLDKMSESEAGDIISNVISVFHAGCFFGALISYPFSFYLGRRLSLIISATAITIGSAIMLAALSKNGLGPIYAGRVIAGLAVGFSTNLTPVYLSEISPPAIRGRVIALYEIGWRVGDLVGFWINYGIDSHMGPSKTQWFIPFAVQLIPSGIFFAGSVIMKESPRWLYSVGKHDQAIKNLKWFRNLPEDDEYMVYEVNQVKESIESQKLHIGLKLWDPFKQVFFKDHKILFRLLITCSLFLFQNFLGIQSINYYSPIIFANLGVKGTNATLFSTGMFGVVKFVCTFIYILFIVDTFGRRKAFMVSSTVCSICFWYIGAYLKVNDPSQPGVQAGPGGTAAIVMMYFWIASFILAWSGGPFVVGSEVFDQNIRSFVQAINAAISWIPIFIMSRFTTKMIDKMEYGIYFFFASLAALSVPFVFFCVPETKGIALEDMDKIFDRSLPARKAHKVVLGQVRANAISQLEGHRGLYKMDTNKSNEIQNIEDLELMVKNEK

SEQ ID NO: 261 - DNA, 1839 bp, Debaryomyces hansenii
  CDS (1)..(1839)
atggttctgattagccaaccaaaacaagatatgcaatcagttgaatctagagaagtagagcatccaaagcatgaaccttcgaccgttaccaaggatcatgctctgagttcttggacgtctaagtttagatggaaggtacaagatgatcatgcgcctaaagagatctataattggagtttgttcctttcggtcactgtatttggtattcttggtgccgcaagaggttatgatgaaggttgtatttcaactgcagtttcccaactttcgtttagagaacgttttggattcaacgatccaaataaaacggtggatgacatcgcagaactaagctcgaatattaaagctatggttcaattgggatccatcggtggagctcttattgctatgtatgctgttgataaacttggtagggttaggtctttacaagcagcttgtttgttatggatcacaggtgcaattatacaaattacctcaggaaacgttggtcagttgtatgctgggagattaattgaaggacttgctattggacaaactaccactattggacctacatatatgtcggaggttgcacctaaggctatcagaggactttgtggatgtgtgtttgctggtgctgtatatatgggtattatgatttcatattttgcaaattatggtgcagctttgcatatgtcacccgactcaaatcagcaatggattgttcctacttcgatcaagatcccattagcaggtttaatattcgttggatcgtttctcttctgtgtcgaaagtccaagatggctattgaaggtcaataagccagataaagcagcaaagaatttatcaaagttaagaaatttacctacagaccacccatatgttttaggtgaaatctccgatattaatgaacaaattaatgctgaaaacgaagctaccgaaggaaataccatattcgctatgatcaaggaaatattctgcgttaaatcgatcagatatagattttttgctgttgcttcattgacacagcttttaggtcaatggtctggtgcaaatgctgtgacaatttatgccccagaactcttttcattaatcggagcagttggtatcgaggaattgaagatgactgctattttaggtgttgtcaagtttgtatctgcttatttgagtgcattctttattattgatttcttaggtagaagaaaggcactctacattggtattataatccaaatgctttccattttatattttgctatattcttaacaattgttcctgaggctagcgaaggagctgacttgactggatcaaggggacgggctggaaagggagctatggcggcgttgtatttgtcaggagttggttggactatgggtttcaattcgattcaatacttattaggctcagaaatttttccattgcatattcgttcgttcgctcagtctgctatcatggttttacatttcgctaatcaatacggtaattcaaaggcattacctaagatgatgcttactatgaacaattatggtgctttctacttctttttcgctgttatgcttgtctctttggtctgggcatggttctttattccagaagttgctggccgttctttggaaagtatggaagaaatcttcaatttaccgtggtatcttattggaagaaagggggcagaattatgtccagattactctgaaatcaataagataacacataatgacgatggacatggtaatgcctacgatggtgaaattaattatgatttagaaaagtctaaggtatcgcaagagtttatcgaagataatggacttatgagaaaaggttcaatcgatgaatatgataagaactcaatcaagggtaaatga

SEQ ID NO: 262 - protein, 612 aa, Debaryomyces hansenii
MVLISQPKQDMQSVESREVEHPKHEPSTVTKDHALSSWTSKFRWKVQDDHAPKEIYNWSLFLSVTVFGILGAARGYDEGCISTAVSQLSFRERFGFNDPNKTVDDIAELSSNIKAMVQLGSIGGALIAMYAVDKLGRVRSLQAACLLWITGAIIQITSGNVGQLYAGRLIEGLAIGQTTTIGPTYMSEVAPKAIRGLCGCVFAGAVYMGIMISYFANYGAALHMSPDSNQQWIVPTSIKIPLAGLIFVGSFLFCVESPRWLLKVNKPDKAAKNLSKLRNLPTDHPYVLGEISDINEQINAENEATEGNTIFAMIKEIFCVKSIRYRFFAVASLTQLLGQWSGANAVTIYAPELFSLIGAVGIEELKMTAILGVVKFVSAYLSAFFIIDFLGRRKALYIGIIIQMLSILYFAIFLTIVPEASEGADLTGSRGRAGKGAMAALYLSGVGWTMGFNSIQYLLGSEIFPLHIRSFAQSAIMVLHFANQYGNSKALPKMMLTMNNYGAFYFFFAVMLVSLVWAWFFIPEVAGRSLESMEEIFNLPWYLIGRKGAELCPDYSEINKITHNDDGHGNAYDGEINYDLEKSKVSQEFIEDNGLMRKGSIDEYDKNSIKGK

SEQ ID NO: 263 - DNA, 1842 bp, Debaryomyces hansenii
  CDS (1)..(1842)
atgctgcacgagcaaaaagacttggcagaagtgtcaaaaattaatactaaagaacaaattgttgagcatccacattctacagcgaccaagcaccacgcgcaagattcatgggcgtctaagtttaggtggaagataaaagacgaccatgctccacctgaaatctttaactggactttgtttctttcggtctttgttttcggtatcttagggtcggctagaggttatgatgaaggtaatatctctgggtcagtcgcgcaaatttcgtttcagaattattttggtttcaatgatccaaataagtctgaagatgatgttgcaaacttgaaatctaatattacatccatggttcaattaggttctattggtggttgtattattgctatgtttgttgttgatagatttggtagaattagatctttacaagcagcttgcgttttatggatcgcagctgcaattattcaaatcacttcaacaaatgttggtcagttgtatgctggaagattaattgaaggacttgctattggacaaactaccactattggacctacatatatgtcggaggttgcacctaaggctatcagaggactttgtggatgtgtgtttgctggtgctgtttactttggtataatgatggcgtattttgcaaattatggtgcagctttgcatatgtcacccgactcaaatcagcaatggattgttcctacttcgatcaagatcccgttagcaggtttgatattgactggatcgttcgttttctgtgtcgaaagtccaagatggctattgaaggtcaataagccagataaagcagcaaagaatttatcaaagttgagaaatttacctacagaccacccatatattttaggggaaatctccgatattaatgaacaaatccatgctgaaaacgaagctacccaaggaagtaccatattcgctatgatcaaggaaatattctgcgttaaatcgatcagatatagattttttgctgttgcttcattgacacagattttaggtcaatggtccggagcaaacgctattacgatatattctccagaactttttgcattagttggagctgttggagttgaaaagttgaaatggactgctattttaggtgttgtcaagtttgtatctgcttacttcagtgcgttctttgttattgatttcttaggtagaagaaaggcactctacattggtattatgatccaaatgctttccattttatattttgctatattcttaacaattgtccctgaagctggagatgataatgtcaatttgactggatcaaaagaaagagccggaaagggagctatggctgcattattcttgtcaggagcaggttggactatgggtttcaattcgattcaatacttattaggttcagagattttcccattgaacattcgttcgttcgcccagtctgctatcatggttttacatttcgctaatcaatatggtaattcaaaggcattacctaagatgttgcttgccatggataactacggtgctttctacttttttgtcgctattatgattatcggcttgttatgggcatggttctttattccagaagttgctggccgttcgttggaaagtatggaagaaatcttcaatttaccgtggtatcttattggaagaaagggggcagagttatgtccagattactctgaaattaataagatcacatacagcgatgatggacatggtaatgcctacgatggtgaaattaattatgatttagaaaagtctaaggtatctcaagagtatgtcgaagataatggacttatgagaaaaggttcgaacgaagaagaagataataactcaatcaaggataaatcttaa

SEQ ID NO: 264 - protein, 613 aa, Debaryomyces hansenii
MLHEQKDLAEVSKINTKEQIVEHPHSTATKHHAQDSWASKFRWKIKDDHAPPEIFNWTLFLSVFVFGILGSARGYDEGNISGSVAQISFQNYFGFNDPNKSEDDVANLKSNITSMVQLGSIGGCIIAMFVVDRFGRIRSLQAACVLWIAAAIIQITSTNVGQLYAGRLIEGLAIGQTTTIGPTYMSEVAPKAIRGLCGCVFAGAVYFGIMMAYFANYGAALHMSPDSNQQWIVPTSIKIPLAGLILTGSFVFCVESPRWLLKVNKPDKAAKNLSKLRNLPTDHPYILGEISDINEQIHAENEATQGSTIFAMIKEIFCVKSIRYRFFAVASLTQILGQWSGANAITIYSPELFALVGAVGVEKLKWTAILGVVKFVSAYFSAFFVIDFLGRRKALYIGIMIQMLSILYFAIFLTIVPEAGDDNVNLTGSKERAGKGAMAALFLSGAGWTMGFNSIQYLLGSEIFPLNIRSFAQSAIMVLHFANQYGNSKALPKMLLAMDNYGAFYFFVAIMIIGLLWAWFFIPEVAGRSLESMEEIFNLPWYLIGRKGAELCPDYSEINKITYSDDGHGNAYDGEINYDLEKSKVSQEYVEDNGLMRKGSNEEEDNNSIKDKS

SEQ ID NO: 265 - DNA, 1638 bp, Debaryomyces hansenii
  CDS (1)..(1638)
atgggatacgaagataaattactagggccagccttaaagtttagaaacttcttggacaaatttccgaacatccataatgtctatattgttgttggtatttcttgtatatctggtatgatgtttggcattgatatttcttcaatgtctttattcattggagatgataaatatttagactatttcaattcaccagattctacacttcaagggtttattacagcatccatgtctttagggtctttctttggggccttattttccgcatttatatcagaacctttcggtagaagaatgtcgttgatgttctgtgcatttttttggtgtgttggagctgccattcaatcatcgtcacagaacgtcgtccagttaattataggtcgttttatttctggttttggtgttggatttggatcctcagtagccccagtttatggtacagaattggcaccaagaaaaataagaggattaattggtggattatttcagctttcggtcactttgggaattttggttatgttctatgtttgttatgcattacattatatcaatggtgtggcttcttttagattatcttgggggttacaaatagttcctggtcttcttttgttcattggctgttttttcatccctgaatcacctagatggttagcaaagcaaggctgttgggaggaggctgaatacattgtggcaatgattcaggccaaaggcaatagggaagatcccgatgtcatgattgagattactgagatcaaagatcaaattttgacagaggaaaatattaaggctttcacttatgcagatttattcaagcgcaaatatctccttagaactgtcaccgcaacatttgctcaaatatggcaacaattaacgggtatgaatacattaatgtattatattgtttatgtttttgatatggctggctatcagggcgatgcaaatttaattgcatcttcaattcaatacgttctttttttcgttatgactgccccttcattatatttaatggataaacttggtagaaggcccattttgttaagcggtgctgcattcatgatgatatggcaattcgcagtcggtggtttgctttccacttatgctgagcccaccaatgatgttggtggaaatgatactgtcagattaaggatcccagctgataactcaaccgctgccaagggtgtaattgcatgttgctatttgtttgttgtatcatttgcatatagttggggtgtttgtatctggatgtattgtgctgaagtttggggtgatagcgcctcaagacaaagaggggcctgttttacaacttcagctaattggatttttaacttcgcgatcgcaatgtttaccccctctgcgttcaaaaacattacttggaaaacatacatgatttttgctacgttctgcggttgtatgttccttcacgtatttttctttttcccagaaactaaaggtaaaagattggaggaaattggccaaatgtgggatgaaggaattccagcatggagaacagccgcatgggagccatctattccattcttatctgataatgacttgcgtgaaaagctagaagtaaaacacgtcgaagattcaaactccagtaattcggatgctgaaaagcctagtgctgtccatattgcttag

SEQ ID NO: 266 - protein, 545 aa, Debaryomyces hansenii
MGYEDKLLGPALKFRNFLDKFPNIHNVYIVVGISCISGMMFGIDISSMSLFIGDDKYLDYFNSPDSTLQGFITASMSLGSFFGALFSAFISEPFGRRMSLMFCAFFWCVGAAIQSSSQNVVQLIIGRFISGFGVGFGSSVAPVYGTELAPRKIRGLIGGLFQLSVTLGILVMFYVCYALHYINGVASFRLSWGLQIVPGLLLFIGCFFIPESPRWLAKQGCWEEAEYIVAMIQAKGNREDPDVMIEITEIKDQILTEENIKAFTYADLFKRKYLLRTVTATFAQIWQQLTGMNTLMYYIVYVFDMAGYQGDANLIASSIQYVLFFVMTAPSLYLMDKLGRRPILLSGAAFMMIWQFAVGGLLSTYAEPTNDVGGNDTVRLRIPADNSTAAKGVIACCYLFVVSFAYSWGVCIWMYCAEVWGDSASRQRGACFTTSANWIFNFAIAMFTPSAFKNITWKTYMIFATFCGCMFLHVFFFFPETKGKRLEEIGQMWDEGIPAWRTAAWEPSIPFLSDNDLREKLEVKHVEDSNSSNSDAEKPSAVHIA

SEQ ID NO: 267 - DNA, 1638 bp, Debaryomyces hansenii
  CDS (1)..(1638)
atgggatatgaagaaaagttggtcgcaccagctctaaaactaagattattcttagataaacttccaaacatttataatatttatgtcattgctactatttcgtgtatttcggggttgatgttcggtatcgacatttcatcgatgtcggcgttccttagtaatgacgcttaccttaaatattttggtacccctgaacctgatatgcaaggattcattactgctgctatgtctcttgggtcattctttgggtctcttgcatcggcattttgttcagagccatttggtagaagagcttcattgttgctttgtggattcttttggtctgttggggctgcaattcaatcttcatcacagaatgtcgcccagttaattattggtcgttttatttctggttttggaattggtttcggctcatctgtggcacccgtgtatggatcagagttggcacctagaaaaattagagggttaattggtggtcttttccaactttcagttaccttaggtattttgattatgttctatatctgttacgggttaggtaaaatccaagccgtcggctcattcagaactgcgtggggtttgcaaattatcccaggattgatcttaatacttggatgtttctttattccagaatcacctagatggttagccaaacagaactactgggaagaggcggaggacattgtcgctagagtccaagctaaaggtaacagagaagaccctgaagtattaattgaaatggctgaaattagagaccagattctgacgttagacaaagttaagtcttttacttatattgatttattcaaaaagaagtatcttcttagaactgtaacggcaatatttgctcaaatttggcaacaattaacaggtatgaacaccttaatgtattatattgtctatgttttcgaaatggctggttatcatggtgatgcaaatttggttgcctcttcaattcaatattgtatcaattttgccatgactattcctgcattgtacttaatggataaggtcggtaggagaccagtgttgttaactggagctgcgctcatgatggcctggcaatttgctatagggggcttgcttgccacttatgctgaacccaccgatatttttgggggtaataataccgttaaaatcagtatcccagaagatgaatctcctgccgccaaggctgttattgcatgttgttacttattcgttgtttcatttgcgtctacttggggtgttggtatctgggtttactgtgctgaagtctggggtgatagtgcctcaagacaaagaggtgcgtgtgttgcaactgctggtaattggatttttaatttcgcaattgcaatgttcactccgcacgctttcagtactattacttggaaaacatacatgatttttgctactttctgtgcatgtatgtttcttcatgttttcttctttttccctgaaactaagggtaaaagattggaagaaattggtcaaatgtgggacgagcatgttccagcttggaagtctgcttcgtggcaaccacacgtaccactcgtttcagataatgaaatacacgggaagatggattctgcgcatgatgaacattcatctcgttcggagtctactggagaaaaggtggtcgcagatcacattgcttga

SEQ ID NO: 268 - protein, 545 aa, Debaryomyces hansenii
MGYEEKLVAPALKLRLFLDKLPNIYNIYVIATISCISGLMFGIDISSMSAFLSNDAYLKYFGTPEPDMQGFITAAMSLGSFFGSLASAFCSEPFGRRASLLLCGFFWSVGAAIQSSSQNVAQLIIGRFISGFGIGFGSSVAPVYGSELAPRKIRGLIGGLFQLSVTLGILIMFYICYGLGKIQAVGSFRTAWGLQIIPGLILILGCFFIPESPRWLAKQNYWEEAEDIVARVQAKGNREDPEVLIEMAEIRDQILTLDKVKSFTYIDLFKKKYLLRTVTAIFAQIWQQLTGMNTLMYYIVYVFEMAGYHGDANLVASSIQYCINFAMTIPALYLMDKVGRRPVLLTGAALMMAWQFAIGGLLATYAEPTDIFGGNNTVKISIPEDESPAAKAVIACCYLFVVSFASTWGVGIWVYCAEVWGDSASRQRGACVATAGNWIFNFAIAMFTPHAFSTITWKTYMIFATFCACMFLHVFFFFPETKGKRLEEIGQMWDEHVPAWKSASWQPHVPLVSDNEIHGKMDSAHDEHSSRSESTGEKVVADHIA

SEQ ID NO: 269 - DNA, 1620 bp, Debaryomyces hansenii
  CDS (1)..(1620)
atgtcaaagctaattccttcgcccaagatctcagaagagaaaatcgatcaagaactatctcaacttgtggaagaaaccgcagtttttcaacaaacaatcgagcacaagtataccaggtatgaggctattagagcgtaccctaggacatgcgtttatattttgatattattatgggttatgatattagttggttatgaaactcaggctggtggtatggtagtctctattcctacatttagacgtgattttggatattatttcgaaggtgattatgttttagatggtaaatggcaatcagcaatttctggtggcccgagtggatctgttgttataggcgggtttttaggctcctatatggcagattcaatcggtagaaagctcacacttttaatcgctgttggagcgacaattggatttatcgttcttgagtatgtttccactacgattgaggtattctttgctggaaaattcttaaatgcactctctttaggaattattgctgcagtatctacgtctttgattgctgagattacccctttagctttaagaggattatccgttgctgcaattagtttgtcgttatctttgggcccatttgtctgttatttgattgcaaatacaacatcgactcgagatgatagaatggcatataggagcttgtttttgagtcaatgggcatttagtggaacatcttttatcatgttattttgtattccagaatccccgtactattatgtgttaaaaaatgcagacgaaaaggctctaaaacaattgagaaaattgtataaaggtgaagcactcgcaaaacatcagttaactgtcattaaaaaaacagtagaagaagctagacatactactatatcgtcatcttttgtggattgctttaggggaattaacttaaaaagaacatttattgcaatatcacctttcattatgcagcctatgagtggtgtcgcctacgttggttcatactctacttattttttccaattagctgggtataatactcacctgtcgtttcaaataagtgttggtcaacaagctttgtctattttaggttgcattgcttcatggtttatccttgatagattcggaagaaggcatgttatgctatacggtatgatttctttatttgtacttaatgttattactgcaggcttgggttgcagcaacaaagaaagctacttaactggtgcgtccgcattcatgactatgtataactttttttacaacccaagcatcggtcccctttcttatgttataaatgcagaaaatcctagttctcaactaagggttaaaactatctcaattgggttggctgcgaataatggtttacaatgtatgtggcaattcgttttgcctttcatgttcaatccagatcaagcaaatatgggatctaagattaatttcatatttgctgcttgttgctttattagtatattctgtttttatttctatttaccagaaactgcaaacaggtcatttgatgaaattgatgaaatgtatataaaaaaggtcccagccaggaagtttaggaattttatttcagatacgcaaattaaagctactgaacaaaatgatgagaaaaagggactcgaagttgaacatattgaagcttga

SEQ ID NO: 270 - protein, 539 aa, Debaryomyces hansenii
MSKLIPSPKISEEKIDQELSQLVEETAVFQQTIEHKYTRYEAIRAYPRTCVYILILLWVMILVGYETQAGGMVVSIPTFRRDFGYYFEGDYVLDGKWQSAISGGPSGSVVIGGFLGSYMADSIGRKLTLLIAVGATIGFIVLEYVSTTIEVFFAGKFLNALSLGIIAAVSTSLIAEITPLALRGLSVAAISLSLSLGPFVCYLIANTTSTRDDRMAYRSLFLSQWAFSGTSFIMLFCIPESPYYYVLKNADEKALKQLRKLYKGEALAKHQLTVIKKTVEEARHTTISSSFVDCFRGINLKRTFIAISPFIMQPMSGVAYVGSYSTYFFQLAGYNTHLSFQISVGQQALSILGCIASWFILDRFGRRHVMLYGMISLFVLNVITAGLGCSNKESYLTGASAFMTMYNFFYNPSIGPLSYVINAENPSSQLRVKTISIGLAANNGLQCMWQFVLPFMFNPDQANMGSKINFIFAACCFISIFCFYFYLPETANRSFDEIDEMYIKKVPARKFRNFISDTQIKATEQNDEKKGLEVEHIEA

SEQ ID NO: 271 - DNA, 1533 bp, Debaryomyces hansenii
  CDS (1)..(1533)
atgataagcttcaagatgtttgggacttctaaaataatatgctacggaaaaaatttacggcttttgattacattttgttcctgcactggctttttattgcttggttacgaccagggcttaatgggtaccattataggagcagataataggttcggtcgtgatttcaaccatcctgactctacggtacaaggtttattgacatccgtatacgatttgggttgtgttggggggtcaattatatgtttttttattggcgaaaagtatggtagaagatcaatgatgttttgtggggggttgattatgataataggaactatcatattagcagcatctcagtcaagaggccaattttatgcaggtagaattattactggtattggaaatggtttcaattcgtcaactatacctgtatatcagtctgagtgtgctctagcttctaacagaggctccatgctaacttggcaagcagttgtgacaattttcggtgtagtaatagcctactgggtagggtatggtacatcttatacagaaagtccttttcaatggaggttcccagtagcatttcaaggtatttttgcaattagtcttactttagaaacattcttgttaccagaaacaccccgttggttggtaaccaaaaaccgtaaagcggaagctacgcaggttttggctgctattttggataaggatgtgaatgatcgggtagtcatttatgaaaaagatgaaatagagaaagcggttgaattagaaggcgccggaggcccttttcaattcaaagaactttttggaggtggtgacattcaaaattttagaaggttactattgaccataggtataatgataatgcaacaatttactggttcaaatatgataaattactatgccccagttgtttatcaatctacaatgaaattaagtagaaacacttcactaatacttgctggctgcacggaaattgtatatcttgcagcgtctttcttcccactttgggccgttgaaagatttggaagaaggccattactcttgtactcttcagcgggactatctttttgttttatagttgtttccattttgttgtctattgggacatatgggtgtggtgtgggtgctgcatgttttatctttatataccaaatttttatgggagttggttggttaccagtaccttggttttacccttcagaaatcaacgttacaaggctaagatctagaaatcaagctatagggtcagcatttaactggttgtcagtttttgcggttgtacaaattactcctatatccattaataatattggttggaagacttttataattttcgccattttgaacgctgtttggatacctataatctattgcttttatccagaaactaagggactagaattagaagatattgatcatatcttcgagaaacctggtattactaggggagtattctcaagtagaggtaagcctattgacccaaacgaaaaacattcttatgaggatagtattattgagaaggaatcaataatacacattgaaaaagtttaa

SEQ ID NO: 272 - protein, 510 aa, Debaryomyces hansenii
MISFKMFGTSKIICYGKNLRLLITFCSCTGFLLLGYDQGLMGTIIGADNRFGRDFNHPDSTVQGLLTSVYDLGCVGGSIICFFIGEKYGRRSMMFCGGLIMIIGTIILAASQSRGQFYAGRIITGIGNGFNSSTIPVYQSECALASNRGSMLTWQAVVTIFGVVIAYWVGYGTSYTESPFQWRFPVAFQGIFAISLTLETFLLPETPRWLVTKNRKAEATQVLAAILDKDVNDRVVIYEKDEIEKAVELEGAGGPFQFKELFGGGDIQNFRRLLLTIGIMIMQQFTGSNMINYYAPVVYQSTMKLSRNTSLILAGCTEIVYLAASFFPLWAVERFGRRPLLLYSSAGLSFCFIVVSILLSIGTYGCGVGAACFIFIYQIFMGVGWLPVPWFYPSEINVTRLRSRNQAIGSAFNWLSVFAVVQITPISINNIGWKTFIIFAILNAVWIPIIYCFYPETKGLELEDIDHIFEKPGITRGVFSSRGKPIDPNEKHSYEDSIIEKESIIHIEKV

SEQ ID NO: 273 - DNA, 1665 bp, Debaryomyces hansenii
  CDS (1)..(1665)
atgaagatagtgataataagggacattatggatactagattgaatatgagtgataaggatatttctctagaaaactcgaggaatgattcggtgaagacacctaaaaatgtttatactctagcagatgttacacccaagtttgaaaaaatatggtttaaatatccttggttgttacaattgaatatttttcttttaggaggtattttggctcaggttacttctggatatgatggtagtatgatgaacaatttgcagacgcttccaagttggagaaattactttgatcaaccaacgggaagcattttaagtactatggctaatggtgttacaattggtaccttaatttcgattccatttacttggtttgtatgtgattattttggtagacggataacgattatgttcggctgtattgttgtcattataggtgcagcaattcaaggtggtgcggtgaattttggaatgttcacggccgcgagagtgctacttggtattggttcatgttttgcatcagcagctgcttcacccttgttggctgagacatcgtatccatctcagaggcctgtcgtgacagcgttgttgttagcatcatggccatttggatcttttgttgcttctgtagttacttggggcccttatcattcaagcatgaagtataataattggtcctggagaataccctctattttgcaatgtgctttccctgcaattgaattattacttgctttttttggtccagaatcaccgagatggttgatcgacaaaggcagaagtgatgaagctgaagctttttttataaaatatcatgctggaggcgattcgagtagtccgttagtgagttatgaaatggccgaaataaaagctattatcgaacaagaaaaggtccaaaaaaagagcaaatggagtgaatggttcaggacaaaacaacgtctccgtaggttgtttattgttttggcagtcccagcaatggcacaactatgtggaaatgcacttatttcatattacttgcaaatagttttgaccaatattggtatcactgaaacaaatgaccaacttaaaattaatattggaatgacagtctacggtttagtatggtctgttggttgcgcaacatttgtcgacaagttcaaacgtaagcatacttttattggaggctatatcctaatgtgtattacatatgttgtttggactatattatctgcaattaatcaacagggtgatttcgaaaataagggtctaggaagaggtgtcgttgctatgatttatcttttcctggggttttatcatattgtatctcctgtatctatgactttcgttatggaagtttgccctttccatttgagagcacaaggagctactctctatcaactttctggaaatgtaattggtttctttaataattatgtgaacaacattgcgatgcaggctataacttggagatactatattgtatggtgtatctggctagtggtgcaaatgaacatcgtatactggatattcccagaaactaaaggtttgggtttagaagaagttgcccaagtattcggagaggatgtaaccgccggctacaaggctggtgatcatgcacttgaatacggaattgaggaggtaaacaaagatgatgtgtctgttgaacacattgaagagaaagtagataaaaactaa

SEQ ID NO: 274 - protein, 554 aa, Debaryomyces hansenii
MKIVIIRDIMDTRLNMSDKDISLENSRNDSVKTPKNVYTLADVTPKFEKIWFKYPWLLQLNIFLLGGILAQVTSGYDGSMMNNLQTLPSWRNYFDQPTGSILSTMANGVTIGTLISIPFTWFVCDYFGRRITIMFGCIVVIIGAAIQGGAVNFGMFTAARVLLGIGSCFASAAASPLLAETSYPSQRPVVTALLLASWPFGSFVASVVTWGPYHSSMKYNNWSWRIPSILQCAFPAIELLLAFFGPESPRWLIDKGRSDEAEAFFIKYHAGGDSSSPLVSYEMAEIKAIIEQEKVQKKSKWSEWFRTKQRLRRLFIVLAVPAMAQLCGNALISYYLQIVLTNIGITETNDQLKINIGMTVYGLVWSVGCATFVDKFKRKHTFIGGYILMCITYVVWTILSAINQQGDFENKGLGRGVVAMIYLFLGFYHIVSPVSMTFVMEVCPFHLRAQGATLYQLSGNVIGFFNNYVNNIAMQAITWRYYIVWCIWLVVQMNIVYWIFPETKGLGLEEVAQVFGEDVTAGYKAGDHALEYGIEEVNKDDVSVEHIEEKVDKN

SEQ ID NO: 275 - DNA, 1749 bp, Debaryomyces hansenii
  CDS (1)..(1749)
atgtcacgcttatcttttatcgttaaaaacgaagtggaacctaatattgaaattgagaacaaaactaaatatgaacaggtgaatttcgaagtagatcctaccgctgataaggatattaatgattatatcgaaaagtttctagacatttcggataatgcaagaaataacgacaagcaagaaaaagagatgtcactacttgagggattgaaaacatatcccaaagcagctgcatggtcagtgattctatcaacagctttggttatggaaggttatgatacttcgctcatgggatcattatatggtatgcctgcatttgctgagaaatttggtatgtttgagccatcttctcaatcgtatcaaattccggcaaaatatcagaccatcatgggtacttgtggtaatgctagttctataattggactctggtttgctggtattcttgcagataggtttggatatagaaaaactattatagctaacttgatcttggttgcaatttttattttcattgtttttttcgcaaagaatattggtatgttaatggcaggtaacattttactaggctttccctggggtgcctttcagacattatcagttgcttatgcttctgaagtatgtcctatggttttgagaatttacttgacgacatattccaatatttgttggatttttgggcaattactctcagctggtgtaatgcgggcatttgttactagcacctcagagcaatcctataaagtaccatttgctattcaatgggtatggcctgttccaattatcatcggtgtattttttgctccagaatcaccttattggttagtcaagaatgacaaatataaagaggccaagagatcgattgagaggctcattactgaaaacaaaaatgtggacaaaaatatactttctgaagcgatgttacaaaaaatgcaaatgacagttaaaggtgagcagcaagaaaaaaagctaccttcttatttggaatgtttcaaaggtgtagagcttcgtcggacacgaattgctgcattgacttggctaactcaaaacctatgtggcgccactctcttgagttattcgagctacttctatattcaagcaggtatggctccagagatgtcatttacatttacaattattcaatttgcacttggtattgtaggcactattgggtcttggtttttgtctaagagatttggtcgctttacaatttattttggagggctttgtgctttagctgtaatattgatggtgataggcgggcttggctgctcaactgataagaattctatgtggggtgttggcactcttctaattatttacgttatggtctacgatttaactgtcggtccgttatgttattgtattgttgctgaaataccttctgttcgtcttcgcgcaaagagtattattattgctagaaacctctacaatatttctggaatagttttgagtatacttactccttatatgcttaatccaggagcttgggattggctggcaaaggttgggtttttctggtcaggattcactattgtttgtgcagtctggtgcttttttgatttaccagagaccaagggaaaaacttttgcggatcttgattatcttttccaacaaaatatcaaatcaagagacttcaaaaatacggaagcttctgtttttgatgccgagagctacatccataaactaggagatgatgggataaagcagcttgttgagcagaatgagtttgccaataatactggaaaagtataa

SEQ ID NO: 276 - protein, 582 aa, Debaryomyces hansenii
MSRLSFIVKNEVEPNIEIENKTKYEQVNFEVDPTADKDINDYIEKFLDISDNARNNDKQEKEMSLLEGLKTYPKAAAWSVILSTALVMEGYDTSLMGSLYGMPAFAEKFGMFEPSSQSYQIPAKYQTIMGTCGNASSIIGLWFAGILADRFGYRKTIIANLILVAIFIFIVFFAKNIGMLMAGNILLGFPWGAFQTLSVAYASEVCPMVLRIYLTTYSNICWIFGQLLSAGVMRAFVTSTSEQSYKVPFAIQWVWPVPIIIGVFFAPESPYWLVKNDKYKEAKRSIERLITENKNVDKNILSEAMLQKMQMTVKGEQQEKKLPSYLECFKGVELRRTRIAALTWLTQNLCGATLLSYSSYFYIQAGMAPEMSFTFTIIQFALGIVGTIGSWFLSKRFGRFTIYFGGLCALAVILMVIGGLGCSTDKNSMWGVGTLLIIYVMVYDLTVGPLCYCIVAEIPSVRLRAKSIIIARNLYNISGIVLSILTPYMLNPGAWDWLAKVGFFWSGFTIVCAVWCFFDLPETKGKTFADLDYLFQQNIKSRDFKNTEASVFDAESYIHKLGDDGIKQLVEQNEFANNTGKV

SEQ ID NO: 277 - DNA, 1737 bp, Debaryomyces hansenii
  CDS (1)..(1737)
atgtttaagcaggagaatggaaaaaaactagaatcaaccagacaactggtcgataatggttctaattcaagcaacaatactgctaacgggtcctttacggcgaaggataaaattgacagtaatgaccttgaaaatcatgaaactccagaagatccagatcaaattccatctacaaacgaaattgttgaaaatttacctaccttacctgaaaaatctactaaagattatttatctacatcgtttttctgtttattgattgctttcggtggttttgtctttggctatgatacgggtacgatttctggctttgtgaatatgacggactttaaaaggaggtttggtactcttgataatggagaatatattttaaccaatattagaacaggtcttattgttgcgatttttaatattggttgtgcagttggtggtatttttctctccaaagttggtgacatatatgggcgtcgtgttggccttatgttttcgatgcttatttatattgttggtactattattattattgcagctagcgataaatggtatcaagtggttattggaagggctattactggattggctgtcggctgtgtttcagttctctccccaatgttcattggagaatctgcaccaaaggtattaagaggtacgttggtttgttgcttccaactcttcattactttaggtattttcttagggtattgcaccacctacggtactaaggtatatgatgattctcgtcaatggagaattccactgggcttatgttttgcatgggcaatctttttaactattggtatgatttgtatgccagagtcacctcgttatttgattgaaaaaaacaaaattgaagaagctaaaaaatctatcggtatttccaataaggtatcggcggagcatccagctgtctacactgaaattcaattaatccaagcaggtattgatagagaaaagttggcaggttcagcttcttggactcaattaattactggtaaaccaagaattttcagtcgtgttatcactggtattgtcttgcagtcgattcaacaattaacaggtaacaattatttcttttactatggtacgactatttttcaagctgttggattaaatgattcttttcaaacttctattattttaggtgttgttaatttttcttcaacttttgtcggtatttacagtattgaaaaattaggtagaagagtctgtttgttgactggttctgttgcctgtagtatctgtttcatcatttattcggtattgggatccgtcgctttgtatcctgagggctatgatggtccaacagataagccatcaggtaatgcgttgattttcattacctgcttattcattttctcattcgcctcgacttgggctggtggtgtctataccatcgtatcagaaatttacccgttgaggattagatcaaaggcaatggctgtagctactgcggcaaattggatctggggtttcttgatttcatttttcacacctatgatcactgctgcaattcatttctactatggttttgttttcacaggttgtttaattttctcattcttttatgtttacttctttgtttatgaaactaaagggttatcattggaagaagttgatgaattgtattctctgaaaataccagcatggaaatcttcagactgggttccaccatctacagataatatggcacatgataccgggttcgcatccgaagcgaaaccttctgatgaacaagtatag

SEQ ID NO: 278 - protein, 578 aa, Debaryomyces hansenii
MFKQENGKKLESTRQLVDNGSNSSNNTANGSFTAKDKIDSNDLENHETPEDPDQIPSTNEIVENLPTLPEKSTKDYLSTSFFCLLIAFGGFVFGYDTGTISGFVNMTDFKRRFGTLDNGEYILTNIRTGLIVAIFNIGCAVGGIFLSKVGDIYGRRVGLMFSMLIYIVGTIIIIAASDKWYQVVIGRAITGLAVGCVSVLSPMFIGESAPKVLRGTLVCCFQLFITLGIFLGYCTTYGTKVYDDSRQWRIPLGLCFAWAIFLTIGMICMPESPRYLIEKNKIEEAKKSIGISNKVSAEHPAVYTEIQLIQAGIDREKLAGSASWTQLITGKPRIFSRVITGIVLQSIQQLTGNNYFFYYGTTIFQAVGLNDSFQTSIILGVVNFSSTFVGIYSIEKLGRRVCLLTGSVACSICFIIYSVLGSVALYPEGYDGPTDKPSGNALIFITCLFIFSFASTWAGGVYTIVSEIYPLRIRSKAMAVATAANWIWGFLISFFTPMITAAIHFYYGFVFTGCLIFSFFYVYFFVYETKGLSLEEVDELYSLKIPAWKSSDWVPPSTDNMAHDTGFASEAKPSDEQV

SEQ ID NO: 279 - DNA, 1584 bp, Debaryomyces hansenii
  CDS (1)..(1584)
atgggtttagaagataatgcgcttattagaaagtatgtcaatgtcggggaaaaaagggctgggtcagcatctatggggattttcgtaggtgccttcgcagctttcgggggtgttttgttcgggtatgatactggaaccatttcaggtatcatggccatgaactatgtcaaaggagaatttcctgccaataaggagagttttacgtcaaaagaaagttcgttgattgtttccatcttatcagcaggtactttcttcggtgcgttgttagcaccgtttatgtctgatactttaggtagaagatggtcattaattatttcaacattcattgttttcaacttgggagtgattttacaaactgtttcaactggtattccattactatgtgctggaagagctattgctggttttggtgttggtcttatatctgctgtcattccattatatcaatcagaagccactccaaaatggattagaggggctgttgtatcttgttatcaatgggccattactattggcttattgttagcggcttgtgttaaccaaggtactcataatagaaatgactcgggttcatacagaattccaattgctgttcaacttttatggtcgttaattttgggtactggtatgatcttcttgcctgacacgccacgtttctggatccacaaaggtaatgaatctgaagctaagaaatcgttgaagattttaagaaaattaccacttgaccacccagacttaattgaagaatacgaagacatcaaagctgcttacgatttcgagtgttctttcggaaaatcgtcttggatggatctttttaccacaaggaataggcaattgaagagattatttaccggtgttgctcttcaagcatttcaacaattaactggtgttaactttatcttctattttggtacctctttcttcaagagtgctggtattgaaaacgaatttcttatttctttagccaccagtattgttaacgtaggtatgactgttccaggtatctttttaattgaattagtgggtcgtcgttctatgttgttgtggggtgctgttggtatgtcggtttctcaatttatcgttgctattgttggtattgccactgatagtgccgacgctaacaaagtcttgatcgcattcacttgtttcttcattgcattctttgcttctacctggggtccaattgcttgggttgttgttggtgagattttcccattaagaactagagctaagtccgttgcattatctgccgcttccaactggctttggaactgggctatcgcatacgctactccatacttggtagaagatggtaagggtaatgctaacttaggaacaaacgttttcttcatctggggtggatgtaactttctttgtattttgttcacttacgtcttcatttacgaaaccaagggttactctttggaacaaattgatgaattatatgaaaaagttccacatgcttggaaatctcgtggcttcattccttctgcccatgctttcagagaagatgctccagagtcaatcagctctatgggaaaggatatggaaaaagttactgaaattgaaaccacttcagtctaa

SEQ ID NO: 280 - protein, 527 aa, Debaryomyces hansenii
MGLEDNALIRKYVNVGEKRAGSASMGIFVGAFAAFGGVLFGYDTGTISGIMAMNYVKGEFPANKESFTSKESSLIVSILSAGTFFGALLAPFMSDTLGRRWSLIISTFIVFNLGVILQTVSTGIPLLCAGRAIAGFGVGLISAVIPLYQSEATPKWIRGAVVSCYQWAITIGLLLAACVNQGTHNRNDSGSYRIPIAVQLLWSLILGTGMIFLPDTPRFWIHKGNESEAKKSLKILRKLPLDHPDLIEEYEDIKAAYDFECSFGKSSWMDLFTTRNRQLKRLFTGVALQAFQQLTGVNFIFYFGTSFFKSAGIENEFLISLATSIVNVGMTVPGIFLIELVGRRSMLLWGAVGMSVSQFIVAIVGIATDSADANKVLIAFTCFFIAFFASTWGPIAWVVVGEIFPLRTRAKSVALSAASNWLWNWAIAYATPYLVEDGKGNANLGTNVFFIWGGCNFLCILFTYVFIYETKGYSLEQIDELYEKVPHAWKSRGFIPSAHAFREDAPESISSMGKDMEKVTEIETTSV

SEQ ID NO: 281 - DNA, 1674 bp, Debaryomyces hansenii
  CDS (1)..(1674)
atgactactgctgttggattagaagataattccaaagggaatattattactgttatgagtaaagatccgttagtgttttgcataattgcgtttgcatctattgggggtttactctttgggtacgatcagggagttattagtggtatagttactatggagtcatttgcggcaaaattccccagaattttttccgatcctgattataagggttggtttgtttctacatttttgttgtgtgcttggtttggttcgttgataaactctcctgttgttgatcgatttggaagaagggatactataagaatagcttgcgttgtatttgttatcggatctgtctttcaatgtgcaggtacgtcggttagtatgcttttcgctgggagagcagttgctggtatcggtgtcggacaattgactatggtagtcccaatttatatgtcggaattagctccaccttcagtaagaggtggtttagttgtaatacagcaattttcaataacaataggtattttgatatcattttggataaattatggcactcaatttattggaggaactaaatgtgctcctgaccaagattacaaaggcgatactttcgacccatacattgatgttcctcaaggtggttgttacggtcaaaaagatgcttcctggagaattccatttgggttacaaattgcaccagctttcattttaggtattggtatgtctttttttccaagatcgccaagatggctcttatcaagaaaaagagaagaggaggcatgggaggctttgaattatttgaggagaagaaataatcctgatatgattgatgctgaattcaatgaaattaaatcggacgtattatttgaacaaaaatataacgagaggaaatttcaaggaaaaacaggaatgtctttctttataacatcgtattgggatctagtctctaccaaatcaaattttaagagagtttttataggctctgcggttatgttcttccaacaatttattggttgtaatgcaattatttattacgcaccaacaatatttagtcaattaggaatggattccaacaccacagcattgttaggaacaggggtctatgggattgttaattgcctttcaactattcctgctatctttgcgattgacagatttggtagaaaaactttattgatggctggggcagctggaacttttgtttcgttggttatagtaggtgcaattgtcggcacatatggtgatactttatctaagcataaaactgctggtagagcggcaatagcttttatttttatatatgatttcaacttttcatatagctgggcacctattggatgggttttaccatccgaaatcttctctattggaatcagatcaaaagctatatccattactacttcatcaacatggatgaataatttcataattggtttggtcaccccccgtatgttggagacaatgaaatggggaacatatatcttttttgcagcatttgctataattgcatttgctttcacttggtttgttatcccagaaactaaaggagtacctttagaagaaatggatttagtttttggtgatttagatgcgttgcaagaaaagcaaaacttctctcgcatgaatgaattatcaaaaatggattcaattaaagctacaacagatatttcggaagcacattattctgattaa

SEQ ID NO: 282 - protein, 557 aa, Debaryomyces hansenii
MTTAVGLEDNSKGNIITVMSKDPLVFCIIAFASIGGLLFGYDQGVISGIVTMESFAAKFPRIFSDPDYKGWFVSTFLLCAWFGSLINSPVVDRFGRRDTIRIACVVFVIGSVFQCAGTSVSMLFAGRAVAGIGVGQLTMVVPIYMSELAPPSVRGGLVVIQQFSITIGILISFWINYGTQFIGGTKCAPDQDYKGDTFDPYIDVPQGGCYGQKDASWRIPFGLQIAPAFILGIGMSFFPRSPRWLLSRKREEEAWEALNYLRRRNNPDMIDAEFNEIKSDVLFEQKYNERKFQGKTGMSFFITSYWDLVSTKSNFKRVFIGSAVMFFQQFIGCNAIIYYAPTIFSQLGMDSNTTALLGTGVYGIVNCLSTIPAIFAIDRFGRKTLLMAGAAGTFVSLVIVGAIVGTYGDTLSKHKTAGRAAIAFIFIYDFNFSYSWAPIGWVLPSEIFSIGIRSKAISITTSSTWMNNFIIGLVTPRMLETMKWGTYIFFAAFAIIAFAFTWFVIPETKGVPLEEMDLVFGDLDALQEKQNFSRMNELSKMDSIKATTDISEAHYSD

SEQ ID NO: 283 - DNA, 1659 bp, Debaryomyces hansenii
  CDS (1)..(1659)
atggaaaaagataaagcagaggtacttcatattgaagaagctgtaaatgataattatgcagataaagctcttggtgttacaaatggagaaataatcgaggaggcaagagaggctactgataatgagcatgccttaactctaagaaaagcttttgcatcatataaacctgcaattctttggtcaatggtattttcagcaactattataatggaggggtacgataatattcttatgtcttcctttttcgcatatccttccttccaaaagaaatacggggttgatattggaaatggcgaatatgagcttctcaccaaatggcaaacggctcttggaacagcccctaatgttggaacaatccttggtgtatttgccaatggatatttaactgaaagatttggtcacagacaggtcattatggtgagtttaatatttatgtctgcatttatttttatcccattttttgcaccttcagtcgaagtattacttgttggtcaaatattatgtggtcttccatggggtgtttttgctacaatgggtccaacatattcatctgaggtttgtcctatggcattaagaggttaccttactgcgtatgttaatatgtgttgggctattggccaatttattgctgcaggagttcttaaggcttttgtcgctaatactactgaatggtcctataggataccttttgccattcagtgggcatggcctatacctctatttatattaacatgggctgctcctgattctccatggtggcttattagaaagggtagggttgaagaggctgaaagatctgtaaaaaggctttgttctaagtctattcaacatagggcgcaccaggcggttgcacttatgatacataccaacgaacttgaacaacaacaagaaaagcttacaaaagaagaagttaaagggttaaaaagttatttaaaatgttttcaaggttcaaaccttcgtagaacagaaattgcttgtatcgcatttgcaggtcaagtcctttctggatcgaccttcgcttattctccaagttattttttttcacaagctggcctaaatagtgatgacacttacaaattaaatctcggtgttactggtatagcatttactggaactttttgttcttggtttttgataaggcgttttggtcgaagaaccatctacgtcagtggatatttcatgctagttttaatgctatttcttattgggattttagcggtacccgcagaaaacaatacaaatgtcaggtgggcccaagcagcattgactatgatttgggttgccacctatgctcttacgattggacctttggccttcacaattgttagtgaaatgtctgctacaaggttgcgtgcacagtctattgcattagcaagaaatgcgtataatttggcttctttgatatcaaatgtagtagagccttatctcattactccaagtggagcgaaccttaaaggtaaaaccgcctttgtttggtttgccactgctttacctactctcatttggagttattttaggcttcctgaaactaaagatagaacgtatgaagaattagatattctttttgaaaaaggtattccttccagaaagttctcatcttatgtattcgatgctggtgccgttaacataaatattgaaagcattgaaaataaagaataa

SEQ ID NO: 284 - protein, 552 aa, Debaryomyces hansenii
MEKDKAEVLHIEEAVNDNYADKALGVTNGEIIEEAREATDNEHALTLRKAFASYKPAILWSMVFSATIIMEGYDNILMSSFFAYPSFQKKYGVDIGNGEYELLTKWQTALGTAPNVGTILGVFANGYLTERFGHRQVIMVSLIFMSAFIFIPFFAPSVEVLLVGQILCGLPWGVFATMGPTYSSEVCPMALRGYLTAYVNMCWAIGQFIAAGVLKAFVANTTEWSYRIPFAIQWAWPIPLFILTWAAPDSPWWLIRKGRVEEAERSVKRLCSKSIQHRAHQAVALMIHTNELEQQQEKLTKEEVKGLKSYLKCFQGSNLRRTEIACIAFAGQVLSGSTFAYSPSYFFSQAGLNSDDTYKLNLGVTGIAFTGTFCSWFLIRRFGRRTIYVSGYFMLVLMLFLIGILAVPAENNTNVRWAQAALTMIWVATYALTIGPLAFTIVSEMSATRLRAQSIALARNAYNLASLISNVVEPYLITPSGANLKGKTAFVWFATALPTLIWSYFRLPETKDRTYEELDILFEKGIPSRKFSSYVFDAGAVNINIESIENKE

SEQ ID NO: 285 - DNA, 1632 bp, Debaryomyces hansenii
  CDS (1)..(1632)
atggctttagaagataagttaattgggccagccttgaaattcagtacttttttggataagttccccaaagtttacaatgtttatgttattgctatgatctcatgtatttccggtatgatgtttgggattgatatttcgtcgatgtctgtgtttgttagtgataaggattatctcagcttttttaattctccaaattctgagttgcaagggtttattacttcatccatggcattaggttcattttttggagcaatatctgcttcatttgtttcagaaccctttggtagaagaccttcattaatgatatgtggtttcttttgggtcgtcggagctgtaattcaatcttcagcccaaaatgtagcccaattgataattgggcgaattatcggtgggtacggtgttggatttgggtcatcagttgcccctgtctatggttccgaaatgtcaccaagaaaaattcgtggtttgataggggggctttttcagttttccgttacactcggtattcttattatgtattttgtgtcttacggttgtcactttataaatggtgttggatccttcagaatagcttggggtgtgcaaatggttcctggacttttgatcatacttggaactttttttattccagaatcccctagatggttagcaaaacaaaatctttgggaccaggctgaaaatattgttgcagaagtgcaggcaaaaggtgatagggaagacccagatgtcataatagaagtttgcgaaattaaagaacaaatatttgcatccgagaaacttagatcttttacgtttgctgacctttttactaagaagtacatctcaagaaccatagtagcagttagtgctcagatctggcaacaattggctggtctgaatgttatgaattattacgttgtttatattttcgaaatggctggttattctggtaataacaatttaattgcatcttgcattcaatattgtttaaaagttggcgtaactggagtcgctttgttatttatggataagtttggtagacggccgctattattatttggtgctgctgggatgatggtttggcaatatgctgtagctggtctctttgccacatatgctgtacaaattgaaaaccctgacaatgatacggttagaatgagaatacctctggaccagaaggcagtaggcaaagctattatcgcatcatgctttttgtttgtttgttgttatgccgggacatggggtgttactatttgggtatattgtgctgaagtttggggcgataatgcagcaagacaaagaggtgctgctatttccactgctgctaattggatattcaatttcgcacttgctatgtatacaccatcttcttttaaaaatattacatggaaaacatacataatttatgcaacgttttgtgcatgtatgttcattcatgttttcttctttttccctgaaaccaagggcaaaagactagaagaacttggtttaatgtggcaagaaaaagttcctgcttggagaagtagactgtggcaaccagatgttccatttctttctgataaggaattacattcaaagatggaaattgaacattttgaaggagaaagaaactctgagaactcgcatgcttctcaatcgttggaaaacaaatag

SEQ ID NO: 286 - protein, 543 aa, Debaryomyces hansenii
MALEDKLIGPALKFSTFLDKFPKVYNVYVIAMISCISGMMFGIDISSMSVFVSDKDYLSFFNSPNSELQGFITSSMALGSFFGAISASFVSEPFGRRPSLMICGFFWVVGAVIQSSAQNVAQLIIGRIIGGYGVGFGSSVAPVYGSEMSPRKIRGLIGGLFQFSVTLGILIMYFVSYGCHFINGVGSFRIAWGVQMVPGLLIILGTFFIPESPRWLAKQNLWDQAENIVAEVQAKGDREDPDVIIEVCEIKEQIFASEKLRSFTFADLFTKKYISRTIVAVSAQIWQQLAGLNVMNYYVVYIFEMAGYSGNNNLIASCIQYCLKVGVTGVALLFMDKFGRRPLLLFGAAGMMVWQYAVAGLFATYAVQIENPDNDTVRMRIPLDQKAVGKAIIASCFLFVCCYAGTWGVTIWVYCAEVWGDNAARQRGAAISTAANWIFNFALAMYTPSSFKNITWKTYIIYATFCACMFIHVFFFFPETKGKRLEELGLMWQEKVPAWRSRLWQPDVPFLSDKELHSKMEIEHFEGERNSENSHASQSLENK

SEQ ID NO: 287 - DNA, 2196 bp, Debaryomyces hansenii
  CDS (1)..(2196)
atgtggccatttctagataggatcatgtatgatcactcgacggaggaggaatattacaaaaagatgcaacagaagtcgtcttcgtcgagtgccattacagtggggctagtggcggcggtagggggatttttgtatgggtacgatactgggctcattaacgatattatggagatgacgtacgtgaaggataacttcccggcgaatggacatagcttcagcgtacacgagcgagcgttgataacggccatcttgtcactcggaacattttttggggcgttgatagcgccgttgatatcggatacgtggggtagaaagttttcgatcattgtatcgtcagctctcatatttaatgtgggaaacatcttgcaggtgtcatccacagaggtggtgcttttatgtgttgggagagctgtttcggggttgtcagtgggtatactctcagccattgtgccgttgtatcaagctgaagcttcgccaaaatgggtaagaggttccattgtgtatacttaccaatgggcgataacatgggggttgttgattgctagtgctatatgtcagggggcaaaaaacattatgaattcgggctcgtatagaataccggtgggaatacagttcttgtgggcaattattttgtctgtcgggatgctttttttacccgaatctcctcgattccatgtacagaaggataatatccaagaagcattgaaatgcttagctagactaagaaaagtgccgacagatgaccctgatttgatagaagaactagttgaaatcaaggccaactatgactacgagttatcgtttggaaaggcatcctatatagattgctttaagagtggtggaggaagaaataagcaactcacgaggatgctcacaggtattggggtccaggcatttcaacaaagttcaggaatcaattttattttctattacggggttaatttcttcgcaagttcaggaattaagaattattacttaatgtcatttgtaacttatgcagttaacacactttttacaataccagggataattttgattgaagtcataggaagaaggaaactattattatttggcggcattggaatggctgtttcaaatttcataatagcaattgttggtgttagtatgtcagatgagtcaatcagttctataatatgtgtgtcattttcgtgtgtctttattgcattttttgcatcatcatggggcggtgccgtatgggcgctctcttcagatatatttggtattggtattagacaaaaagcaatatcgctaacggcagcgacaaattggttagttaattttacctttgcatttataacgccatatttgattgatactggtaaacataccgcagcattgggtaacaaaattttttttatctggggtggttgtaatgctctaggcgtcgtatttgtgtactttatggtttacgaaacgaaaggattaaaattggaagaaattgatttcatgtacaaaaactgtgtgaacgctagagcttcgactaagttcaaatctcaaaagattgtatacgccaatcaaatttcaacaccgatctcagagcttcttaatcccaaccgatcgcatattgcgattgagaaatcaagtggaagtaacaataatggcgatgatgatgagaatagcgaagaaaatcaccatgattttggtttagagaacggaaacgtcttacacaacaatttggataataggaatataactcttatcccttataagaatattatttcacctctgcgatcattcagttcagattcttcaagcgattccgactcatcttcaccactcaatgattatgaaagatacttacatagcttgcaaaaagaaggcagccatcatgacacctctcaaacttcaacgtccttaattactgacaataagctaagtcatcttaattccatgcataatgcccactcacggggtaattttactgaggaggacttgaagtacctcaatgatgaatatgatttagcgatgtcgcagaaatacccaggcacaactacggcgcctctaaaaccaagcacgaatatgactgttatagcggcgccattttttgacgctccaccaagcgattcagacacggacgacgaaagcgacgacgatgaagtcggtgacgaagatagcgaaacagaaccagaaactactaagggctcaccggttgataccaaggactctagttcgtag

SEQ ID NO: 288 - protein, 731 aa, Debaryomyces hansenii
MWPFLDRIMYDHSTEEEYYKKMQQKSSSSSAITVGLVAAVGGFLYGYDTGLINDIMEMTYVKDNFPANGHSFSVHERALITAILSLGTFFGALIAPLISDTWGRKFSIIVSSALIFNVGNILQVSSTEVVLLCVGRAVSGLSVGILSAIVPLYQAEASPKWVRGSIVYTYQWAITWGLLIASAICQGAKNIMNSGSYRIPVGIQFLWAIILSVGMLFLPESPRFHVQKDNIQEALKCLARLRKVPTDDPDLIEELVEIKANYDYELSFGKASYIDCFKSGGGRNKQLTRMLTGIGVQAFQQSSGINFIFYYGVNFFASSGIKNYYLMSFVTYAVNTLFTIPGIILIEVIGRRKLLLFGGIGMAVSNFIIAIVGVSMSDESISSIICVSFSCVFIAFFASSWGGAVWALSSDIFGIGIRQKAISLTAATNWLVNFTFAFITPYLIDTGKHTAALGNKIFFIWGGCNALGVVFVYFMVYETKGLKLEEIDFMYKNCVNARASTKFKSQKIVYANQISTPISELLNPNRSHIAIEKSSGSNNNGDDDENSEENHHDFGLENGNVLHNNLDNRNITLIPYKNIISPLRSFSSDSSSDSDSSSPLNDYERYLHSLQKEGSHHDTSQTSTSLITDNKLSHLNSMHNAHSRGNFTEEDLKYLNDEYDLAMSQKYPGTTTAPLKPSTNMTVIAAPFFDAPPSDSDTDDESDDDEVGDEDSETEPETTKGSPVDTKDSSS

SEQ ID NO: 289 - DNA, 1647 bp, Debaryomyces hansenii
  CDS (1)..(1647)
atgaccgagaaagttgatatgattggtacgacacaagacaaggtacaaactccagtaaacatggaacaagaagttataactactgcccattatactgagtatattgattcacatacttctaaatgggaaacgattaaaaagttcccctttgcatgcttttgtatcggcgtaatgatcttcaccttagttttaacatcatttgaatcgcaggcaggaggaattgttatttccatttctatgtttagaaaacacttcggtgttatacaacctgatggttcatatgttcttgaagcacaatggcaatctgctatttctggtgtgcccttggctgcgcaaattattggacagtggacaggatcttggttagctgatcattttggtaagaagtgggtcatatatgtatccatacttgtatcaacagccttcataggtatcgaatttgctgccactacaatccaaacatttttagctggaaaaacaatgaatggattatgtttgggtattatacaagcgtccattgtctcatatgtggcagatattacaccttttgctttaagaggtgcatctacagcactttgtaatatttcattctcgattggtccgttagtttgtttcattatcaactattctgagagtgataggctagattcttgggcgtatagatccatttttgctgcccaatggggattttctgctatctccttaattacactattatttgtcccagattcccctacgtattatatattaaaaggaaagaccgaaaaagcagaggcttgctatgaaaagttattaaaagatcctgtatcaattcaacaacaaatggccgttgtcataaatacgataaaagaatcacaaacatcggcagatagctgtacattcttggattgttttaaaggtaataatttgaaaagaaccatggtcgcgtccgttccatttatattctgtccattttctggtgtatattttacaggtaattatacaacatattggttccaattagcaggtttatcggattctgaatcttttaaatacactattggtgcccaacttttgtccattgctgggtgtgtggctacattgtttgttgttgatagatttggaagaagaactaatatcctttatggtgtgggaactattattgtcgtcgatttcataattggaggcacaggtttagtgaaagataatgaccaagcattaaaagctacaatatcatttatgatgatgtatgggtttttttacaactttggtctaggttctgtatgttatccaattgcctctgaaaaccctacaagtgcattaagaaccaaaactattggtcttgcactctcatcgaccaatatagcggggatggtatggtccttcgttttaccatacatatttaatccagacgaaggaaacttgggtgccagtacgatgttcattttcgccgggttttcacttctcttttgggtatacttttatttctgtgtacccgaaactgcaaataggacccttgaagaagtagatgaaatgtattttaacaaagttcccttaagaaattttgggagccacgaaactttttcttcaagagaaaatgaagaaacttttaagaatgttgctgctaatgaaaaaactaatgaaactcttcatgtcgaggaaatttaa

SEQ ID NO: 290 - protein, 548 aa, Debaryomyces hansenii
MTEKVDMIGTTQDKVQTPVNMEQEVITTAHYTEYIDSHTSKWETIKKFPFACFCIGVMIFTLVLTSFESQAGGIVISISMFRKHFGVIQPDGSYVLEAQWQSAISGVPLAAQIIGQWTGSWLADHFGKKWVIYVSILVSTAFIGIEFAATTIQTFLAGKTMNGLCLGIIQASIVSYVADITPFALRGASTALCNISFSIGPLVCFIINYSESDRLDSWAYRSIFAAQWGFSAISLITLLFVPDSPTYYILKGKTEKAEACYEKLLKDPVSIQQQMAVVINTIKESQTSADSCTFLDCFKGNNLKRTMVASVPFIFCPFSGVYFTGNYTTYWFQLAGLSDSESFKYTIGAQLLSIAGCVATLFVVDRFGRRTNILYGVGTIIVVDFIIGGTGLVKDNDQALKATISFMMMYGFFYNFGLGSVCYPIASENPTSALRTKTIGLALSSTNIAGMVWSFVLPYIFNPDEGNLGASTMFIFAGFSLLFWVYFYFCVPETANRTLEEVDEMYFNKVPLRNFGSHETFSSRENEETFKNVAANEKTNETLHVEEI

SEQ ID NO: 291 - DNA, 1659 bp, Debaryomyces hansenii
  CDS (1)..(1659)
atgtcgacagtttcaccggaaaaatctatatcgtctaagatacaacctcttgactcaaaaaatgagaagcactatgttcaagatcacatcatccaaattgaagactccaaaacctatacgtatttgggtttcaaaggtcagacattgcataacatgatttcatttctcgctggtatggggttcttacttttcggttacgaccagggtgtcatgggctcgttgttgactttgccagcttttaggaacacatttgaatctatagacacaattaaatacccagagcacgccactttccagggttttgttattgccgtttatgaaattggttgtttagcgggtgccgtttccactatgtacttgggtgatatgcttggaagaagaaaaactattctcattggatgttgtattatgattgttggtgctgtcatccagtgttcctcgttctccgttggtcagttaattgccggaagaattatcaccggtattggtaacggtatgaacacttccaccgttccaatatggcaatctgagtgtgctaagtcagaaaagagaggtaaattagttatgattcaaggtgccttaatcactggtggaatttgtatttcctactggatcgattttggcttcttcttcatcaaaaatagttctgtatcatggagattcccaattgggttccaaatatttttcccactattcatcttgcccctcatcatgtacttacctgaatctcctagatggttactaaaagccggtaaattggatgaagctgctaaagttttctctgctcttgatgacatcccagttaatgatcctactattgtctacgaagttcgagaaattgaaaactctttacaaaaggaaagacatgaaggtgaacaaaaatccaaccttcttcttttatttgctcagggtgataccaagaatttccacagaacttgcttggccgtctggtcgcaaattatgcaacaaattactggtattaatttaatcacctactatgcgggtactgtattcgaaaaatatattggtttaaatcctttgaacgcgagaatcctagccgcctgtaacggtactgaatatttcatggtttcttgggttgcattctacacgattgaaagagttggcagaagaaaattgatgttatttggggctgctggtcaagctatgtctatggctgtcttgaccggtgccacctgggctgctagtccagaacacaatgacagtggtgctgcagctattgttgctgctgtcttcttattcgttttcaacagtttcttcgctatcggttggttaggaatgacctggttatacccagctgaaattaccccattaaacatcagagctgcttctaatgggttaagtacagctgcaaattggtctttcaattttatggtagttatgatcaccccagttgctttcgaaagtattgattcctacacttatactattttcgcagtaatcaatctcttaatgattccagtcgtttatttcttctatccagaaacagctggtaggtcgttagaggaaatggataacgtcttcgaactatccaatccttacactccttgggatgttgtaaaaatcgctagagagctaccttacgagagccaaactcgtgatcgtgatattgaaaaggttaatattcagcatatcggatga

SEQ ID NO: 292 - protein, 552 aa, Debaryomyces hansenii
MSTVSPEKSISSKIQPLDSKNEKHYVQDHIIQIEDSKTYTYLGFKGQTLHNMISFLAGMGFLLFGYDQGVMGSLLTLPAFRNTFESIDTIKYPEHATFQGFVIAVYEIGCLAGAVSTMYLGDMLGRRKTILIGCCIMIVGAVIQCSSFSVGQLIAGRIITGIGNGMNTSTVPIWQSECAKSEKRGKLVMIQGALITGGICISYWIDFGFFFIKNSSVSWRFPIGFQIFFPLFILPLIMYLPESPRWLLKAGKLDEAAKVFSALDDIPVNDPTIVYEVREIENSLQKERHEGEQKSNLLLLFAQGDTKNFHRTCLAVWSQIMQQITGINLITYYAGTVFEKYIGLNPLNARILAACNGTEYFMVSWVAFYTIERVGRRKLMLFGAAGQAMSMAVLTGATWAASPEHNDSGAAAIVAAVFLFVFNSFFAIGWLGMTWLYPAEITPLNIRAASNGLSTAANWSFNFMVVMITPVAFESIDSYTYTIFAVINLLMIPVVYFFYPETAGRSLEEMDNVFELSNPYTPWDVVKIARELPYESQTRDRDIEKVNIQHIG

SEQ ID NO: 293 - DNA, 1623 bp, Yarrowia lipolytica
  CDS (1)..(1623)
atgtcgctggacaaaaaccgccagatcacgacctctgagtcgtcgtctggaagcagtgccgatgaagggacccatatcatgagaggcctgaccagtactagtactcaggacgagaccactggttccatttcggaaggcaacctagaagccgagaaaatctcgccgtttgtgtttgtgctggttgccctggcctccatttccggattcctgtttggatacgacacgggctatgtttctggagctctggtggtcatcaaggaggatcttggacgtgccctttccaacggagataaggagctgattactgcttccacgtccctgggagctctccttggaggagttattgccggagccatgtgcgacttctttggccgaaagtgggttatcacctttgccaatattctgtttctggttggagctgccattcagtgtggagctcacgccgtgtggaccatgatcggaggccgattcgtcatgggatggggcgtgggtattgcatctctatgtgctcctctgtacatttccgagctggcccccactcgaatccgaggtcgtcttgtcgttctcaacgtcctggctatcaccggaggacagcttgtggcctacggaattggtgctggcatggcccacgtgcaccaaggatggagaattctagttggtctgtctatggtgcctgcctttgtgcaaatggtcatctttgtgttcatgcccgagactcctcgatatcttgttcgaaagaataagattgctgaggccaagaaggtgctggccaagacatatgccaccgatgacgacaaccttctcgaccgaaagctccacgaactcatgctccacaacgcatacaaggagtccggcctgtccactatggcgcgagctcgaaacactatgaaggaactttattgcgtacccagcaacttgcgagccctcataattgcttgtggactgcagggaatccagcagttttgtggtttcaactcgctcatgtacttttctgctaccatttttgaggtggtgggctttgataacgccacagccgtctccatcatcgttgctggaacgaactttgtcttcaccattgtcgcctttatggtcattgaccgtattggacgacgccgaattctcctgggaaccatctggggcatgtctctgggactcgttgtcaacgccattgctttccacttccttgacaagcagaaggaaaagaaccccaaccatgagctcgataaggaacacatttccggatgggcatacgtggtcctcgttgctcagctcgtctacgtcgccttctacgccactggtatcggtaatgtgccatggcagcagtcggagctgttccccatctccgtccgaggtgttggaactggcatggccactgccaccaactgggcaggatcgctcattgtgtcctccactttcctgaccatgttggaaaatatcacccccactggaacattttccttctacgccggtctctgtgctctcggagaagtgtttgtcttcttcctgtatcccgagacttccggcatggatctggagcagattcaacagctgctgacgggaggtttcaacatcaaggagagtatgcggctgtctgatgaggccaagagaggctacaagaagtag

SEQ ID NO: 294 - protein, 540 aa, Yarrowia lipolytica
MSLDKNRQITTSESSSGSSADEGTHIMRGLTSTSTQDETTGSISEGNLEAEKISPFVFVLVALASISGFLFGYDTGYVSGALVVIKEDLGRALSNGDKELITASTSLGALLGGVIAGAMCDFFGRKWVITFANILFLVGAAIQCGAHAVWTMIGGRFVMGWGVGIASLCAPLYISELAPTRIRGRLVVLNVLAITGGQLVAYGIGAGMAHVHQGWRILVGLSMVPAFVQMVIFVFMPETPRYLVRKNKIAEAKKVLAKTYATDDDNLLDRKLHELMLHNAYKESGLSTMARARNTMKELYCVPSNLRALIIACGLQGIQQFCGFNSLMYFSATIFEVVGFDNATAVSIIVAGTNFVFTIVAFMVIDRIGRRRILLGTIWGMSLGLVVNAIAFHFLDKQKEKNPNHELDKEHISGWAYVVLVAQLVYVAFYATGIGNVPWQQSELFPISVRGVGTGMATATNWAGSLIVSSTFLTMLENITPTGTFSFYAGLCALGEVFVFFLYPETSGMDLEQIQQLLTGGFNIKESMRLSDEAKRGYKK

SEQ ID NO: 295 - DNA, 1602 bp, Yarrowia lipolytica
  CDS (1)..(1602)
atgtccactagtgctatgaccgacgattatcccatggctgaggtctccattactgaggagaccaagatgcctgagcctgccaagaaatcgcagcttcttgtcattctgctctgtctctttgccgccatgggcggttttgtctttggctatgacactggtaccatttctggcttcatcaacatggaccctttcctagagagctttggagaagccgatgagtctggcgttttctttctatcccgaatccgagctgggctcattgttggactcttttccattggtgctttccttggcacccttcttggtggcttccttgctgacaaggttggtcgaaagaagggaattgtctatgtcgccatggtctacattgttggtatgcttatccagatcacagccttcacagcctggtaccagattgccattggtcgtgtcatcggtggtgttggtattggtgcactctctgtgctggtccccatgttccagtcagagactgctccccagaatcttcgaggcgctcttgtctcttctttccagctgtttattactctcggcatcttcattggatttagtgtttgctacgctaccaagtcgcggctcgataccggtgcctaccgaatccccatgggtctttgcttcgcctgggcttttatccttctcattggcatgtgcttcatgccagagtcccctcgattcctggtttcaattggccgcattgaggaggcccgaaaggctatggccatgacaaaccaggttcctctccacgacgctgtcattgatgaggaactcaaggctattgagaactctgtcattagggaaaagagtgctggtaaggccacatggaaagaacttttcactggcgagccccgaatgggctaccggcttacccttggtattctcgtccaggttctccagcagctctgtggtgccaactactttttctattacggaacttctatcttcaaggccattggaatgtcggattctttcgctacttcgatgatctttggcggaatcaacctcctgtctacctttggaggtctctacattgttgatcgattcggtcgacgaaagtgccttcttggtggagccatggtcatgtttgtctgtttcctcgtctattctactgtcgggttcgctgctctttatcccaacggtgataccacccttcccgccagaaaggctgttggtgatgtcatgattctgttcacctgtatcttcatcgccgctttcgcctctacgtgggcccctattgccttcgtcgttgtttctgagaccttccctctcagaatgcgatcaaagggaatggctgttgctactggaggaaactggatgatcaacttcctcgtttctttcctgactcccttcatcaccagttccattgggttcaagtacggttatgtcttcactgcttgcattggtttcgccattatctttgtcttcttcttcatccctgagaccaagggtctgtcccttgaggatgttgacgagctgtacgcttcaggtgtcagtgctcgaaactcccccaactgggttccttcttccaagaagcaggaagtcaacgaacctaagaacagtatgaccgacttctccgagtcctcttag

SEQ ID NO: 296 - protein, 533 aa, Yarrowia lipolytica
MSTSAMTDDYPMAEVSITEETKMPEPAKKSQLLVILLCLFAAMGGFVFGYDTGTISGFINMDPFLESFGEADESGVFFLSRIRAGLIVGLFSIGAFLGTLLGGFLADKVGRKKGIVYVAMVYIVGMLIQITAFTAWYQIAIGRVIGGVGIGALSVLVPMFQSETAPQNLRGALVSSFQLFITLGIFIGFSVCYATKSRLDTGAYRIPMGLCFAWAFILLIGMCFMPESPRFLVSIGRIEEARKAMAMTNQVPLHDAVIDEELKAIENSVIREKSAGKATWKELFTGEPRMGYRLTLGILVQVLQQLCGANYFFYYGTSIFKAIGMSDSFATSMIFGGINLLSTFGGLYIVDRFGRRKCLLGGAMVMFVCFLVYSTVGFAALYPNGDTTLPARKAVGDVMILFTCIFIAAFASTWAPIAFVVVSETFPLRMRSKGMAVATGGNWMINFLVSFLTPFITSSIGFKYGYVFTACIGFAIIFVFFFIPETKGLSLEDVDELYASGVSARNSPNWVPSSKKQEVNEPKNSMTDFSESS

SEQ ID NO: 297 - DNA, 1701 bp, Yarrowia lipolytica
  CDS (1)..(1701)
atgtccgggcagacatatatagagggatggcctggagttgagccagtcctttttcttctttctctatcgactctgtcactctctcctccagccatgttttggatttcaatgaaaaacgagcccaagcaggtgctcaacagaaccctgtggttcgccatcttcgtctttggtcttctgggaacctcccgaggtctcgacgagggaaacatttccggtaccgttgcccagccatctttcatctccaaattcaagctccatgaccccagtctatccaaggacgcccaggctaacttgctgtccaacatcaccagtatggtccagattggctctgttgccggagctcttatcgctatgctcattgtcgatcgtatcggccgactgtgggctctcagagaaatgcttgtcatctggattgtcggtgtcatcgtccagattacctccaacaatgtcggtcaactgtacgctggtcgttttgttgccggcatgggtatcggtcagtctgttgtcattggtcccacctacctggctgagattgctcctcctcatgtcagaggtctggcaacctgtgtcttctctggttccgtctatctgggagtcatgctgtcgtactttgccaactatggtaccactctgcacatctcaaacacctcccggaaccagtgggtcatccccaccactctgcagatcatcttctctggtatcatgctgattggctctatctttgtccacgagtctcctcgatggctcatgaagatcggcaaggaagaagaggccgttgaaactctgtgcaagatccgtaagcttcccgccgacgatctctacgtccagggcgagattctcatggtgcgagagcagattgagcgagaaaagcaggctatgaccggcgcctcatactggtcgctgttcaaggagctgctggctacccctgccaaccggtaccgactcttccttggtctcatgatccagattctgggccagtggtccggagccaatgccattaccatctatgctccttccttcttccagatgatcggtgtcagcggccagcagcagaagatgttcgccacggccattcttggagtcgtcaagttcgccgcctccattatttgcgccgtcttcctaatcgataccattggcagacgacgatctctctactcgggtatcactctgcagttcatctccattctgtatgtggccatctacctggctgtggtgcccaacaacgacccctcgcggatcaagtctgctgccgagcgacatgccggagtcggcgccattgccttcatctacctctcgggtgtgggctgggctctcggttggaactccatccagtacctcatcaacgccgagatctacactgttcggcacagatctctggcgtccggtctcatcatgacggtccatttcgccaaccagtacggcaactccaaggctctgccttccatgcgactgggaatgaccgacactggagccatgttcttcttctccgggatcattctcgtcggtctggtgtggtcctggttcttcctgcccgaggtctcgggccggtctctcgagtccatcgacgaaatgttctcgctgccttggtatctcattggaagacggggccaccagatggtgcccgagacttcagctgctgtgcagattgccgccgacgaggatgagaagaagggcggggtggtccatgtggagaactgctag

SEQ ID NO: 298 - protein, 566 aa, Yarrowia lipolytica
MSGQTYIEGWPGVEPVLFLLSLSTLSLSPPAMFWISMKNEPKQVLNRTLWFAIFVFGLLGTSRGLDEGNISGTVAQPSFISKFKLHDPSLSKDAQANLLSNITSMVQIGSVAGALIAMLIVDRIGRLWALREMLVIWIVGVIVQITSNNVGQLYAGRFVAGMGIGQSVVIGPTYLAEIAPPHVRGLATCVFSGSVYLGVMLSYFANYGTTLHISNTSRNQWVIPTTLQIIFSGIMLIGSIFVHESPRWLMKIGKEEEAVETLCKIRKLPADDLYVQGEILMVREQIEREKQAMTGASYWSLFKELLATPANRYRLFLGLMIQILGQWSGANAITIYAPSFFQMIGVSGQQQKMFATAILGVVKFAASIICAVFLIDTIGRRRSLYSGITLQFISILYVAIYLAVVPNNDPSRIKSAAERHAGVGAIAFIYLSGVGWALGWNSIQYLINAEIYTVRHRSLASGLIMTVHFANQYGNSKALPSMRLGMTDTGAMFFFSGIILVGLVWSWFFLPEVSGRSLESIDEMFSLPWYLIGRRGHQMVPETSAAVQIAADEDEKKGGVVHVENC

SEQ ID NO: 299 - DNA, 1779 bp, Yarrowia lipolytica
  CDS (1)..(1779)
atgggacgaaactggctagcgttttcacaagcctccactgaggtcaagaccgagtttctgggtcttcgaggccagaagctccaccgagccgtggccttcattgccggtatgggtttcctgctgttcggatacgaccagggagtcatgggtggtctgctgaccctcccccggttcatccaccagttccccaagatggacacctccgactacgttcctgaggagacccgaaagttcaacaccaccatccagggtgtgtctgtcggtatttacgagattggatgtatgatcggcgctctgttcaccatgtgggccggagacaaactcggtcgacgacgtatgattttctggggctctatcatcatgactattggtgccattctgcagtgtgcttcttactctcttggtcagttcattaccggtcgagttgtttctggtgttggtaacggttttatcaccgccactgttcccatgttccagtccgagtgtgccaagcctgagcgacgaggagctctcgtcatgatggagggtgcccttatcaccggtggtattgccctctcttactggatcgattttggcttctactgggtcaacaacgatgccgactggcgattccctattgctttccagatcatcttctccatgttcctcaccttcaccgtcatgtctcttcccgaatctccccgatggcttgtcaagaagcaacgattcgacgaggctgctggtgtcttctctgctctcgaggatgtgcctattgatgacccttacgtgattgaccagatcgccgaggtcaaggagtccatcatgatggagcagcttgcccagcttggtgttgacggatccgaggctcgagagaagattgcctctggagagttccagatgggtgctgagctgcccttcttggaacagatgaagctgctcttcacctttggcaagaagaagaacttccaccgaaccatgctggcctactggaaccaggtcatgcagcagattaccggtatcaacctgattacctactacgccgcctacatttacgagacatctgttggtatgaacgccaccaactcgcgaattctcgctgcctgtaacggtactgagtacttcctcgcctcctgggttgccttctacaccattgagcgattcggaagacgaaagctcatgttgttcggagccattggtcaggcttgcaccatggctattcttactggaactgtctacgccgcttctcctcccgaggacggtggacttgacaactctggcgctggtattgcagctgccgtcttcctcttcgtctttaacaccttcttcgccattggctggctcggaatgacctggctgtaccctgccgagatcacctctctggagatccgagcccccgccaacggtctgtccacctccggtaactgggtcttcaacttcatggtcgtcatgatcacccccgttgccttcgatacaatcaagtggaagacttacatcattttcgcctgcatcaacgccgccatggtccccgtggtctacttcttctaccccgagaccgctggacgatctctcgaggagattgacaagatcttcgccgagtccaacccccgaactccctgggatgttgttggcattgcccgacgaatgccccgagagtctgctcttacccgacgaaagcagggtgtcaaccagaccttcgacaactccaacgagaaggctgtggtcgaggagaacaccgagtccgctgttggctccaccaccggctctgcctctccttcttttgagaacgtttctcaagcttaa

SEQ ID NO: 300 - protein, 592 aa, Yarrowia lipolytica
MGRNWLAFSQASTEVKTEFLGLRGQKLHRAVAFIAGMGFLLFGYDQGVMGGLLTLPRFIHQFPKMDTSDYVPEETRKFNTTIQGVSVGIYEIGCMIGALFTMWAGDKLGRRRMIFWGSIIMTIGAILQCASYSLGQFITGRVVSGVGNGFITATVPMFQSECAKPERRGALVMMEGALITGGIALSYWIDFGFYWVNNDADWRFPIAFQIIFSMFLTFTVMSLPESPRWLVKKQRFDEAAGVFSALEDVPIDDPYVIDQIAEVKESIMMEQLAQLGVDGSEAREKIASGEFQMGAELPFLEQMKLLFTFGKKKNFHRTMLAYWNQVMQQITGINLITYYAAYIYETSVGMNATNSRILAACNGTEYFLASWVAFYTIERFGRRKLMLFGAIGQACTMAILTGTVYAASPPEDGGLDNSGAGIAAAVFLFVFNTFFAIGWLGMTWLYPAEITSLEIRAPANGLSTSGNWVFNFMVVMITPVAFDTIKWKTYIIFACINAAMVPVVYFFYPETAGRSLEEIDKIFAESNPRTPWDVVGIARRMPRESALTRRKQGVNQTFDNSNEKAVVEENTESAVGSTTGSASPSFENVSQA

SEQ ID NO: 301 - DNA, 1620 bp, Yarrowia lipolytica
  CDS (1)..(1620)
atgttctggaaaaacatgaagaatgagcctaaacaggtcctcaattggactctgtggctctcagtcctagtctttggcctgcttggttcagcccgaggccttgatgaaggaaacatctcaggtacatcccaccaggtctccttcgagaaccaattcgggctcagagaccccaacaagaccgaaaaagaaatcgcagatgccctctccaacatcactgccatggtccaactgggctctgtgggaggttccattatcgccatgttcgcccaagacaagattggacgagtccgatgtttgcaacagatgctaattgtgtggatcgtcggtgttgttatccaagtcacctctcacggccaaggtcaactcctggctggtcgattcattgctggtctaggaatcggtcagtccgtcgttattggtcccacatatcttgctgaggtgtctcccaagaatgttcgaggtctctgcacatgtgtcttttcgggctcagtctatctgggtatcatgttggaatactttgccaactattccacaacactgaacgtctctgacgagagcagaatgcagtgggtactccctaccagtgtccagttcatctttgctggtctccttttcattggatcattcttcatttacgagtctccaagatggctcatgaagattggccaggaggaaaaggcaatggaaactctgtccaagatcagacatcttcccattgacgacgtttacatccaaggagagatccttgatgtccgagaacaggtcgagcgagaaaagcaggccctatctggtactagcatcttttctattttgaaggaacttgttgctactcaggccaatcgatacagacttttcattggcatcatggtccaactacttggccagtggtcaggagccaacgcagtcaccatctactcgccccagttctttgccatgctcggtgtcactctccgaactgatcgaatgatgtacactgccattctaggtattatcaagtttgctgcttccgttgtctgtgctgtcttcctcattgataccatcggccgacgacgatctctctacaccggcgtctgtctccagttcatctccatgctgtatcttggtatctatctgtctattgttcctgctagctctggggctgttgaggacagaactgcttcccagagacatgctggaggaggtgccatcgctgccatctacctgtcaggttgcgggtgggctctcggctggaactccatccagtacctcatcaacgctgaaatctacactgttcgacaccgatcacttgcctgcggtatcatcatggtattccactttgtcaaccagtatggtaactccaaggcactcccctacatgcgaaagtctctgactgaccatggaaccatgttcttcttctctggtgtgattctcatcggtctggcctggtcatggttcttccttcccgaggtctccggaagatctctggaatctatcgacgagatgttctctctaccttggtatctcattggacgacgaggagccaagcttgtgcccgaaacaagcaccactacccagctgcaggaagacgacgatctggccaaggagaagaagggagccactgttcacgtggagacctgttag

SEQ ID NO: 302 - protein, 539 aa, Yarrowia lipolytica
MFWKNMKNEPKQVLNWTLWLSVLVFGLLGSARGLDEGNISGTSHQVSFENQFGLRDPNKTEKEIADALSNITAMVQLGSVGGSIIAMFAQDKIGRVRCLQQMLIVWIVGVVIQVTSHGQGQLLAGRFIAGLGIGQSVVIGPTYLAEVSPKNVRGLCTCVFSGSVYLGIMLEYFANYSTTLNVSDESRMQWVLPTSVQFIFAGLLFIGSFFIYESPRWLMKIGQEEKAMETLSKIRHLPIDDVYIQGEILDVREQVEREKQALSGTSIFSILKELVATQANRYRLFIGIMVQLLGQWSGANAVTIYSPQFFAMLGVTLRTDRMMYTAILGIIKFAASVVCAVFLIDTIGRRRSLYTGVCLQFISMLYLGIYLSIVPASSGAVEDRTASQRHAGGGAIAAIYLSGCGWALGWNSIQYLINAEIYTVRHRSLACGIIMVFHFVNQYGNSKALPYMRKSLTDHGTMFFFSGVILIGLAWSWFFLPEVSGRSLESIDEMFSLPWYLIGRRGAKLVPETSTTTQLQEDDDLAKEKKGATVHVETC

SEQ ID NO: 303 - DNA, 1737 bp, Yarrowia lipolytica
  CDS (1)..(1737)
atgaagctacaagtacccgcgtttgcgcggtcgtcttctgacgtgaaaacgtcattcatgggagcccggggccagaaactgcacaatctcgtggcagcaattgcaggattgggattcttgctgtttggatacgaccagggagttatgggcggtcttctaactctcgacacgttcatccaacagtttcccaaaatggacacctccgactacctgcctccaaaggtcaagaccttcaacaccaccattcaaggcacagccgtgggcatctacgaaatcggatgcatgattggagctctgttcaccatgtgggctggagacaagcttggaagacgctacatgatcttctttggctccatcatcatgacgattggagcgattctgcaatgtgcttcctactctctgggacagttcattgccggaagagtcatttctggaattggaaacggcttcatcacagccacagtccccatgctccagtcggaatgcgccaaacccgaacgtcgaggaaagttggtcatgctggagggagctctcatcaccgctggaattgctctttcgtattggatcgactttggcttctattgggtgcggaccaacgacgccgactggcgtttccctatcgccttccagattgtcttctctctggttctcaccttcaccatcatgtctcttcccgagtctccccgatggctcgtgaagaaacagagattcgaagaagcggcaggagtttttgctgctctcgaggatgtgcctctggacgacccctacgtgattaaccagatcacctccgtcaaagaatcgatcatgatggagcagctggcccagttgggtgtcgatggtgtcgatgctcggcggaaaatccagtcgggcgagttccaaatgggccaggagctgtctttcatcggtcaaatgaaactcatgttcacctttggcaaaaagaaaaacttccaccgaacaatgctggcctactggaaccaggtgatgcagcaggtgaccggcatcaacctcatcacctactacgcagcttacatttaccaaaccagcgtgggaatgaatgccacagactcgcgaattctggccgcctgcaacggaacagagtactttatggcttcctgggtcgccttctacacaattgagcgatttggacgccgaaaactcatgctgtttggagccgtaggccaagcatgcactatggccattctcaccggatgtgtttacgcagcttcaaagcccgaagatggaggcttggacatgcagggggcgggaatcgctgcggccgtctttctgtttgtgttcaacactttcttcgccattggctggctcggtatgacctggctctaccctgcggaaatctcgtctttggagatcagagctccggcaaacggtctttccacctcgggcaactgggccttcaacttcatggtggtaatgatcacccccgtggctttcaactccatcaagtggaagacgtatatcatttttgcctgcatcaacgccttcatggtccccatggtgtactttttctaccccgagaccgccggacgaagcttggaagagattgatatgatctttgccgagtccaaccctcgaactccctgggacgtggttggtattgccaaccgtctgcccaagaactccgtggcaacttatgatgactacgaggctggtgaacaggaggagaaggccattgttgagacagcggaaagtgtctctcatgattcggccgagtttcagtga

SEQ ID NO: 304 - protein, 578 aa, Yarrowia lipolytica
MKLQVPAFARSSSDVKTSFMGARGQKLHNLVAAIAGLGFLLFGYDQGVMGGLLTLDTFIQQFPKMDTSDYLPPKVKTFNTTIQGTAVGIYEIGCMIGALFTMWAGDKLGRRYMIFFGSIIMTIGAILQCASYSLGQFIAGRVISGIGNGFITATVPMLQSECAKPERRGKLVMLEGALITAGIALSYWIDFGFYWVRTNDADWRFPIAFQIVFSLVLTFTIMSLPESPRWLVKKQRFEEAAGVFAALEDVPLDDPYVINQITSVKESIMMEQLAQLGVDGVDARRKIQSGEFQMGQELSFIGQMKLMFTFGKKKNFHRTMLAYWNQVMQQVTGINLITYYAAYIYQTSVGMNATDSRILAACNGTEYFMASWVAFYTIERFGRRKLMLFGAVGQACTMAILTGCVYAASKPEDGGLDMQGAGIAAAVFLFVFNTFFAIGWLGMTWLYPAEISSLEIRAPANGLSTSGNWAFNFMVVMITPVAFNSIKWKTYIIFACINAFMVPMVYFFYPETAGRSLEEIDMIFAESNPRTPWDVVGIANRLPKNSVATYDDYEAGEQEEKAIVETAESVSHDSAEFQ

SEQ ID NO: 305 - DNA, 1548 bp, Yarrowia lipolytica
  CDS (1)..(1548)
atgggactcgctaacatcatcaaccgtggagaaaagcccgagggctcggccttcatggcggcctttgtggccgtgtttgtcgcgtttggaggtattctgtttggatacgacactggaaccatttccggcgtcatggccatgccattcgtcaagaagacctttacagatgacggcctggagttcacttctgagcagacctcgctcatcacttccattctttctgcaggcaccttcactggagccatttctgctccctgggcctctgatactctgggaagacgactgggtctgatcctcttctgtgtcgtcttctctgttggcgctattcttcagactgctgccaccggccgaacgcttttgattgtcggacgagttgttgctggtcttggtgttggtggagtctcttccatcgttcctctttaccagtctgaggttgcccccaagtggatccgaggtgccgttgtctccatctaccagtttgccatcaccattggtcttctgctggctgccattgtcaacaacgcaaccaaaaacaaagacaacagtgcttcctaccgaattcctctcggccttcagcttctgtgggccgtcatcctgagtggaggtctcatcctgctaccggagactcctcgattctggatcaagaagggcgagtacgacaaggccgccgattccctgcgacgactacgacgacttcctgttgagcacgaggctgtacagaaggagctcctggagatccaatcttctcacgaccacgagatgcagatcggtagcgccacctgggccgcctgcttctcccccaaggggtcccagctgaagcgaatgctgaccggtattgccattcaggccctgcagcagctcaccggtatcaacttcatcttctactacggaaccgagttcttcaagaagtccaacatctccaaccccttcctcatccagatgatcaccaacattgtcaacgtggttatgaccatccccggtatcatgtttgttgatcgagtcggacgacgaaagctgctgttgatcggagctatcgtcatgtgctcttccgagtttatcgtggcggctgttggtactgccattgataacgagacctcctcaaaggttctgattgccttcacttgtaccttcattgccggtttcgccgccacctggggtcctattgcctgggttgtcattggagagattttccctctacgaatccgagccaagggtgttgctctatgcgccgcctccaactggcttttcaactttgccattgcctttgcaaccccctacctcgtcgacgaggcccctggatcggccggtctcaagaccaaggtcttcttcatctggggaggctgcaacttcctgtgcatcgccttcacttacttcttcatctacgagaccaagggtcttactctggaggaggtggaccagatgtacgccgagatcaagattgcttctcgatcccaccagtttgtgcctaccactcgagtcgctgcttacgacgagcacgcttctgacgacaagaaggacggacagcacgtctacattgagtctgtctag

SEQ ID NO: 306 - protein, 515 aa, Yarrowia lipolytica
MGLANIINRGEKPEGSAFMAAFVAVFVAFGGILFGYDTGTISGVMAMPFVKKTFTDDGLEFTSEQTSLITSILSAGTFTGAISAPWASDTLGRRLGLILFCVVFSVGAILQTAATGRTLLIVGRVVAGLGVGGVSSIVPLYQSEVAPKWIRGAVVSIYQFAITIGLLLAAIVNNATKNKDNSASYRIPLGLQLLWAVILSGGLILLPETPRFWIKKGEYDKAADSLRRLRRLPVEHEAVQKELLEIQSSHDHEMQIGSATWAACFSPKGSQLKRMLTGIAIQALQQLTGINFIFYYGTEFFKKSNISNPFLIQMITNIVNVVMTIPGIMFVDRVGRRKLLLIGAIVMCSSEFIVAAVGTAIDNETSSKVLIAFTCTFIAGFAATWGPIAWVVIGEIFPLRIRAKGVALCAASNWLFNFAIAFATPYLVDEAPGSAGLKTKVFFIWGGCNFLCIAFTYFFIYETKGLTLEEVDQMYAEIKIASRSHQFVPTTRVAAYDEHASDDKKDGQHVYIESV

SEQ ID NO: 307 - DNA, 1698 bp, Yarrowia lipolytica
  CDS (1)..(1698)
atgggcttcagaggccaaagactccatcactatgttgcgactgtcgcaggcatgggttttctactctttggatacgaccagggagtcatgggaggtcttcttactcttccctcctttgtcaagcagttccccaagatggacacttctgactatctaccgccggatgtcaagtccttcaacaccaccatccaaggcacagcaattgccatctacgagatcgggtgcatgatgggggctctattcaccatgtggggaggagacaaggtcggtagacggtacatcatcttctacggatcaatcatcatgaccattggagccgttctacaatgtgcctcatactctttgggcatgttcattacaggccgtgtcgtctcgggtgtcggtaacggattcatcaccgcaacagtccccatgctccagtctgagtgtgcgaaaccagagaaacgaggcaaactcgtcatgttggaaggagctcttatcaccgccggtatcgctctttcatactggatcgatttcggcttctattgggtcaaggccaacgacgctgactggcggttccctgtcgcattccaaattgtcttctgtctctttctcttcttcaccgttcttactatccccgaatctccaaggtggttggtcaaaaaggggcgattcgaagaagcagccggagtctttgctgccctcgaagatgtggacattgaagacccctacgttgtcacccagatcacatacgtcaaagaatccatcatgctggaacaattggctcagttgggtattgatggacctgctgctcgtgagaagattgcagcaggcgagttttcaatgggtgaggaactgcccttcctgtcccagatgaaactcatgttcacctttggcaagaagaagaatttccaccgaaccatgctggcctactggagtcaggtcatgcaacaaatcacaggtatcaatctcatcacatactatgcggcgtacatctatgagacgtctgtcggcatgacccctactaattctcgaattctcgctgcttgtaacggtaccgaatacttcctagcctcttggatcgccttctacaccatcgagcggttcggacgtcgaaaactcatgattttcggagctgctggtcaggcagctactatggctattctcacaggatgtgtctacgctgcatcttcaccggcagacggaggactcgacaatcagagcgccggtgttgctgctgccgtcttccttttcgtcttcaacaccttctttgccattggttggctgggcatgtcgtggctgtatcctgccgagatcagttccttggagattcgagctcccgccaacggcctttccacctctggaaactgggtcttcaacttcatggtcgtcatgatcacccccgtggccttcgacactatcaagtggaagacctacatcatctttgccgtcatcaacgcagccatggttccagtcgtctacttcttctatcccgagactgccggtcggtctctggaagagattgaccagatctttgccgactccaaccccaagacaccctgggacgttgtctggatcgccagacggctccctaagagcactgctgtcgaccacaacctcgttgagcctcgaatcttgctcgaagagaagactgcccttgagacggtcgagtctgtttcccccactccttctgatcaagaggaaaccagacatgtttaa

SEQ ID NO: 308 - protein, 565 aa, Yarrowia lipolytica
MGFRGQRLHHYVATVAGMGFLLFGYDQGVMGGLLTLPSFVKQFPKMDTSDYLPPDVKSFNTTIQGTAIAIYEIGCMMGALFTMWGGDKVGRRYIIFYGSIIMTIGAVLQCASYSLGMFITGRVVSGVGNGFITATVPMLQSECAKPEKRGKLVMLEGALITAGIALSYWIDFGFYWVKANDADWRFPVAFQIVFCLFLFFTVLTIPESPRWLVKKGRFEEAAGVFAALEDVDIEDPYVVTQITYVKESIMLEQLAQLGIDGPAAREKIAAGEFSMGEELPFLSQMKLMFTFGKKKNFHRTMLAYWSQVMQQITGINLITYYAAYIYETSVGMTPTNSRILAACNGTEYFLASWIAFYTIERFGRRKLMIFGAAGQAATMAILTGCVYAASSPADGGLDNQSAGVAAAVFLFVFNTFFAIGWLGMSWLYPAEISSLEIRAPANGLSTSGNWVFNFMVVMITPVAFDTIKWKTYIIFAVINAAMVPVVYFFYPETAGRSLEEIDQIFADSNPKTPWDVVWIARRLPKSTAVDHNLVEPRILLEEKTALETVESVSPTPSDQEETRHV

SEQ ID NO: 309 - DNA, 1665 bp, Yarrowia lipolytica
  CDS (1)..(1665)
atgtacaaggtccataacccctacctcacggcggcggtagccaccatgggcggaatgctctttggtttcgatatctcgtccgtgtcggcctttgtgggcgaagataactacatgaactactttggtcatcccacctccttccagcagggaggtatcaccgcctccatggccggaggatccatgctgtcgtgtgcgtttgccggctacatttccgaccgggttggccgaaagcccaccattcaatttgccgccgcctggtggatggttggcgcctccattcaatgctctgcccagaatatgggccaactgattgccggccgggccatttccgggcttggaatcggcctcggctcgtcccagatccccgtcttcatctccgagttgtcccccaagaagatccgaggccggctcgtcggctgcttccaatggtccgttacctggggtattctcatcatgttctacatttcgttcggctgctcatacatcaagggccactcgtccttccgactggcgtggggcatccagctgattccaggagccatgttggcgttcggaatgatgctgctggacgaatcgccgcgatggctggcgtccaaagaccgctgggaagaggccatccagatcatccgctccatcaatgccaactacggatccgaggaggacattctcatggaaatcgaagatctgcgagaggtggtgcgaatcgaccacgagtccaagtcggtcaccatctgggacctgttccgaaaagactccatcaaccgaaccatggtcggagtgtgggcccagatctggcaacaactgactggaatgaacatcatgatgtactacgtggtcatcatcttcaaaatggccggctactcgggcaaaagtgccgtcattgtctccggctccatccagtacatcatcaacgtggtcatgaccatcccggcgctgcttttcattgataaaatcggacgaagacccctgctcctctgtggaagcatgctcatggccacctggctgctagctgtcggaggaatgctaggagcctacggaatccaaatgccccaaggtctaccggcagtaccctccaaaaaccaggcagcggacccctacaccaccatctacattcccgacaaccaggcgccggcccgaaaggccattatcgcctgttgctatctgtttgtcgcctcttttgcacccacctggggccccggcatctggctctactgctccgagatcttccccaacaaacaacgagcgctggccaactcgctgaccgccggcgccaactggggcttcaactttgccctggccctgtttgtgcccaccgccttcaagaacatcaactggaaggtgtacatcatcttcggtgtcttctgcatcgtcatgtccatccacgtcttcctgctcttccccgaaaccaagggcaagagtctggaggtgattgaccagatgtgggacgcccgcgtgcccgcttggaaaaccgcctcctgggtccccgaccacatgccttctcattacgcaggggaccaggaggaaaagcccaccgacgaactggccgaggcgccgtttcacgaggagaatgccccggtgaacaccgagacccctcctcatgaggatgagcccacttttgcggagaccgagcccaagacccagtatcctggaactgagcatgtctaa

SEQ ID NO: 310 - protein, 554 aa, Yarrowia lipolytica
MYKVHNPYLTAAVATMGGMLFGFDISSVSAFVGEDNYMNYFGHPTSFQQGGITASMAGGSMLSCAFAGYISDRVGRKPTIQFAAAWWMVGASIQCSAQNMGQLIAGRAISGLGIGLGSSQIPVFISELSPKKIRGRLVGCFQWSVTWGILIMFYISFGCSYIKGHSSFRLAWGIQLIPGAMLAFGMMLLDESPRWLASKDRWEEAIQIIRSINANYGSEEDILMEIEDLREVVRIDHESKSVTIWDLFRKDSINRTMVGVWAQIWQQLTGMNIMMYYVVIIFKMAGYSGKSAVIVSGSIQYIINVVMTIPALLFIDKIGRRPLLLCGSMLMATWLLAVGGMLGAYGIQMPQGLPAVPSKNQAADPYTTIYIPDNQAPARKAIIACCYLFVASFAPTWGPGIWLYCSEIFPNKQRALANSLTAGANWGFNFALALFVPTAFKNINWKVYIIFGVFCIVMSIHVFLLFPETKGKSLEVIDQMWDARVPAWKTASWVPDHMPSHYAGDQEEKPTDELAEAPFHEENAPVNTETPPHEDEPTFAETEPKTQYPGTEHV

SEQ ID NO: 311 - DNA, 1740 bp, Yarrowia lipolytica
  CDS (1)..(1740)
atgtcgcaccggccctgggattgcctaccgctatggaacaccgtggtcgttttccgaagatgtgtgctttggagcctggtcatgtgttttgtaattgtgatggacggctatgacggttttctgattccgtccttctacgcggtgccgtcattccagcgcagatacggagtacagctgccggacgggtcgtggacggtcgaggccaagtggcagacggcctacatggttggagcaccgatagggcggatagctggggctttgggggttggggttttggccgaccggttcgggaggaagcgggttactctggtgggtcttttttgcctgtcggggatcaccttcattgtcttttttgcggtcggcaaggccatgttggtggtgggctggtttttgtcgggattgatctggggaatcttcaacaccatgacgccgacctacgtgtctgaaatctgtccggtttcgcttcggagcacgtttgcagcggccattaatctctcctgggtcgtcggacaattcatttccaccgctgtgatcaccgcctcggagtcccgacaggacgaatgggcttatagagtacctctggcggtccaatgggtgtttcccgtggtgctgattccgcttgttatggtcatgcccgagtctccctggtggattttgaagcacggggacaaaaagggcgccagacaagttctgaccagactcatggacgaaaaagacgtcgatatagacatgtatttggagtacatgcgtcagacgctggaggatgaagttgatggaggctcgttcgtcgactgcttcaaggggtcagatgttcgtcggacggagatttgctgtctcacatacttcttccaaccgctctcgggactctacattctgtcctatgccgcctactttttgcagctcacgggaatcccgcaaaatgtcgttttcaagctgactctggggctgactggactagcggtgatggcgtccttggttgcacctatcgtgattctcacctttacccgacgctccatttatatgggctctttagctctcatggctgccactcttttcgccattggaataaccgcttgttacgacacccaggcggccaaatgggcagcgccagtgctcatctacgtgtgggtagggacctacgatgcgacgatcggacctctgacctacgtcattgtctcggaaacgtcgtcggtcaagctgaggtccaaaaccattgctctggcaagcatcaccaactccatcatggtcctggtgctccacatttccgtgccttacatgatgaacgaggaggaggcgaatatggacgggtttgtggggttcatctacgcccccttttgcctgctggcaatagcctgggcgtggtggcgactgccggagctgaaggggatgagttttatggagattgacatgttattcggcaacgagacgggaacccaaagagcgccgctggtttttgatggtcagaagcgcgaacgacaacctctagagtcacttgacggtctcggatggaggttcggaggtcaacaggacttgtcagagacaaatgacaataatgagggctccagagaggaacggctgtcgaatccttattgctcgtccaatgaagataatcgaagcgacagattccagccctcagaacgtggatgtatattagacagtccaaagaggaagcatgcaatcgagaagaacggagtggtgatcaccgagactctggaaatgggtgaaaatgctgataggtga

SEQ ID NO: 312 - protein, 579 aa, Yarrowia lipolytica
MSHRPWDCLPLWNTVVVFRRCVLWSLVMCFVIVMDGYDGFLIPSFYAVPSFQRRYGVQLPDGSWTVEAKWQTAYMVGAPIGRIAGALGVGVLADRFGRKRVTLVGLFCLSGITFIVFFAVGKAMLVVGWFLSGLIWGIFNTMTPTYVSEICPVSLRSTFAAAINLSWVVGQFISTAVITASESRQDEWAYRVPLAVQWVFPVVLIPLVMVMPESPWWILKHGDKKGARQVLTRLMDEKDVDIDMYLEYMRQTLEDEVDGGSFVDCFKGSDVRRTEICCLTYFFQPLSGLYILSYAAYFLQLTGIPQNVVFKLTLGLTGLAVMASLVAPIVILTFTRRSIYMGSLALMAATLFAIGITACYDTQAAKWAAPVLIYVWVGTYDATIGPLTYVIVSETSSVKLRSKTIALASITNSIMVLVLHISVPYMMNEEEANMDGFVGFIYAPFCLLAIAWAWWRLPELKGMSFMEIDMLFGNETGTQRAPLVFDGQKRERQPLESLDGLGWRFGGQQDLSETNDNNEGSREERLSNPYCSSNEDNRSDRFQPSERGCILDSPKRKHAIEKNGVVITETLEMGENADR

SEQ ID NO: 313 - DNA, 1329 bp, Yarrowia lipolytica
  CDS (1)..(1329)
atggtgccgtctttctacgcgcttcccgtgttccagaaaaagttcggcatccagctccccaacggagactggacagtggaagccaagtggcagacggcgtttctggtgggagtccccattggcagaatcacaggtgccgtgggagtcggtctgctggcagacagattcggcagaaagaaggtgactatcacgtctctggcattcatggtgggagtgacctttgttgtgttttttgccaccggcaaggaaatgctgtgtgccggctggatcatcagtggaattatctggggcgttttcaacaccatggccccgacctacgtctcggaagtgtgccccatcaaaatgcggagtcttttggcagccgctatcaacctgtcctgggtcgccggacagttcatttccaccggagtcgtcacaggtacgtccaccagaaccgacgactgggcatatcgagtaccgctagcagtgcaatgggtgtttccggcaattctgattcccacattgtgctttgccccagagtctccgtggtggctcttgcgacggggagagattgacaaggcaagaaacgcactggctagactggcagacgagaccaaaattgacctcgacgcgcatctcgaacacatgatccagaccgacaaggaggaagacaagtcaggaacgatagccgagtgcttcaagggtccagatctccatcgtaccgaaatctgctccatggtgtactccatccagccgctgtcaggagccaacattattaacttcttcgccttcttcttccaactgacaggagtgccccaagacattatcttcaaactcaccctgggacttacaggtttggggtttttggctactctgctgtcgtctgttcccatcgctcgagtgggaagacgcaaaatcatgctcacgggactgtttgttctgacggtggctctttttgccatgggtattctgggctgttttacatcccggggaaccaactgggctaccgcaatcttgctatttgtgtgggtcggcacgtacgacctgtccattggtcctggagcttttgtgatttactcagagtcgtcgtctgtgcgtctgagatccaaaaccatcgccattgcctccgtcatttcctcgacagtgactcttgttttcaacgtggctgttccatacatgttgaacgaggctgaggccaacatgcgaggacttgtggggtttgtgtatggtccgctgtgtatactgtctctgatctgggtctattttcgtcttccggagctcaaggggctcagttatatggagattgatcggttgtttgagggcaagaaggttgctaaagatggtgtctag

SEQ ID NO: 314 - protein, 442 aa, Yarrowia lipolytica
MVPSFYALPVFQKKFGIQLPNGDWTVEAKWQTAFLVGVPIGRITGAVGVGLLADRFGRKKVTITSLAFMVGVTFVVFFATGKEMLCAGWIISGIIWGVFNTMAPTYVSEVCPIKMRSLLAAAINLSWVAGQFISTGVVTGTSTRTDDWAYRVPLAVQWVFPAILIPTLCFAPESPWWLLRRGEIDKARNALARLADETKIDLDAHLEHMIQTDKEEDKSGTIAECFKGPDLHRTEICSMVYSIQPLSGANIINFFAFFFQLTGVPQDIIFKLTLGLTGLGFLATLLSSVPIARVGRRKIMLTGLFVLTVALFAMGILGCFTSRGTNWATAILLFVWVGTYDLSIGPGAFVIYSESSSVRLRSKTIAIASVISSTVTLVFNVAVPYMLNEAEANMRGLVGFVYGPLCILSLIWVYFRLPELKGLSYMEIDRLFEGKKVAKDGV

SEQ ID NO: 315 - DNA, 1602 bp, Yarrowia lipolytica
  CDS (1)..(1602)
atgttctggaagaacatgaaaaatgagccgcgccaggttcttaactcgacactatggctttccgtcattgtctttggtcttctgggctctgcccgaggtttggacgaaggcatgattgctggaacaacttcacaggcctccttcgagcatcaattcaatctcaaagaccccacaaagaccgccaaccaacaggccaacgagctgtccaacatcacagccatggtgcagattgggtctgttggaggggctctgatagccatgtttgtgcaggatcgaattggacgaatcagatgtctgcaagagatgatcattctgtggacggtgggggtcattatagaggtgacttcctactctcaaggacaactattggcaggacgattcgtggcgggacttggaatcggccagtcggtggtggttgggcccacctatctggctgaagtggcccccaaaaacgtccgaggactgtgcacttgcatcttttcaggctcagtctatctcggcgtcatgttggagtactttgccaactactccaccactttgcacatgtctccaaacagccgaatccagtgggtgctgccgactgctgtgcagttcatttttgcaggtcttttgttcattggttcgtttttcatcaaggagtctccacggtggctgatgaagattggtaaggacgaactggcagtggagacactatccaagatcagacacctgccggtggacgatctctacgtccagggagaaattgtagacgtgagagaacagattgagcgagagaagcaggcgctcagcggaaccagcatattgtctcttctcaaggaactcgtttccaccaaggccaatcgatatcgcctgtttttgggaatcatggtacagctcctgggacagtggtcaggggccaatgctgtgactgtctactctccaaagttcttctccatgctcggaatcccctcgaaaacggaccagatgatgtacacagcggttctgggtgtcatcaagttcacctcggccatctgctgtgccttgttcctaattgacaccattggacgccgaagaagtttgtacacgggcatctgtctgcaatttgtctccatgttgtaccttggcatctatctcgccattgtgcctgcaacagttggagtagatcgatcaccgtcccagaagaaggctggaggagccgccattgctgccatctacctgtctggctgcgggtgggctctgggatggaattcgatccagtatctgatcaacgcagagatctacaccgttcgtcacagatctctggcgtcgggaatcatcatggtattccactttgccaaccagtacggcaactccaaggcgcttccgttcatgcggtctggtatcaccgaccatggcagcatgttcttttttgcgggagtgttgcttcttggactggcctggtcgtggttctttctgcccgaggtgtctggacggtctttggagagcattgatgagatgttttcgctgccctggtaccagattggaagacggggacacaagctggttcctgaaacgggcacggtgattcagatccaggaggaggaggagaagaaaggaggtgttattcatgtggagaattgttaa

SEQ ID NO: 316 - protein, 533 aa, Yarrowia lipolytica
MFWKNMKNEPRQVLNSTLWLSVIVFGLLGSARGLDEGMIAGTTSQASFEHQFNLKDPTKTANQQANELSNITAMVQIGSVGGALIAMFVQDRIGRIRCLQEMIILWTVGVIIEVTSYSQGQLLAGRFVAGLGIGQSVVVGPTYLAEVAPKNVRGLCTCIFSGSVYLGVMLEYFANYSTTLHMSPNSRIQWVLPTAVQFIFAGLLFIGSFFIKESPRWLMKIGKDELAVETLSKIRHLPVDDLYVQGEIVDVREQIEREKQALSGTSILSLLKELVSTKANRYRLFLGIMVQLLGQWSGANAVTVYSPKFFSMLGIPSKTDQMMYTAVLGVIKFTSAICCALFLIDTIGRRRSLYTGICLQFVSMLYLGIYLAIVPATVGVDRSPSQKKAGGAAIAAIYLSGCGWALGWNSIQYLINAEIYTVRHRSLASGIIMVFHFANQYGNSKALPFMRSGITDHGSMFFFAGVLLLGLAWSWFFLPEVSGRSLESIDEMFSLPWYQIGRRGHKLVPETGTVIQIQEEEEKKGGVIHVENC

SEQ ID NO: 317 - DNA, 2364 bp, Kluyveromyces lactis
  CDS (1)..(2364)
atgactactgattctgttccacgaaagaatatttctcaagctatcaaactagtgtttcttcgacggaaagcacaagagcgtaacgaggcaggctcctctgaagtaccgacgggtggtaaatcgaataatgcttccgctacatcgtcacccgaagaggcacttgagaatagtggagaaaacttcgaactcacaaatttcgcatctttatcagaaatggaatcagaaatctttcttgcacctcccgccaaacaatcgaagaagatctccattcttgttggtatgtttgttgctgtgggtggatttttgtttgggtatgatacaggattaataaataatatcagcgaaatgccttatgttaaccaaaagtttgcacctaacaagaatcatttcacaacaccacaaatctcgatattagtgtcttttttatccttggggacgttcattggagccttactggcacctttaatctccgactcttatggtcgaaagactacaatgatctttagtacgttcgtggtatttatgataggaaactctttacaggtggcagctggttctatgaccatacttgtagttggaagagtcctctctggtatgagtgttggactaatatcggctgcggtgccattatatcaaagtgaagctgcacagaaatctgttcgtggtgcaattatttcctgttaccagtgggccattacatgggggctacttgtagcaagtgcagtttcccaaggaacatataaaagaatggatgcatctagttaccaaataccgatcggattacagtatatttggtcctttctactcggtgtcggcattcttttcctccctgaaagcccaagatactatgttttcaaagataggctagacaaagcggcaaaatctttatcctttttacgtggcgtaccagaggatgactccggattacttgaagagttggttgagatcaaagcaacatatgattacgagatgtcattcggaaaaatctcttacctagattgtttcagatcaacgagatcaagaaccaaacagcgtctacgaatgttgaccggtatcgctcttcaggcttttcagcaagtgagtggtatcaattttatcttttattatggcgtagactttttcaataagagtggtgtcagcgaaagctatttggtttccttcgtcacatatgcagtaaatgttgcgtttaacattccggggttattcttggtcgaatatatcggacgaagaaaattgttattgatgggtggtattcttatgactatctccaatttcattattgctatagtcggattagcgactgactccatggttgcgaacaaagtgatgattgcattcatctgtttattcattgcatcattttcggccacctggggtggtggtgtgtgggtaatttccgctgaattatatccattgggtgttcgcgctaaatgcaccgccatctgtgcagcatcaaactggctaataaatttcatctgtgcattaataacgccttacattatgcacatagatagcagtgtcagacaaacgagtatcggtaccaaaatcttctttgtttgggggtcattgaacgctgttggggttcttgttgtgtacttcaccgtgtacgaaacgaatggattatcattggaagagatcgatgagttgtacaagaaatcttcttctggaataaactccatagaatggaacaagaagatcaaagcctttccagatttgtttcaaaggacaagaccgaacaatgaaggtgacggagaagctgatgataacatacatacagatgaaaattataaccatactatttccagctataatggaacccaaaacaatgaaaaatatcctattcaagtacagatgccacaatttggtgtacggaacatcgaatttttgaacaccacaggctcatctccgcaatcggatatgacagaacccaactttgtcgacttgggtaatggtcttggtataacaacgtatcaaagaggcccaccatccgtccttactgactcgagtgaagaagaggaagagggacaacaacaagagacagatgagactgaggaaggtaaatcattcaaacaccagtacactgacgctcgtaataaaaatcgtggcgagcgcggcagtttcaatagcaatagttcaacctcaggcactactcgatcttcttcccacaaggccagtgttcaaaggatggaagaaattaatctgtacatggcccaattaatgcatcgcggaggaacagaagatctttcgcgtaacactaccgataacactcatcaaccgatatcacatgatatcatgagtcaatggaactcctcatcccaaaataaaggacctagcactcaaaccgatattaatagtaacacttag

SEQ ID NO: 318 - protein, 787 aa, Kluyveromyces lactis
MTTDSVPRKNISQAIKLVFLRRKAQERNEAGSSEVPTGGKSNNASATSSPEEALENSGENFELTNFASLSEMESEIFLAPPAKQSKKISILVGMFVAVGGFLFGYDTGLINNISEMPYVNQKFAPNKNHFTTPQISILVSFLSLGTFIGALLAPLISDSYGRKTTMIFSTFVVFMIGNSLQVAAGSMTILVVGRVLSGMSVGLISAAVPLYQSEAAQKSVRGAIISCYQWAITWGLLVASAVSQGTYKRMDASSYQIPIGLQYIWSFLLGVGILFLPESPRYYVFKDRLDKAAKSLSFLRGVPEDDSGLLEELVEIKATYDYEMSFGKISYLDCFRSTRSRTKQRLRMLTGIALQAFQQVSGINFIFYYGVDFFNKSGVSESYLVSFVTYAVNVAFNIPGLFLVEYIGRRKLLLMGGILMTISNFIIAIVGLATDSMVANKVMIAFICLFIASFSATWGGGVWVISAELYPLGVRAKCTAICAASNWLINFICALITPYIMHIDSSVRQTSIGTKIFFVWGSLNAVGVLVVYFTVYETNGLSLEEIDELYKKSSSGINSIEWNKKIKAFPDLFQRTRPNNEGDGEADDNIHTDENYNHTISSYNGTQNNEKYPIQVQMPQFGVRNIEFLNTTGSSPQSDMTEPNFVDLGNGLGITTYQRGPPSVLTDSSEEEEEGQQQETDETEEGKSFKHQYTDARNKNRGERGSFNSNSSTSGTTRSSSHKASVQRMEEINLYMAQLMHRGGTEDLSRNTTDNTHQPISHDIMSQWNSSSQNKGPSTQTDINSNT

SEQ ID NO: 319 - DNA, 1434 bp, Kluyveromyces lactis
  CDS (1)..(1434)
atgccagactatctaaacgcgatgggtaatcctaacggtgcagagttgggtgttatctccaacggtatgatgtttggtatgcttttgtgcttccaatttgcaccatatgtcattgacaagtatggccgtaaggtcgggatgtacgtgggtaatgtcttgatttgcattggtgtcctcatccaagcagtatctggtgcatggatcaatggtttaccagaggattatgacaagaaggacgtgttcggtatgtttgttgcttcacgtatcgtgttgggtaccggagttttgttgatcagtatttcgactccagctttgatctcagaaatatcataccctcctcacagagagctttgtacctccatatataatacatgttggtaccttggtgctgttgtctcagcttgggtcacttacggctgcagaaacctagctcatcattggaactggagaattccatctatcattcaagcttttttccctatcgttcaactcattgtgctatacaactgcccagaatctccaagatatcttgttttccataacagagattccgaagcaagggccattttgaacaaataccatgcaggtgataatgaggaatacgcgggcttgatcgattttgaattggcagaaattaaactggctattgaacaagaaaaagcttctcaagctaccaacttctctgatttctttaaaacctccggtaatcgccatagattgtggattttgatctggactgcaattttcacacaactttccggaaatggattggtgtcttactatctatccaaagtcttcaattcgattggtattacagatcctgatgagcaattagagtggaatggttggttaatgctttacaactggttatgttcattaattttgatgagttacatcgccccattcttcaaaagaaggcaattatttttgatatccttgacttcaatggcctgttgctacattgtctggacagctttatctgctgaaaaccaaaaacgtaatttcgaggataaatctctagcaaatggtgtcttggcaatgatcttcttatattatctttcttacaactttggattcaacggttacccattcctctacacaactgaaattttaccttacactttgagaggtaaagggcttacaattttccagttggccattagtcttgcagttattttcaacgggtttgttaactcaattgcaatggatgctattgaatggaaatactacatcttttattgttgtttcttagccgttgagattgttgtctgttatttcactttcgttgaaacttctggaagatctttggaagaagttgacgaggtgtttggagatggtatcactcaactcccagaagtgacatcccaggttatgttagaagatggtaagaggttatctgttgaacatctagaaagaacagaaacctcatcctaa

SEQ ID NO: 320 - protein, 477 aa, Kluyveromyces lactis
MPDYLNAMGNPNGAELGVISNGMMFGMLLCFQFAPYVIDKYGRKVGMYVGNVLICIGVLIQAVSGAWINGLPEDYDKKDVFGMFVASRIVLGTGVLLISISTPALISEISYPPHRELCTSIYNTCWYLGAVVSAWVTYGCRNLAHHWNWRIPSIIQAFFPIVQLIVLYNCPESPRYLVFHNRDSEARAILNKYHAGDNEEYAGLIDFELAEIKLAIEQEKASQATNFSDFFKTSGNRHRLWILIWTAIFTQLSGNGLVSYYLSKVFNSIGITDPDEQLEWNGWLMLYNWLCSLILMSYIAPFFKRRQLFLISLTSMACCYIVWTALSAENQKRNFEDKSLANGVLAMIFLYYLSYNFGFNGYPFLYTTEILPYTLRGKGLTIFQLAISLAVIFNGFVNSIAMDAIEWKYYIFYCCFLAVEIVVCYFTFVETSGRSLEEVDEVFGDGITQLPEVTSQVMLEDGKRLSVEHLERTETSS

SEQ ID NO: 321 - DNA, 1719 bp, Kluyveromyces lactis
  CDS (1)..(1719)
atgtccgaagagaaaaaggttgttaatgttccttcaaactctgaaaaagaaagcgcacttgtcgaagttgaatcaagatcaactattgatgaaatcgaaaatgtgtttaatggcaacaaaccaacagaagaagttctgaaagaagttgatgaattggtcttgaagtatgatcttcaagaataccaagaactattaagtcgtggtgctttattggctaatgatcctgatgttttgctaactgataactactccgaaaaggaaagaaaaaagatcggcagggagttaacacatccatttctgtctttgtcaagaggtatgatttgggctgcgttatgtacctctttggccgccgtcaatttcggtatggatgaaagtgctgtcggtggtgctgtcttgggttatcaaaaggcgttcaacattacaaaccctaacatccaaggtcttactttagctgcgccttatttggctgctggtgtcttgaccttaccactgactgtcttattgaacaaaaaatttggtagaagatttattgttttgataagttgttttatcggtgtgtctggttctctgatccaaggcttttcgaacggattaggtcttatattgttcgcaagattatatttaggtattggtatgggtttatgttcatctactgtcccaatctatactgcagaatgtgcaccagcagtttctagaggcgcaattttaatgttgtggcagacttttatcgctcttggtgtttgtttgggttcagttttcaatagagcttttgtcgaaatcgaggggaacctatcttggagattaatgattggttcttcttgtgtagcaccctttatcacggctctcgtggtttacattccacctgaatcaccaagatggcttattggaaacggatttgtcagagaatccctagagtccctaatcagattgagaaacacagaagtctctggttcacgggacttttatatcctatatgagtctttgaaatacgaacataaacttgcagctaaactttcttggcaccaagagattaaatccctattcagtaacatcagaaacagatttgctttgtgggtatcgttccttggtattcttggtcagcaatacggtggcgttaacatcttggtttcatatactgcaacaattttaacgaatgctggtattgacccggtaactgccattgctggctcaatcggtattggaggtggttgtttcttagctactttcctttcctcgcagttgatcgacagatttggtagaagaacaatgttgcttttgacacttcctgtagaaggcgcttgtttgttttggttgggtggtattttgaatatcaaagaagatcaagctcggttggctgctggtttggctgctatgtatgtatttgtgctgttctacggtattggtattgggccaattagttttacattggtagcagaaaccccatccattaccgttagaatggctcatagtgcttttgctatgtcgatcaattggttgcttgatttctgtttgacgatgacatggccaaaaatggccgattctatgggaacttcaggagggttatatttctacggtgcgtttaactttctgatttgggttcttgcttatttcacaatcccagaaacaaaaaggttcacactagaacagttagatgaggtgttcaaacatggtgttacccattatgccaagcaaaataccagaaaactatttggtaaataa

SEQ ID NO: 322 - protein, 572 aa, Kluyveromyces lactis
MSEEKKVVNVPSNSEKESALVEVESRSTIDEIENVFNGNKPTEEVLKEVDELVLKYDLQEYQELLSRGALLANDPDVLLTDNYSEKERKKIGRELTHPFLSLSRGMIWAALCTSLAAVNFGMDESAVGGAVLGYQKAFNITNPNIQGLTLAAPYLAAGVLTLPLTVLLNKKFGRRFIVLISCFIGVSGSLIQGFSNGLGLILFARLYLGIGMGLCSSTVPIYTAECAPAVSRGAILMLWQTFIALGVCLGSVFNRAFVEIEGNLSWRLMIGSSCVAPFITALVVYIPPESPRWLIGNGFVRESLESLIRLRNTEVSGSRDFYILYESLKYEHKLAAKLSWHQEIKSLFSNIRNRFALWVSFLGILGQQYGGVNILVSYTATILTNAGIDPVTAIAGSIGIGGGCFLATFLSSQLIDRFGRRTMLLLTLPVEGACLFWLGGILNIKEDQARLAAGLAAMYVFVLFYGIGIGPISFTLVAETPSITVRMAHSAFAMSINWLLDFCLTMTWPKMADSMGTSGGLYFYGAFNFLIWVLAYFTIPETKRFTLEQLDEVFKHGVTHYAKQNTRKLFGK

SEQ ID NO: 323 - DNA, 1536 bp, Kluyveromyces lactis
  CDS (1)..(1536)
atgacaagcgagaagactgttgaatatactgaggcagtaacaaaaattgattcttcctcaaggcagtatgaaaaatctacgaagaattttttcataaatctgaaggaatctttcaacttgaccatgactttgtcaagtctgttgttgatttgttcttctttctctcatggatttgataatcagggtttcgcgacgattcaggcaatggattcctttatagagaaattcggacagtacgatgcccaaacaggagcatacgctattcctccggtgtttttgtcgttcttgaatagtttccaatacatcggttttgcttttggtctagtctgcggaagcatagtgtcttctaggtttggtagaaaaatctgtgttctatcaatgagcctatatgcgctgataacagccactatcggaatcacatctaattctaaggaacagatattatcggctagagttctcaactatgtttttattggaatggaaatggcagtcattcctgtatttcaggcagaaattgttccaccaaacacaagaggattctttgttggtgcttttcagttgtcactcaatattggtgggttagttattcatatcatcacaaatagtacagcacatatagatggaacatcatcatggaggattcctctcggactttactatattttcccgagtgttattgcctcccttgtcatgtttattccagaatctccaaggtggcttattctgaagggtaagaaggaagaggcgatgcggtctctcgttcgtttgcgtaatggaacaatttatgaaagtgaaataatcaacgagtatgaaagcattatatcttctgtggaagcagaaaagcaagagaaaagtaaatacaccgaactcttcactggaacaaacaagagaagaaccttaatcgtaattctggcaaacatctttcagcaagtgactggtcaggcatttgcttcccaatatggtaccatattcatcaagtctttgaataccgtagatccctttcaaatgtcaatcgtgtcttctgtcgtagctattgttgcagtcatcatagttttgttgtttactgatgaatttggtcgcaaaaagttccttgtaattgggtcagttattcaggctatagccttattggtaatggggggcttggggacaggagatgtgaccactgccaaaaagaacggaattgttgcgacaatgatgattaacagctttgcttattgtatatcatgggcccctctctcttatgttataagtagcgaaatccccactccacgcttaagagacaaaacctacgctgttggcatcctctttaatattctgtttgccttcataactgcctttacgcttccctatctgctgtcgaagccgtatgcaaacctacaatcgaaggttggttttatttatggagcatttactgtactttctgttgtcttttcgtactatctgcccgaatgtcgcggtttgagtttagaggaaattgaatcaaatttcgtaaataaagtacctttaaaccggttctctaagaattcgattagttaa

SEQ ID NO: 324 - protein, 511 aa, Kluyveromyces lactis
MTSEKTVEYTEAVTKIDSSSRQYEKSTKNFFINLKESFNLTMTLSSLLLICSSFSHGFDNQGFATIQAMDSFIEKFGQYDAQTGAYAIPPVFLSFLNSFQYIGFAFGLVCGSIVSSRFGRKICVLSMSLYALITATIGITSNSKEQILSARVLNYVFIGMEMAVIPVFQAEIVPPNTRGFFVGAFQLSLNIGGLVIHIITNSTAHIDGTSSWRIPLGLYYIFPSVIASLVMFIPESPRWLILKGKKEEAMRSLVRLRNGTIYESEIINEYESIISSVEAEKQEKSKYTELFTGTNKRRTLIVILANIFQQVTGQAFASQYGTIFIKSLNTVDPFQMSIVSSVVAIVAVIIVLLFTDEFGRKKFLVIGSVIQAIALLVMGGLGTGDVTTAKKNGIVATMMINSFAYCISWAPLSYVISSEIPTPRLRDKTYAVGILFNILFAFITAFTLPYLLSKPYANLQSKVGFIYGAFTVLSVVFSYYLPECRGLSLEEIESNFVNKVPLNRFSKNSIS

SEQ ID NO: 325 - DNA, 2034 bp, Kluyveromyces lactis
  CDS (1)..(2034)
atgtctgatagtaccgataaagataggcataacaaaaattcgtccaggggtatcgtcaatacggatatcgaggatgacaatagtccatcacctttggacaccactgacaagaaaggtgctccggaattgcagaaaccgggaaatccatctttgttcaaggaatctgctttgaagaattctgatcagctacaatttagaaacagtttcaacattccaaatgccgttggcggaactaacggaattgtaattcctccaaatgttcaaccattagatcaacaacgtattccacctagctacactgatcacttacaggttaaggatacttatttgacgggaagaactctattgtacttcacatcgatatttgtgtcactaggcgtatttttgtttggctacgatcaaggtgttatgtctggtattatcactggcccatatttcaagacttatttcaataacccaactgcggcaactattggtactatggtctcaattcttgagattggagctcttgtttcctccttactagtctccaatattggtgaaaaattcggtagaaggttcactataaaatatggatctttaattttcattttaggtggattggttcagacgttttcatgggaaatgggtcatatgatatttggtagaatcattagtggtattggtgttggtttattaagtaccattgtacccatttatcaatcagaaattagccccccacataacagaggaaaattggcttgcattgagtttacaggaaatattgttggttatgcgtctagtgtttgggtcgattatgcgtgctcctatatagaatcagatacttcttggagattacccttgttcattcaatgtgttatgggcttgctgttatttttagggtcgtttgttattgttgagactccccgttggttattaaatcacgaccatgatattgaagggttggtggtcatagcagacttacatagtgatggtgacgttttgcattcaaaagctcatgaggagtataagctgatcaaggaaacagtcctcatatcaagactggaaggtgaaaagaaatcgttacgttttgcttttaaacggtatagaaccaggatgctaattgcaatgagctctcaaatgtttgctcaattaaacggtatcaacgttatatcatattacgcgcctcttgtttttgaacaagctggatgggttggtagagaggccttgttgatgacaggtattaattccatcatttacatattgtccactattttgccatggaaattagttgataaatgggggagaaaaccaatcctactctccggggcgctggtaatgggaacttctttgcttgcaatagccatgtcattatgggcgaatgttgctgccactccaagattagtggtcgtgttcgtgatcatctttaatgcctttttcggttacagttggggtccaatcccatggctatatcctgttgagattgcgcctgcaatggcaagatctgcaatggcatctgcttctactgctacaaactggctgtttaactggttagtaggtatcatgactcctatcttgcaagaaaaaatccattggagaatgtacttgattcatactgtatcctgctacttgtcattctggtgtgtgttaaaagtttatccagagactgctggtttaagattagaagatatggattctgtttttgatgacaggtcatcaaccttcagtttccagtcagggacctccgctgaaatagaacaacagtctcatctagtaagtggtggaggagaagtagcaccatcaacgagatctcgcaaaagtgtttattcgaatgcacaatccatgtttaataaagatgagatacaaccaccaacattgacccaggttcttcaatggaaggaagagagaactcaaactaaaccattgaaaaaatttataagaagaggctcggagactgtctgtttgatatataataaggtacgaaacttacggagcaccaatgatacaaaccaaatcgagtatggtgccgtatccaataatcagcctccgaactaa

SEQ ID NO: 326 - protein, 677 aa, Kluyveromyces lactis
MSDSTDKDRHNKNSSRGIVNTDIEDDNSPSPLDTTDKKGAPELQKPGNPSLFKESALKNSDQLQFRNSFNIPNAVGGTNGIVIPPNVQPLDQQRIPPSYTDHLQVKDTYLTGRTLLYFTSIFVSLGVFLFGYDQGVMSGIITGPYFKTYFNNPTAATIGTMVSILEIGALVSSLLVSNIGEKFGRRFTIKYGSLIFILGGLVQTFSWEMGHMIFGRIISGIGVGLLSTIVPIYQSEISPPHNRGKLACIEFTGNIVGYASSVWVDYACSYIESDTSWRLPLFIQCVMGLLLFLGSFVIVETPRWLLNHDHDIEGLVVIADLHSDGDVLHSKAHEEYKLIKETVLISRLEGEKKSLRFAFKRYRTRMLIAMSSQMFAQLNGINVISYYAPLVFEQAGWVGREALLMTGINSIIYILSTILPWKLVDKWGRKPILLSGALVMGTSLLAIAMSLWANVAATPRLVVVFVIIFNAFFGYSWGPIPWLYPVEIAPAMARSAMASASTATNWLFNWLVGIMTPILQEKIHWRMYLIHTVSCYLSFWCVLKVYPETAGLRLEDMDSVFDDRSSTFSFQSGTSAEIEQQSHLVSGGGEVAPSTRSRKSVYSNAQSMFNKDEIQPPTLTQVLQWKEERTQTKPLKKFIRRGSETVCLIYNKVRNLRSTNDTNQIEYGAVSNNQPPN

SEQ ID NO: 327 - DNA, 1596 bp, Candida glabrata
  CDS (1)..(1596)
atggagcaagtcactatcggtgttatatcattagattcatctcctacagaaaattacacgctgaacacagcagaaacaaggcaatcatttcagctctctggaaagagtgaagtaaataccataccgggagaaaaatatgaagaactaaagatgaagtacatacgccagcacactaaagcagtagtattatgttgtttaatatcatttggaggaatgatactaggctgggacatcggtaccgtgggtggtgtgtcgataatgccaagtttcaataatgcattcggtgatcaaacgacgattgtgtcctctgcaaaggaactctcaaatatgaaaagaggtctttacatttccatattcaacattggatgtgccttaggtggtattatgttttctaggttatcaaatactgtgggtcgtagagtaggaattctaaccgctatagcaaagtatactcttgtcctgacggtccagttattctcaaatggaaactttatccttcttctggcatctagatttgtattgggagtaactgttggcgcaataagtgttttggtgccgatgtttgtatcagaaagtgcgccaattaaaattcgaggagcattagtggtagtctatcaactagcaataacattgggaatactctttggaaatatactaaactacatgactaacaagcatttgtctatggtagatcccatgaacaatatggcatggaaaattccgatgctattcggttacctttgggctgccattgttgcagtgggcgcttgtattaccccggaatctgtccatttcctagccaaaattcgtaatgattatgaaagtgccaaaatatcatattcgatcatgaacaatatttcagtatttgaccatgaaactatcgattatgttaacaacttgctagtaaagcaagatgtgtataatgagaacgaccttaggaaccataaatttgagtttttatatggtaagccaaaatatggaaaacgcctacttattggcatcatggtgatggcctttcaacaactttctggtataaactacttcttctattatggaacctcattattcaaaagtgttggaatcaaagatacatacgccacggctatcatactttcatcagtcaattttattagtacttttgcaggcatctacttagtggaaagccttggaagaagatctacactaatttatggctcatttggcatgttcatatgtatgatattttatgcgtcttttggaactttaagtttgagaaaggatctattatcattcgtactgatcattgttacatgcttatttatctcgatcttcgccataactatcggcccagtatcatttgtagttgtagccgaattgttcccaacaagaactagatccgtttcaatgtctatatgctcttcctttaattggctagttaatttcgccattgctctggcaacaccagtgataatcaatagaataggcttcctttatgggtttttctttgcaggttgtcttctattagcaactggatttgaagcattctttgtaccagaaactaaaaataaaacagaagaagaaatagactatatgttccaaaacaacttgaaatcgtga

SEQ ID NO: 328 - protein, 531 aa, Candida glabrata
MEQVTIGVISLDSSPTENYTLNTAETRQSFQLSGKSEVNTIPGEKYEELKMKYIRQHTKAVVLCCLISFGGMILGWDIGTVGGVSIMPSFNNAFGDQTTIVSSAKELSNMKRGLYISIFNIGCALGGIMFSRLSNTVGRRVGILTAIAKYTLVLTVQLFSNGNFILLLASRFVLGVTVGAISVLVPMFVSESAPIKIRGALVVVYQLAITLGILFGNILNYMTNKHLSMVDPMNNMAWKIPMLFGYLWAAIVAVGACITPESVHFLAKIRNDYESAKISYSIMNNISVFDHETIDYVNNLLVKQDVYNENDLRNHKFEFLYGKPKYGKRLLIGIMVMAFQQLSGINYFFYYGTSLFKSVGIKDTYATAIILSSVNFISTFAGIYLVESLGRRSTLIYGSFGMFICMIFYASFGTLSLRKDLLSFVLIIVTCLFISIFAITIGPVSFVVVAELFPTRTRSVSMSICSSFNWLVNFAIALATPVIINRIGFLYGFFFAGCLLLATGFEAFFVPETKNKTEEEIDYMFQNNLKS

SEQ ID NO: 329 - DNA, 2571 bp, Candida glabrata
  CDS (1)..(2571)
atgacgatcatatcggaggatgagaagagtgtggcccgagatagagagggtgtgttggctcgggctatcaaagtggtaaacaggaagttcaggaggaaagatgtacggcgggaaaagctagagcgagcgcttagctgtgataaccagatgacgttgaactctacgaatctctacgcggcgcagcagcaagagtatcagcggagggaggagaatgatatagaggagaaccaggagccggagggtggtaatgacgatatagactacgacatctcaatactatcggacgagatgtctaccgtggacgacgcatctctgctttttgcggagccaccgcagaagcagtcgcatatgatgtctatagtggtgggtgcgtttgttgcagttggtggatttctgtttggctacgacacggggctcataaacagtatagtagacatgaggtatgtgcgggagaatatcgcgccaaatcacgttggattcacggcgcagcagctggccatattggtttcgttcctatctctgggcacttttgtaggtgctctgtcggcaccggtgatatctgataaatacggcaggaaaaagacaattatgtttagcacagcggtggtgttctcacttggtaattccttgcaggtgggggcacataacattcaattacttattgcaggcagagttatatctggtctaggtgttggcctggtatccgcagttgtaccattatatcaagcagaggctgctcataaatcgctgagaggtgccatcatttcaacttatcagtgggccatcacttggggtttgttggtgtcaagtgcagtatcgcaaggaacacataatagaaatgacgcttcctcgtataggatacccataggtcttcaatatgtctgggcatatatattagcagctggtatgctatggcttccggaaagccctcggtattatgttctcagagatcaactagacaaagctgcacaatcattatcattcttaagaggagttcctatccatgattcaggactactagaagaacttgtagaaataaaggcaacatttgactacgaatcatcattcggcaaaacaaccttctgggactgttttaaatcgaataagagtagacctaaacaaacacttagaatgtttacaggtattgctattcaggcattccagcaattttcaggtatcaattttatcttctactatggtgtaagtttcttcaatagatctggtgtcgaaaacagctacattgtttcattaataacgtacgcagtaaatgttgggttcagtgttcccgggatgttcctggtggaatattttggtagaagaagtgtgttgctatatggaggtgcgattatgactctatcgaatttcattatcgctatagtaggatcctcgacacaatccgtcgtggctaataaagttatgatagctttcatatgcttattcattgcatcatttgcggcaacctggggtggtgtagtgtgggttatatctgccgagttataccctcttggagtcagagccaaatgtactgccatctgtgcggcagctaattggctgattaattttgtttgtgctttcataactccttacattgttgatacgggcgaaagaagagcattgattggaccaaagatttattttatttggggtagcttgaacgctctaggtattctggtggtatatttcactgtttatgaaaccagagggctaaccttggaagaaatagatgaactatatacaaaatcacccaacggtattgtatcagctaagtggaataggagaataagacacagagaaaaaacatatggccacaaggagcaacaaaatagagatagaaatcaacaaactaccaaggaaaacctacgtaagaatgttgtaaatgaagacatgctaagtgatgacctaactcctcgcaatgactctataaacacccatcatagtgttgattctaatgaaaagtatcaaagtgaaaacaccgataacactttagcacccgcagttaacgataggagtatgatggattttggcaatgacatgatattacatatatgtaatagaggtcctccatctatctccactgcagctagtgtagaagagtttggcggaaactcaacccaaatggagaacctcagttataatgaaagtaacagtgtcgaaaagaaaaaagtgggcttgttttccaagttcaagctgggttcacgaaagtcttccattaatgggactgaagaagacagcaaaccaaaatctccgcaactgggtcaagccgaattttctccatctccattagatgtgaaggtatctgatgatgatcacaatgacttcgttgatttaggcaatggttttggtttgtacagtgttaccagaagactttcctcaggagtacctgatacaagtgacgaggaatctgcatatgatcttggtaatgcaccatcatcaacaaatacttatagaaatagaggtaacctggattcaataaacacgtatatgtcacaattaattcagagtaatacctataccagccaaaatacagggtactcacaaaacgacaacgatcagacgcagcaccatcaatga

SEQ ID NO: 330 - protein, 856 aa, Candida glabrata
MTIISEDEKSVARDREGVLARAIKVVNRKFRRKDVRREKLERALSCDNQMTLNSTNLYAAQQQEYQRREENDIEENQEPEGGNDDIDYDISILSDEMSTVDDASLLFAEPPQKQSHMMSIVVGAFVAVGGFLFGYDTGLINSIVDMRYVRENIAPNHVGFTAQQLAILVSFLSLGTFVGALSAPVISDKYGRKKTIMFSTAVVFSLGNSLQVGAHNIQLLIAGRVISGLGVGLVSAVVPLYQAEAAHKSLRGAIISTYQWAITWGLLVSSAVSQGTHNRNDASSYRIPIGLQYVWAYILAAGMLWLPESPRYYVLRDQLDKAAQSLSFLRGVPIHDSGLLEELVEIKATFDYESSFGKTTFWDCFKSNKSRPKQTLRMFTGIAIQAFQQFSGINFIFYYGVSFFNRSGVENSYIVSLITYAVNVGFSVPGMFLVEYFGRRSVLLYGGAIMTLSNFIIAIVGSSTQSVVANKVMIAFICLFIASFAATWGGVVWVISAELYPLGVRAKCTAICAAANWLINFVCAFITPYIVDTGERRALIGPKIYFIWGSLNALGILVVYFTVYETRGLTLEEIDELYTKSPNGIVSAKWNRRIRHREKTYGHKEQQNRDRNQQTTKENLRKNVVNEDMLSDDLTPRNDSINTHHSVDSNEKYQSENTDNTLAPAVNDRSMMDFGNDMILHICNRGPPSISTAASVEEFGGNSTQMENLSYNESNSVEKKKVGLFSKFKLGSRKSSINGTEEDSKPKSPQLGQAEFSPSPLDVKVSDDDHNDFVDLGNGFGLYSVTRRLSSGVPDTSDEESAYDLGNAPSSTNTYRNRGNLDSINTYMSQLIQSNTYTSQNTGYSQNDNDQTQHHQ

SEQ ID NO: 331 - DNA, 2289 bp, Candida glabrata
  CDS (1)..(2289)
atggattctagcttcgaaatactcccgtaccgtggtgacgatcaaataccgagagttgatagtggcgggttgcgaagacgagcatcacagacaataaatactaatcatgatgacacttgtgttgatatagatgcctacaatagtggtatagatgtgtcaagtaagaatgagtatcttggaatcaataccgcagacgatgataatgaatatggtaacggtggaatgcaaaattatgaaggacctgtgaatgagcaagctatccattgtcaaaccaacgatatatcagaaaatgaaaataatctacagttgcttggacagccattgccacttcgttcaactatgatgaccacgtttgtgggacttttcgttgccgttggtgggtttttatatggttatgatacaggtctgataaatagtataactgatatgaaatacgttaaagaacacattgcaccaaatcactcattctttactacaacacagatatcgatgctggtgtcatttttatcattgggcacatttgtaggcgccctcattgctccatggatttcagatatttatggaagaaagtcaacaattatattcagtactatgatcatcttttcgataggtaactctctgcaagtagcagctggcgggctggcattgttaattgttgggagggtaatatctggtattggaataggtataatatctgctgtagttcccctttatcaggctgaagctgcacagaagcacatgagaggagccattattactacctaccagttggctattactttaggattactcgtttcaagcgcagtgtcacaaggcacagagtctatcaatgctccgagttcatacagagttcccataggattacagtatgtctggtctgttgttttaggtgttggaatggtttttttaccagaaagtcctcggtattatataatgaaggatgagatagaagaagcagcgagaagtttatcgttcttgagaggtatctctttagaagatccaaggctcttagaggaactagtcgaaattaaagctaactacgattatgaatcctcatttggtcctgtatcaatatgggattgtttcagatccagtgagcaacgtccaaagcaggtgctgagaatgtttactgggatatctatacaagctttccaacaattttctggtattaatttcatcttttactatggtgtttatttcttcaacaagacaggtattaaaagtagttacctggtgtcgtttgtcacttatgctgtgaatgttgcattcaacataccagggatgtttttaattgactatttagggagaagaaaagtattaatcttcggtggcattgcaatgactgcttgcaactttattattgccattgtgggtgtttctgccaaatccattgtttcaaataatgtaatgattgcatttatttgtgttttcatagcagccttctcgagtacatggggtggtgttgtatgggtaatctctgcagagctatttcccttgggtgtgagatcaaagtgcactgctatatgtgcggcagccaattggctagttaactttgtctgtgcattgatgactccttatattgtcgatacaggatcaaactacacatcttcgatgggtaccaagatatacttcatttggggaagtctgaatgcccttggaactatagttgcatatctgacagtgtatgagacgagagggttgacgcttgaagaaatcaatgagttgtacgttaactcacccacaccatttgcgtcgaacgaatggaatagaaagattcgcacagaatccacgatcccacctatggtacatgaccatgaactagataaccacattgtgccaacaatggacaacattctccatagcagaaatccaaaccagccatactcttcagatgagaaccaagatgttatagtaggggaagacaagctggacttggagcaaggctacaataaggagattcacaaccacagggatgataacaacgtatcgccaataccattcctccaggaacaaaatgggaaagaattcagcaatggtgctgatttcagcccatcgacacactcaacttttgccttgaccgagcacataccagcgaactacgtggaattggggaacggatttggattaaacacatacaggggcgggcccccatccatctccgattctagtgatgacgatcattgcacacactggcaaagcccagagaatggatcacctatataccatgaaattctgtcctctaacgacacgaatagtggcacttacaacaagaactctgaaaatttatag

SEQ ID NO: 332 - protein, 762 aa, Candida glabrata
MDSSFEILPYRGDDQIPRVDSGGLRRRASQTINTNHDDTCVDIDAYNSGIDVSSKNEYLGINTADDDNEYGNGGMQNYEGPVNEQAIHCQTNDISENENNLQLLGQPLPLRSTMMTTFVGLFVAVGGFLYGYDTGLINSITDMKYVKEHIAPNHSFFTTTQISMLVSFLSLGTFVGALIAPWISDIYGRKSTIIFSTMIIFSIGNSLQVAAGGLALLIVGRVISGIGIGIISAVVPLYQAEAAQKHMRGAIITTYQLAITLGLLVSSAVSQGTESINAPSSYRVPIGLQYVWSVVLGVGMVFLPESPRYYIMKDEIEEAARSLSFLRGISLEDPRLLEELVEIKANYDYESSFGPVSIWDCFRSSEQRPKQVLRMFTGISIQAFQQFSGINFIFYYGVYFFNKTGIKSSYLVSFVTYAVNVAFNIPGMFLIDYLGRRKVLIFGGIAMTACNFIIAIVGVSAKSIVSNNVMIAFICVFIAAFSSTWGGVVWVISAELFPLGVRSKCTAICAAANWLVNFVCALMTPYIVDTGSNYTSSMGTKIYFIWGSLNALGTIVAYLTVYETRGLTLEEINELYVNSPTPFASNEWNRKIRTESTIPPMVHDHELDNHIVPTMDNILHSRNPNQPYSSDENQDVIVGEDKLDLEQGYNKEIHNHRDDNNVSPIPFLQEQNGKEFSNGADFSPSTHSTFALTEHIPANYVELGNGFGLNTYRGGPPSISDSSDDDHCTHWQSPENGSPIYHEILSSNDTNSGTYNKNSENL

SEQ ID NO: 333 - DNA, 1668 bp, Candida glabrata
  CDS (1)..(1668)
atgtcacaaagtgccatttcatccacatccgctactgatcctgagagacagaccccagaaactaagctggaaggcgaagatttccaactgaaggccgatgaagccagtattcaaggcgctgagattccaagaaagcccttaggcgcttactggaccgttatgtgtctatgtttaatgattgcctttggtggttttgtctttggttgggatacaggtactatctctggttttgttgctcaaactgatttcaaaagaagattcggtcaaagacactcagatggtacttactacttgtcaaatgttagaactggtctaattgtcgctatatttaatattggatgtgccttcggtggtctaactttaggccgtactggtgatttgtatggccgtaagaaaggtctagtcattgttgtttctgtctatgttgttggtattattattcaaatcgcttcggtagacaaatggtaccagtattttattggtagaattatttctggtctaggtgttggtggtattgccgttctttctccaaccttaatttctgaaacagctcctaaacatctaagaggtacttgtgtttcattctaccaattaatgattactctaggtattttcttgggttactgtacaaactatggtaccaagaattattctaactccgtccaatggagagtcccattgggtctatgttttgcctgggctttgttcatgattggtggtatgtccatggttccagaatctccaagatttttggttgaaaaaggcagattagaagaagccagacgttctattgctatttccaacaagctttccatggatgaccctggtgtaaccttcgaattagatactataagcgcaggtgttgaagctgaaagacttgctggtagtgcctcttggggtgaattattttctaataagggtaagattctacctcgtgttattatgggtgtaatgattcaatctttgcaacaactgacaggtaataactactttttctactatggtaccacaattttcaaggctgtcggtttggaagattcattccagacatccattgtcctaggtattgttaacttcgcttctacatttgtgggtttatggactgtcgagagatttggccgtcgtagatgtttgttgtggggttctgcaactatggctgcttgttttgtcatctttgcttcagtcggtgtaaagagtctgtatcctcacggtagagaccatgcatcctctaagggtgccggtaactgtatgattgttttcacatgtttcttcattttctgttttgctactacttgggctccaattgcctacgttattgtctctgaaacttatccattgcgtgttaagaaccgtgccatggctattgctgttggctctaactggatttggggtttcttgattggtttcttcactccattcattaccagtgcgattaacttctcttatggttatgtattcatgggttgtttggtattctcttacttctatgttttcttctttgtctgtgaaactaagggattaacattagaagaagttaatgatatgtatgaagaaggtgtcttaccatggaagtctccaaactgggttccaccatctagaagagatgcttcttacgatatcgacgctatgatgcacgatgacaagccatggtacaagagattcttgtaa

SEQ ID NO: 334 - protein, 555 aa, Candida glabrata
MSQSAISSTSATDPERQTPETKLEGEDFQLKADEASIQGAEIPRKPLGAYWTVMCLCLMIAFGGFVFGWDTGTISGFVAQTDFKRRFGQRHSDGTYYLSNVRTGLIVAIFNIGCAFGGLTLGRTGDLYGRKKGLVIVVSVYVVGIIIQIASVDKWYQYFIGRIISGLGVGGIAVLSPTLISETAPKHLRGTCVSFYQLMITLGIFLGYCTNYGTKNYSNSVQWRVPLGLCFAWALFMIGGMSMVPESPRFLVEKGRLEEARRSIAISNKLSMDDPGVTFELDTISAGVEAERLAGSASWGELFSNKGKILPRVIMGVMIQSLQQLTGNNYFFYYGTTIFKAVGLEDSFQTSIVLGIVNFASTFVGLWTVERFGRRRCLLWGSATMAACFVIFASVGVKSLYPHGRDHASSKGAGNCMIVFTCFFIFCFATTWAPIAYVIVSETYPLRVKNRAMAIAVGSNWIWGFLIGFFTPFITSAINFSYGYVFMGCLVFSYFYVFFFVCETKGLTLEEVNDMYEEGVLPWKSPNWVPPSRRDASYDIDAMMHDDKPWYKRFL

SEQ ID NO: 335 - DNA, 1695 bp, Candida glabrata
  CDS (1)..(1695)
atgtcacaagctcaaagtttgtcaccttctgaaagcgccgaaaactccccagtcagggaagtcaatgttgctaacagcttcaaagatgatgacttcattttggagcagaagcaaaccgctgatgtttctgcgatgtccccagaagcagaagcaccacctaaaccaatctcagcctactttactgtgatctgtctatgtttgatgatcgcattcggtggttttgtctttggctgggatactggtactatttctggttttgttgctcagaccgatttcaagagaagatttggacaacaagctgctgatggttcttactacttatctgatgtgagaactggtttgattgttgctattttcaatattggttgtgccattggtggtttgaccttgggtcgtcttggtgatatgtatggtcgtcgtcttggtttgatggctgttattactgtctacgttgttggtattgtaattcaaatctcttctaccactacctggtaccaatattttgttggtagaattgtctccggtcttggtgttggtggtattgctgtgctatccccaaccttaatttctgaaactgctccaaagcatttgagaggtacttgtgtgtcattctaccagttgatgattactttgggtatcttcttgggttactgtacaaactatggtaccaagactcacaccaattctattcaatggagagttcctctaggtctatgttttgcctgggctttgttcatgcttgttggtatgtccatggttcctgaatcaccaagattcttggttgagaagggtagatttgaagaggccagacgctctcttgcccgttctaacaaggtttccatggatgacccaattgtcacagctgaaattgaaaacatcagcgctggtgttgaagctgagaaatctgcaggtaatgcctcttggggtgaattgttttccaccaagggtaagatcttgcaacgtgttgtcatgggtatcatgatccaatctttgcaacaattgactggttgtaactacttcttctactacggtactactattttcaaggctgttggtttagaagattctttccaaacttctattatcttgggtattgtcaactttgcttccacctttgtcgctttgtatgttgttgaccgctttggtcgccgtaagtgtttgctatggggttcctctacaatggctgtctgcatggtcatctttgcttcagttggtgtcaagagtctatatcctaacggtaaggaccaaccatcctccactactgctggtaacgttatgattgttttcacctgtctatacatcttctgttttgcaactacttgggctccaactgcttacgttattgttgccgaaacctacccactacgtgttaaaaaccgtgctatggccattgctgttggtttcaactggatctggggtttcttgattggtttcttcacaccatttattactactgccattaacttctactacggttacgtcttcatgggctgtctagtcttctccttcttctacgtcttcttctttgtttgcgaaactaaaggtttgactttggaagaagtcaatgaaatgtacgaagaaggcgtcttgccatggaagtccgctcaatggctaccaactaccaagagaaccagtggctacgatgtggacgctgctttgcacgatgacaagccatggtacaagagatttgcttag

SEQ ID NO: 336 - protein, 564 aa, Candida glabrata
MSQAQSLSPSESAENSPVREVNVANSFKDDDFILEQKQTADVSAMSPEAEAPPKPISAYFTVICLCLMIAFGGFVFGWDTGTISGFVAQTDFKRRFGQQAADGSYYLSDVRTGLIVAIFNIGCAIGGLTLGRLGDMYGRRLGLMAVITVYVVGIVIQISSTTTWYQYFVGRIVSGLGVGGIAVLSPTLISETAPKHLRGTCVSFYQLMITLGIFLGYCTNYGTKTHTNSIQWRVPLGLCFAWALFMLVGMSMVPESPRFLVEKGRFEEARRSLARSNKVSMDDPIVTAEIENISAGVEAEKSAGNASWGELFSTKGKILQRVVMGIMIQSLQQLTGCNYFFYYGTTIFKAVGLEDSFQTSIILGIVNFASTFVALYVVDRFGRRKCLLWGSSTMAVCMVIFASVGVKSLYPNGKDQPSSTTAGNVMIVFTCLYIFCFATTWAPTAYVIVAETYPLRVKNRAMAIAVGFNWIWGFLIGFFTPFITTAINFYYGYVFMGCLVFSFFYVFFFVCETKGLTLEEVNEMYEEGVLPWKSAQWLPTTKRTSGYDVDAALHDDKPWYKRFA

SEQ ID NO: 337 - DNA, 1650 bp, Candida glabrata
  CDS (1)..(1650)
atgtctgaagaatcacaatctgcattctcagcttccaacagcaaagttgagagagaggaagacttcaaagcttacgctgatgaggatggtcaacccatggttgagattcccaaaaaaccagcttctgcttataccctcatctttatcctctgcttattcatcgctttcggggggttcgttttcggttgggatactggtactatttccggttttgttgctgaggaagacttcatcaaaagattgggtcaaagacgtgccaataacacttactacctatccaaggtcagaactggtctaattgtttctatatttaacattggttgtgctattggcggtgtcgtcttatccaagtttggagatatgtatggacgtaagatcggtttaattattgtcatcgttgtttatattgtcggtatcgtgattcaaattgctactattgacaagtggtaccaatacttcatcggtagaattgtttccggtctgggtgtcggtggtattgcggtattgtctcctatgttgatttccgaagtttctccaaaacatatgagaggtacattggtctcttgctaccagttaatggtgacttgcggtatcttcttgggttattgtaccaactacggtacaaaaaactaccccaactctgtacaatggagagttccactaggtctatgttttgcttgggctctattcatgataggtggtatgctgtgtgttccagaatctccacggtacttagttgaagtcggcaaatttgaagaagctagaagatccattgccatctctaacaaacttacaccagaagatccggcagtcactttcgagttagaaaatgttcaagcaggtgttgaagcagaaagattagctggttctgcttcctggggtgaattgttctctaccaagacgaaggtcttacaacgtttgattatgggcatcatgcttcaatgtttgcaacaattgacaggtgacaactacttcttctactatggtactactgttttcaaggctgttggcttggaagattctttccaaacttcaattgttattggtatcgttaactttgcatccacattcgtagctttgtacgttgttgaccgcttcggtcgtcgtaaatgtctcttgtggggagccgctagcatgactgcttgtatggttgtctttgcatcagttggtgtcaccagattatatccaaacggtatggaccaaccatcctccaagggtgctggtaactgtatgattgttttcacctgtttctacattttctgtttcgcaacaacttgggcaccaactccatgggtcatcaactccgaaacattcccattgagggttaaagccaagtgtatggcaatatgtcaagccgctaactggatctggggtttcttaattgccttcttcactccgttcatcacgggtgctatcaatttctactatggttacgtcttcatgggctgcctatgtttctcctacttctacgttttcttttttattccagaaacaaaaggcttaacattggaggaagtcaacactatgtgggaagaaggcgtcttgccatggaagtctccagattggattccaccatcaaagagagacgccacctatgatgctgatgccatgatgcacgatgataagccatggtaccggagaatgtggtaa

SEQ ID NO: 338 - protein, 549 aa, Candida glabrata
MSEESQSAFSASNSKVEREEDFKAYADEDGQPMVEIPKKPASAYTLIFILCLFIAFGGFVFGWDTGTISGFVAEEDFIKRLGQRRANNTYYLSKVRTGLIVSIFNIGCAIGGVVLSKFGDMYGRKIGLIIVIVVYIVGIVIQIATIDKWYQYFIGRIVSGLGVGGIAVLSPMLISEVSPKHMRGTLVSCYQLMVTCGIFLGYCTNYGTKNYPNSVQWRVPLGLCFAWALFMIGGMLCVPESPRYLVEVGKFEEARRSIAISNKLTPEDPAVTFELENVQAGVEAERLAGSASWGELFSTKTKVLQRLIMGIMLQCLQQLTGDNYFFYYGTTVFKAVGLEDSFQTSIVIGIVNFASTFVALYVVDRFGRRKCLLWGAASMTACMVVFASVGVTRLYPNGMDQPSSKGAGNCMIVFTCFYIFCFATTWAPTPWVINSETFPLRVKAKCMAICQAANWIWGFLIAFFTPFITGAINFYYGYVFMGCLCFSYFYVFFFIPETKGLTLEEVNTMWEEGVLPWKSPDWIPPSKRDATYDADAMMHDDKPWYRRMW

SEQ ID NO: 339 - DNA, 1602 bp, Candida glabrata
  CDS (1)..(1602)
atgatcagcggccctaaggaagaacttcaaaaggaggttgaagaagaactgcaccacaaaaagaagagtgacctaatatttgtctccttatgctgtattatggttgcctttggtggttttgtttttggctgggatacaggtactatttctggttttgttaaccaaacagattttctgagaagatttggacaacaaagaagtgatggtacctattacttgtctaatgttagaacaggtttaattgtcgctatctttaatatcggatgtgctattggtggtattaccctttcaaaacttggtgatatttggggaagaagattgggcttggttacggtcgtggttgtatatacaatcggcattgttatccaaatcgcctctattgataaatggtaccagtacttcatcggtagaattatctccggtttaggtgtcggtggtatcgctgtcttgtcaccaatgttaatctctgaggtttctccaaaacaattaagaggtacattagtttcttgctaccaactaatgattacatgtggtatctttttgggctactgtaccaattacggtacaaaaaactactccaactctgtccaatggagagttccattagggttatgtttcgcatgggcattatttatgatatttggtgttatgtgtgttcctgaatctccaagatatcttgtggaagtaggcaagttagaagaagccaagcgttctcttgccagagccaataaaacaactgtagattctccaatcgtccttttggaactggacaaatatcaagcatcagttgaagctgaacgtctggccggctctgcatcatggggagaattagtcacaggtaaaccacaaatgttaagacgtacaatcatgggtatgatgatccagtcgctacaacaattaacgggtgcaaactacttcttctactatggtactaccattttcagagctgttggattagatgattcattccaaactgcaattgttttaggtgttgtcaactttgtttcaacattctatgccttgtatactgtagaccactatggtcgccgtaattgtttaatgtggggttgtgttggtatggtatgttgttacgttgtctatgcctctgttggtgtaacgagactatggccaaatggtgagggtaacggctcttccaaaggtgctggtaactgtatgattgtttttgcatgtttctttattttctgttttgccactacatgggcaccaattgcctatgttattgtctctgagtcatacccactaagaattcgtggtaaggccatgtccatcgctattgctgctaactggatctggggtttcttgattgcttttttcactcctttcatcacatccgccattaatttctattacggatatgtcttcatgggctgtatggtatttgcatacttctacgtctttttctttgtccctgaaacaaaaggattaactctagaagaagttaatcaaatgtatgaagagggtgtacttccatggaagtcatccagttgggtgcctccagacagaagaactgccgagtacaatttggatgactattcccacgatgataagccatggtataagagagtattctcaagaaattga

SEQ ID NO: 340 - protein, 533 aa, Candida glabrata
MISGPKEELQKEVEEELHHKKKSDLIFVSLCCIMVAFGGFVFGWDTGTISGFVNQTDFLRRFGQQRSDGTYYLSNVRTGLIVAIFNIGCAIGGITLSKLGDIWGRRLGLVTVVVVYTIGIVIQIASIDKWYQYFIGRIISGLGVGGIAVLSPMLISEVSPKQLRGTLVSCYQLMITCGIFLGYCTNYGTKNYSNSVQWRVPLGLCFAWALFMIFGVMCVPESPRYLVEVGKLEEAKRSLARANKTTVDSPIVLLELDKYQASVEAERLAGSASWGELVTGKPQMLRRTIMGMMIQSLQQLTGANYFFYYGTTIFRAVGLDDSFQTAIVLGVVNFVSTFYALYTVDHYGRRNCLMWGCVGMVCCYVVYASVGVTRLWPNGEGNGSSKGAGNCMIVFACFFIFCFATTWAPIAYVIVSESYPLRIRGKAMSIAIAANWIWGFLIAFFTPFITSAINFYYGYVFMGCMVFAYFYVFFFVPETKGLTLEEVNQMYEEGVLPWKSSSWVPPDRRTAEYNLDDYSHDDKPWYKRVFSRN

SEQ ID NO: 341 - DNA, 1692 bp, Candida glabrata
  CDS (1)..(1692)
atgaattctcaaccggatttgataagtccacaaaaatcctcttcttcaaatgaggtggattctcatgaatccaaatatctaaaccaagtcggcaagaatgatatggctgacgaatttgttcagaacgaaatgattgccaacccaaacactggtaaaggtgcttttgtcggtgtcattatcagttgtttcatggtcgcttttggtggttttgtctttggatgggataccggtactatttctggttttgtcgcacaaaaggatttcattcacagatttggtatgaagcatcctgacggaactgaatacttatccaaggtcagaactggtttaattgtctctatcttcaatattggttgtgccatcggtggtattattctatctaagcttggtgacactaaaggtcgtaagatgggtttggttgttgtcgttgttatttacatcgttggtatcatcatccaaatcgcttccattaacaagtggtaccaatacttcatcggtagaattatctctggtttgggtgttggtggtatctctgttctatctccaatgttgatttctgaagtcgctccaagtgatctaagaggttctctagtttcttgctaccaattgatgatcacattgggtattttcttgggttactgtactaacttcggtaccaagaactacactaactctgtccaatggagagttccattgggtctatgtttcgcctgggctcttttcatgatcggtggtatgaccttcgttccagaatccccacgttatttggttgaagctggtcaaattgaagaagccagatcatccttggccagaatcaacaaatgttccccagatcacccatacatccaacaagaactagacttaattcaagctagtgttgatgaagctagatctgcaggttctgcttcttggggcgaattatttaccggtaagccagctatgttcagacgtactcttatgggtatcatgattcaatctttgcaacaattgacaggtgacaactacttcttctactatggtactattgttttcaaggctgttggtttagaagattccttcgagacctccattgttttcggtgttgtcaacttcttctccacctgttgctctttgctaactgtcgatcgtttcggtcgtcgtaactgtttactgtatggtgctatcggtatggtctgctgttacgttgtctatgcttctgttggtgtcacaagattatggccccatggtcaaggtaatggctcttccaagggtgccggtaactgtatgatcgtcttctcctgtttctacatcttctgtttcgctaccacctgggctccaatcgcttatgttattatctctgaaactttcccattgagaatcaaggccaaggccatgtccattgcaactgctgctaactggatgtggggtttcttgattgccttcttcactccattcatcaccaatgccattaacttctactacggatatgttttcatgggctgtatggtttttgcatacttctatgttttcttctttgtctcagagacaaagggtttaactctagaagaggttaacgaaatgtatgccgaaggtgttttgccttggaagtcttccaaatgggttcctgcttccagaagaggtgctgattatgatgccgatgctttgatgcacgacgacaccccatggtacaagagagttgttggtagaggttaa

SEQ ID NO: 342 - protein, 563 aa, Candida glabrata
MNSQPDLISPQKSSSSNEVDSHESKYLNQVGKNDMADEFVQNEMIANPNTGKGAFVGVIISCFMVAFGGFVFGWDTGTISGFVAQKDFIHRFGMKHPDGTEYLSKVRTGLIVSIFNIGCAIGGIILSKLGDTKGRKMGLVVVVVIYIVGIIIQIASINKWYQYFIGRIISGLGVGGISVLSPMLISEVAPSDLRGSLVSCYQLMITLGIFLGYCTNFGTKNYTNSVQWRVPLGLCFAWALFMIGGMTFVPESPRYLVEAGQIEEARSSLARINKCSPDHPYIQQELDLIQASVDEARSAGSASWGELFTGKPAMFRRTLMGIMIQSLQQLTGDNYFFYYGTIVFKAVGLEDSFETSIVFGVVNFFSTCCSLLTVDRFGRRNCLLYGAIGMVCCYVVYASVGVTRLWPHGQGNGSSKGAGNCMIVFSCFYIFCFATTWAPIAYVIISETFPLRIKAKAMSIATAANWMWGFLIAFFTPFITNAINFYYGYVFMGCMVFAYFYVFFFVSETKGLTLEEVNEMYAEGVLPWKSSKWVPASRRGADYDADALMHDDTPWYKRVVGRG

SEQ ID NO: 343 - DNA, 1707 bp, Candida glabrata
  CDS (1)..(1707)
atgcttttctcaaaaaagaaggaagatcctcaggccgttcctgaggcatctccagaaaatgacttttctccatctctatcccaacaagattcatctgcttccccatatgaaaatgatgtcaagaagcttgaagaagaagccgaacaaactccaatagtagacattccaaagaagcctgcttctgcttatgttactgtttctatcttctgtctattcatcgcttttggtggttttgttttcggttgggatactggtaccatttctggtttcgtcgctcaaaccgatttcattagaagattgggtcaaaagcgtgcaaatggtacacactacttgtctaaggttagaactggtttggttgtctctattttcaacattggttgtgccattggtggtgttatcttgtccaaattgggtgatgtgtacggccgtaagcctggtttgattatcgttgtcgttatttatgtcgttggtattattatccagatcgctactattgacaagtggtaccaatacttcatcggtagaattatctccggtttgggtgttggtggtattgctgtcttgtctcctatgttgatttccgaagtctctccaaagcacttgagagcaactctggtggcgtgctaccaactaatgattacattgggtattttcttgggttactgtactaacttcggtaccaagaactactccaactctgtccaatggagagttccattaggtctatgttttgcttgggctatctttatgatcagtggtatgaccttcgttccagaatctccaagatttttggtcgagaaaggtagaattgaggatgccaagagatctattgcgtcttctaacaaggtttcggttgatgatccagctgtcgttgctgaagttgacagtgttcaagctgctgttgaagctgaaagattggctggttctgcttcctggggtgaattgttctcaaccaagaccaagattttccaacgtttggttatgggtatcatgattcaatctttgcaacaattgacaggtgacaactacttcttctactatggtactattgttttcaaggctgttggtttggaagattccttcgagacctccattgttatcggtgttgtcaacttcttctctactttcgttggtattttcttggtcggtagatttggccgtcgtacctgtctattgtggggtgccgctaccatgactgcttgtatggttgttttcgcttctgtcggtgtcaccagactatggcctcacggtaagggtaatggttcttccaagggtgctggtaactgtatgattgtcttcacctgtttctacattttctgtttcgctaccacctgggctccactagctttcgttatctgttctgaaaccttcccattgagagtcaaggccaagtgtatggctcttgctcaagcctctaactggatctggggtttcttgattagtttcttcactcctttcattactgatgctattaacttcaactatggttacgtcttcatgggctgtctatgtttctcctacttctacgttttcttctttgttccagaaaccaagggtctaactttggaagaagtcaacaccatgtgggaagaaggtgtcttgccatggaaggcttctcaatgggttcctccatccagaagaggtgctgattatgatgccgatgctttgatgcacgatgacaccccatggtacaagagattcctataa

SEQ ID NO: 344 - protein, 568 aa, Candida glabrata
MLFSKKKEDPQAVPEASPENDFSPSLSQQDSSASPYENDVKKLEEEAEQTPIVDIPKKPASAYVTVSIFCLFIAFGGFVFGWDTGTISGFVAQTDFIRRLGQKRANGTHYLSKVRTGLVVSIFNIGCAIGGVILSKLGDVYGRKPGLIIVVVIYVVGIIIQIATIDKWYQYFIGRIISGLGVGGIAVLSPMLISEVSPKHLRATLVACYQLMITLGIFLGYCTNFGTKNYSNSVQWRVPLGLCFAWAIFMISGMTFVPESPRFLVEKGRIEDAKRSIASSNKVSVDDPAVVAEVDSVQAAVEAERLAGSASWGELFSTKTKIFQRLVMGIMIQSLQQLTGDNYFFYYGTIVFKAVGLEDSFETSIVIGVVNFFSTFVGIFLVGRFGRRTCLLWGAATMTACMVVFASVGVTRLWPHGKGNGSSKGAGNCMIVFTCFYIFCFATTWAPLAFVICSETFPLRVKAKCMALAQASNWIWGFLISFFTPFITDAINFNYGYVFMGCLCFSYFYVFFFVPETKGLTLEEVNTMWEEGVLPWKASQWVPPSRRGADYDADALMHDDTPWYKRFL

SEQ ID NO: 345 - DNA, 1671 bp, Candida glabrata
  CDS (1)..(1671)
atgagtagttctaataaagattccgagtcttttgagaattatccttcgcaaaattctgacaacagctacaagagggatgatctggatccagataccctcgagaaggaggccaagatcgaaaaccctaacggtaagagcgcctacatcgcagtgagtatctcctgtgctttggtcgctttcggtggtttcatcttcggctgggataccggtaccatttccggtttcgtcaaccaaactgacttcatcagaagaatcggttccaagcacgctgatggtacctcatacttgtccaaggttagaaccggtctagttgtcggtatcttcaacatcggttgtgccatcggtggtgttgttttgtctaaaatcggtgatactaaaggtcgtaaggccggtctggtgactgtcgtgctaatttacattgtcggtatcgtgattcaaatcgctaccattgacaagtggtaccaatacttcatcggtagaatcatctccggtttgggtgttggtggtatctctgtgctttccccaactctaatttctgaagtcgctcctaaggaattgagaggttctttggtctctctataccaaatcatgatcactttgggtatcttcttgggttactgtactaactacggtaccaagaactactccaactctgtccaatggagagttcctttgggtctatgtttcgcttgggctttgcttatgatcggtggtatgaccttcgttccagaatccccacgttacttgatcgaagccggagatgacgatgctgctcgtaagtctctatgtgctgccaacaagttgccagctgaacacccattcatcgaacaagaattcaccatcttgaaagccaaggtcgaagaagctaatgccgctggtactgcttcttggtccgaattgatcactggtaagcctgctatgttgagacgtaccattatgggtatcatgattcaatctttgcaacaattgactggtgacaactacttcttctactacggtactactgttttcaaggctgttggtttggaagattctttccaaacctctatcgttttcggtgtcgttaacttcttctctaccttcttatctttgttcaccgtcgaccgtttcggtcgtcgtaactgtttgctgtacggtgccgccggtatggtctgctgttacgttgtctacgcttccgttggtgttaccagattatggccaaatggtcaaggtaatggctcttccaagggtgccggtaactgtatgatcgtcttctcctgtttctacatcttctgtttcgctaccacctgggctccaattgcttacgttattatctccgaatccttcccattgagaatcaagaccaaggccatgtccattgcctctgcttccaactggatctggggtttcttgattgccttcttcacaccatttattaccaatgccattaacttctactacggttacgtctttatgggctgtatggtctttgcttacttctacgttttctttttcgtcaacgaaactagaggtttgactttggaagaagtcgatgagatgtacgccgaaggtgttctaccatggaagtcctccaagtgggtcccagaatccgaaagagatgacagctatgacgccgatgctttacttcatgatgacacaccatggtacaagagagtcattggtagaaattaa

SEQ ID NO: 346 - protein, 556 aa, Candida glabrata
MSSSNKDSESFENYPSQNSDNSYKRDDLDPDTLEKEAKIENPNGKSAYIAVSISCALVAFGGFIFGWDTGTISGFVNQTDFIRRIGSKHADGTSYLSKVRTGLVVGIFNIGCAIGGVVLSKIGDTKGRKAGLVTVVLIYIVGIVIQIATIDKWYQYFIGRIISGLGVGGISVLSPTLISEVAPKELRGSLVSLYQIMITLGIFLGYCTNYGTKNYSNSVQWRVPLGLCFAWALLMIGGMTFVPESPRYLIEAGDDDAARKSLCAANKLPAEHPFIEQEFTILKAKVEEANAAGTASWSELITGKPAMLRRTIMGIMIQSLQQLTGDNYFFYYGTTVFKAVGLEDSFQTSIVFGVVNFFSTFLSLFTVDRFGRRNCLLYGAAGMVCCYVVYASVGVTRLWPNGQGNGSSKGAGNCMIVFSCFYIFCFATTWAPIAYVIISESFPLRIKTKAMSIASASNWIWGFLIAFFTPFITNAINFYYGYVFMGCMVFAYFYVFFFVNETRGLTLEEVDEMYAEGVLPWKSSKWVPESERDDSYDADALLHDDTPWYKRVIGRN

SEQ ID NO: 347 - DNA, 1650 bp, Candida glabrata
  CDS (1)..(1650)
atgtctgaagaatcacaatctgctctctcggcctccaacagcaaagttgaaagagaggacgagttcaaggcttacaccgatgaggatggccaaccaatggttgagatcccaaagaagcctgcttccgcttacgttgctatttccatcttctgtctattcatcgctttcggtggtttcgttttcggttgggatactggtaccatttctggtttcgttgcccaaactgatttcatcagaagaatgggtcaaactcgtgctaatggtactcactacttgtctaaggttagaaccggtttaattgtttctattttcaacatcggttgtgccattggtggtgttgtcttgtccaagctaggtgatgtttacggtcgtaagatcggtttgatcagtgtcgttgtcatctacattgtcggtatcgttattcaaattgctaccattgacaagtggtaccaatacttcatcggtagaattatctccggtttgggtgttggtggtattgccgtcttgtctcctatgttgatttctgaagtctctccaaagcacatgagaggttctttggtttcctgttaccaactgatgattacctgtggtatcttcttgggttactgtactaactacggtaccaagaactactccaactctgtccaatggagagttccattgggcctatgtttcgcctgggctctattcatgatcggtggtatgaccttcgttccagaatccccacgttacttgattgaggttggtagagttgaagaagccagaagatccattgctatctctaacaaggtttctccagatgatccagctgtcactttcgaagttgaaaatgtccaagccggtgttgaagctgaaagattggctggttctgcttcctggggtgaattgttctccaccaagaccaagattttccaacgtttgattatgggtatcatgattcaatctttgcaacaattgacaggtgacaactacttcttctactatggtactactgttttcaaggctgttggtttggaagattctttcgaaacctccattgtcattggtattgttaacttcgcttccactttcgttgccttgtacgttgttgaccgtttcggtcgtcgtagatgtctattgtggggtgccgctgctatgactgcttgtatggttgtcttcgcttctgtcggtgtcaccagactatatcctcacggtatgaaacagccatcatccaagggtgctggtaactgtatgattgttttcacctgtttctacattttctgtttcgctaccacctgggctccaattccatttgttgtcaactctgaaactttcccattgagagtcaaggccaagtgtatggctattgcccaagcttccaactggatctggggtttcttgattgccttcttcactccatttattaccaatgccattaacttctactacggttacgtgttcatgggctgtctatgtttctcctacttctacgttttcttcttcattccagagaccaagggtctaactttggaagaagtcaacactatgtgggaagaaggtgtcttggcttggaagtctccaaactgggttccaccatccaagagagatgcttcttacgatgctgacgctttgatgcacgatgacaagccatggtacaagagattctattaa

SEQ ID NO: 348 - protein, 549 aa, Candida glabrata
MSEESQSALSASNSKVEREDEFKAYTDEDGQPMVEIPKKPASAYVAISIFCLFIAFGGFVFGWDTGTISGFVAQTDFIRRMGQTRANGTHYLSKVRTGLIVSIFNIGCAIGGVVLSKLGDVYGRKIGLISVVVIYIVGIVIQIATIDKWYQYFIGRIISGLGVGGIAVLSPMLISEVSPKHMRGSLVSCYQLMITCGIFLGYCTNYGTKNYSNSVQWRVPLGLCFAWALFMIGGMTFVPESPRYLIEVGRVEEARRSIAISNKVSPDDPAVTFEVENVQAGVEAERLAGSASWGELFSTKTKIFQRLIMGIMIQSLQQLTGDNYFFYYGTTVFKAVGLEDSFETSIVIGIVNFASTFVALYVVDRFGRRRCLLWGAAAMTACMVVFASVGVTRLYPHGMKQPSSKGAGNCMIVFTCFYIFCFATTWAPIPFVVNSETFPLRVKAKCMAIAQASNWIWGFLIAFFTPFITNAINFYYGYVFMGCLCFSYFYVFFFIPETKGLTLEEVNTMWEEGVLAWKSPNWVPPSKRDASYDADALMHDDKPWYKRFY

SEQ ID NO: 349 - DNA, 1659 bp, Candida glabrata
  CDS (1)..(1659)
atgtctgatcaagaatcaagatcacaatctgtcttgtcagcctccaacagtaaggctgacagagaagacgaattcaaggcttatgtcgatgaggaaggtcaaccaatggttgaaattccaaagaagcctgcttccgcttacgtctctatttccatcttctgtctattcatcgctttcggtggtttcgttttcggttgggatactggtaccatttctggtttcgttgcccaaactgatttcatcagaagattgggtcaaactcgtgctaatggtactcactacttgtctaaggttagaactggtctagtcgtctccattttcaacatcggttgtgctatcggtggtattgttttgtctaagttgggtgatatgtatggtcgtaagatcggtttgatcagtgtcgttgtcatctacattgtcggtatcgttattcaaattgctaccattgacaagtggtaccaatacttcatcggtagaattatctccggtttgggtgttggtggtattgccgtcttgtctcctatgttgatttctgaagtctctccaaagcacatgagaggttctttggtttcctgttaccaactgatgattacctgtggtatcttcttgggttactgtactaactacggtaccaagaactactccaactctgtccaatggagagttccattgggcctatgtttcgcctgggctctattcatgatcggtggtatgaccttcgttccagaatctccacgttacttgattgaggttggtagagttgaagaagccagaagatccattgctatctctaacaaggtttctccagatgatccagctgtcactttcgaagttgaaaatgtccaagctgctgttgaagctgaaagattggctggttctgcttcctggggtgaattgttctctaccaagactaaggttttccaacgtttgattatgggtatcatgattcaatctttgcaacaattgacaggtgacaactacttcttctactatggtactactgttttcaaggctgttggtttggaagattctttcgaaacctccattgtcattggtattgttaacttcgcttccactttcgttgccttgtacgttgttgaccgtttcggtcgtcgtagatgtctattgtggggtgccgctgctatgactgcttgtatggttgtcttcgcttctgtcggtgtcaccagactatggccaaatggtcaagaccaaccatcctccaagggtgctggtaactgtatgattgttttcacctgtttctacattttctgtttcgctaccacctgggctccaattccatttgttgtcaactctgaaactttcccattgagagttaaggccaagtgtatggctattgcccaagcttccaactggatctggggtttcttgattgccttcttcactccatttattaccaatgccattaacttctactacggttacgtgttcatgggctgtctatgtttctcctacttctacgttttcttcttcattccagagaccaagggtctaactttggaagaagtcaacactttgtgggaagaaggtgtcttgccatggaagtctccaaactgggttccaccatccaagagagatgcttcttacgatgctgacgctatgatgcacgatgacaagccatggtacaagagatttgtttaa

SEQ ID NO: 350 - protein, 552 aa, Candida glabrata
MSDQESRSQSVLSASNSKADREDEFKAYVDEEGQPMVEIPKKPASAYVSISIFCLFIAFGGFVFGWDTGTISGFVAQTDFIRRLGQTRANGTHYLSKVRTGLVVSIFNIGCAIGGIVLSKLGDMYGRKIGLISVVVIYIVGIVIQIATIDKWYQYFIGRIISGLGVGGIAVLSPMLISEVSPKHMRGSLVSCYQLMITCGIFLGYCTNYGTKNYSNSVQWRVPLGLCFAWALFMIGGMTFVPESPRYLIEVGRVEEARRSIAISNKVSPDDPAVTFEVENVQAAVEAERLAGSASWGELFSTKTKVFQRLIMGIMIQSLQQLTGDNYFFYYGTTVFKAVGLEDSFETSIVIGIVNFASTFVALYVVDRFGRRRCLLWGAAAMTACMVVFASVGVTRLWPNGQDQPSSKGAGNCMIVFTCFYIFCFATTWAPIPFVVNSETFPLRVKAKCMAIAQASNWIWGFLIAFFTPFITNAINFYYGYVFMGCLCFSYFYVFFFIPETKGLTLEEVNTLWEEGVLPWKSPNWVPPSKRDASYDADAMMHDDKPWYKRFV

SEQ ID NO: 351 - DNA, 1728 bp, Yarrowia lipolytica
  CDS (1)..(1728)
atgaagctgtttaaacgagaagcgccccaaggaacagtcagaactagctactttggaagtagaggcacgcggctgcatcggatcattgcagccgtggctggaatcggcttcttgctgtttggatatgacaccggagtcatgggcagtttgttgaccctgccgaccttcattcaccagtttccaactatggatagcacgtctccacatctggatgcaaagacaaagtcgttccattcgacggtccagggcacagccgtggccatctacgagattgggtgcatgttgggtgctctgtttacaatgtggggaggagacaagctgggtagacgaaagataatcttcattggctccataattgtcaccattggagcgattcttcaatgtgcttcgtattcgctcggtcaatttgtgactggaagagtcattgctggtattggagtcggtttcactacagctacagtgccaatgttccaggctgagtgtgctcgtcctgaacggagaggggccctggtgatgcttggaggagccctgacaactggaggaattgctctcagttactggatcgactttggcttttatttcgtcaagcgaaatgactcggactggagattcccggtagcttttcagatcctcttctccctcattctgtcgtgcacagtcctgtaccttcccgagtcccccagatggctcattaagaagggacgctatgaagaagcagcaggagtgtttgcagccctggaagatgtgcccattgacgacatctatgtatctcagcaactcatgcaggtcaaagagtcgctcatggtaggccaacttgcacaggaaggcattgagggagatgaagcacgacgacgaatcgcttcaggagacgtggagcttggagaagagccgccgttcaggaaacagttggttctgctcttcacctttggcaaaaaaaaacaccttcatcgagccatgttggcttactctcaacagatcatgcaccaaatgtgtggaatcaacctcatctcatattacgcagcctacattttccagacttctatcggtatgagcccgctcaactcacgaattctggcggcttgtgatggaacagagtacttcctggcgtcctggatcgccttctacaccattgagaggttcggacgaagaaagctcatgctgtttggaaccattggacaagcctgtacgatggctattctagcaggaacagtctacgcagcatcttcagtaaaagacggtggcctagacaaacctcaggctggcattgcagcagcagtgttcctgtttgttttcaacaccttcttctccattggctggctaggtatggcgtggctgtaccctgcggaaatcgcccccattgaaatcagagccatttcccagggtctgtccacatccggaaactgggtcttcaatttcctggtcgtcatgatcacccccgtggccttcaactccatcaagtggagaacttacatcatctttgcgtgcatcaacgtcgccatggtcccctccatctacttcttcttccccgaaaccatgggccgatcgctcgaagaaatcgatctcattttcgaagactccaaccccagaactccttgggacgtggttggtattgcaaagcgacttcctaggggtaccctggatggagttgttccttcagacatggagctggagaaggagatcgagcatgtcagcgtcaagtctttgggaggtgccactattcgtggatag

SEQ ID NO: 352 - protein, 575 aa, Yarrowia lipolytica
MKLFKREAPQGTVRTSYFGSRGTRLHRIIAAVAGIGFLLFGYDTGVMGSLLTLPTFIHQFPTMDSTSPHLDAKTKSFHSTVQGTAVAIYEIGCMLGALFTMWGGDKLGRRKIIFIGSIIVTIGAILQCASYSLGQFVTGRVIAGIGVGFTTATVPMFQAECARPERRGALVMLGGALTTGGIALSYWIDFGFYFVKRNDSDWRFPVAFQILFSLILSCTVLYLPESPRWLIKKGRYEEAAGVFAALEDVPIDDIYVSQQLMQVKESLMVGQLAQEGIEGDEARRRIASGDVELGEEPPFRKQLVLLFTFGKKKHLHRAMLAYSQQIMHQMCGINLISYYAAYIFQTSIGMSPLNSRILAACDGTEYFLASWIAFYTIERFGRRKLMLFGTIGQACTMAILAGTVYAASSVKDGGLDKPQAGIAAAVFLFVFNTFFSIGWLGMAWLYPAEIAPIEIRAISQGLSTSGNWVFNFLVVMITPVAFNSIKWRTYIIFACINVAMVPSIYFFFPETMGRSLEEIDLIFEDSNPRTPWDVVGIAKRLPRGTLDGVVPSDMELEKEIEHVSVKSLGGATIRG

SEQ ID NO: 353 - DNA, 1647 bp, Trichoderma reesei
  CDS (1)..(1647)
atgcccattggcaacatctacgtgatcgccggcgtgtccgtcgtcggcggcgcgttgttcggcttcgacatctcgtctgtgtcggcccagctggccgagcagtcgtacctctgctacttcaaccaagatgagaatccgcccaccaccgtcgatggcacctgtggtggcccgcggtccctcgtccagggcggcatcacggcctccatggctgctgggtcctggctgggcgccctgatctcgggtcccctgtctgatcgcctgggccgcaagtactccatcatggtcggatgtatcatttgggttattggctccaccctctcgtgcgcttctcaaaacattggcatgctcattgtcgcccgtatcatcaacggtctctccgtcggtatcgaatctgctcaggtccccgtctacattgccgagatttcgcctccctccaagcgcggccgcttcatcggcatgcagcagtgggccatcacctggggcatcctcatcatgtactacatctcctacggctgctccttcatcggcaagcagaaccctctcgagtacaacactgcctcgtggcgtattccatggggtctgcagatgattcccgccttcttcctcttcttcatgatgatgccgcttcccgagtctccccgttggctcgcccgcaaggaccgctgggaggactgccgcgccgtgctcaccctcgtccacggcaagggcgatcccaaccacccctttgttgcctacgaactgcaggacatcaaggacatgtgcgagtttgagcgtcgccatgctgatgtcacctacctcgacctgttcaagcccaacatgctcaaccgcacattcattggtctctttacccagatctggtcccagctgacgggcatgaacgtcatgatgtactacattgccaacatcttctccatggctggctacagcggcaacgccaacctgctcgcctcgtccatccagtacatcatcaacgtgctgatgaccattcccgccctgctttgggtcgacaaatggggtcgccgtcccacgctgctcgtcggttccgtcctcatggccctgtggatgtacgccaacgcgggtatcctcgccacctacggtgaagtcgtccccggcggcattgatcacgtcgctgcccagtcgatgcgtgtctcgggcgcccctgccaagggtctcattgcctgcacgtacctgtttgtggcctcgttcgcgcccacctggggtcccgtctcgtggacctaccctccggagctgttccccctccgcctccgaggcaagggcgtggctctggcgacttccggaaactgggccttcaacacggcgctgggtctcttcaccccggtggcctttgccaacatcaagtggaagtcgtacctcatctttgccatcttcaacactgtcgccttcttccacgtcttcttcgtcttccccgagacggccggcaagacgctcgaggagacggaggccatgttcgaggatcccaacggcatcaagtacctgggcacgcccgcgtggaagacgagggtggccacgagcctcacggagcgtgccgagcacggcgacattgaggccaagattggccatgacacggagaagcctccggtccacactcacgaggaggagaaggccagcactccccctccccagtag

SEQ ID NO: 354 - protein, 548 aa, Trichoderma reesei
MPIGNIYVIAGVSVVGGALFGFDISSVSAQLAEQSYLCYFNQDENPPTTVDGTCGGPRSLVQGGITASMAAGSWLGALISGPLSDRLGRKYSIMVGCIIWVIGSTLSCASQNIGMLIVARIINGLSVGIESAQVPVYIAEISPPSKRGRFIGMQQWAITWGILIMYYISYGCSFIGKQNPLEYNTASWRIPWGLQMIPAFFLFFMMMPLPESPRWLARKDRWEDCRAVLTLVHGKGDPNHPFVAYELQDIKDMCEFERRHADVTYLDLFKPNMLNRTFIGLFTQIWSQLTGMNVMMYYIANIFSMAGYSGNANLLASSIQYIINVLMTIPALLWVDKWGRRPTLLVGSVLMALWMYANAGILATYGEVVPGGIDHVAAQSMRVSGAPAKGLIACTYLFVASFAPTWGPVSWTYPPELFPLRLRGKGVALATSGNWAFNTALGLFTPVAFANIKWKSYLIFAIFNTVAFFHVFFVFPETAGKTLEETEAMFEDPNGIKYLGTPAWKTRVATSLTERAEHGDIEAKIGHDTEKPPVHTHEEEKASTPPPQ

SEQ ID NO: 355 - DNA, 2048 bp, Equus caballus
  misc_feature (1853)..(1853): n is a, c, g, or t
  CDS (178)..(1752)
ttgctatgcatccaacgcgttgggagctctcccatatggtcgacctgcaggcggccgcgaattcactagtgattctaatacgactcactatagggcaagcagtggtaacaacgcagagtacgcggggacacactcactgcaggacctggaattagaggaagactcccgacccataaaatgacagaacataaggtcactgggaccttggcgttcactgtcttcactgccgtgctgggttccttccagtttggatatgacattggtgtgatcaatgcacctcaagaggtaataatatcccattatagacacgttttgggtgttccactggatgaccgaaaagctattaataactatgctatcaacagtacgaaggaactgcccacagtcccatccctaaggactccaacaccaacttcttcggctgaggaagaggctatggcatctgccagccacatcatcatgttgtggtccctgtctgtgtccagctttgcagttggtggaatgttcgcatcattctttggtgggtggcttggggaccggcttggaagaatcaaagccatgttggtagcaaacattttctcaatagttggagctctcttgatggggttttcgaaattgggaccatctcacattcttataatttcaggaagaggcatatcaggactttactgtgggctaatttcaggcttggttccaatgtacattggtgaagttgctccaaccacactcagaggtgccatcggtactcttcaccagctggccattgtcacgggcattctcattagtcagattgttggtcttgactttatcctgggcaatcagaagctgtggcacatccttcttggcctgtctgcggtgccagctgtcctccagtctctaatgctcttcttctgtccagaaagccccagatacctttacattaagttggatgaggaagtcaaagcaagtaaaagtttgaaaagactcagaggaggtgctgatgtcaccaaagacatcattgagatgagaaaagaaaaggaagaagcatcaagtgagcagaaagtctccatacttcagctcttcaccaattccagttaccgacagcctatcctagtggcgttaatgctacacctggctcagcaattttctggaatcaatgggatcttttactactcaaccagcatttttcagacggctggaatcagccaacctgtttatgcaaccattggagttggtgtcgtcaacacagttttcactgttgtctctgtattccttgtggagaaggcagggcgacgctctctgtttctaatcggaatgagtgggatgtttctctgtgccatcttcatgtcagtgggacttatgctactgaataaactggcttggatgagttacgtgagcatgacagccatcttcctttttgtcagtttctttgaaattgggccaggccccatcccctggttcatagtggctgagtttttcagtcaaggaccacggcctgctgctttggcaatagctgcattcagcaactggacctgcaatttcattgtagctctgtgtttcccatacattgcggacttctgtggaccttatgtgttcttcctttttgctggagtggtcctagcctttactctgtttacatttttcaaagttccagaaaccaaaggaaagtcgtttgaagaaattgcggcagaattccgaaagaagagtggatcggcccaagcaccaaaagctgctgtcgaaatggaattccttggagctacagagactgcgtagagacaacctgctttttgatgtgaccagaaacaggatggaagctgtgtgtttttaaatgacgattcttttgagaattttatatctgcatcttgaagtattgntttattttctaaagagcttttatgggctctgattagaaacgtcatcaagtattaccaaagaaagtatttttttttaaagttaagagaatctatttttgatggtaaaactctgtaattaaagtaaacccaaaaagtcgagttcatttcgctgcattaaatggcaagtctggcctaaaaaaaaaaaaaaaaaaaaaa

SEQ ID NO: 356 - protein, 524 aa, Equus caballus
MTEHKVTGTLAFTVFTAVLGSFQFGYDIGVINAPQEVIISHYRHVLGVPLDDRKAINNYAINSTKELPTVPSLRTPTPTSSAEEEAMASASHIIMLWSLSVSSFAVGGMFASFFGGWLGDRLGRIKAMLVANIFSIVGALLMGFSKLGPSHILIISGRGISGLYCGLISGLVPMYIGEVAPTTLRGAIGTLHQLAIVTGILISQIVGLDFILGNQKLWHILLGLSAVPAVLQSLMLFFCPESPRYLYIKLDEEVKASKSLKRLRGGADVTKDIIEMRKEKEEASSEQKVSILQLFTNSSYRQPILVALMLHLAQQFSGINGIFYYSTSIFQTAGISQPVYATIGVGVVNTVFTVVSVFLVEKAGRRSLFLIGMSGMFLCAIFMSVGLMLLNKLAWMSYVSMTAIFLFVSFFEIGPGPIPWFIVAEFFSQGPRPAALAIAAFSNWTCNFIVALCFPYIADFCGPYVFFLFAGVVLAFTLFTFFKVPETKGKSFEEIAAEFRKKSGSAQAPKAAVEMEFLGATETA

SEQ ID NO: 357 - DNA, 1629 bp, Aspergillus fumigatus
  CDS (1)..(1629)
atgtccatccttgctctggtcgaagatcgaccaactccaaaagaggtctacaactggaagatttacctgctggccgccgtggcatccttcacatcatgcatgatcggctatgacagtgcctttatcggaaccactctcgccctcagctccttcagggaagagtttgggttcagcaccatgagcaagacggcggtcaatctggtaagcgccaacatcgtctcctgctaccaggccggcgccttctttggcgcttttttcgcctaccctattggtcacttctggggtaggaaatggggcctgctatttgccggtacgattttcacccttggcgctggtctcatgcttggtgccaacggtgatcgggggctgggcctgctttatggagggcgtgttctggccggtcttggtgtcggtgcgggctcgaatatcactcccatctacatttcggagatggctccaccctcgattcgtggacgactggttggagtgtacgagttgggctggcagattggtggtctggtgggcttctggatcaattacggtgtcagtgaaaccctggctcccagccacaagcagtggatcattccctttgctgtgcagttgattccatccggtctgctcctcattggtgcagttttcctcaaagagtctccgcgctggctgttctcgcgcggacgtcgggaagatgccatcaagaatctctgctggatccgccagctgcctgcggatcacatatacatgatcgaggagatcggcgcggtcgaccaggccttggaggagcagcgcaccaccattggccttggcttctggaagccgttcaaggccgccggaaccaacaaaaaagtcatgtatcgcctcttcctgggaagcatgctcttcttctggcaaaacggcagtggcatcaatgccatcaactactatagccccacggtgttcaagagcattggtctccatggggcaaacaccagcatgttcagcaccgggatttttggagtcgtcaagaccgtggtcacctttgtctggctcctttacctaatcgaccgcgtgggacggcgtctgctgctgttgatcggagctgccggcgcagcagtctgcttgcttattgttggcgcttatatcaagatcgccgacccggcctctaaccctacccaggagatgactgggggcggcattgcggccatgttcttcttttatctttacactgttttttacactccgtcgtggaacggcactccttgggtgatgaattcggaaatgttcgagcccaacatgcgctcccttgcgcaggcctgcgcggccgcgtccaactggctctggaactttctcatctcgcgtttcacaccgcagatgttcgccaagatggagtacggcgtgtggttcttctttgcatctttgatgttgctgtccatcgtttttgtgttcttccttgttccggagaccaagggcatcccgctggagagcatggatgtcttgtttgagtcgaagccgatttggcgtgctcatgcgacggtcctggccaaactgcgagaagatgaggaacagttccggcatgatatcgaggaatcggggtatagcaagactggtgagcagcaggtggagcacgtgtccgaggatctgcccaaggtctag

SEQ ID NO: 358 - protein, 542 aa, Aspergillus fumigatus
MSILALVEDRPTPKEVYNWKIYLLAAVASFTSCMIGYDSAFIGTTLALSSFREEFGFSTMSKTAVNLVSANIVSCYQAGAFFGAFFAYPIGHFWGRKWGLLFAGTIFTLGAGLMLGANGDRGLGLLYGGRVLAGLGVGAGSNITPIYISEMAPPSIRGRLVGVYELGWQIGGLVGFWINYGVSETLAPSHKQWIIPFAVQLIPSGLLLIGAVFLKESPRWLFSRGRREDAIKNLCWIRQLPADHIYMIEEIGAVDQALEEQRTTIGLGFWKPFKAAGTNKKVMYRLFLGSMLFFWQNGSGINAINYYSPTVFKSIGLHGANTSMFSTGIFGVVKTVVTFVWLLYLIDRVGRRLLLLIGAAGAAVCLLIVGAYIKIADPASNPTQEMTGGGIAAMFFFYLYTVFYTPSWNGTPWVMNSEMFEPNMRSLAQACAAASNWLWNFLISRFTPQMFAKMEYGVWFFFASLMLLSIVFVFFLVPETKGIPLESMDVLFESKPIWRAHATVLAKLREDEEQFRHDIEESGYSKTGEQQVEHVSEDLPKV

SEQ ID NO: 359 - DNA, 1653 bp, Leptosphaeria maculans
  CDS (1)..(1653)
atggcttcgacgatgaaaggggaaggccatgtcgctgagcgcgtcgagtcggcatctgctcactatgttaccgacgacacaaacacggccatcgataatgaacgtaatatgaccgtcagacagtcgttgcggttctggtggaaggctattgtattctcctttgtcatctcactgtgcgtggtcatggaggggtacgatacgagtctgatgaacaagttcttcgccttcactcctttcaagaaccgttttggagatcaggtcgacgcagacgggattccgcttgtgtcgtcgcgttggcagactattattttgaacggcacacaggtcggatgtatattgggcctgattatcaacggatatataaccgagtggattggatacaagaagacaatgattgggagtatggtgtttatgaccggagcaatcctcatccccttcttttcgaccagcctggagatgttcctcgtcggtggtatcatccaaggtctaccatggggtgtcttccagacccttgccatctcctacgccgcagacctatgccctattcatcttcgaggctacatgacatcctggatcaacatgtgctgggtcatcggcggcctcttgtccactggtattctaaccgggttaatgaagaacaattcgcaatggggctaccgcatcccctttgcgctccaatgggtctggcccatccccatcatcctcgccacactcctcgcgcctgaatctccctggtggctcgtacgtcaaggccgcaacggaagaagccaaagccgcgatccgcaaaatcaccacgcctactccggggtccagtttgacgtcgactcccacgttgagatgatggtcgtcaccaatcaatatgaaaaggaagtcggcgcgggtaccaactactggcacctgttccgcggaagcgaccttcaccgcacggaggtttcggctatggcgtttgtcacccaggcgctagttggcacgacttttatggggtttggggtccaattctttttgggtgtcggtctgaagcaggaggattctttctatctgactgttgggcaagactgcctgggtttaattggctgtttcattgcgtggtggattatgacgagatttggccgtcgacccatctacctcaccggtctctgtgccatctttctcatcctgctgattgtcggattccttgggcttgcaccgccaacaaacgaaagcgcaggcttagcaggcggcatattcatcgtccttatgattttctgcttccagctttcactgggtccaatttgctactcgctagccgctgaaatcccctcttcccgcctacgcgtgaaaactgtggccctctctcgcgcctcttacaattccattgtctttgtaacaaacaccattatgccgaaaatggtcggccgcaacgactggaactggggtgcaaaaggcggatttttctgggccggtattgccgcccttttcattgtgtggggctactttcgcctcccggagccgaaggggtttacgtactctgagctggatttgctgtttgagcacagagtttctgcgcggaagtttacgagggagagggtggaggttctgaggccagcgttgggtggcggggtggggaagttggatgagaaggagtcgattgagagggtcggggatggggcgtag

SEQ ID NO: 360 - protein, 550 aa, Leptosphaeria maculans
MASTMKGEGHVAERVESASAHYVTDDTNTAIDNERNMTVRQSLRFWWKAIVFSFVISLCVVMEGYDTSLMNKFFAFTPFKNRFGDQVDADGIPLVSSRWQTIILNGTQVGCILGLIINGYITEWIGYKKTMIGSMVFMTGAILIPFFSTSLEMFLVGGIIQGLPWGVFQTLAISYAADLCPIHLRGYMTSWINMCWVIGGLLSTGILTGLMKNNSQWGYRIPFALQWVWPIPIILATLLAPESPWWLVRQGRNGRSQSRDPQNHHAYSGVQFDVDSHVEMMVVTNQYEKEVGAGTNYWHLFRGSDLHRTEVSAMAFVTQALVGTTFMGFGVQFFLGVGLKQEDSFYLTVGQDCLGLIGCFIAWWIMTRFGRRPIYLTGLCAIFLILLIVGFLGLAPPTNESAGLAGGIFIVLMIFCFQLSLGPICYSLAAEIPSSRLRVKTVALSRASYNSIVFVTNTIMPKMVGRNDWNWGAKGGFFWAGIAALFIVWGYFRLPEPKGFTYSELDLLFEHRVSARKFTRERVEVLRPALGGGVGKLDEKESIERVGDGA

SEQ ID NO: 361 - DNA, 1542 bp, Aspergillus parasiticus
  CDS (1)..(1542)
atggttgctggcggtggaattgtttcttcatccggcatggatgcataccgggccctgccaaacaatacgaactcgaactggttcaaggacaagggcctccggcgtctgaatttcggcctcatgcttatgtttgcatccgctgcagcaaatgggtatgatggggctttgatgaatggtctcctgactctccctatgtgtgagtttcctttgtcaagttgtcctcacctctggcgaatgttcacctttattccagcttcgtacttcgcggattacttcggccgcaagatgtctgtcgcacttggatcggccatcatgattgtcgcgagcgttatccaagcggcaaccgtcggccgctgggccttctttggaacgagaatcgcgatgggtatcgggctgggctttgcacagacagctgccccgccgctgactactgagatagctcatccgcggcatcgtggcgttgtgacggccatttttcaggctacgtggtactggggtgctatcctagctgctgcggtgtgcttggccactctttatgtggagggaagtacttggtcctggcggattccatgccttgtccaatgtttcttccctgctgttcagttgctaggactactcatcgttccagaaagcccgaggtggctcgtgtcgaaggacaggcgagacgaggccttgcaaatcctcgcccgctaccatgggaattgtgacacgtcagatccattggttcagttcgagttttctgagatctgcagtgcgatcgagctagaaaactcagtcgcccataagagtggttggtctgcgttcattgcaaccaagggagctcggcatcgccttgcaatttgtctgttggtcggggttatgatccagtgggcaggcaatggtgtcatttcctactatcttgcaccgatccttcgatccgtcggcattaccaatcctacgcagcaatccgccatcaacctgggcctgcaggcgtggaacgcagtctgcgccgcgggaggcgccgtcgctgcagagaaatacggccgacgccctctctggatgctctccactgtacttatgctcctattctttaccctggcgactgtcctttctgccgtctttgacgaatcagccataaaagctgctggtagtgcggttgtcgcattcctctatctgttctacggcgcgtacgatatcgcctataccccgctctcaattgcataccctgtcgagatcatgccattctacctgcgcaccaagggcttatcgttaagcttaacggcgcagtttggggcgggcttcttcaaccagttcgtcaaccccatcgctcttggtgcgataaaatggaagttttatttcgtgtaccttggtctgttggttatctttttgggcattgtttactttgtgtttccggagacaaagggccacaccctggaggagatcgctgtcatcttcgacggtcctggggcagagacggaggtacagcgggatctggccgctatcattgcggtggagagggaggtaaaggctcctatgaaggaggagttggaacacgctccgtag

SEQ ID NO: 362 - protein, 513 aa, Aspergillus parasiticus
MVAGGGIVSSSGMDAYRALPNNTNSNWFKDKGLRRLNFGLMLMFASAAANGYDGALMNGLLTLPMCEFPLSSCPHLWRMFTFIPASYFADYFGRKMSVALGSAIMIVASVIQAATVGRWAFFGTRIAMGIGLGFAQTAAPPLTTEIAHPRHRGVVTAIFQATWYWGAILAAAVCLATLYVEGSTWSWRIPCLVQCFFPAVQLLGLLIVPESPRWLVSKDRRDEALQILARYHGNCDTSDPLVQFEFSEICSAIELENSVAHKSGWSAFIATKGARHRLAICLLVGVMIQWAGNGVISYYLAPILRSVGITNPTQQSAINLGLQAWNAVCAAGGAVAAEKYGRRPLWMLSTVLMLLFFTLATVLSAVFDESAIKAAGSAVVAFLYLFYGAYDIAYTPLSIAYPVEIMPFYLRTKGLSLSLTAQFGAGFFNQFVNPIALGAIKWKFYFVYLGLLVIFLGIVYFVFPETKGHTLEEIAVIFDGPGAETEVQRDLAAIIAVEREVKAPMKEELEHAP

SEQ ID NO: 363 - DNA, 1548 bp, Oryza sativa
  CDS (1)..(1548)
atgtctggaggtggatcaattgccaacgatggtgaagaggccgccggcggcggcggcggcggccgtggcgaggtgacatttacagttgtgatgagctgcctcacggcgggcgccggcgggctcttgcttgggtacgacatcggtgttacaggcggggtgacgcagatggaatcgttcctgcaggcgttcttcccggaggtcctgcggaagatgtccagcgcgaagcaggacgcgtactgcatcttcgacagccaggtgctcaacgccttcgtctcctccttctacctctccaccatggtcgccagccttgtcgccggccacctaaccaagacgctggggaggaggaactcgctgctgatcgccggcgtgctcttcttcgccggcaccctcctcaacctggccgccgtgaacatcagcatgctcatcatcggccgcatcctcctcggcgtcgccgtcggcttcagtagcttggctgcaccggtgtacctagcggagatagcgccggcgcggtggcgcggcgcgttcacggcctccataggcctcttcggcaacttgggtttcttgatggctgacatgatcaactaccgcgccactaccatggcgaggtggggttggcgcctctctctcggcgccggcatcgtcccggccgtcatcgtcatcgtgggcgccgcgttcatcccggacacgcccaacagcctcgcgctgcgcgggaggctcgacgaggcccgagactcgctgcggcgcatccgcggggccgccgatgtggacgccgagctcaaggacatcgtccgcgctgccgaggaggaccggaggtacaagtcgggcgcgctgcggcggcttctccgtcgcgagtaccggccgcacctggtgatggccgtgctaatcatggtgttcttcgagatgacgggagccatcgtggtggccatcttcacgccgctcctcttctacaccgtcgggttcacgagccagaaggccatcctcgggtccatcatcaccgacgtcgtcagcatcgtctccgtcgctgccgccgcggccgtggtcgaccgccacgggcggcgtagactcttcatggtgggcggtgccgtactgatcctgtgccaggtggccatggcgtggatcttcggcgcgcagctgggcgctgacggtgggagggcgatgccgcgggggtacgccgtcgcggtggtggcgctcgtgtgcacgtacacggcggggctaagcgtgtcgtggggctcgctgtcgtcggtggtcaccagcgagatcttcccgctggaggtgaggtcggcggcgctggggctgggcggcaccatctcgtcggcgctcacgttcatgcagtcgcagtcattcttggagatgctgtgcagcttcaagtacggcgccttcgcctactacgccggatggttggtgatgatgacggcgttcgtggcggcgttcctgccggagacgaagggggtgccgatcgagtccatgggcgcggtgtgggcgcagcattggtactggaagcgctttgtcaagctggcaccggccaagcaggccgatgggccagaatga

SEQ ID NO: 364 - protein, 515 aa, Oryza sativa
MSGGGSIANDGEEAAGGGGGGRGEVTFTVVMSCLTAGAGGLLLGYDIGVTGGVTQMESFLQAFFPEVLRKMSSAKQDAYCIFDSQVLNAFVSSFYLSTMVASLVAGHLTKTLGRRNSLLIAGVLFFAGTLLNLAAVNISMLIIGRILLGVAVGFSSLAAPVYLAEIAPARWRGAFTASIGLFGNLGFLMADMINYRATTMARWGWRLSLGAGIVPAVIVIVGAAFIPDTPNSLALRGRLDEARDSLRRIRGAADVDAELKDIVRAAEEDRRYKSGALRRLLRREYRPHLVMAVLIMVFFEMTGAIVVAIFTPLLFYTVGFTSQKAILGSIITDVVSIVSVAAAAAVVDRHGRRRLFMVGGAVLILCQVAMAWIFGAQLGADGGRAMPRGYAVAVVALVCTYTAGLSVSWGSLSSVVTSEIFPLEVRSAALGLGGTISSALTFMQSQSFLEMLCSFKYGAFAYYAGWLVMMTAFVAAFLPETKGVPIESMGAVWAQHWYWKRFVKLAPAKQADGPE

SEQ ID NO: 365 - DNA, 1584 bp, Oryza sativa
  CDS (1)..(1584)
atggccagagggggagcgatggtcgcggcggcggatgccggcgccggcgccggcgtggcgcccgggtacagcagcgagatcacgttcaccgtggtgatgagctgcctcatggcggcctccggcgggctcattttcggctacgacatcagcatcacaggtggactgacgcagatgcagtcgttcctcgaggcgttcttcccagacatctgggcgaagatgaacaacgccgagcaggacgcgtactgcatcttcgacagccaggtgctcaccaccttcgtctcctcgctctacctcgccggcgttttcgcctgcctcatcgccggccacgtcacccggagggtgggccggaggaactccatgctcatcggcgcctctctcttcttcgtcggcgccatcctcaactgcgccgccgtcaacatcgccatgctcgtcatcggccgcatcctcctcggcttcgccgtcggcttcaccaaccagtctgcgccggtgtacctggcggagatagctccggcgcggtggcgcggggcgttcacgagcatcttccacttcttcctcaacgtggggatgttcgtggccgacctggtgaactaccgcgccaacaccatcccggtctggggctggcggctgtcgctcggcgtcgccgtcgtcccggccgccgtcatcctggtgggcgccgcgttcatcccggacacgcccaacagcctcgtcctgcgcgggaagctcgacgaggcccgcgcctcgctgcgccgcatccgcggagccgccgccaacatcgacgccgagctcaaggacatcgcccgcgccgcggaggaggaccggcagcaccacaccggcgcgttccggcgcatcgtgcggcgggagtaccgcccgcacctggtgatggcgatcgccatcccggtgttcttcgagctgacggggatgatcgtggtgacgctgttcacgccgctgctgttctacacggtggggttctcgagccagaaggccatcctggggtccatcatcaccgacgtggtgagcctggcgtccatcgcggcggcggcgctgaccgtggacaggtacgggcggcggacgctgttcatggtgggcggcggcgtgctgctggtgtgcctgacgggcatggcgtggacgtacggggcgcggctggggagcgacggcgggaaggcgatgccgcgcgggtacgcggtggcggtggtggcgctggtgtgcctgtacgacgccgggttcggcatctcgtgggggcccctcaagtggatcatccccagcgagatcttcccgctggaggtgaggtcggcggggcagagcatgagcgaggccatctcgctggcgctcaccttcgcgcagacacagtcgttcctccggatgctgtgcagcttcaagttcggcgccttcgcgtacaacgccgcgtgggtggtggtcatgacggcgttcgtggcgctcctcctgccggagaccaagggggtgcccatcgagtcgctcggcgcggtgtgggcgcagcactggtactggaagcgcttcgtcaagccgccgccgccgccgccatcgacggcggcggagaccaagcaggcggacggggctccggcatga

SEQ ID NO: 366 - protein, 527 aa, Oryza sativa
MARGGAMVAAADAGAGAGVAPGYSSEITFTVVMSCLMAASGGLIFGYDISITGGLTQMQSFLEAFFPDIWAKMNNAEQDAYCIFDSQVLTTFVSSLYLAGVFACLIAGHVTRRVGRRNSMLIGASLFFVGAILNCAAVNIAMLVIGRILLGFAVGFTNQSAPVYLAEIAPARWRGAFTSIFHFFLNVGMFVADLVNYRANTIPVWGWRLSLGVAVVPAAVILVGAAFIPDTPNSLVLRGKLDEARASLRRIRGAAANIDAELKDIARAAEEDRQHHTGAFRRIVRREYRPHLVMAIAIPVFFELTGMIVVTLFTPLLFYTVGFSSQKAILGSIITDVVSLASIAAAALTVDRYGRRTLFMVGGGVLLVCLTGMAWTYGARLGSDGGKAMPRGYAVAVVALVCLYDAGFGISWGPLKWIIPSEIFPLEVRSAGQSMSEAISLALTFAQTQSFLRMLCSFKFGAFAYNAAWVVVMTAFVALLLPETKGVPIESLGAVWAQHWYWKRFVKPPPPPPSTAAETKQADGAPA

SEQ ID NO: 367 - DNA, 1536 bp, Oryza sativa
  CDS (1)..(1536)
atgccggaatccaccaagctcacggccatggctgtcgaccccaagaagaagaacgccagctatgcattcacctgcgccatcctcgcctccatggcctccatcattctcggctatgacatcggggtgatgagcggcgcatcgctgtacatcaagaaagacctgaagatcactgacgtgcaggtggagatcctgatgggcatcctgaacatctactcgctcgtcggctccttcgccgcggggaggacggcggactggatcggccggcggttcaccgtcgtcttcgctgccgccttcttcttcgccagagctctactcatggggttctccggtgactacgccactctcatggtcggccgcttcgtggcgggcgtcggcgtggggtacgcgatcatgatcgcgcccgtgtacacggccgagatctcgccggcgtcgtcgcgtggcttcctcacgtcgttcccggaggtctccatcaacctcggtatcctcctcggctacgtctccaactatgctttcgcgcgcctgccgctctccctcgggtggcgcgtcatgctcggcgtcggcgcggcgccatccgtgctgctcgcgctcatggtgctcggcatgccggagtcgccacggtggcttgtcatgaagggtcgcctcgccgacgccaaggctgtgctggagaagatcgctgacacgccggaggaggcgtcggagcggctcgctgacatcaaggcggcggctggcatcccagatgacctcgacggcgacgtggtcaccgtgtccaagaagagaggcggcgaggaggggcaggtttggagggagctcgtcgtgtccccgaccccggccatgcggcgaatcgtgctcgcggcggtcggcctccacttcttccagcaggcgtcgggcgtcgactccgtcgtgctctacagcccgcgcgtgttccagagcgcgggcatcaccggcgacgaccagctcctgggcaccacctgcgccgtcggcttcgccaagacggtcttcatcctggtcgccgcgttcctgctcgaccgcgccggccggcggccgctgctgctgaccagcacgggcgggatggtcttctccctcgtcggcctcgcgacggggctcaccgtcgtgggcggcagcccggacgcccaggtgcccagctgggccgtcggcctgtgcgtcgcgtccatcctggcctacgtcgccttcttctccgtcggcctcgggcccatgtccggcgtgtacacctcggagatcttcccgctgcgggcgcgcgcgctgggcttcgcggtcgccgtggcgtgcaaccgcgtcaccagcggcgtcatctccatgaccttcctgtcgctctccagcgccatcaccatcggcggcagcttcttcctctacgccgccatctcgtcgctcgcgtgggtgttcttcttcactcgcctcccggagacgcgcggccagacgctggaggagatcggcaaggtgttcggcatggacgacacggccatggaagcagaggactccgccgcgtacagggaaagactcttggcaacttctccatga

SEQ ID NO: 368 - protein, 511 aa, Oryza sativa
MPESTKLTAMAVDPKKKNASYAFTCAILASMASIILGYDIGVMSGASLYIKKDLKITDVQVEILMGILNIYSLVGSFAAGRTADWIGRRFTVVFAAAFFFARALLMGFSGDYATLMVGRFVAGVGVGYAIMIAPVYTAEISPASSRGFLTSFPEVSINLGILLGYVSNYAFARLPLSLGWRVMLGVGAAPSVLLALMVLGMPESPRWLVMKGRLADAKAVLEKIADTPEEASERLADIKAAAGIPDDLDGDVVTVSKKRGGEEGQVWRELVVSPTPAMRRIVLAAVGLHFFQQASGVDSVVLYSPRVFQSAGITGDDQLLGTTCAVGFAKTVFILVAAFLLDRAGRRPLLLTSTGGMVFSLVGLATGLTVVGGSPDAQVPSWAVGLCVASILAYVAFFSVGLGPMSGVYTSEIFPLRARALGFAVAVACNRVTSGVISMTFLSLSSAITIGGSFFLYAAISSLAWVFFFTRLPETRGQTLEEIGKVFGMDDTAMEAEDSAAYRERLLATSP

SEQ ID NO: 369 - DNA, 1891 bp, Plantago major
  CDS (146)..(1738)
ttccaagtctccaagctaattgagacttgtccaaagttcaatttcactagccaaacacacaagtaggctcacacttttacaacctcatcatatatccactaatttggccttcaattttatcacacttgttgaaaccctaaccatcatgaatagtgaacaccataactccggtggccttgcttctttttcggttgatgctggtaagtctcaaaagccagacgcggcgtcagttctcgacactcttcctaagaagccggtgacgaggaacaaatatgctttggccatttctattctggcttcaatgacttctgtcttgcttggatatgatacgggagtgatgagtggagctacactatacatcaaggacgacttgaaaatctcggacgtccaagtggagctcctagtcgggaccattaacatctactcccttgtgggctctgcagtcgcgggtcggacctccgactgggtgggacggcgctacactaccgtatttgcctccgtggtcttctttgtaggcgcgatcctcatgggaatcgcaacaaactatgtttttctcatggcgggaaggttcgtagccggtataggagtcggatatgcccttatgattgcgcctgtgtatgcagcggaggtagctcccgcatcttgccgtggcttcctcacctccttccctgaagtcttcatcaattttggagttctacttggttttgtatcaaactatgcgttcgcgaagtttcctcttaagctaggatggcgaatgatgctaggagtaggagcaattccagcggtcttcctagccatcggggtaatatacatgcctgaatcccctcgttggctagtcttacaaggccgccttggtgacgcaagaagggtgctagacaaaacgtctgactcactcgaagaatcaaagcttaggcttgcggatatcaaagaggctgcaggaataccggaagactgtaatgatgattttgttcaggtccagaaacactcccagggccagggggtgtggagagagcttctcctccatcccacaaaaccggttcttcacatccttatttgtggtgttggcatccacttctttcagcagggtatcggtatcgactcagtggtgttgtacagtcccagaatctacgatagagctgggatcacggacacttcagataagttgcttgcgaccattgccgttgggattagcaagacgttcttcattttgatcaccacattctatgttgacaggttcggtcgtcgctttctgctactcgtaagttgtgctggggttgctttgagcatgttcgccctaggaactgtcttaacaataattgaccgcaatccggatgcaaagcaaaccggcgtcttggttttggtggtgctcttgacgatggtgatagtgggattcttctcaatgggattgggacctatagcgtgggtgtacagctctgagattttccccctaaaacttagggcacagggttgcggcttaggagtggcgatgaaccggttcatgagtggtgtgatcttgatgtcatttatatcgttgtacaaagagataacaattggcgggtcattcttcttgtttggtggtattacgacactcgggtggattttcttcttcacattgtttccggagactcgagggaggacgttggaggaaatggagggtctctttggaactttcttcaaatggaggactacaatgaaagagttggacgccaagaagaggagtggtactgatggtgcctaagtatttagtagtgagttacattttttcttgttgactgttatagttctttattcataattagttatatgtaatatgaaaagctatgagagttgatatctcttcgtgtaatctttgatcgttttggtaataatacaaattataaaaaaaaaaaaa

SEQ ID NO: 370 - protein, 530 aa, Plantago major
MNSEHHNSGGLASFSVDAGKSQKPDAASVLDTLPKKPVTRNKYALAISILASMTSVLLGYDTGVMSGATLYIKDDLKISDVQVELLVGTINIYSLVGSAVAGRTSDWVGRRYTTVFASVVFFVGAILMGIATNYVFLMAGRFVAGIGVGYALMIAPVYAAEVAPASCRGFLTSFPEVFINFGVLLGFVSNYAFAKFPLKLGWRMMLGVGAIPAVFLAIGVIYMPESPRWLVLQGRLGDARRVLDKTSDSLEESKLRLADIKEAAGIPEDCNDDFVQVQKHSQGQGVWRELLLHPTKPVLHILICGVGIHFFQQGIGIDSVVLYSPRIYDRAGITDTSDKLLATIAVGISKTFFILITTFYVDRFGRRFLLLVSCAGVALSMFALGTVLTIIDRNPDAKQTGVLVLVVLLTMVIVGFFSMGLGPIAWVYSSEIFPLKLRAQGCGLGVAMNRFMSGVILMSFISLYKEITIGGSFFLFGGITTLGWIFFFTLFPETRGRTLEEMEGLFGTFFKWRTTMKELDAKKRSGTDGA

SEQ ID NO: 371 - DNA, 1987 bp, Plantago major
  CDS (116)..(1705)
ccagatgttccaataaaactctctctttctcaaagtctttctcgcaagtcttcttaataacactttcacttataagctagctagtcaattaaaccaacactacttgttttcaactatgactgctgatcaccagaagtcaagtgttgcttcttttgccgtctcctccggtgatgccggaaagctcggcttgtcgtcgactctcgacacactccctaagaagccccttaagaggaacaagtatgctttagccatctccattcttgcttccatgacctctgtcttgcttggatacgattgtggagtgatgagcggagctacacaattcatacaagaagatctgataatcactgacgtccaagtggaactcctggtggggaccatcaatatttactccctagtcgggtctgcggtggctggtcgaacttccgactgggtagggaggcgctacactatcgtgttcgcatccacgatattcttcctaggcgcgatccttatggggttcgcgaccaactacgcgttcctaatggtgggtaggttcgtagccggtattggggttggatacgcgcttatgatcgccccagtttatgcagccgaggtggctccggcttcgtgtcgtggttttctcacgtcattccctgaagtgttcatcaattttggtgtactacttggctatgtatcaaactttgcttttgccaaacttcctctcacgctaggatggagaatgatgctcggagtcggagccgttccgtctgtcctcctcggtgtcggtgtgctttacatgccagagtcccctcgttggctcgtcttacaaggtcgcctgggggatgcaaagaaagtgttggacaaaacatccgactccctcgaagaatcgaaactaaggctcgctgacatcaaagaggctgccggagtacccttagactgccatgacgagattgttcaggtccaaaaacgatcccaggggcaaggcgtgtggaaagagctcctcctccacccgacaaaaccggttcttcacatccttatatgtggcgttggcattcacttcttccagcagggtattggtatcgactcagtggtgctgtacagcccaaggatctacgagaaagccgggatcaagaacacttctgacaagttgcttgccacaattgccgtcggggtcagcaagaccttcttcatattgatcactaccttctttgttgacaggttcggacgtcgtccattgctactcacaagttgtgccggtgttgccttgtccatgttcgccctcggcaccagcctgaccataatagaccgcaatcccgacggcaacattaaaggtctcttgattttcgctgttatcctgacaatggcaatagtcggtttcttctcgatgggattgggacctatcgcgtgggtgtacagctccgagatcttcccgctgaagctcagggctcaaggatgcagtatgggagtcgcaatgaataggttcatgagtggtgtgatactcatgtcattcatatcgctctacaaggccataacaattggcggcgcgttcttcttgttcggtggtataacaaccgtggcgtttatcttcttctacaccctgtttccggagacacagggaaggactttggaggaaatggaggagcttttcggcactttcttcagctggaggactagaatgaaagagctggacgccaagaagaagactggttctgaagctacctaagtcatcttatgtgctgaatttatcctagttttctccatcttatgaggagaaaaacaatgagatggtagatggatcctctttagttctgaagatgtaataagactctgatgatactctctagtctctacaatgcctatctgttacaggagattcgaacataaatgtatcaataacttgcataagacaaatcgttatctaagatctttagtaatatcaggttaacatctaacctgtttgctatgtatgtaacaaatgtttgctgtatacgttaatgatttttcg

SEQ ID NO: 372 - protein, 529 aa, Plantago major
MTADHQKSSVASFAVSSGDAGKLGLSSTLDTLPKKPLKRNKYALAISILASMTSVLLGYDCGVMSGATQFIQEDLIITDVQVELLVGTINIYSLVGSAVAGRTSDWVGRRYTIVFASTIFFLGAILMGFATNYAFLMVGRFVAGIGVGYALMIAPVYAAEVAPASCRGFLTSFPEVFINFGVLLGYVSNFAFAKLPLTLGWRMMLGVGAVPSVLLGVGVLYMPESPRWLVLQGRLGDAKKVLDKTSDSLEESKLRLADIKEAAGVPLDCHDEIVQVQKRSQGQGVWKELLLHPTKPVLHILICGVGIHFFQQGIGIDSVVLYSPRIYEKAGIKNTSDKLLATIAVGVSKTFFILITTFFVDRFGRRPLLLTSCAGVALSMFALGTSLTIIDRNPDGNIKGLLIFAVILTMAIVGFFSMGLGPIAWVYSSEIFPLKLRAQGCSMGVAMNRFMSGVILMSFISLYKAITIGGAFFLFGGITTVAFIFFYTLFPETQGRTLEEMEELFGTFFSWRTRMKELDAKKKTGSEAT

SEQ ID NO: 373 - DNA, 1677 bp, Ashbya gossypii
  CDS (1)..(1677)
atgcaggcaacaacatctgcttccacggatgtggatgcatataaaaaggacatcaccgtcagacggcgtagccagccatgcagcagttccagcgggagcttgaaagtgatgaatactgagaccaaagcgatggatacccggtcggtcctggagttgaaggagaaggaggagtacggcgtgtatgaggctgcgggatcgactgacagatccatctctctctccggggccagcccggtgccggaggggtctctggtacggcctgtgctgtactgcctgtctgttgccttctgtgggattatcttcgggtgggatctcggcacaatcgggggtatttcgacgatgccctcgttccaaaacacactgggcccccggttcaacggggataccgggctgcacgagtttccgggtagattgctggggctgttgatcgggattttcaacattggatgtgcaattggcggtctgacgattgccaggctaggcgacattaagggcagaaaaatagcaattctcacatcgctgcttgtgtatgccgtcggaatgttcgtccaactgggatccggacacttttggtaccgctattttattggcagactgatagctggacttgcagtgggcgctactatggtgctggtaccaatgtttttgtctgagttggctccggtgcggatccggggcgcgatgattgtcttataccaggtggtgatctgtctgggtatcgctctgggcagcatagtgaactatgcttgtaaggagctggtccacgacacgctgtcgaacatgacgtggaaggtgccgattttcttccagattgggtttaccgttcttctctcgctggctttgctgatcacgccagagtcagcggagttccttgccatgaagggccacttggaaaaggccaagcgctccttcgcggtgatgaacggtttgtcaaaggatcatccgttcgttgaggagcgggtcgcgtccttcgttcaagtcagtatgaagtctgacgacattgagcattccggtgacagatgggagttcatcagaggtaatcctcgtctaggtctccgtctatttattggtgtgactgttatggctctacagatgttgtctggtgtgaactactttttctactacgggacaacattgttcagatttgtgggtattgaagatgcctatgtcacgtctatcatcattggctgcgttgacttgctgggtacctttattggtgtttacatcgtcgaaagacttggccggaagatctgcttgttatccggtgcaacaggtatgttcatctgtatgacagtctacgcgtgtcttggttcttttgctttgaaagatgattcgaacaacaagacagtaggtgcagtgatgatcttcttcacctgtgttttcgttatgttctttgctgctacctctgggccagtatccatggtggtaatgtctgaaatcttccccatcaggacgaaggttatgtctatggctatctgtacctccgtgaactggttggtcaactttttgattgcatttgtgacgccagatgtcactgatgcaattaattatcgtttcgggtttgtcttctccggctgcctattattctcgatagtgtttttcatctacttggtccctgagaccaaggggttgacacatgaacaggtggatgccatttacgagaaaacccatgactaa

SEQ ID NO: 374 - protein, 558 aa, Ashbya gossypii
MQATTSASTDVDAYKKDITVRRRSQPCSSSSGSLKVMNTETKAMDTRSVLELKEKEEYGVYEAAGSTDRSISLSGASPVPEGSLVRPVLYCLSVAFCGIIFGWDLGTIGGISTMPSFQNTLGPRFNGDTGLHEFPGRLLGLLIGIFNIGCAIGGLTIARLGDIKGRKIAILTSLLVYAVGMFVQLGSGHFWYRYFIGRLIAGLAVGATMVLVPMFLSELAPVRIRGAMIVLYQVVICLGIALGSIVNYACKELVHDTLSNMTWKVPIFFQIGFTVLLSLALLITPESAEFLAMKGHLEKAKRSFAVMNGLSKDHPFVEERVASFVQVSMKSDDIEHSGDRWEFIRGNPRLGLRLFIGVTVMALQMLSGVNYFFYYGTTLFRFVGIEDAYVTSIIIGCVDLLGTFIGVYIVERLGRKICLLSGATGMFICMTVYACLGSFALKDDSNNKTVGAVMIFFTCVFVMFFAATSGPVSMVVMSEIFPIRTKVMSMAICTSVNWLVNFLIAFVTPDVTDAINYRFGFVFSGCLLFSIVFFIYLVPETKGLTHEQVDAIYEKTHD

SEQ ID NO: 375 - DNA, 1608 bp, Ashbya gossypii
  CDS (1)..(1608)
atgaccgtttctgaaggtatgacgccgtctaaaagcgagctctcgggagatggttcgaattcgcatcccattgagagcaagaaagatattgtatcggtaatctcgacagagacaaagccattttcagcttatatctttgcgtgcttatgctgcttcatggttgcattcggtggctttatttttggatgggataccggtacgatttctggcttcgtcaaacaaacagatttcatagcgcgttttggccagctgagcccgagtggagagtatgaactcagtgatgacaggactggattgattgtctcgatctttaacattggttgtgctgttggtggtatattcttatccaagattggtgatgcctatgggcgtaaaatcggtcttgcgactgtgacggcagtttatgtcatcgggatagttatccaaatcagcgcaagtgacaagtggtaccaatatttcgttggtagaatcatttcaggtttaggtgtgggtggtattgccgttctttcgcccatgttgatctctgagacctccccaaagcacttgagaggctctcttgtgtcatgttaccaacttatgattaccgcgggtatctttctcggatactgcacgaattatggaacaaaaaccaattacactgactccagacaatggagaattccattggggttgggttttgcctgggctctcctaatgattggaggcatggccttcgttccggagtccccacgttacttggtggaggccgaaaacctacccaaggcccggatgtctattgcgagggccaacaaggttgcagaagaccaccctatcgtcgagcatgagctaaatactttgcagactgcaatcgagcttgaaaagctagcgggtaaggctcggatcgttgacctgtttaacgttaaaaagaagattttccaacggttgattattggtatttttatccagtctttgcagcaacttattggtaacaactatttcttctactacgggaccaccatatttaacgctgtcggaatggacgatccgttcgtcacgtcgattgtgctgggtatcgtgaactttggctcaacctttttctctctgtacaccgttgacaaatttggcagaagaaagtgtttgatatggggcgcctttgccatggctatttgtatggcaatttttgcttccgttggcgtcacgaagttgtggccaaatggcgaggatcaaccatcctccaagccagcaggtaacgttatgattgtcttcacctgcatttacatcttcttcttcgccaccacctgggctccgattgcctatgttatcatttccgagatatacccacttagagtgaaggctagagctatggcgcttgcaacagctgcaaactggatatggggtttcttgattgccttctttaccccacgaatcaccagtgccatcaagttttgctacggctacgtctttatgggctgtctgatcttcgctttcttctacatcttcttcttcgtcccagaaacgaagggcctgacattggaggatgtcgacgagatgtggcaagagggtgtggtgccgtgggggtccgagagctggctacctcgtagcgacagggaagttgcccacgacgcctaa

SEQ ID NO: 376 - protein, 535 aa, Ashbya gossypii
MTVSEGMTPSKSELSGDGSNSHPIESKKDIVSVISTETKPFSAYIFACLCCFMVAFGGFIFGWDTGTISGFVKQTDFIARFGQLSPSGEYELSDDRTGLIVSIFNIGCAVGGIFLSKIGDAYGRKIGLATVTAVYVIGIVIQISASDKWYQYFVGRIISGLGVGGIAVLSPMLISETSPKHLRGSLVSCYQLMITAGIFLGYCTNYGTKTNYTDSRQWRIPLGLGFAWALLMIGGMAFVPESPRYLVEAENLPKARMSIARANKVAEDHPIVEHELNTLQTAIELEKLAGKARIVDLFNVKKKIFQRLIIGIFIQSLQQLIGNNYFFYYGTTIFNAVGMDDPFVTSIVLGIVNFGSTFFSLYTVDKFGRRKCLIWGAFAMAICMAIFASVGVTKLWPNGEDQPSSKPAGNVMIVFTCIYIFFFATTWAPIAYVIISEIYPLRVKARAMALATAANWIWGFLIAFFTPRITSAIKFCYGYVFMGCLIFAFFYIFFFVPETKGLTLEDVDEMWQEGVVPWGSESWLPRSDREVAHDA

SEQ ID NO: 377 - DNA, 1641 bp, Ashbya gossypii
  CDS (1)..(1641)
atgtctgcagcaattgcacaacctgacaaccgctccgtgatgagcacacattcgtctacagcatcgaacaagccttcgaaagaagagaacaaggagtctggcctagttgagatcccagtgaagcctgcctccgcctatattacggtgtctttgttgtgtatcctagttgcatttggtggtttcatctttggatgggatacaggtacgatttctggtttcgtgaaccagtccgattacaagaatcgctttggtgaattgaatgagagtggtgactactacctatctgacaacagaactggcctgattgtggctatcttcaacattggttgtgccgttggtggtattttcttgtctaagtttgctgatatgtacggccgtcgtatcgggttgatgattgttaccctagtctacgttattggtatcgttgtccagataagttccaccgacaaatggtaccaatactgtattggcagagtcatctctggtctaggtgttggtggtattgctgttttgtcgccaatgttgatctccgagacctctccaaagcacttgagaggcatgttggtttcttgctatcaattgatgattactgctggtatctttgtcggttactgcgccaactacggtacaaaagccaaatatgaagactcgaagcaatggagaatcccattgggtctttcttttgcgtgggctatccttatgatcggaggtatggtcctcgttccagagtctcctcgttacttggtcgaggtcaacaaatatgaggatgctaagagatctctagccagatccaacaaggttcctgtggacgacccatcgatccaagctgagtttgacaacatccatgctggtattgagttggagagaatggcaggttccgcttcttggggtgagctattctctactaagagcaagattctacagcgtgttattatgggtgttatgatccaatctctacagcagctaactggtaacaactacttcttctactacggtactactattttcaagtctgtcggtttggaggattctttccagacctcgatcatcttgggtgctgtgaacttcggttccacctttgttgctgtctgggctgtcggtaaatttggcagaagacggctgatgctagccggtgccgcggctatgactgtctgtatggtgatcttcgcttctattggtgtgactaagttgtggcctaacggggaggaccagccttcatctaagccagctggtaacgtcatgatcgtcttcacctgtatctacattttctgcttcgcgactacctgggcaccaattccgttcgtcatcgtttcggagactttcccattgagagtcaaggccaagggtatggctattgccacagccgcgaactggatctggggtttcttgatcgccttcttcactcctaagatcaccaacgccatcaagttcaactacggctacgtgttcatgggctgcttgatcttcgccttcttctacatgttcttctttgtcccagagacaaagggtttgactttggaagaggtcgaggagatgtggcaggagggtgtcgtcccatggaagtccgagtcctggactccttcctacaagagaaatgcttacgagactgaggaggtgaagccagagaagacctgggcttaa

SEQ ID NO: 378 - protein, 546 aa, Ashbya gossypii
MSAAIAQPDNRSVMSTHSSTASNKPSKEENKESGLVEIPVKPASAYITVSLLCILVAFGGFIFGWDTGTISGFVNQSDYKNRFGELNESGDYYLSDNRTGLIVAIFNIGCAVGGIFLSKFADMYGRRIGLMIVTLVYVIGIVVQISSTDKWYQYCIGRVISGLGVGGIAVLSPMLISETSPKHLRGMLVSCYQLMITAGIFVGYCANYGTKAKYEDSKQWRIPLGLSFAWAILMIGGMVLVPESPRYLVEVNKYEDAKRSLARSNKVPVDDPSIQAEFDNIHAGIELERMAGSASWGELFSTKSKILQRVIMGVMIQSLQQLTGNNYFFYYGTTIFKSVGLEDSFQTSIILGAVNFGSTFVAVWAVGKFGRRRLMLAGAAAMTVCMVIFASIGVTKLWPNGEDQPSSKPAGNVMIVFTCIYIFCFATTWAPIPFVIVSETFPLRVKAKGMAIATAANWIWGFLIAFFTPKITNAIKFNYGYVFMGCLIFAFFYMFFFVPETKGLTLEEVEEMWQEGVVPWKSESWTPSYKRNAYETEEVKPEKTWA

SEQ ID NO: 379 - DNA, 1620 bp, Ashbya gossypii
  CDS (1)..(1620)
atgagccgtcaggttttacacagtgatatgcggtccgtgggtacagaggtatccgcggcatcgcaaaagaagtatttgatggaagaaacagtcgacataccaacaaaaccggctacggcatacattacagtttgtttgctctgtgtatttgttgcatttggtggctttatttttggctgggataccggtaccatttctggttttgtcaatcagacagactttaggcggcgttttgcccaagtgaatgatgaaggcggatactactggtccaatgccagagttggtcttattgttgcgatctttaatattggctgcgcagttggcggtatcattctatccaggttgggcgatatgtatggacgccgcattggcttgatgatcgttagtctcatttatgtggttggtataattattcaaatttcatccaacactaaatggtatcaatactgtattggcagagtcatctctggtctaggtgttggtggtattgctgtgttgtcgcctatgttgatttcagagacatcgccaaaacatttgagagggacactagtttcatgttaccagttaatgattacggccggtatattattaggctattgcgcgaactacggtacgaaaagcagatacgatgactcaaggcaatggcggattcctttggggctctgctttttgtgggctatattcatgattactggtatggcgttcgtgccagaatcccctcgttatttgatcgaaaaagataaaattgaagaggctaaaagatctctagcaacatcaaataaagttccggtagatgatccggctattctggcagaagtcaataacatccaagctggtgtggagttagaaagaatggcaggttccgcttcctggggtgaattattcaccgtccgcaccaagattctccaacgagtgatcatgggtgctatgatacagtcgttacaacaacttacaggtaacaattatttcttctactacggtaccacgatttttgattccgtcggtttggaggatgcgttcaagacatccatcattttaggtgccgtaaactttggttccacctttgtggcaatgtacactgtcgatagatttggcaggaggaaatgtttgctctacggtgccgcggcaatggccgtttgtatggttatttttgcctccgttggtgtgacaagactatggcccaatggacccgatcagccttcttccagaccggcaggcaatgctatgattgtttttacctgcctctacattttcttctttgcaactacctgggccccaattgcgtatgtcattgtttcggagactttcccattaagagtcaaagccaagggcatggctatcgccacagccgcgaattggatatggggctttttgatcgccttctttacaccatacattaccaatgcgatcaggttttactacggctacgtgttcatgggttgtttgatctttgcgttcttctacatcttcttctttgtccccgagacaaagggtttgactttggaagaggtcgaggagatgtggcaggaaggtgtggtaccttggcgttcagaatcatgggtaccctctgcaaggcggcacgcgccgtactccagtgacaaacaagctgccggcatatga

SEQ ID NO: 380 - protein, 539 aa, Ashbya gossypii
MSRQVLHSDMRSVGTEVSAASQKKYLMEETVDIPTKPATAYITVCLLCVFVAFGGFIFGWDTGTISGFVNQTDFRRRFAQVNDEGGYYWSNARVGLIVAIFNIGCAVGGIILSRLGDMYGRRIGLMIVSLIYVVGIIIQISSNTKWYQYCIGRVISGLGVGGIAVLSPMLISETSPKHLRGTLVSCYQLMITAGILLGYCANYGTKSRYDDSRQWRIPLGLCFLWAIFMITGMAFVPESPRYLIEKDKIEEAKRSLATSNKVPVDDPAILAEVNNIQAGVELERMAGSASWGELFTVRTKILQRVIMGAMIQSLQQLTGNNYFFYYGTTIFDSVGLEDAFKTSIILGAVNFGSTFVAMYTVDRFGRRKCLLYGAAAMAVCMVIFASVGVTRLWPNGPDQPSSRPAGNAMIVFTCLYIFFFATTWAPIAYVIVSETFPLRVKAKGMAIATAANWIWGFLIAFFTPYITNAIRFYYGYVFMGCLIFAFFYIFFFVPETKGLTLEEVEEMWQEGVVPWRSESWVPSARRHAPYSSDKQAAGI

SEQ ID NO: 381 - DNA, 1644 bp, Ashbya gossypii
  CDS (1)..(1644)
atgacactggtggacaagcttttgctcagaaatattgaatacaagggcaccgcgtacgactactttcccaaggtctacaatgtgtacctggtggcggttgttgcgtgcatctcggggatgatgtttggctttgatatctcgtcgatgtcttcgatgcaggactttgagccctacaaggactactttaaacatccaaacgaactgacgcagggcggtatcacggcctcgatggctgctggttccctgttaggatccatcctttcgcccggtatctcggacgcttttggtcgtcgggtgtcattgcacatgtgttccagtctgtggattattggcgcggtgctgcaaactgcagcgcagaaccaggcgatgctttttgtggggcgcattgttgcggggcttggtgttggcttcgggtcatcggtcgcgccagtgtacactgctgaggtgtctccgccaaagatcagaggtgctgtgggaggtttgttccagctgtcggtcacggtcgggatcttggtcatgttcctgatcgggtacggatctgtgtcgttgaattcggtggcgtccttccgtgtggcgtggtcaatgcaactcgtgccaggcgtggtgttgctgttggccacattcctgcttcctgagtcacctcggtggctagctaaccatggccggtgggatgagaccactcttgttgtcgagaaagtcgggcgcagtgtcaatgtcagcgatgaagagctgcgcatacacatcaacgagatccgcgagcgcgtggccctggatgaaatggcccgcgatttcacttacgccgacctgttccgccgcaagacacaacgcaagattttcattggtatggctgcgcagatgtggcagcaactctgtggtatgaatgtgatgatgtactatattgtccatgtgttcaaaatggctggattctcgggcaatcagaacctggtctcttcgatagtgcagtatgtgctaaacgtgggcatgaccatcccctctctatttttggttgatcgtgcagggcgccggcctgtcttgatcatcggaggtgtgttgatgttcacctggctttacgctgtggccggaattcttgccacttattctgttcctcgccctaatggcgtggaaggcaacaccactgttcggattgagattccgcccgagaggagctccgcggccaaagctgtcattgtctgttcttatctgttcgtgtgttcctttgctcctacctggggtatcggtatctgggtgtactgcgcagagattttcaataacattgagcgtgcccgcggttcggctctgtgtacctctgtcaactgggccttcaactttgcccttgccatgtttgtgccaacggcgtttaagaatatcacttggaggacatacattatttttggcacattctctgtcgcgctgacgatccacgcattcctgtcgttccctgaaacaaagggtaagactctagaggaaattgacgaaatgtgggacgcccatattccggcctggcgcaccgccagttacaagcccgagcttgcccaaatggcagcgccaaaactttcttcaggcagcatttccgacgccacaggcgggcttcacgagaaaaaggcggctgccggcagccctggtgccagtgctggctcttcctag

SEQ ID NO: 382 - protein, 547 aa, Ashbya gossypii
MTLVDKLLLRNIEYKGTAYDYFPKVYNVYLVAVVACISGMMFGFDISSMSSMQDFEPYKDYFKHPNELTQGGITASMAAGSLLGSILSPGISDAFGRRVSLHMCSSLWIIGAVLQTAAQNQAMLFVGRIVAGLGVGFGSSVAPVYTAEVSPPKIRGAVGGLFQLSVTVGILVMFLIGYGSVSLNSVASFRVAWSMQLVPGVVLLLATFLLPESPRWLANHGRWDETTLVVEKVGRSVNVSDEELRIHINEIRERVALDEMARDFTYADLFRRKTQRKIFIGMAAQMWQQLCGMNVMMYYIVHVFKMAGFSGNQNLVSSIVQYVLNVGMTIPSLFLVDRAGRRPVLIIGGVLMFTWLYAVAGILATYSVPRPNGVEGNTTVRIEIPPERSSAAKAVIVCSYLFVCSFAPTWGIGIWVYCAEIFNNIERARGSALCTSVNWAFNFALAMFVPTAFKNITWRTYIIFGTFSVALTIHAFLSFPETKGKTLEEIDEMWDAHIPAWRTASYKPELAQMAAPKLSSGSISDATGGLHEKKAAAGSPGASAGSS

SEQ ID NO: 383 - DNA, 1995 bp, Ashbya gossypii
  CDS (1)..(1995)
atgctgaaaagtgttgagaagttaacacttccacaagtaatatcacagaggcttactttccactatcgactgaggcgcaagcctgaggagatagaggagaactgcatctcatccgagacctccgatgagaagcactcgaagggctgcaacgatcagaagaatgcaagccactatgagcagcctgtgatggtgaccgatttgagagatgattcagaagggttttccatccaggagaccgaactagaacggccagcgatgcgacagtctaataagatgtcaattctggtgggcatatttgttgcggtcggtggctttctatatgggtacgataccggcctcattaacagtatcaccgagatgagcttcgtcaagaagcattttgcacccaatcatgtcaactttacctcgatggagatgtccatacttgtctctttcctgtcacttgggaccttcattggtgcacttgcggccccgctgctggcagactcctacggaagaaaatcgactgtcatattcagtacattcataatgttcttggaaggcacgttgctgcaggtcagcgcaactagtatggcgcttctagtggcaggtcgtgttgcctccggggtggctgtgggactaatatctgtggttgtgccgttataccaaggcgaagcggcgcagaaatggtgtcgtggtgccattatctgtacatatcagtgggccataacctgggggttgcttgtctcgagcgctgtttctcagggcacatatctgaggaacgacgcctcgtcctacagaataccaattgcgctgcaatacgtgtggtgcatcattcttgggtcgggaatgcttctgctgccagagagcccacgttattacgtcctgagggaccagctggacaaggccgctctatccctgtccttcttgcgaggagtgccgcacgatgacgccggcctcctggaagaactggtagagatcaaggcgaactatgactatgagatgtcgttgaagtcatcttcgtatcttgactgttttcgaactagtgagcacagacccaagcagcaaattaggatgctttcagggattttgttgcaggcattccagcagttttcgggcatcaatttcattttctattacggggtcaacttcttcagcagcacaggcattagcaagagctatcttgtatcgttcgttacttacgccgtaaatgtcgtcttcaacatacccggtctatttctcgtcgagtatgctggccgccggaagctgcttctggtcggcggcgtgctgatgaccatctccaatttcatcatcgcaatagtgggtgtgtccaccgattcagttatcgctaagaaggttatgatcgtgttcatctgcatgttcatcgccgcattctccgcaacttggggaggcgtcgtctgggtcatgtccgccgagatgtatccgttgggcgtccgctccaaatgcgcggccatctgcgcggcatccaactggctcgttaactttgtctgcgcgatgattaccccgtacctcattgatataagctcctacacgtcccgcctcggtagcaccatcttctttgtctggggttcgctcaacgccattggcgttatggtcgtctacctgactgtctatgagaccagcggtctaacactcgaagaaattaatgaactctaccgccgctgtccatccagcctggcgtcctgtgcatggaaccggcgtatcaaaagttccccagaagactaccacctcaccgtcaccggccggtgcgctcccagtgaacaccaagaccatgtcgatctcggcaacggtctctgtctggccacgtatcaccgtgccccgccttcaataatttcggaatcctccaatagcagtagcgacagcgttgtcaattccggcgctggcgctggcggtcccgctgccgcgcctgcgggcatcaacgcttacatgtctgacctaatgaacaatattgtcgtaaacacacattctactcccgcagcaggcacaagtacatag

SEQ ID NO: 384 - protein, 664 aa, Ashbya gossypii
MLKSVEKLTLPQVISQRLTFHYRLRRKPEEIEENCISSETSDEKHSKGCNDQKNASHYEQPVMVTDLRDDSEGFSIQETELERPAMRQSNKMSILVGIFVAVGGFLYGYDTGLINSITEMSFVKKHFAPNHVNFTSMEMSILVSFLSLGTFIGALAAPLLADSYGRKSTVIFSTFIMFLEGTLLQVSATSMALLVAGRVASGVAVGLISVVVPLYQGEAAQKWCRGAIICTYQWAITWGLLVSSAVSQGTYLRNDASSYRIPIALQYVWCIILGSGMLLLPESPRYYVLRDQLDKAALSLSFLRGVPHDDAGLLEELVEIKANYDYEMSLKSSSYLDCFRTSEHRPKQQIRMLSGILLQAFQQFSGINFIFYYGVNFFSSTGISKSYLVSFVTYAVNVVFNIPGLFLVEYAGRRKLLLVGGVLMTISNFIIAIVGVSTDSVIAKKVMIVFICMFIAAFSATWGGVVWVMSAEMYPLGVRSKCAAICAASNWLVNFVCAMITPYLIDISSYTSRLGSTIFFVWGSLNAIGVMVVYLTVYETSGLTLEEINELYRRCPSSLASCAWNRRIKSSPEDYHLTVTGRCAPSEHQDHVDLGNGLCLATYHRAPPSIISESSNSSSDSVVNSGAGAGGPAAAPAGINAYMSDLMNNIVVNTHSTPAAGTST

SEQ ID NO: 385 - DNA, 1642 bp, Drosophila melanogaster
  CDS (119)..(1453)
cgaacttagtagtatatgattcttacgttcagtagaacgaactattgatactaggcagtctttgcacgcacacactaatagttagagtgtaatttgcctctgtttcaaaattgtaaaaatgggaactgccactcagtttattgttggtttcatcggcgccctgggcgccttttgtctaggcgcagtgatcggctggtcaggaccggtggaaaatgaagtcaagaattctaacgcgtacaactttacccctcgtcaaacggaatggggcctggtgggatctctgatgactctgggtgcagctttctcgtgcattccggtgggcgtgctcattggtaagatcgggcggaagacgacaatgctaatcctgctgccaccgttctttatcggatggctcctgatcctcctggcatcgcacatagcaatgctgctgctcggacgcttcgtagtgggattctgcggaggagccttctgcgtgacttgtcccatgtacgtgactgagatagcccaggtccagtaccgcggaaccatgggatgcttcttccagctgctaatcgtttttggtattctgtacgcctttgtggttggaggttttgtaaagaccttctactttaatattgcttgcgcaattttgcccgtaatcttttttgtcttgatgatttttatgccggaatctccgatttttctggcccaaaagggaaaagccgagaaggcggagaaatctcttaaatttctgcgcggaaaggatgcggatgtgagcggtgagctgaaggaaatgagcgccgagggccaaaaggagaaggctagcgttgggaaaatcctatgccgcaggattaccctcaaggggctgttcctctccatcggtctcatgttgttccagcagatgacgggcatcaatgcgattattttctattctacattcatctttgagacggctggatcgaccctggagcccagaatatctacaattattgtgggcattgtgcaggctattgccactatcatttcgatcctggttattgagaaagtcggtcggaagatactcctattggtgtccgcctgcatgatgggtatcagcaccctgatcatggctctttactttggcatgttgatgaaatctggagtcggctggctggccctaattgccgtttgtgtttttattattggattctccctgggattcggtccagttccctggctgatgatggccgagctctttgccgaggatgtaaaggccctagcaggatcgattgccgggactacaaattggtgttttgcttttatcgtgacccttcttttccctgttcttaacgatattattggagcaaccgcgtgctttgcaatcttcttcggatttgcggtggccgcctttgtcttcattctcttcctaattcccgagacaaagggaaaaacgcttaacgagattcaggccaagatgggcgagaaggccgaatagtacttgcaatcttttgatatcatcagggattcaagtctatggatctctgaccaaacttttgataaattttcgtggaattggaactgaatatttgtaccgtcaaatgcaatcaaatgcatttaaatttatgtcttaacatttttctacatgatgttattatgaataaaatgccacctcttgacattttaa

SEQ ID NO: 386 - protein, 444 aa, Drosophila melanogaster
MGTATQFIVGFIGALGAFCLGAVIGWSGPVENEVKNSNAYNFTPRQTEWGLVGSLMTLGAAFSCIPVGVLIGKIGRKTTMLILLPPFFIGWLLILLASHIAMLLLGRFVVGFCGGAFCVTCPMYVTEIAQVQYRGTMGCFFQLLIVFGILYAFVVGGFVKTFYFNIACAILPVIFFVLMIFMPESPIFLAQKGKAEKAEKSLKFLRGKDADVSGELKEMSAEGQKEKASVGKILCRRITLKGLFLSIGLMLFQQMTGINAIIFYSTFIFETAGSTLEPRISTIIVGIVQAIATIISILVIEKVGRKILLLVSACMMGISTLIMALYFGMLMKSGVGWLALIAVCVFIIGFSLGFGPVPWLMMAELFAEDVKALAGSIAGTTNWCFAFIVTLLFPVLNDIIGATACFAIFFGFAVAAFVFILFLIPETKGKTLNEIQAKMGEKAE

SEQ ID NO: 387 - DNA, 1620 bp, Neurospora crassa
  CDS (1)..(1620)
atggagcacgatcactccgcctccgacattgagaaggaggccgtcactgtggcccggccacagggcgatgtcacccgcgttgaggctcccgttaccctcaaggcgtacatgatgtgcgtctttgccgctttcggcggtatattcttcggctacgactcaggttacatttctggtgtcatgggcatgaagtactttatcgaaaccatcaacggacccggcgccaccttcctgccatccaaggaaaagtcgctcatcacctccattctctctgccggtaccttctttggcgccctcatgggcggtgatctcgctgactgggttggccgtcgtcctaccatcatcttcggctgcctcgtcttcatcgtcggtgttgttctccagactgcctcccagagcttgggtctcatcgttgccggccgtctcgtcgctggtttcggtgtcggtttcgtctcggccattatcatcctgtacatgtctgagatcgcgccccgcaaggtccgcggtgccatggtgtccggctaccagttctgcatctgcctgggtctgctcctggcctcgtgcgttgactacggcacccagaaccgcaccgacagcggctcttatagaatcccgattggtctccagatggcctgggccctcattcttgctactggtatctttttccttcctgaatcccctcgcttcttcgtcaagaaaggcaagctcgacaaggccgccggcgtgctctcccgcctgcgcgaccagccgctcgattccgactacgtcagggacgaacttgccgagatcgttgccaaccacgaattcgaaatgaccgtcgtcccctacggcaactacttccagcagtgggccaactgcttccgcggctccatctggcagggcggttcttacctccgccgcaccattctgggcacttcgatgcagatgatgcagcagtggacgggaatcaactttatcttttactttggcaccaccttcttccagcagctcggcaccattgacaaccccttcctgatgtctctggtcactactcttgtcaacgtctgctccacccccatctccttttacaccatggagaagctcggccgtcgtaccctcctcatctggggcgctctcggcatgctgatctgcgagttcatcgtcgccatcgttggcacctgcaggccggatgataccatggccatcaaggccatgctcgcctttatctgcatctacatcttcttctttgctaccacctggggtcctgcttcctgggtcgtcatcggcgaagttttccctcttcccattcgtgccaagggtgttgccctttccaccgcctccaactggctctggaactgcatcatcgccgtcatcaccccctacatggtcgatgaggataagggcaacctgggccccaaggtgttctacatctggggtggcctctgcacctgctgcttcatctacgcctacctgcttgtgcccgagaccaagggcctcacgctcgagcaggtcgaccaaatgctttccgagtctaccccccgcacctcgaccaagtggaagcctcacaccacttatgctgctgagatgggcatgaccgagaagactgttgctggccacgctgagaaccgcagcgatagcgagtaa

SEQ ID NO: 388 - protein, 539 aa, Neurospora crassa
MEHDHSASDIEKEAVTVARPQGDVTRVEAPVTLKAYMMCVFAAFGGIFFGYDSGYISGVMGMKYFIETINGPGATFLPSKEKSLITSILSAGTFFGALMGGDLADWVGRRPTIIFGCLVFIVGVVLQTASQSLGLIVAGRLVAGFGVGFVSAIIILYMSEIAPRKVRGAMVSGYQFCICLGLLLASCVDYGTQNRTDSGSYRIPIGLQMAWALILATGIFFLPESPRFFVKKGKLDKAAGVLSRLRDQPLDSDYVRDELAEIVANHEFEMTVVPYGNYFQQWANCFRGSIWQGGSYLRRTILGTSMQMMQQWTGINFIFYFGTTFFQQLGTIDNPFLMSLVTTLVNVCSTPISFYTMEKLGRRTLLIWGALGMLICEFIVAIVGTCRPDDTMAIKAMLAFICIYIFFFATTWGPASWVVIGEVFPLPIRAKGVALSTASNWLWNCIIAVITPYMVDEDKGNLGPKVFYIWGGLCTCCFIYAYLLVPETKGLTLEQVDQMLSESTPRTSTKWKPHTTYAAEMGMTEKTVAGHAENRSDSE

SEQ ID NO: 389 - DNA, 1968 bp, Neurospora crassa
  CDS (1)..(1968)
atgggccacaatccagacctggacagtagcggcactgccggagaacccaaaggtgtcaccggctcgcacattgaacaaacctcgtccaacctcgaagccaacatcaacctcgaagccaagctcaagaacccgctcgacggcctttcccgcgtcgagctcctgtcacgcgtcgagaccttttgcgccgaaaagaacctaaccgagcacctccctcttttccgtaagggagcactcatcgcccagtccccggacagctatgcgtccatctcgggcccggaagccttggacgatgaggagaaggcagtacttttgaaggaggtcgaacacaagtggcggctgccggcaagactgttcctgacgattgctacttgctcgatcggtgctgctgtccaaggttgggatcagacgggcacgaatggcgcgaatatcttctttcccaactattacggtatcggaggcgacactgcgagggagaagttgcttgtcggattgatcaatgctgggccctatattgggagcgcattcatcggttgctggctttctgatcccatcaacaactggattggtcgtcgtggtgttatctttgtctctgctcacttctgtatctggcccgtcatcggttctgctttctgtcacacatggccccagcaactggcctgccgtctgctgatgggtatcggtatgggtgtgaaggcatcaacggtgccgatctatgccgcggaaaactcgcctgcttctattcgaggtgcgctggtcatgtcatggcagatgtggacagccttcggcatcttcttgggcactgcctttaaccttgccgtcttccacgccagctccaacgttaactggcgcctcatgctcggtgcccccttcattcccgccgtacccctgcttctgctcatctatctttgccccgagtccccgcgctggtacatgaagaagggccgctacccagaagcctggaaatccatggtcaagctgcgcaaccaccccatccaagttgcccgcgacatgttctacatccactcgcaattggaagtcgagcaccagctcctcgccggctccaactatgccaagcgcttcgtcgagctcttcaccgtccctcgtgttcgccgcgccaccctcgccgctttcaccgtcatgattgcccagcagatgtgcggaatcaacatcatcgccttttacagcaccaccatcttcaaggattccggctccaccgaattccaagccctgctttcctccttcggcttcggtctagtcaattggctctttgccttccccgccttctggactatcgacacttttggccggcgctctctgcttctttttaccttcccgcaaatgatgtggaccctgctagcagccggcctcttcaccttgctcgacatgggtcccgcccggaccgggctcgtcgccttattcgtcttcctcttcgccgcgttctactcacccggtgaaggtcctgtccccttcacctactcggccgaagtcttccccctctctcacagagaagtaggcatgggcttcgccgtcgccacctgcctcttctgggcatctgttttgggtattaccttccccttcttgcttgactctctcggcaccgtcggcgcctttggtctgtacgcgggcttcaacctagtggcgtttattgccatcttcttggtcgtgccggagacgaagcagaagacgctcgaggagttggattatgtctttgctgtgaagacgagcaagttcatgtcgtatcagtgcaccaaggcgctgccgtggttcatcaagaggtgggtgttttggcagaggaatgcaaagctggagccactgtatgagtttgatcggatcaaggaggcggagaaggagaggagagcagaggaggagagaagggcaaaggagacgggaacgatcacctctactgctacaggagctgagttggatgagaagaagggactgagtcatgttaatgctcctaattcttag

SEQ ID NO: 390 - protein, 655 aa, Neurospora crassa
MGHNPDLDSSGTAGEPKGVTGSHIEQTSSNLEANINLEAKLKNPLDGLSRVELLSRVETFCAEKNLTEHLPLFRKGALIAQSPDSYASISGPEALDDEEKAVLLKEVEHKWRLPARLFLTIATCSIGAAVQGWDQTGTNGANIFFPNYYGIGGDTAREKLLVGLINAGPYIGSAFIGCWLSDPINNWIGRRGVIFVSAHFCIWPVIGSAFCHTWPQQLACRLLMGIGMGVKASTVPIYAAENSPASIRGALVMSWQMWTAFGIFLGTAFNLAVFHASSNVNWRLMLGAPFIPAVPLLLLIYLCPESPRWYMKKGRYPEAWKSMVKLRNHPIQVARDMFYIHSQLEVEHQLLAGSNYAKRFVELFTVPRVRRATLAAFTVMIAQQMCGINIIAFYSTTIFKDSGSTEFQALLSSFGFGLVNWLFAFPAFWTIDTFGRRSLLLFTFPQMMWTLLAAGLFTLLDMGPARTGLVALFVFLFAAFYSPGEGPVPFTYSAEVFPLSHREVGMGFAVATCLFWASVLGITFPFLLDSLGTVGAFGLYAGFNLVAFIAIFLVVPETKQKTLEELDYVFAVKTSKFMSYQCTKALPWFIKRWVFWQRNAKLEPLYEFDRIKEAEKERRAEEERRAKETGTITSTATGAELDEKKGLSHVNAPNS

SEQ ID NO: 391 - DNA, 1572 bp, Neurospora crassa
  CDS (1)..(1572)
atgggcttgtcactcaagaagcctgaaggtgtgccgggcaagtcatggcccgccattgtcattggcttgtttgtcgcctttggtggtgtactctttgggtatgacactggcactattggcggtatccttgctatgccctattggcaagatttgttttcgacaggttacagaaacccagagcatcacttggacgttaccgcgtcgcagtctgccactatcgtctccattctgtctgctggaaccttctttggcgctcttggtgccgctccccttgccgactgggctggacgacgcttgggccttattctgtcgtcgtttgtgtttatcttcggtgtcatcctgcagaccgcagccgtcagcattcctctttttctggctggccgattctttgctggattgggagttggtctcatatcggcaaccatccccctctatcaatccgagactgccccgaaatggattcgtggtgtcatcgtcgggtcctatcagctagccattaccatcggtcttcttcttgcctccattgtcaacaatgccacgcataacatgcagaacaccggctgctatcgcatccccatagctgtccaatttgcatgggcgatcatcctgatcgttggcatgatcattcttcccgaaactccacgctttcatatcaagagagacaatctcccagccgccactaggtctctagctatcctccgccgtctggagcagaaccatccagcgatcatcgaagagctttccgagatccaagccaatcatgaatttgagaagagcctcgggaaggcgacctacttggactgcctcaagggcaatttactcaagcggctccttactggctgttttctccagagcctgcagcagttgactggcatcaactttatcttctactacggcacacagttcttcaaaaactccggattctcagactcgtttctgatatccttgatcactaatcttgtcaatgtcgtgtcgacccttcccggactctacgccatcgacaaatggggccggaggcctgttttactctggggagctgttgggatgtgtgtctgccagttcatcgttgctattcttgggacaacaacgacaagtcaagatgcaagcggaatgatcattgtgcataatctcgccgcacagaaagcagctattgcattcatctgcttctacatctttttcttcgctgcatcttggggtccagttgcctgggtcgttacaggcgagatcttcccccttaaagtccgcgccaagtcgctctccataactacagcgtcgaattggctgctcaactgggccattgcttacagcacaccttaccttgtcaactacggccctggcaatgcgaacctgcagtccaagatcttcttcgtctggggcggatgctgcttcatctgcatcgcattcgtttacttcatgatctatgagacaaaaggtctcacactggagcaggttgacgagctatatgaagaggtctcggatgccaggaagagtattggttgggtgccgaccatcactttccgggagatccgggaggaaaagaaaaatatatgcgtggcggctgctcttaagtag

SEQ ID NO: 392 - protein, 523 aa, Neurospora crassa
MGLSLKKPEGVPGKSWPAIVIGLFVAFGGVLFGYDTGTIGGILAMPYWQDLFSTGYRNPEHHLDVTASQSATIVSILSAGTFFGALGAAPLADWAGRRLGLILSSFVFIFGVILQTAAVSIPLFLAGRFFAGLGVGLISATIPLYQSETAPKWIRGVIVGSYQLAITIGLLLASIVNNATHNMQNTGCYRIPIAVQFAWAIILIVGMIILPETPRFHIKRDNLPAATRSLAILRRLEQNHPAIIEELSEIQANHEFEKSLGKATYLDCLKGNLLKRLLTGCFLQSLQQLTGINFIFYYGTQFFKNSGFSDSFLISLITNLVNVVSTLPGLYAIDKWGRRPVLLWGAVGMCVCQFIVAILGTTTTSQDASGMIIVHNLAAQKAAIAFICFYIFFFAASWGPVAWVVTGEIFPLKVRAKSLSITTASNWLLNWAIAYSTPYLVNYGPGNANLQSKIFFVWGGCCFICIAFVYFMIYETKGLTLEQVDELYEEVSDARKSIGWVPTITFREIREEKKNICVAAALK

SEQ ID NO: 393 - DNA, 1614 bp, Neurospora crassa
  CDS (1)..(1614)
atgtacaaaatcggcaacatctacttcatcgccgccgtcgccgtcatcggcggcgcgctatttggcttcgatatttcttccatgtcagctatcatctcgactcagccgtacctctgccagttcaaccagctcggccacaacgaaaagggcttgtgcctcggtcctaccaacgatgttcagggtggtatcacagccgccatgcctggtggttcgtggctcggcgctctctgctctggttttgtctccgatactttcggccgcaaacgctccattcagataggttccgtgatttggattattggttccgtcatcgtctgcgcgtctgtcaacattcctatgttggttgtcggtcgcatcatcaacggattttcggtcggaatatgctctgcccaagtccctgtctacatttccgagatcgcccttccatcgaagcgcggtcgccttgtcggtttccagcaatgggctatcacctggggcattctgatcatgttctttatctgctatggctgctcgttcatgaagggaacggccgccttcagagttccttggggtcttcaggccatccctgccgccctcctctttctcggccttgtcttcctccccgagtcgccccgctggctttgcaagaaggacagatgggacgaggcaaaggatgtgcttaccttggttcacggaaaaggaaatcccaactccccgtgggtgcaccgtgagatgcaagagattcgcgagatggtcgagttcgagcgcgccaatgctgatgtcagctacttcgaactgttcaagcccaacatgatcaaccggacctcgattggcgtttttactcagatatggtctcagttgaccggtatgaatgtgatgatgtactacataacctacgtcttcacaatggccggtcttgccgatggaagcgagaatgctgtccttctccctagcggtatccagttcgtcattaacgtcgtcatgacgataccggctcttctttggatggatcgctggggtcgccgtccgaccctgctggttggtgcattcttcatgtgcctctggctctgtgtcaatgccggcttgtttgctgtttattcacgacctgcccgccctggcgagttcacttccccggccgagtccatggctatcactggcgctccagccaaagccgtcattgcttcaacttatctctttgtcgcatctttcgcacccacttggggtcctgtttcgtggacctatcccccggagctttacccgcttcgtctccgcggaaaagccgttgccctctgcacttcagccaactgggctttcaactttgcccttgcctacttcgttcctcctgcttttgctaacattacctggaaaacctacgtcatcttcgctacgttctgcgcggccatgttcatccacgtctttttcatgttccccgagaccgccaacaagcctcttgaggaagtcgaggagatctttgacgataccaagcctggagccatcaagtacatcggcacccccgcttggaagacaagaaacactcgcaatcttacgctcaagcaggagcacaacgatactctctcgtcggaggagaagattggcttggaggagcacgctcacaaggaaaccaccggcagatga

SEQ ID NO: 394 - protein, 537 aa, Neurospora crassa
MYKIGNIYFIAAVAVIGGALFGFDISSMSAIISTQPYLCQFNQLGHNEKGLCLGPTNDVQGGITAAMPGGSWLGALCSGFVSDTFGRKRSIQIGSVIWIIGSVIVCASVNIPMLVVGRIINGFSVGICSAQVPVYISEIALPSKRGRLVGFQQWAITWGILIMFFICYGCSFMKGTAAFRVPWGLQAIPAALLFLGLVFLPESPRWLCKKDRWDEAKDVLTLVHGKGNPNSPWVHREMQEIREMVEFERANADVSYFELFKPNMINRTSIGVFTQIWSQLTGMNVMMYYITYVFTMAGLADGSENAVLLPSGIQFVINVVMTIPALLWMDRWGRRPTLLVGAFFMCLWLCVNAGLFAVYSRPARPGEFTSPAESMAITGAPAKAVIASTYLFVASFAPTWGPVSWTYPPELYPLRLRGKAVALCTSANWAFNFALAYFVPPAFANITWKTYVIFATFCAAMFIHVFFMFPETANKPLEEVEEIFDDTKPGAIKYIGTPAWKTRNTRNLTLKQEHNDTLSSEEKIGLEEHAHKETTGR

SEQ ID NO: 395 - DNA, 1989 bp, Neurospora crassa
  CDS (1)..(1989)
atggttctattcaagcgccctcccgatgagaaggggtccgtatggttctccgttctgatcggcgtcttcgtggcctttggcggtcttctttttggctatgacaccggcaccatcagcggcgtcattgccatgaaatattggaacgagcgtttctccactggctacatcgatgctgatgggaggccggccattagcccgtcccaatcttccctcattgtgtctatcctttcggctggtaccttcttcggtgctttggcttctcccttgctggcggataagattggtcggcgatggggtatcatcatatcctcttgggtcttcaactttggcgtgtccatgcaagtaatttctgtcgccattcctctgtttgtagccgggagattctttgccggccttggagttggcctgctttcggctcttgtcccgctctatcaatccgagaccgcccccaaatggatccgtggaatgatcgtaggcgtatatcaacttgcaatcaccatcggcatccttttcgccgccatagtcaataatggcactcatgaacgggaggacaccggctcgtacagaattcccattgctctccagtggctcttctcgctcactctcatcattggcatgcacttccttcccgaaactcccaggtattgcatcaagcgaggcgacatgacccgtgccacccgagccctggccagaatccgctgcctgtcgcccaatgatcccgccatccttgcggagatggaagagatccgtgcaaactaccaatatgaactgtcactcggtaacagcagctacctggactgcttccgtaagggcatgttgaagaggatgctcacaggcatggtacttcaaatcctgcagcaacttaccggcgtcaacttcattttttactacggtactcaattcttcgagaactcgggcatctcgaattccttcttgattagtatgatcctagccacagtcaacgttctctcgacggtccccgctgtcttcatgttcgacaagttcggtcgccgccctttactcttgtggggtggtgtagccatgcacatatgccactttatcgtcgctacactcggtacatcgacaacgagtcagactgccaccggggtcattatcgtgctcaacgttgctgctcaaaaagcatcaatcacttttgtgtgcttgttcattgccttcttcgccgcaacatggggtcccttggcgtgggtggtaactgcagaattgtacccactgaagcatcggtcgcagatgttgagcattagcacagctacaaacaaacatgttccttcattttcaactccggattctgtctactaccatgacattctggggtggttagtaaactgggccatcgcctactcgactccttacctcgtcaactatggtcccgggtacgcaaacctccagtcaaagatcttcttcgtctggggtacggcctgcatgctctgcgtcggctttgtctacttttacatctatgagacaaagggtctatctctggaggagatcgacgaaatgtaccagacaccaaatctcaaggctaaggacagcagcaagtggcggccgagcgtccatttccgagaaaccccgctcacggagatcacataccacaaggctactggtggaagtcctgctcaggccgaggctgctccagtagctgagaccgcggagagagctgagcgcgaggctgttcctacccttcctaatcttactacagctcccaagattgggcctcctcctcctcctcctgaaagtgacgatgtcctgaagactctgcaagacgctgtccttcgtcctgcaggagctttcgcccaccctgctacgctgaacccggcctggaattcccattctcccttgtccgcacaaattgcgccgtcgaatcttccgtcttcctctcttgcttccaacaggtctgccccgtccctgggcacgactcccaacgaaggtggaactagttcaccccacccagcgcgaagaagcttcgggcgttga

SEQ ID NO: 396 - protein, 662 aa, Neurospora crassa
MVLFKRPPDEKGSVWFSVLIGVFVAFGGLLFGYDTGTISGVIAMKYWNERFSTGYIDADGRPAISPSQSSLIVSILSAGTFFGALASPLLADKIGRRWGIIISSWVFNFGVSMQVISVAIPLFVAGRFFAGLGVGLLSALVPLYQSETAPKWIRGMIVGVYQLAITIGILFAAIVNNGTHEREDTGSYRIPIALQWLFSLTLIIGMHFLPETPRYCIKRGDMTRATRALARIRCLSPNDPAILAEMEEIRANYQYELSLGNSSYLDCFRKGMLKRMLTGMVLQILQQLTGVNFIFYYGTQFFENSGISNSFLISMILATVNVLSTVPAVFMFDKFGRRPLLLWGGVAMHICHFIVATLGTSTTSQTATGVIIVLNVAAQKASITFVCLFIAFFAATWGPLAWVVTAELYPLKHRSQMLSISTATNKHVPSFSTPDSVYYHDILGWLVNWAIAYSTPYLVNYGPGYANLQSKIFFVWGTACMLCVGFVYFYIYETKGLSLEEIDEMYQTPNLKAKDSSKWRPSVHFRETPLTEITYHKATGGSPAQAEAAPVAETAERAEREAVPTLPNLTTAPKIGPPPPPPESDDVLKTLQDAVLRPAGAFAHPATLNPAWNSHSPLSAQIAPSNLPSSSLASNRSAPSLGTTPNEGGTSSPHPARRSFGR

SEQ ID NO: 397 - DNA, 1557 bp, Neurospora crassa
  CDS (1)..(1557)
atggggctcgggcttaagctaccgacaatctacaatgtccaccttgtggctatcattgccaccttgggtggtgcactcttcggctttgatatctcctccatgtccgccatcgtcgtgaccgaccaatacctcacctacttcaacaacccccatgatatcatccaaggagccatcggctctgcccttgctgctggctccgtcgtcggttccgccatcgccggtcctctttccgacaagatcggtcgtcgtgactccatctttttcgcctgcttcttctggctcattggtacctccgtccaggttgcctgcaagaactatggccagctcatcgccggccgtgtgctcaacggctttaccgtcggcatcacttcctcccaggttcccgtgtaccttgccgagatcgccaaggcagagaagcgtggttccttggtcatcatccagcaactcgccatcgagtttggtatcttgatcatgtactttatcggctacggctgtgcgtcgatcgagggccctgcttcgttccggaccgcttggggcattcagtttatcccttgctttttcctcatggtcggtcttcccttcttgcctaggtcgcccagatggctggccaaggtcggtagggaccaggaggccattgctgtcctggctaacatccaggctgatggcaacgttgatgacccgagagtcgttgctgagtgggaggagattgtcaccgttatgaacgccgagcgtgaggccggtaagggatggaggaagtttgtcaagaacggcatgtggaagcgaaccatggctggcatgactgtacaggcttggcagcaactcgccggcgccaacgtaatcgtctactacctaacctacatcgcccaaatggccggactcacaggcaacgtcgccatggtaacctcgggcatccaatacgccgttttcatcatcttcaccggcgtcatgtggctcttcatcgacaagaccggtcgtcgcacccttttagtttacggcgccttgggaatggccttctgccactttgtcgtcggcggcgtcatgggcgcgcaccacgacaacgttccggacggcgtcggcggcaacgccaacattgtcattagcgtgcacaagggcgcgcccgccaacacggtcatcctgttctcgtacctgctcattgtcgtctacgccttgacgctcgctcccgtctgctggatctacgccgccgaggtctggtcgttgggcactcgcgctacgggcatgtccatggctgccatgtccaactgggtgttcaactttgcgctgggcatgttcacgccgccggcgtttgtcaatattacgtggaagctgtttatcattttcggggtgctttgcgtcacggcggcggtctggttctggttgttttacccggagacgtgtggtaagacgctggaggagattgagatcctgtttggtgatcagggtcctaagccgtggaagacgaagaagggcgagtcgagacttacggcggagattgaggctgtcaaggcgaggaagacggtggagcacgagattgaggtgcatgagcatgagaaggtttag

SEQ ID NO: 398 - protein, 518 aa, Neurospora crassa
MGLGLKLPTIYNVHLVAIIATLGGALFGFDISSMSAIVVTDQYLTYFNNPHDIIQGAIGSALAAGSVVGSAIAGPLSDKIGRRDSIFFACFFWLIGTSVQVACKNYGQLIAGRVLNGFTVGITSSQVPVYLAEIAKAEKRGSLVIIQQLAIEFGILIMYFIGYGCASIEGPASFRTAWGIQFIPCFFLMVGLPFLPRSPRWLAKVGRDQEAIAVLANIQADGNVDDPRVVAEWEEIVTVMNAEREAGKGWRKFVKNGMWKRTMAGMTVQAWQQLAGANVIVYYLTYIAQMAGLTGNVAMVTSGIQYAVFIIFTGVMWLFIDKTGRRTLLVYGALGMAFCHFVVGGVMGAHHDNVPDGVGGNANIVISVHKGAPANTVILFSYLLIVVYALTLAPVCWIYAAEVWSLGTRATGMSMAAMSNWVFNFALGMFTPPAFVNITWKLFIIFGVLCVTAAVWFWLFYPETCGKTLEEIEILFGDQGPKPWKTKKGESRLTAEIEAVKARKTVEHEIEVHEHEKV

SEQ ID NO: 399 - DNA, 1626 bp, Neurospora crassa
  CDS (1)..(1626)
atgggcggtgcaggtggtgactttgggggttccgaccccgtcatctcccgcctcgccaaagaggacccaatcccgtggtacaagaaacccaacctgcgattcctctactttatgctcttcccgacatgtatgggcatcgagttgacgtcggggtttgattcccagatgatcaacgccctgcagattttggagtcttggatccagtactttgacaacccgcagggtgctctcaaaggcatcatcagcgcagcatactctcttggtgccatcttgtctcttcccctggtacccatcatcaacgacaggttcggtcgaagatggtccatcgctctcggttccatcgtcatgattgtgggcgccatcattcagggtttctcccagcatgtcggcatgtacatcgtcgcccgtatgattctcggcttcggcatccccacttgcatcgtctccggctcctccctgatcggcgaacttgcctacccgaaagagcgtcccgtcttgacctcgctcttcaacgtgtcctatttcgtcgggcaaatcgttgctgccgccattgtctttggcaccaatagcatcgcaagcaattggggctggagaatcccctcgcttctccagatttgtccttcactgcttcaacttgcctttgtctttttcatccccgagagtccccgctggctaatcaccaaagaccgctctcaagaagcccacgacattctgaaaaagtaccacggagaaatggagcgcggtgaggaatttgtcgccgccgagttcgcccagatgcaagccgtcattcgtctcgaatacgaaaccgtctccaagagctcgtggatggatctcctccggaccccgggcatgcgcaagcgtcttctcatctcgtccatgctcggtctcttcacccagtggtccggaaacaccctgatctcctacttcctcggcgacctcctcaagatgattggcttcaccgactcgacctttatccaaaagatcaacgtctccatcgcctgctggagtttgttctgcggtgtgactgtctcgctccttgtcacccgtatcagacgtcgtatcatgtacatggcctgcaccatcagcttgctgctgtgctatatcgcatggactgtctccatggagcgcgccatgacaggcaaggcgaatggcacacccaataacggggccaacatcgccaccctcttcttcatctacatgtattcgccgtgctataacatgggttataacgccctgacctacacctacatggtggaagtctggccctatgccgagcgctcccgtggtatcgccgtcttccagctctttggtcgtttggccggcttcttcaccacctttgtcaaccccatcggtctcaagaatgttggctggaagtacctcatctcgtactgctgctggctcgcattcgaggtctgctttgtttacttcatgttccctgaaaccatgggtcggacgctcgaagagcttaccttcatgttcgagggcgaggaccttcaaagacaggccaatgccgctgccgagaaggtggtcaaccacactgagcatgacacgactggccttggtaggcgcagcaccaacgaaaacaagctgggcggctcggctgaggtaaaggagcatgtcccatga

SEQ ID NO: 400 - protein, 541 aa, Neurospora crassa
MGGAGGDFGGSDPVISRLAKEDPIPWYKKPNLRFLYFMLFPTCMGIELTSGFDSQMINALQILESWIQYFDNPQGALKGIISAAYSLGAILSLPLVPIINDRFGRRWSIALGSIVMIVGAIIQGFSQHVGMYIVARMILGFGIPTCIVSGSSLIGELAYPKERPVLTSLFNVSYFVGQIVAAAIVFGTNSIASNWGWRIPSLLQICPSLLQLAFVFFIPESPRWLITKDRSQEAHDILKKYHGEMERGEEFVAAEFAQMQAVIRLEYETVSKSSWMDLLRTPGMRKRLLISSMLGLFTQWSGNTLISYFLGDLLKMIGFTDSTFIQKINVSIACWSLFCGVTVSLLVTRIRRRIMYMACTISLLLCYIAWTVSMERAMTGKANGTPNNGANIATLFFIYMYSPCYNMGYNALTYTYMVEVWPYAERSRGIAVFQLFGRLAGFFTTFVNPIGLKNVGWKYLISYCCWLAFEVCFVYFMFPETMGRTLEELTFMFEGEDLQRQANAAAEKVVNHTEHDTTGLGRRSTNENKLGGSAEVKEHVP

SEQ ID NO: 401 - DNA, 1752 bp, Neurospora crassa
  CDS (1)..(1752)
atgggtggcggaggcggctccggcgcagctggtttttatgatgccgctcttcagaggcgtgaggcagtgatggggaagagtggccctgcagcacttgtcaagaacttccgggtcttttctattgcatgcttcgcatgtatcggtggtgtgctctatgggtacaaccaagggatgttttcgggtgtcctcgccatgccagcctttcagaaacacatgggcgaatacgatccgatagacgagaacgcgagtcagacaaagaagggctggctaaccgcaattcttgagctcggtgcttggcttggtacgcttctgtctgggttcatggcagaggttctctcgagaaagtacggtgtgctagtggcgtgcttggttttcatgctgggtgtggtcatccaagccacgtctatctctggaggacatgagaccattcttgccggacggtttatcacgggtatgggtgtcggatccttagccatgatcattcccatttacaactcggaagttgcaccacctgaggtccgtggagctcttgttgctctccagcagttggctatctgcttcggtatcatggtcagcttctggattgactacggaaccaactatatcggcggcaccaagctcgagacccaatccgacgccgcctggcttgtacccgtctgcctgcaactcgcccctgctctcattctgtttttcggcatgatgttcatgcccttctccccacgctggctcatccaccatggccgcgaggcggaagctcgaaagatcctctccacccttcgcggtctaccgcaagaccacgagcttgtcgagctcgagttcctcgaaataaaggctcagtctctctttgaaaaacgcagcattgccgagttgtttcccgaattgcgcgagcagactgcctggaatacctttaagctccagtttgtcgccatagagaagcttttccggacaaaggcaatgttccgacgcgttatcgtggcaaccgtaaccatgttcttccagcagtggtccggcatcaacgcgattctctactacgccccgcaaatcttcaagcagcttggactgagcggcaacacaacctcactcctggctacgggtgtagtaggcatcgtcatgttcatcgcaacggttcctgccgtgctgtggatcgaccgtgttggtcgcaagcccgtgcttactatcggtgccctcgggatggctacctgccatatcatcatcgctgtcattgttgccaagaacgtggaccaatgggagactcataaggctgctggatgggctgctgtagccatggtctggctattcgtcattcactttggatattcatggggtccatgtgcctggatcattgttgctgagatctggccgctgagtacgagaccatatggtgtctctctaggagcttcgagcaactggatgaacaactttatcgtcggtcaggtcacgccggatatgttaaaagcgatcccgtacggaacgtatatcatcttcgggttgttgacttatatgggcgccgcctttatctggttctttgtgccggagacgaagagattaaccttggaagagatggacatgatcttcggatccgaaggcactgcacaagccgacaatgagcgcatggaggagatcaatgctgagattggtcttacccgattcctgcaaggtggtagtggtgcaaaccaaggtgctgctgatggaagtgatactggttatgatgcggagaaggggaagagcgaacactattctcagcatgtctaa

SEQ ID NO: 402 - protein, 583 aa, Neurospora crassa
MGGGGGSGAAGFYDAALQRREAVMGKSGPAALVKNFRVFSIACFACIGGVLYGYNQGMFSGVLAMPAFQKHMGEYDPIDENASQTKKGWLTAILELGAWLGTLLSGFMAEVLSRKYGVLVACLVFMLGVVIQATSISGGHETILAGRFITGMGVGSLAMIIPIYNSEVAPPEVRGALVALQQLAICFGIMVSFWIDYGTNYIGGTKLETQSDAAWLVPVCLQLAPALILFFGMMFMPFSPRWLIHHGREAEARKILSTLRGLPQDHELVELEFLEIKAQSLFEKRSIAELFPELREQTAWNTFKLQFVAIEKLFRTKAMFRRVIVATVTMFFQQWSGINAILYYAPQIFKQLGLSGNTTSLLATGVVGIVMFIATVPAVLWIDRVGRKPVLTIGALGMATCHIIIAVIVAKNVDQWETHKAAGWAAVAMVWLFVIHFGYSWGPCAWIIVAEIWPLSTRPYGVSLGASSNWMNNFIVGQVTPDMLKAIPYGTYIIFGLLTYMGAAFIWFFVPETKRLTLEEMDMIFGSEGTAQADNERMEEINAEIGLTRFLQGGSGANQGAADGSDTGYDAEKGKSEHYSQHV

SEQ ID NO: 403 - DNA, 1698 bp, Neurospora crassa
  CDS (1)..(1698)
atgtcctccaaagagacagcctccaccatggcggagaaggatgtcgaacaccccatcgacacccccgtagccatcaccgcagaagtcgaagagaaatatggcatcaaagcccactggaaatgtctcgccgcctgcactctggtgtccatgtgtcccttccaatacggccttgactttggtttgatcggcgggctgcaggccatgattggttttctcaaggtcttcggccacccagccccccacgtcgccggcggctggaacatctccccctcccgtcaacaactcatctcctcgctcatgaccctcggcgccttcctgtcttcctccctcgccggccccaccgccacttttctttcacgccgccaaactatctgggctgcttctttgctatgtatcgtctccaacgtcatcatgatggccaccacctccatcggcgggctctacgccggccgcttgttacttggtctagcaaacgggttctacatgaccttttcgcagctttacatccaagaggtagcgccggctcggtatcgcggactgatgatttccagttttcaggtgtggacgagcgtaggtacagtgattggcggggtggtggataactttactgagaagattgatggaagggatagttacttgatcccgctgggattgatctttgtgtttcctgtggtgattagtctgggactgtttgcggttcctgaaagtccacggtggttgatgatgcaaggacgcgaagagcaggcgagaaagagtctaaggtggcatcgcccgtattcggatcggatggtggaggaggagatcagggatattcagctggcgctggcggcggagggggagacggtcaagggggcgagtgtgtgggatatgtttagggatccggtggataggagacggacggtgttggcggtttgcgggttgacggtgcagggggcgtcgggggctatgtatatgattgcatacggcacatacttcttcaagatggctggtatcggcaagccgttcgaaaaccacgtcatcttgacatcccttggcgtggtggccatcctcgtcaactcggctatggtcacgcactttggtcgtcggcgcatcttcctcatcagcggtctgatcctctgcggtgttgcccagctccttatagccgttgtgtataccgtcaagccgggcaccaagtccaccggtcaagccatagttggactcgctgttgtctatatcctggggtataacggcatggtagcgacgtatgcgtggatctcaggcggcgaactcccctcgcagaggttgcggtcgtatacgttcggactggcgacagcgattggattctttgcggcttggttgacgacgtttacggcgccgtactttatcaatcccgagtcgatgaactgggggccaaaatatgggtatatctggacgccatcgtgttggatttctgctctctgggtgtacttttacctaccggaagtcaagggccgtaccttggaggagattgaccaaatgttcgaggcgcggttgccggcgaggaagtttcgcaaatacgtgtgtgttggtcgcgatggtggtggtggtggtggtggtggtggtggtggtggtggtggtggtggtggtgcaaacgagtcggacaagaacagtgtcaattgggagaagaagggcgacgaggtggtgcatgcggaagaggtgaagcgggtggtgtccagttag

SEQ ID NO: 404 - protein, 565 aa, Neurospora crassa
MSSKETASTMAEKDVEHPIDTPVAITAEVEEKYGIKAHWKCLAACTLVSMCPFQYGLDFGLIGGLQAMIGFLKVFGHPAPHVAGGWNISPSRQQLISSLMTLGAFLSSSLAGPTATFLSRRQTIWAASLLCIVSNVIMMATTSIGGLYAGRLLLGLANGFYMTFSQLYIQEVAPARYRGLMISSFQVWTSVGTVIGGVVDNFTEKIDGRDSYLIPLGLIFVFPVVISLGLFAVPESPRWLMMQGREEQARKSLRWHRPYSDRMVEEEIRDIQLALAAEGETVKGASVWDMFRDPVDRRRTVLAVCGLTVQGASGAMYMIAYGTYFFKMAGIGKPFENHVILTSLGVVAILVNSAMVTHFGRRRIFLISGLILCGVAQLLIAVVYTVKPGTKSTGQAIVGLAVVYILGYNGMVATYAWISGGELPSQRLRSYTFGLATAIGFFAAWLTTFTAPYFINPESMNWGPKYGYIWTPSCWISALWVYFYLPEVKGRTLEEIDQMFEARLPARKFRKYVCVGRDGGGGGGGGGGGGGGGGGANESDKNSVNWEKKGDEVVHAEEVKRVVSS

SEQ ID NO: 405 - DNA, 1647 bp, Neurospora crassa
  CDS (1)..(1647)
atggttctggggaaaaagtcaatcaaaatcaatggcgccgacattggcgtcgaagccatccttctcggtgccgtcaccgcgataggaggcttccttttcggctatgacaccggtcagatctcgggcatgcttctattcagcgacttcaagaacagatttggccagatcacccaaccagatggatcaaaggaattcgagtccatcatccagtcactgctagtatctcttatgagtatcggtacactcctcggttctttgacttcatcatacaccgccacctggtggggccgccgcaagtcccttacattcggcgtcggtctcttcatcatcggcaacatcattcagatcaccgcaatgcactcctgggtacacatgatgatgggccgcttcgtcgccggtctaggcgtcggtaccctctccgtcggtgtgcccatgttccaatccgagtgctcccctagagaaatccgtggtgccgtcgtcgcctcttaccaactgctcatcacctttggtatcctcatcgccaacattgtcaactacggcgtgcgcgagatccaggagcaggacgcttcctggcgtatcgtcattggtttgggtatctttttctcgcttccgcttggcgtgggagtgctgttggtccccgaaagcccaaggtggctggcgtccaaggaggattgggagggagcccgcatgtcgatggcgagactgagaggcttgaagcatgacccgcataacgagctggtggaggatgatatgaaggagatgcgggaggttttggagaaagagcggactgcggccgtgggaacttggaaggagtgtttcatccccaacaagaacggtgttcccaagcaggtgtaccgcacattcctgggtatcggcatccacttcctgcaacagtggactggcgtcaactacttcttctactatggcgccaccatcttccagtcggcgggtatcaaggaccccattcaaacacagctcatcctcggcgctgtcaacgtcttctcaaccctgttcggtctctgggtcgtcgagcgcttcggacgcagatggccgctgttcatcggtgctatctggcaggcgtcttggctggccgtgttcgcttccatgggcaccgctctcgaacccgaccaaaacaaggcgtcgggtattgtcatgatcgtctcggccgcactcttcatcgcttcctttgcttgcacctggggtcccattgcttgggtcgtcatcggcgagagtttccctctgcgcacccgtgccaagcaggcttcgcttgccacggctggtaactggcttggaaacttcatgatctccttcctcacccccctcgccaccgatggcatcggctatgcctacggctacgtctttgtagccaccaacatcatgggcgcacttttggtctggttcttcctgtacgagtccaccagcttgtccctcgagaacgtcgacctcatgtacagcgagccgggcatcaagccgtggaactcgcacaagtggatgccgcctggctacatcacgcgcatgcagcgcgatgatgagtacttccaccatcctgagaagggtggttcggatggtcttgaaatcacgaatggaagcaaggagatgcacccccacgaggagagggaagagaaggttattaaccatagggtttag

SEQ ID NO: 406 - protein, 548 aa, Neurospora crassa
MVLGKKSIKINGADIGVEAILLGAVTAIGGFLFGYDTGQISGMLLFSDFKNRFGQITQPDGSKEFESIIQSLLVSLMSIGTLLGSLTSSYTATWWGRRKSLTFGVGLFIIGNIIQITAMHSWVHMMMGRFVAGLGVGTLSVGVPMFQSECSPREIRGAVVASYQLLITFGILIANIVNYGVREIQEQDASWRIVIGLGIFFSLPLGVGVLLVPESPRWLASKEDWEGARMSMARLRGLKHDPHNELVEDDMKEMREVLEKERTAAVGTWKECFIPNKNGVPKQVYRTFLGIGIHFLQQWTGVNYFFYYGATIFQSAGIKDPIQTQLILGAVNVFSTLFGLWVVERFGRRWPLFIGAIWQASWLAVFASMGTALEPDQNKASGIVMIVSAALFIASFACTWGPIAWVVIGESFPLRTRAKQASLATAGNWLGNFMISFLTPLATDGIGYAYGYVFVATNIMGALLVWFFLYESTSLSLENVDLMYSEPGIKPWNSHKWMPPGYITRMQRDDEYFHHPEKGGSDGLEITNGSKEMHPHEEREEKVINHRV

SEQ ID NO: 407 - DNA, 1533 bp, Neurospora crassa
  CDS (1)..(1533)
atgaacggaatcaaggacctgggcctgggcttctccaaagcctcgacgcgcttgcatttctttagtctgttgcttgctcttggctcatttgtctggggatacaacgttggcgttctcgcctcggtcctcgcccatccaggcttccgcgagaccatccctggctatggtccatataagcgcggcctcatcacatccatcaactacctcggcacatggctgagttacatcttcttctcccgtcccgcgacggatctgctcggccgtcgctatgctgccatggtgggcatgtccgtgttatgcgtaggccaggcacttcaggctgctgcgtctgggtcggtggctcttagtatggtgatatttggacgggttgtttctggcttgggcaccggtattgtctcgacgagtgtgccattgtatcagagtgaaattgccccggccaaacagcgaggcagacttgttgttttgaaccatgtcgggtttgtagccggacttgcctctggcttctgctcacacggctacctcagcggatggcgcctgtccgtgtccctctccttcatccccgccctcatcttcttcgtcggcctccccttcctgcacgagtctccgcggtggctcgtcgagcacggccgccctgacgaagccctcaaagccctgcagttctaccgcgaaggatccttcaccccttcgcaaatccaaagcgaactgacagacatcaagcgcaatgtgtgcgcctaccaggccactagcctgaagaaatggacctcccttttcaccaaccccagcttgttcacgcgcctgtggcgagctgcactgctccatttcatggcgcagatgtgcggcgctacggccatgaagtattatctgccggacctgtttagggtgttgggactgagcccgcgcgtgtcgctgctggcgggcgggatcgagagcaccctgaagattgggtgtacggtgttggagatgtttgttattgataaggtgggaaggaggatgacactggctgttggggcggggattatggcttttgcattgttgatcaacggtgccctccccctcgcttaccccaacaacaccaaccgcgcctcagactacacctgcgtcgtcttcatcttcatctactcgcttggctacagcatgggtttcggcccggcagcttgggtctacgggtctgagatcttccccactgccgctcgcgcgcgtggtttgagcttcgctgcttctggtggcgcggtcgggtcaatcattgtttcccaactgtggcctatcgggatcgcagagcttggctcgaagatttacttcttcttcatggcggtcaatttggcgtgcgtaccgattatcttcttgctctatcctgagaccaagggacgtccgctggaggatatggaggtgctgtttggcgggtatgagggtggaactccgtcaactacgtctttgcttttggctgatgagagggaagatgggaacgaggaggacgaggagaatgagacactgggtaggccgttgcttggtgatggaagaggcatggcaaggtag

SEQ ID NO: 408 - protein, 510 aa, Neurospora crassa
MNGIKDLGLGFSKASTRLHFFSLLLALGSFVWGYNVGVLASVLAHPGFRETIPGYGPYKRGLITSINYLGTWLSYIFFSRPATDLLGRRYAAMVGMSVLCVGQALQAAASGSVALSMVIFGRVVSGLGTGIVSTSVPLYQSEIAPAKQRGRLVVLNHVGFVAGLASGFCSHGYLSGWRLSVSLSFIPALIFFVGLPFLHESPRWLVEHGRPDEALKALQFYREGSFTPSQIQSELTDIKRNVCAYQATSLKKWTSLFTNPSLFTRLWRAALLHFMAQMCGATAMKYYLPDLFRVLGLSPRVSLLAGGIESTLKIGCTVLEMFVIDKVGRRMTLAVGAGIMAFALLINGALPLAYPNNTNRASDYTCVVFIFIYSLGYSMGFGPAAWVYGSEIFPTAARARGLSFAASGGAVGSIIVSQLWPIGIAELGSKIYFFFMAVNLACVPIIFLLYPETKGRPLEDMEVLFGGYEGGTPSTTSLLLADEREDGNEEDEENETLGRPLLGDGRGMAR

SEQ ID NO: 409 - DNA, 1695 bp, Neurospora crassa
  CDS (1)..(1695)
atggcttcacccgacccccggaccacagccaacccgtcatccgacgacattgtatttagtgattcgaaaggccaacacgatgtcctccataactcggatgaggtccgacgcaccgacactacggacaggatcatccaaaatgccaaaacagcaaccgacaaggagcaaaagatgacgctgttgcagggcatcaagctgtacccaaaggcgattgcgtggagcatgctcatctcgacgtgcatcgtcatggagggttacgatgtctgtctgattaacaatttctacgccttcccccagtttgctcgcaagtacggcgaggagatagcgccgggccactgggaggttcctgctcgctggcaggctggtcttagtaatggcgccaacgtgggagagttgatcggccttctcatcaatggatatgtatcagaacgtttcggttatcggtacaccgttatcggctgcttgatgctcatttgcgcgtggacttccctgttctttacggcgcagaatgtccagacgttgttggctgctgagattctttgcggcatcccatggggcgtcttccaaactctcaccatcacctacgcctccgaagtctgccccgtcgccatgcgcggctaccttaccacctacgtcaacttctgctggggcgtgggccaggaaatcgccatcggagtcatcatgtccatgctcaagcgcgacgacgaatgggcctaccggatcccctacgccctgcaatggatgtggcccgtacctctggccttgggaatcttcttcgcacccgaatcgccttggtggctcgtccgcaagggtcgtctggatgacgccaagaagtctctcctccgtctgaccagcgtgaaccgcgaaaccgatttcaatgcggacgagaccgtcgccatgatggttcacaccaccgccctggaggagaagacgacgcagggagcgaccttttgggattgcttcaagggccatgatctcaggagaacggagattgtgtgcatggtgtgggcgattcagaatctgagtggaaactcgttctcgaattactcgacgtatttcctcaagcaggccggcctggacgatgatgacgcctatgcgtttgctctcgggcagtacgctatcaacatggcgggcgtgtttggcgcgtggttcttgatgagccgcggcattggacggagagctctttacctgtatgggttgtgcggtctattctgcatgctctttgtgctgggtttccttggtcttgttcccgaagcgcacaacagggaggcttcgattgcgactggcagtatcatgttgggctgggctttggtgtaccagttgacagtcggaacggtctgctactcgcttgtcagtgaaatctcgacgagaagactgcagatcaagaccattgctcttggtcgtgtgctttacattattgtcggcatcgtcactgccgtcctcacaccctacatgctcaaccccggcgcctgggactggtccaactttaccggtttcttctggcccaccggccgcacctttgccgagctcgacctcctcttctcaaagggcatcagcgcgcgcaagttcgctgagaccaaggtggatgtattcgctgatgaggctgcgtccctcgatagctcggtgttgcaaaagtacgagaagggcttggatatgtcccaaactgacagcaaggctagtggcagtggggtataa

SEQ ID NO: 410 - protein, 564 aa, Neurospora crassa
MASPDPRTTANPSSDDIVFSDSKGQHDVLHNSDEVRRTDTTDRIIQNAKTATDKEQKMTLLQGIKLYPKAIAWSMLISTCIVMEGYDVCLINNFYAFPQFARKYGEEIAPGHWEVPARWQAGLSNGANVGELIGLLINGYVSERFGYRYTVIGCLMLICAWTSLFFTAQNVQTLLAAEILCGIPWGVFQTLTITYASEVCPVAMRGYLTTYVNFCWGVGQEIAIGVIMSMLKRDDEWAYRIPYALQWMWPVPLALGIFFAPESPWWLVRKGRLDDAKKSLLRLTSVNRETDFNADETVAMMVHTTALEEKTTQGATFWDCFKGHDLRRTEIVCMVWAIQNLSGNSFSNYSTYFLKQAGLDDDDAYAFALGQYAINMAGVFGAWFLMSRGIGRRALYLYGLCGLFCMLFVLGFLGLVPEAHNREASIATGSIMLGWALVYQLTVGTVCYSLVSEISTRRLQIKTIALGRVLYIIVGIVTAVLTPYMLNPGAWDWSNFTGFFWPTGRTFAELDLLFSKGISARKFAETKVDVFADEAASLDSSVLQKYEKGLDMSQTDSKASGSGV

SEQ ID NO: 411 - DNA, 1683 bp, Neurospora crassa
  CDS (1)..(1683)
atggcggaccaaaaaccccttacctcttcgcctgaagaggccacagaggcgggcaccactaccactaccaccatcccccaagcccaaatccaagacgacgtcgtcctcgtcgaagccaaacacgccgccgacaccgagcacgaaatgaccctcctccgcgccatccagctctaccccaaagccatcggctggtccgtcctactctcttcgaccttgatcatggagggctacgacctcgccctcctggggagcttatacgcctcccccgttttcaacaagaaattcggcgagctcaacccggccacgggcaagtacgccgtctctgctgcttggcagtcgggtctgtccaacggggcaagagccggagagatttttggcttgatctttgctggatgggcggctgatcggatcgggtacaagaagacgacgattgcgagtctggtgttgatgattacctttatttttgtcttgttttttgcgccgaatgtgaaggtgttggtggttggggaggttctttgtggtatcccctggggtgcctttcagagcgttacacccgcctatgcctccgaggttgcgccgatggtgcttcgcccgtacctgacaaccttcatcaacatgtgctgggtaattggccagttcttcgctgccgccgtcaacaagggctccgtgggccggactgatcagtgggcgtacaggattccctttggcgtgcagtgggtgtggccaattcccatcctcgccgggctcgtctttgctcccgagtcgccttggtggtatgtccgacatgacaggagggaggaggccaagcagtcgctcctccgtttgacttcgaggaatcaacccgggttcaacgtggacgagacgctggctatgattgagcataccaacgagctcgagaagcagatgaaggagggtgtcactttccgcgactgcttcaggggtgttgatcttcgccgtacggagatcgtcgtgggcatttggcttgtccagaccctcggcggccagaacctgatgggttacttctcctacttcctcacgcaagccggcatggacccgagcaactcgttctcgctctccatgggccagtacgccctcggtatggtcggcaccgccgggtcgtggttcctcatgtcacgcgtcggccgtcgacgcatccattttagcggtctctgcgcgcagttctgtctgctcgccatcgtcggctgtctctcctttggcggaaacaaggcctctgtgtgggccatcggcggcgtactcgtcgcgttcacgttcgtctacgactttgctgtcggtccggtgacgtactgtctcatctccgagctgtcgtcaactcgtctaaaggccaagaccatcgtgcttgcccgtgcagcgtacaatgctagtaacatctttgtcaatgtaatgacgaattaccagctgagctcgacggcgtggaattggggcgctaggacggcgttcttctgggcgggcagctgcttgttgtcggctatatgggtgttctttagactgccggagccgaaggggaggacatatgccgagttggatattttgtttgagaagaaggtgacagcgaggaagtttaggaagaccaaagttgatccttttgacttgcgcagtcatggcgagaagaagatgtcgcttgagaagatggagagtcatgaggggaaggaaatcgaggcttaa

SEQ ID NO: 412 - protein, 560 aa, Neurospora crassa
MADQKPLTSSPEEATEAGTTTTTTIPQAQIQDDVVLVEAKHAADTEHEMTLLRAIQLYPKAIGWSVLLSSTLIMEGYDLALLGSLYASPVFNKKFGELNPATGKYAVSAAWQSGLSNGARAGEIFGLIFAGWAADRIGYKKTTIASLVLMITFIFVLFFAPNVKVLVVGEVLCGIPWGAFQSVTPAYASEVAPMVLRPYLTTFINMCWVIGQFFAAAVNKGSVGRTDQWAYRIPFGVQWVWPIPILAGLVFAPESPWWYVRHDRREEAKQSLLRLTSRNQPGFNVDETLAMIEHTNELEKQMKEGVTFRDCFRGVDLRRTEIVVGIWLVQTLGGQNLMGYFSYFLTQAGMDPSNSFSLSMGQYALGMVGTAGSWFLMSRVGRRRIHFSGLCAQFCLLAIVGCLSFGGNKASVWAIGGVLVAFTFVYDFAVGPVTYCLISELSSTRLKAKTIVLARAAYNASNIFVNVMTNYQLSSTAWNWGARTAFFWAGSCLLSAIWVFFRLPEPKGRTYAELDILFEKKVTARKFRKTKVDPFDLRSHGEKKMSLEKMESHEGKEIEA

SEQ ID NO: 413 - DNA, 1794 bp, Neurospora crassa
  CDS (1)..(1794)
atgtccaataacgacaaccttgcccctcgaggaccacacacatccgacgatgaggagaaaacagcatcaacgccccctctctccaccgcggcacacgaaaatgccacaccccaccgcacccagttcttcggtgcgagtgaatacgaccaagatctagcccttcttgccgagaaaagggagcaagaaatgagtttcaagcgcgcattcatgggagatctatgtttgatcatgtactcgctcggctactccgggactatcatcatggagggttacggcatggcactcctcacgtatttcttcagcgtggaatctttcaacgcgaagttcggtgtcttcgacaccacgaccggaaaatatgagcttgcgtacaaatggaaggcccttttgcccttgttggcccaagtcggcgcgatcttcggcgtcgtccttacatcattcttcgtgaagtggtttgggtacaagcacaccgttcttttcatgctcatcctctgcgcggcatttggcttcgtacccttcttcgccaacaacgtcgtcatcttggcgatcggctgtctggcccagggcatcccgtggggcctatttcaagtcgctagtcccgcctactcctccgaaattgcttcattgcggatgcggccaatcttgaccacatggaacaatctttgctggatcatcggtcaactcttggcctctgccgtcgcctatggcttccatagtcttcaaaatgagtgggcctacagggtgcccttcgccctgaactgggtcttcatcgcctttctctttgttgccattttcgttgcccccgagtctccatactggtatctccagaaaaacagggtagaggatgctcacaaggccatcaagaagctcgtccgcaagggatccgaggaacgcacccaggagaagcttgctttgatgcagcacgccatctgccatgaaatgaagcacgttgccgacaaccagaccagatggcagagaatcagcgccatgttcagaggcactgacagaaggcgtaccgaaattacctgcaatacatggatgattcaagccctctgcggttcgagcctcattggttgggctcccaagctattcgagtctgtcggcatggcaagcgacaaggcactggccatgaacattgccttgccctgtgccggaattgtgggcacaattgcgtcttggtggttgatgcaaaagatgggacgtcgacggatctttttctggggcctaatcagcatggccatcgtgctcactgtgtgcggttccgcctcactagctacaactccggagtccgtgtccgctgccggagcgatccttgttgtgtatactgccatctatgacctgactatcggccccatttgctactcaattgtttccgatatcccttcggttcgcctccgcacagagaccattgctctcgcacgtggcctttacctggcggccaatctcttcaatctgttccttacccccaagatgctcggaatggactcgaagagctggaattggggcgccaagacgggttttctttacgcaggcatctgtggtctcggagctctgtacacgttctaccgcatcccggaaaccaaggatatctctgtccgaggactcagcattcttttcaacgagaaagtgaaggcgagcaaattcagcgctacgaaggctgcggagctggaaaaatcgcagggggctgcagcttccatgactagcatcagcgataacaccgtctcagtccttgaccagactgtggagcctaagattgcttctcccgctagggctgcgtctgttaagaacaacaactga

SEQ ID NO: 414 - protein, 597 aa, Neurospora crassa
MSNNDNLAPRGPHTSDDEEKTASTPPLSTAAHENATPHRTQFFGASEYDQDLALLAEKREQEMSFKRAFMGDLCLIMYSLGYSGTIIMEGYGMALLTYFFSVESFNAKFGVFDTTTGKYELAYKWKALLPLLAQVGAIFGVVLTSFFVKWFGYKHTVLFMLILCAAFGFVPFFANNVVILAIGCLAQGIPWGLFQVASPAYSSEIASLRMRPILTTWNNLCWIIGQLLASAVAYGFHSLQNEWAYRVPFALNWVFIAFLFVAIFVAPESPYWYLQKNRVEDAHKAIKKLVRKGSEERTQEKLALMQHAICHEMKHVADNQTRWQRISAMFRGTDRRRTEITCNTWMIQALCGSSLIGWAPKLFESVGMASDKALAMNIALPCAGIVGTIASWWLMQKMGRRRIFFWGLISMAIVLTVCGSASLATTPESVSAAGAILVVYTAIYDLTIGPICYSIVSDIPSVRLRTETIALARGLYLAANLFNLFLTPKMLGMDSKSWNWGAKTGFLYAGICGLGALYTFYRIPETKDISVRGLSILFNEKVKASKFSATKAAELEKSQGAAASMTSISDNTVSVLDQTVEPKIASPARAASVKNNN

SEQ ID NO: 415 - DNA, 1578 bp, Neurospora crassa
  CDS (1)..(1578)
atgggcatcttcaacaagaagcccgtggctcaggccgtcgacctcaatcagatacaggaggaggctcctcagtttgagagggttgactggaagaaggaccccggtcttcgcaagctctacttctacgccttcattctttgcattgcttcggccaccaccggttacgatggcatgttcttcaactcggtgcagaacttcgagacctggattaagtactttggcgacccgcgaggatccgagcttggtctgctcggtgctctctaccagattggttccattggctccatcccctttgtccccctccttaccgacaactttggccgcaagacccccatcatcatcggctgcgttatcatgatcgtcggtgccgttctccaggccacggccaagaacctcgatacattcatgggcggccgtaccatgctcggctttggcaactccctcgcccagatcgcctcccccatgcttctcaccgagctcgcccatcctcaacaccgcgctcgtctcaccaccatctacaactgcttgtggaacgttggtgccctcgtcgtctcgtggttggcctttggcaccaactacatcaacaacgactggtcatggcgcattcccgccttgctccaggctttcccctccatcattcagctcctcggtatctggtgggttcccgagtctccccgtttcctcatcgccaaggacaagcacgacgaggccctccacatcctcgccaagtaccacgccaacggcgaccccaaccaccccaccgtccagtttgagttccgcgagatcaaggagaccatccgcctcgagatggaatcgaccaagaacagcagctacctcgacttcttcaagagccgcggcaaccgctaccgcctcgccatcctcctctcgctcggcttcttctcccaatggtccggcaacgccatcatctccaactactcctccaagctgtacgagaccgccggcgtcaccgactccaccgccaaactcggtctttccgccggacagaccggtctcgcgctcatcgtgtccgtcaccatggcgctgctcgtcgacaagctcggtcgtcgtcttgctttcctcgcttccacgggcggcatgtgcggcacctttgtcatttggacgttgacagccggcctgtacggcgagcaccgcctcaagggcgccgacaaggccatgatcttctttatctgggtgttcggcatcttctactcgctcgcctggtccgggttgctggtcggctacgccatcgaaatcctcccttaccgacttcgcggcaaggggttgatggtcatgaacatgtcggtgcagtgcgcgctgacgctcaatacttatgcgaaccctgttgcgtttgattactttggtcctgatcactcgtggaagctttatcttatttacacttgctggatcgccgccgagttcgtcttcgtcttcttcatgtacgtcgagaccaagggccccacgctcgaggagcttgccaaggtcattgatggcgatgaggccgatgttgcccacatcgacattcaccaggtcgagaaggaggtggagattcacgagcatgagggcaagtctgttgcttga

SEQ ID NO: 416 - protein, 525 aa, Neurospora crassa
MGIFNKKPVAQAVDLNQIQEEAPQFERVDWKKDPGLRKLYFYAFILCIASATTGYDGMFFNSVQNFETWIKYFGDPRGSELGLLGALYQIGSIGSIPFVPLLTDNFGRKTPIIIGCVIMIVGAVLQATAKNLDTFMGGRTMLGFGNSLAQIASPMLLTELAHPQHRARLTTIYNCLWNVGALVVSWLAFGTNYINNDWSWRIPALLQAFPSIIQLLGIWWVPESPRFLIAKDKHDEALHILAKYHANGDPNHPTVQFEFREIKETIRLEMESTKNSSYLDFFKSRGNRYRLAILLSLGFFSQWSGNAIISNYSSKLYETAGVTDSTAKLGLSAGQTGLALIVSVTMALLVDKLGRRLAFLASTGGMCGTFVIWTLTAGLYGEHRLKGADKAMIFFIWVFGIFYSLAWSGLLVGYAIEILPYRLRGKGLMVMNMSVQCALTLNTYANPVAFDYFGPDHSWKLYLIYTCWIAAEFVFVFFMYVETKGPTLEELAKVIDGDEADVAHIDIHQVEKEVEIHEHEGKSVA

SEQ ID NO: 417 - DNA, 1614 bp, Neurospora crassa
  CDS (1)..(1614)
atgggtctttcgataggaaataggatcctccggaaaattgtcaaaaatgaggccatggcagaagatcccccagagatctatggctggcgtgtctatctcctagcgtgctctgcctgcttcggcgccatgtctttcggctgggattcctccgtcatcggcggcgtcatcgaactcgaaccctttaaacacgactttggcttcatcggcaacgataaagccaaggccaacctgggcgccaatatcgtctctaccctccaagccggctgcttcctcggtgcgctgatcgcctcacctataaccgatcgcttcggccgcaagtggtgtctcatcgctgtctccctggtcgtcatcatcggtatcatcatgcaagccgccgcctcaggcaacctcgcacccatgtacattggccgtttcgtcgccggcgtgggcgtcggcgccgccagctgcatcaaccccgtctttgtgtctgagaacgctccccgctcgatccgcggtctgttgacgggcctctaccaactcttcattgtcaccggcggcatgatcgcattctggatcaactactccgtctctctgcacttcaagggcaaatccatgtacatcttcccgctcgccatccaaggtcttcccgccggccttttgtgcgtctgcatgctcctctgccacgaaagcccgcgctggctggcccgtcgtgaccgatgggaagaatgcaagtctgtgctggcgcgcatccgcaacctccccccagaccacccgtacatcgtcgacgagttccgcgagatccaggaccagctcgaacaggagcgtcgtctccagggcgacgccacttactgggacttgacccgcgatatgtggaccgtcgccggcaaccgcaagcgcgccctgattagtattttcttgatgatctgccagcaaatgacgggcaccaacgccatcaacacgtacgcgcctaccatcttcaagaacttgggtatcaccggcacgtcgactagcttgtttagtaccggcatctatggtattgtcaaggtcgttagctgcgtcattttcttgctgttcttggccgactcgctgggtcgtagacgttcgctgctgtggacgtcgattgcgcagggtcttgctatgttttatattggcctttatgtccgcatctcgccgccgattgatggccagccggtgccgcctgcgggttatgtagcgttggtgtgcatatttctgtttgctgctttcttccaatttggctggggtcctgcctgctggatctacgcctcggaaatccccgccgcccgcctgcgctccctcaacgtgtcctacgccgccgcgacgcagtggctgttcaatttcgtcgtggcccgcgccgtgcctactatgctggtcacggtcggcccccacggttacggcacctacctcatctttggcagcttctgcctcagcatgtttgtctttgtctggttcttcgtgcccgagacaaagggtatctcgcttgagcacatggatgagctgtttggcgttactgatgggcctgccgctgagaagtcgtcggtgcatggtggagatgatgtcgggtcggagatggggaagggggatcagaagtcgaagcatgtggaggtttatgtttaa

SEQ ID NO: 418 - protein, 537 aa, Neurospora crassa
MGLSIGNRILRKIVKNEAMAEDPPEIYGWRVYLLACSACFGAMSFGWDSSVIGGVIELEPFKHDFGFIGNDKAKANLGANIVSTLQAGCFLGALIASPITDRFGRKWCLIAVSLVVIIGIIMQAAASGNLAPMYIGRFVAGVGVGAASCINPVFVSENAPRSIRGLLTGLYQLFIVTGGMIAFWINYSVSLHFKGKSMYIFPLAIQGLPAGLLCVCMLLCHESPRWLARRDRWEECKSVLARIRNLPPDHPYIVDEFREIQDQLEQERRLQGDATYWDLTRDMWTVAGNRKRALISIFLMICQQMTGTNAINTYAPTIFKNLGITGTSTSLFSTGIYGIVKVVSCVIFLLFLADSLGRRRSLLWTSIAQGLAMFYIGLYVRISPPIDGQPVPPAGYVALVCIFLFAAFFQFGWGPACWIYASEIPAARLRSLNVSYAAATQWLFNFVVARAVPTMLVTVGPHGYGTYLIFGSFCLSMFVFVWFFVPETKGISLEHMDELFGVTDGPAAEKSSVHGGDDVGSEMGKGDQKSKHVEVYV

SEQ ID NO: 419 - DNA, 1641 bp, Neurospora crassa
  CDS (1)..(1641)
atggcgcctccaaagttcctgggcctctcaggccgaccgctctctctagctgtctcgactgtagccaccacgggcttccttctcttcggctatgaccaaggtgtcatgagcggcatcattaccgcccccgctttcaacaacttcttcacaccaaccaaagacaactcgaccatgcagggtctcatcactgccatctacgaaattggatgcttgattggtgccatgttcgtcctctggaccggcgatttgttgggtagacgcaggaacatcatggtgggcgccttcattatggctctcggtgtcattattcaggttacctgtcaggctggatccaacccttttgctcagctgttcgtcggcagagtcgtcatgggtattggcaacggcatgaacacttcgaccattcccacttatcaaggcggtgtcattgcctttggtactttgattgcttattggatcgactatggtgcatcttacggtcccgatgacctcgtttggcgcttccccatcgctttccagcttctcttcgccatcttcatctgcgtccccatgttttaccttcccgagtcgcccagatggctcctcagccatggccggacccaagaagctgacaaggtcattgctgccctccgtggctacgagatcgatggtcccgagaccatccaagagcgcaacctcattgttgactccctgcgtgcctctggaggtttcggccaaaagagcactcccttcaaggccctcttcactggcggcaagacccagcatttccgtcgtctcttgctcggttccagctcccagttcatgcagcaagttggtggttgcaacgccgtcatctactacttccccattctgttccaggattctattggcgagtcccacaacatgtccatgttgctgggcggtatcaacatgatcgtctactccatcttcgctaccgtttcctggttcgccattgagcgtgtcggtcgtcgtcgtctgttcttgatcggcaccgttggccagatgctctccatggtcatcgtcttcgcctgcttgatccccgacgaccctatgaaggcccgcggtgccgcggtcggtctcttcacttacattgcctttttcggtgccacttggcttcccctcccctggctctaccccgccgaggttaaccccatccgcacacgtggaaaggctaacgccgtctccacctgctccaactggatgttcaacttcctcatcgtcatggtcacccccatcatggtcgacaagattggctggggaacttacctcttcttcgcggtcatgaacggctgcttccttcccatcatttacttcttctaccccgagactgcgaaccgctcgctcgaggagatcgacatcatcttcgccaagggcttcgtcgagaacatgtcgtacgtcactgccgccaaggagctgcctcacctcactgccgaggagatcgagtcctatgccaacaagtatggcctcgtcgaccgcgattccaacggcgagggcggcaaccgccatgacgaggagaagacgcgcgaccgccccgaccagagtgacagcgactcccccgctcacgtcgagattgatgttgtcgacgagcacggtgtcgagtccggcttcggtgatggtattaacaccaaggaaacacgttaa

SEQ ID NO: 420 - protein, 546 aa, Neurospora crassa
MAPPKFLGLSGRPLSLAVSTVATTGFLLFGYDQGVMSGIITAPAFNNFFTPTKDNSTMQGLITAIYEIGCLIGAMFVLWTGDLLGRRRNIMVGAFIMALGVIIQVTCQAGSNPFAQLFVGRVVMGIGNGMNTSTIPTYQGGVIAFGTLIAYWIDYGASYGPDDLVWRFPIAFQLLFAIFICVPMFYLPESPRWLLSHGRTQEADKVIAALRGYEIDGPETIQERNLIVDSLRASGGFGQKSTPFKALFTGGKTQHFRRLLLGSSSQFMQQVGGCNAVIYYFPILFQDSIGESHNMSMLLGGINMIVYSIFATVSWFAIERVGRRRLFLIGTVGQMLSMVIVFACLIPDDPMKARGAAVGLFTYIAFFGATWLPLPWLYPAEVNPIRTRGKANAVSTCSNWMFNFLIVMVTPIMVDKIGWGTYLFFAVMNGCFLPIIYFFYPETANRSLEEIDIIFAKGFVENMSYVTAAKELPHLTAEEIESYANKYGLVDRDSNGEGGNRHDEEKTRDRPDQSDSDSPAHVEIDVVDEHGVESGFGDGINTKETR

SEQ ID NO: 421 - DNA, 1644 bp, Neurospora crassa
  CDS (1)..(1644)
atggctcacagcataaacgaaaaggaggccatgggtgcccatgacgatgccttcccagaatccgatattactgtccagttggcccatgatgtcgacaacacaaagtactcgccctggtccaagagcatgttccgcctctaccttgtcctcgcgtgtgcctacctctgcggatgtctcaatgggtacgatggaagtctgatgggaggcttaaacggtatgaaagcctaccagaactacttccatatgtccactgcaggctcgggaaccggccttgttttcgccatgtataacattggcagtgttgctgccgttttcttcaccgcccctgtcaacgactggttcgggcgtcgctggggcatgttcacaggtgctcttgtcattatcattggcacgtgtgtccaagccacgacacataccaaatcccagttcctaggcggtcgcttcgtcctcggtttcggcgtcagcttctgttgcgtatcagccccttgctatgtcagcgagatggctcaccccaagtggcgcggcaccctgacaggcttgtataatacgacctggtacattggctctattatcgcttcgtgggtcgtctatggttgctcctatatcgagaacaacaaggacgcgtggcggattcccatctggtgccaaatgatcacctccggaatcgtgtgcttgggagtcttttggttgcccgagagtcccaggtggctcgtggctcaagacaggtacgaagaagctgccaaaatcctggccacctaccacggcgaaggccggctcgaccaccctctagtacagctgcaactcaaggagatggccaaccagatctcgtcagaggcatccgacaagaagtggtacgattaccacgagctttggaacactcactccgcccgtcgccgccttatctgcgtcctcggcatggcctgctttggccaagtcagcggcaatagcttgtcctcctattacatggtcaacatgctcaaatcagccggtattaccgatgagcacaaggtattggcgctgaacggtatcaacccggccttgtcgctcatcggcgccgtaatgggagcacgcatgaccgatgtcgttggccgccgtcctcttctgctctacacaatcgtcttctcttccacctgcttcgccattatgacgggtaccagtaaactcgcaatgccgggccatgttggtaaccttgacgacgctgatactcaagctctcaccccatcccaacgtgctgccgctaacacgaccattgcctttatctttatatttggcattgtcttttctttcggatggacggccttgcagtccatgtatattgcggagacactccctacagctacccgcgcaaaaggcactgctgtcggaaatttcgtatctgctgcttcgtctgtcgttcttcaatattcctctgggcctgctttcgagaagatcgggtactacttttatctcgtttttgtgttttgggacctcattgaaggtgtcctgatcttcttctatttccctgaaaccaaggatcgcaccctcgaagaactcgaggaagtgttctcggctcctaacccggtcaagaaaagcctggagaagaggagtgcgcagacagtattgaacaccatgggagcgccggatgacgagaaagttacaatttag

SEQ ID NO: 422 - protein, 547 aa, Neurospora crassa
MAHSINEKEAMGAHDDAFPESDITVQLAHDVDNTKYSPWSKSMFRLYLVLACAYLCGCLNGYDGSLMGGLNGMKAYQNYFHMSTAGSGTGLVFAMYNIGSVAAVFFTAPVNDWFGRRWGMFTGALVIIIGTCVQATTHTKSQFLGGRFVLGFGVSFCCVSAPCYVSEMAHPKWRGTLTGLYNTTWYIGSIIASWVVYGCSYIENNKDAWRIPIWCQMITSGIVCLGVFWLPESPRWLVAQDRYEEAAKILATYHGEGRLDHPLVQLQLKEMANQISSEASDKKWYDYHELWNTHSARRRLICVLGMACFGQVSGNSLSSYYMVNMLKSAGITDEHKVLALNGINPALSLIGAVMGARMTDVVGRRPLLLYTIVFSSTCFAIMTGTSKLAMPGHVGNLDDADTQALTPSQRAAANTTIAFIFIFGIVFSFGWTALQSMYIAETLPTATRAKGTAVGNFVSAASSVVLQYSSGPAFEKIGYYFYLVFVFWDLIEGVLIFFYFPETKDRTLEELEEVFSAPNPVKKSLEKRSAQTVLNTMGAPDDEKVTI

SEQ ID NO: 423 - DNA, 1572 bp, Neurospora crassa
  CDS (1)..(1572)
atggctcaaggcaacaacaacaacaaggcagatgccgccagcaaggatatcaaagcaattgtccaccatgataccggcctggacgaagccatccacttcgaacgttccctaacctttctccaagcctgcgccctctacccctccgccatcctgtggtccgccttcgtctccatgggcgtcataatgctcgccttcgacccgcagctcctaggcaacttgtacgccatgccgcaattccgcaaagactttggctatctctataaaaatgactacatcatcagcgcgccctggcagaccggcctatcaatgggtaatcccgtggggcaagtcgtcggcgctttgattgcgggatacccgatggagcggttcgggaggaagtggacttttggggcttgcgtggcgctgacggcttgtcttatttttatccagttcttcgcccgctcgctgcaggtgttgctggttggtgagcttttggggggtctggtgctggggtgttatgccgtcattgcacctgcttactcgtccgaggtgtgcccgatggctcttaggggggtgttgacgagctatgtcaacttgtgctttgttattggtcagttgttggggaacgcagtatgtgctggaacgagcaagttgagcaatcattgggcgtattcaattccgtttgcgctgcagtggttttggtgcttggttatactattggggctggcgtgggtgccggaaagtccgtggtggttggtaaggaaggggaaactggatgaggctgagatggtgctgcgtaggctggcatcggacaaggttgatgtgggaaagacgttgacagtgattgtggaaacggatcggttggagcaggagttggagatggggagtacttattgggactgctttaggggagtgaatctccggaggacggaaatttccatgggtgtttattgtacccaggtcctgagtgggatttacctgatcaattatgggacgtatttctttcagctcgctggtttggacaacgacgaagcatttgacatgggaattggatttttagccgtcggcttcctcggcactatcatttcctggcccctgttgatccgctacggtcgccgaaagatcttcaacaccggcctcctagtcctcgtcttccttcaaatcattattggcattcttgactgcattcctggccggcccagtggcgttatttggaccgaatcctcactgatgctagtgtggaacttcttctacgatatatctgtcggccccgtctgcttcgtcattatatccgaagccagcgccaccagggtgcgatccaagagcattgccctcgcgactgccgctcaaggcgctcttggctgtgtgatgacggttgcgattccttatatgatcaaccctgatcaggcgaacatgcaggggaaattgggtttcttctttgggggtcttgctgcgatgtgcctggtttggtcgtatttgagggttccggagacgagcgggaggacgtatgaagaattggatatcctgtttgagaggaagatcggagcaaggcagtttcaagaatacgttatcgagagtgaaggtgtcgactga

SEQ ID NO: 424 - protein, 523 aa, Neurospora crassa
MAQGNNNNKADAASKDIKAIVHHDTGLDEAIHFERSLTFLQACALYPSAILWSAFVSMGVIMLAFDPQLLGNLYAMPQFRKDFGYLYKNDYIISAPWQTGLSMGNPVGQVVGALIAGYPMERFGRKWTFGACVALTACLIFIQFFARSLQVLLVGELLGGLVLGCYAVIAPAYSSEVCPMALRGVLTSYVNLCFVIGQLLGNAVCAGTSKLSNHWAYSIPFALQWFWCLVILLGLAWVPESPWWLVRKGKLDEAEMVLRRLASDKVDVGKTLTVIVETDRLEQELEMGSTYWDCFRGVNLRRTEISMGVYCTQVLSGIYLINYGTYFFQLAGLDNDEAFDMGIGFLAVGFLGTIISWPLLIRYGRRKIFNTGLLVLVFLQIIIGILDCIPGRPSGVIWTESSLMLVWNFFYDISVGPVCFVIISEASATRVRSKSIALATAAQGALGCVMTVAIPYMINPDQANMQGKLGFFFGGLAAMCLVWSYLRVPETSGRTYEELDILFERKIGARQFQEYVIESEGVD

SEQ ID NO: 425 - DNA, 1509 bp, Mycobacterium bovis
  CDS (1)..(1509)
atgacgacgctgtggcagcctcatcgaaatgactacagccctataccaggacgcggggttcacgcccgccggggcgcccgacgaccccgaccgcgtggtggacgtgctgagcgccccggtaccggtcaactgaccagatcggggcgccgggcgctcctcgtcgggctcaccgccgccagcgtcggcgtcctctacgggtacgacctttccgccatcgcgggtgcgttgctgtctctcagcgaggaattcgaactcaccactcgagaacaggagttgctgaccaccacggcggtgctcggccagatcgccggggcgcttggcggcggcatcctcgccaacgcgatcggacgcaagaaatcggtggtgctcatcgtcgccggctacgcagtgttcgccctgctcggcgcgacctcggtgtccgtaccgatgctggtggtggcgcgtctgctgctgggtgtgacaatcggcctgtcggtggtggtggtgccggtgtatgtggccgagtcggcgccggcggcggtgcgtgggtcgttggtgaccgcgtatcagctggcgacgcttagcggcatcgtcgtcggttacctggtcggctacctgttggccggatcgcacggctggcgcgcgatgttcgggctggccgccgcgccggccacgctgctgttgccgttgttgtggcgcatgcccgataccgcccgctggtatctgctcaagggccggatcgccgacgcgcgtagcgcgctgcggcggatccagccggaggccgacatcgatgccgagctggccgatatggcggccgcggtcgacgaacgcggcggcggtatcggcgaaatggtgcggcggccgtatctgcgggccacgctgttcgtcatcgcgctcggcttcctcgtccagatcaccgggatcaacgcgatcatctactacagtccgcgacttttcgccgccatgggcttcgcgggctatttcgcgatgcttgccctgcccgcgatggtgcaagtcgccggcttggcggcggtgtgtgcctcgctgtttctggtcgatcggctgggccgtcgcccgatcctgttgtccggcatcgcgacgatgatcaccgcagatgccgtgctgatcaccgtattcgccaacgactccgatggtggcacggggctggtgttggggttcgccggcgtgctgctgttcatcatcgggttcaacttcggattcggctcgctggtctgggtgtacgccgcggagagcttcccgtcccggctgcggtcgatgggatcgagcctgatgctcacctcgacactgacggccaacgcgatcgttgccgccttctcgctcaccatgctgcgtgtgctcggcggcgcaggcgttttcgcggtcttcggcacgttcgccgtcgtcgcgttcgtggtcgtgtaccgctttgcgccggagaccaagggccgcaaactcgaggagatccggcacttctgggagaacggcggccgctggcccgccgagcggtcaccggcggcggacgaaccgtga

SEQ ID NO: 426 - protein, 502 aa, Mycobacterium bovis
MTTLWQPHRNDYSPIPGRGVHARRGARRPRPRGGRAERPGTGQLTRSGRRALLVGLTAASVGVLYGYDLSAIAGALLSLSEEFELTTREQELLTTTAVLGQIAGALGGGILANAIGRKKSVVLIVAGYAVFALLGATSVSVPMLVVARLLLGVTIGLSVVVVPVYVAESAPAAVRGSLVTAYQLATLSGIVVGYLVGYLLAGSHGWRAMFGLAAAPATLLLPLLWRMPDTARWYLLKGRIADARSALRRIQPEADIDAELADMAAAVDERGGGIGEMVRRPYLRATLFVIALGFLVQITGINAIIYYSPRLFAAMGFAGYFAMLALPAMVQVAGLAAVCASLFLVDRLGRRPILLSGIATMITADAVLITVFANDSDGGTGLVLGFAGVLLFIIGFNFGFGSLVWVYAAESFPSRLRSMGSSLMLTSTLTANAIVAAFSLTMLRVLGGAGVFAVFGTFAVVAFVVVYRFAPETKGRKLEEIRHFWENGGRWPAERSPAADEP

SEQ ID NO: 427 - DNA, 2251 bp, Oryza sativa
  CDS (152)..(1723)
gttcgacatctcccacctttctcgcgcccccattggattgggggcgtccgccattgatgaccagctccgaatctagtacggcgaatcgcccgcggcaaggagcagcgtcgccgtcgcccgtggatcgccgggagcccggagggaggcggcgatggcgggcgcggaggccgccaatggcaggaacaagtacgcggttcttgatcccagcgacgagccggaggggcggaggaggccctcggcgtgggagcggaggagcaaggagcggttcgtgctcgcctgcgccatcttcgcctcgctcaacgccatcctcctcggctacgatgttggtgtaatgagtggcgcaataatctacattcagaaagatcttcacattaccgaatttcaggaagaaatcctagttggttgcttgagtgtggtttcactcttgggaagtctgtcaggaggaagaacatctgatgcaattggcaggaaatggacaatggctcttggtgcaattgtcttccaggctggtgcagccataatgacgttcgccccttcattcaccgtgctcatgatcgggaggctccttgctggtgtgggcattggctttggtgccatggtatctgcagtctatatcgctgagatatcccctgcagctgcccgtgggactctcacatccctccctgagatctgtatcaatttagggatcctccttggttatgtttccaactatgctttctcgggcctttcagagcatatcaattggaggattatgcttggtgttggtatcctcccatctgtcttcattggatttgcactttttgtgatcccagaatcacccaggtggttgatgatggaaaagagagttccagaagccagggcagtattgctgcagataagtgagtctgaagctgaggttgaagaaaggattgctgagattgaggaagctgcaaatcttcttaaatcgacgaaatccgaggacaaggcagtgtggatggagctgttgaacccttctcctgctgttcgtcggatgctatatgctggctgtggtatccaaatgttccagcagatcacgggtattgatgctactgtctattacagcccaactattttcagagatgccgggatcaagtctgatcaggagcttcttgcagccacagtggctgttggttttactaagacagtgttcatattggttgcaattttcctcattgataaagttggacgcaaaccgcttctttatgttagcaccattggaatgactatgtgcttatttgtcttggggattgcactcacattgcaaaagcatgccatgggacttatttctccaagaattgggattgacctagcagtttttgcagtttgtggaaatgtggctttcttttcaattggcatgggtccaatatgttgggtcttgtcttcagagatatttcctttgagattacgagctcaagcatcggcactaggtcaagtaggtggtagagtgagcagtggtttggtttccatgtcatttctttccatggcccgtattatatcagtggcaggaatgttctttgtctttgcggttatctcgactgtctctgtggcctttgtgtatttctgcgtgccagaaacgaaagggaaaactctggagcagattgagatgatgtttgaaggtgggaaagaatggagagggagtgagatagagcttgaggatacacaacatttaatacagagcagcaagaagtctgtgtctctaggctgacactattagaaacaataaattcgaaatcattcgatgttcaatgatgaaccatacttatcctgcttccatcgcctacgggattctgaaattcaggtctgcaaaatgatcaggctgccttggactgctacggattttgagggcttaacacgagtatattaggtgtaggcgcaaaacagcatgtaaatgtctgctttacacaactacatcccaaaatgttacctgggaggacacagatgatgttgtatatggcggtatcttccacctaccaaaaaatatagttgttgaagttccttattccacagtttaattttaatagaggaagaggtgtgtgatttccaactgaatgaattctgtgtgattcttgatccagctttttgatttagtccttcatgatattgtagtactgtggctttgttggtctagtataaaaccttcaagaccatgccatgtctatagctttgcattgacgtgcagagttctgtaaataccagatttggatgattcattctgtcaaattaattatttact

SEQ ID NO: 428 - protein, 523 aa, Oryza sativa
MAGAEAANGRNKYAVLDPSDEPEGRRRPSAWERRSKERFVLACAIFASLNAILLGYDVGVMSGAIIYIQKDLHITEFQEEILVGCLSVVSLLGSLSGGRTSDAIGRKWTMALGAIVFQAGAAIMTFAPSFTVLMIGRLLAGVGIGFGAMVSAVYIAEISPAAARGTLTSLPEICINLGILLGYVSNYAFSGLSEHINWRIMLGVGILPSVFIGFALFVIPESPRWLMMEKRVPEARAVLLQISESEAEVEERIAEIEEAANLLKSTKSEDKAVWMELLNPSPAVRRMLYAGCGIQMFQQITGIDATVYYSPTIFRDAGIKSDQELLAATVAVGFTKTVFILVAIFLIDKVGRKPLLYVSTIGMTMCLFVLGIALTLQKHAMGLISPRIGIDLAVFAVCGNVAFFSIGMGPICWVLSSEIFPLRLRAQASALGQVGGRVSSGLVSMSFLSMARIISVAGMFFVFAVISTVSVAFVYFCVPETKGKTLEQIEMMFEGGKEWRGSEIELEDTQHLIQSSKKSVSLG

SEQ ID NO: 429 - DNA, 1648 bp, Orobanche ramosa
  CDS (46)..(1605)
acagttagacaaacatttccttcttcttctccacttcgaatttcaatgacggagcaattgggggcggcggccaaattccgtcggtccggcggatctccgacgaaagcactcatcaataaacctaagaagaatatgtatgctttactgatctccgttatggcgtcgatgacatctatccttctcggatatgataccggggttatgagcggggcgaccctttacataaaaaaggatttgaaaatcacagacgtacaggtcgagattttggtgggtttaatcaatatctactcgctgatcgggtcggccgtagctggtcggacctccgattacttggggcgccggataaccatagttatcgcgtcggttatcttcttcgtcggagctgctgtgatggggctggccaacaattacgcggtgctgatggtggggcggttcgtggctgggctcggcgtcggctacgcgctgatgatcgcgccggtttacgcggctgaggtggcaccggcttcgtctcgcggcttcttgacttcttttccggaggttttcatcaatttcggcgttttacttggatacttatcaaactatgcatttgccaaattttccttgaaattgggctggcgcctcatgcttggtgtcggcgcactccctgctatcttcatcggccttgcggtgattgttatgcccgaatcccctcgttggctggtcatgcagggccgtctgggtgacgccaagaaagtgctcgacagaacgtccgactcgccacaggaagcccaattaagactcgccgacattatggaagccgccggcctgccagaggattgccacgacgacgtcgtcccggtcctcaagcaggaccgcggcggcggcggcgtctggaaggagctgattgtccacccgaccaagcccgtcctccacatcaccattgctgccgtgggctgccagttttttcagcaggccagcggcattgatgccgtggtgatgtacagcccgaggatctacgaaaaggccgggatcacgagcgacgagaagaagctgctcgccaccatagccgtcgggctctgcaagacggtgttcatcctcgtgacgactttcatggtggacaggatcggacggcgtgtgttgctcctcaccagctgcggcggcctcgtgctgtcgatgttgactctggctacgggattgaccgtgatcgatcactacggcgccgacaggttcccttgggtcgtggtcttatgtgtcctaacgacgtattcttcggtcgcgttcttttcgatggggatgggtcccattgcgtgggtgtacagttcggagatcttcccgttgaaattgagagctcagggttgtggtttgggagtcgcaataaaccgcgccaccaacggcgtgatactgatgtcgtttatatcgctctacaatgccatcactattggcggagctttctatttgttcagcggtatcggtatcgtaacttggatctttttctttacgttgttgccggagacgaggggaagaaccttggaggatatggaggtactgtttggcactttctttaaatggaggacaaccatgagagagttgcataagaaggaagcagaagatgctttgtatgcctaaagtgataaatttaagtagtgtgtgcattagattgttatattgg

SEQ ID NO: 430 - protein, 519 aa, Orobanche ramosa
MTEQLGAAAKFRRSGGSPTKALINKPKKNMYALLISVMASMTSILLGYDTGVMSGATLYIKKDLKITDVQVEILVGLINIYSLIGSAVAGRTSDYLGRRITIVIASVIFFVGAAVMGLANNYAVLMVGRFVAGLGVGYALMIAPVYAAEVAPASSRGFLTSFPEVFINFGVLLGYLSNYAFAKFSLKLGWRLMLGVGALPAIFIGLAVIVMPESPRWLVMQGRLGDAKKVLDRTSDSPQEAQLRLADIMEAAGLPEDCHDDVVPVLKQDRGGGGVWKELIVHPTKPVLHITIAAVGCQFFQQASGIDAVVMYSPRIYEKAGITSDEKKLLATIAVGLCKTVFILVTTFMVDRIGRRVLLLTSCGGLVLSMLTLATGLTVIDHYGADRFPWVVVLCVLTTYSSVAFFSMGMGPIAWVYSSEIFPLKLRAQGCGLGVAINRATNGVILMSFISLYNAITIGGAFYLFSGIGIVTWIFFFTLLPETRGRTLEDMEVLFGTFFKWRTTMRELHKKEAEDALYA

SEQ ID NO: 431 - DNA, 1608 bp, Oryza sativa
  CDS (1)..(1608)
atggggcttcgtgccaccgaggcggcgacgggcaacggcggcggcatgaggagccttccggatttcttggggaggaagagcaagtacgtgcgcatggacgacgtgctcccggatgagcagggagatggcggcggcggcggcggcgtcgttcgtgtccgcggcggcggcggcagcgggagatacgtctttgcctgctctgtcttcgcctccctcaaccatgtcctgctcggctacgatgttggtgtgatgagtggctgcatcatattcatccagaaggacctccacatcagtgaagtgcagcaagaagtgctcgtcgggtgcctcagcttcatctccctcctcggcagcctcgccgccgggaggacgtccgacgccgtcggccggaaatggaccatcgggctcgccgctgccgtgttccaggccggcgcggccgtcatgacgctcgcgccgtccttcgccgtgctcatgatgggccggctgctggccggcatcggcatcgggatcgggatcatggtggcgccggtgtacatatcggagatcacgccggccacgctgcgggggtcgtacgcctcgttcccggagatcttcatcagcctcggcatcctcctcggctacgtctccaacctcgccttctccggtctccccgaccacatcaactggcgagtcatgctcgccgccggcatcgtcccttccatctccgtcgcgttcgtgctgctggtgatcccggagtcgccgcggtggctcgtcatgcagggccgggccgccgaggcgcgcgcggtgcttctcaaggtcaccgatggcgaggacgaggcgcaggagaggctcgccgagatcgaggaggcggcgcgcgtcacggccaccggcaacggcaaggccgtgtggcgcgagctcctgaggccgtcgccggtgatccgccgcatgctggtgaccggcatcggcgtgcagctcttccagcagatcaccggcatcgacgcgctggtctactacagcccgacgatattccgggacgccggcatcaccaccgagagccagctgctcgccgccaccgtcggcgtggggctctccaagacggtgttcatcgtgatcgccatcgtcctcgtcgaccgcgtcgggcggaagccgctgctgtacgtcagcacggccgggatcaccgcgtgcctggccgcgctcgccgcgtcgctctccctgctcgcgcacggcgcgctgccgcgggcggcggcgatcggggcggccatcctgacggtgtgcggcttcgtggcgttcttctcggtggggatcgggccgatcaacatggtgctgagctcggagatctacccgctgcggctgcgcgcgcaggcggtggcgctcggcttcgccgtgaacaggctgaccagcggcgcggtggccatgtcgttcctgtccatctgcggcgccgtgtccgtcgcgggtgccttcgccgcgttcgccgccatctcggcgctgtccgtggtgttcgtccacgtgttcgtgccggagatgagcggcaagtcgctggagcagatcgagtccctgttcggcgccggcgccggcgccggcgaggtggagctcggtgacgcggaacatctggtacaagggaaagaaatgagctga

SEQ ID NO: 432 - protein, 535 aa, Oryza sativa
MGLRATEAATGNGGGMRSLPDFLGRKSKYVRMDDVLPDEQGDGGGGGGVVRVRGGGGSGRYVFACSVFASLNHVLLGYDVGVMSGCIIFIQKDLHISEVQQEVLVGCLSFISLLGSLAAGRTSDAVGRKWTIGLAAAVFQAGAAVMTLAPSFAVLMMGRLLAGIGIGIGIMVAPVYISEITPATLRGSYASFPEIFISLGILLGYVSNLAFSGLPDHINWRVMLAAGIVPSISVAFVLLVIPESPRWLVMQGRAAEARAVLLKVTDGEDEAQERLAEIEEAARVTATGNGKAVWRELLRPSPVIRRMLVTGIGVQLFQQITGIDALVYYSPTIFRDAGITTESQLLAATVGVGLSKTVFIVIAIVLVDRVGRKPLLYVSTAGITACLAALAASLSLLAHGALPRAAAIGAAILTVCGFVAFFSVGIGPINMVLSSEIYPLRLRAQAVALGFAVNRLTSGAVAMSFLSICGAVSVAGAFAAFAAISALSVVFVHVFVPEMSGKSLEQIESLFGAGAGAGEVELGDAEHLVQGKEMS

SEQ ID NO: 433 - DNA, 1617 bp, Oryza sativa
  CDS (1)..(1617)
atggggctccccggcgccgagccgccggcggccagcggcggcggcctccctggattcttcggcggcaagagcaagtacgtccgcatggacgacgtgctgccgcaggagcaggaggaggacggcgtcggcggcggaggcggaggcgtccgcgtccgccggagccacagcagcaggcgctacgtcttcgcctgctctgtcttcgcctccctcaactccgtcctcctcggctacgatgttggtgtgatgagcggctgcattctcttcatccagagagacctccacatcaatgaagtgcagcaagaagtgctcgtcgggtgcctcagcttcatctccctcctcggcagcctcgccggcggaaggacgtcggacgccgtcggccggaaatggacgatcggcctcgccgccatcgtgttccaggccggcgcggccgtcatgacgctcgccccgtcgttcgaggtgctcatggtcgggaggctgctggccggcgtcggcatcgggttcggcgtcatgatcgcgccggtgtacatcgccgagatctccccggcggcgtcgcggggctccttcacctccttcccggagatcttcatcaacctcggcatcctcctcgggtacatctccaactacgccttctccggcctcccggaccacgtcagctggcgcgtcatgctcgccgtcggcatcctcccgtcggtgtccatcgcctttgcactgctggtgatcccagagtcgccgcggtggctggtcatgaagaacagggccgacgaggcgcgcgaggtgcttctcaaggtcaccgacagcgaggacgaggcgaaggagaggcttgccgagatcgaggccgccgccgccgtcgcgagcgccggcaagtacggcgacaagacggtgtggcaggagctgacgaggccgtctccggtgatccggcggatgctcatcaccgggctaggcatccagtgcttccagcagatcaccggcatcgacgcgctcgtctactacagcccgacgatattccgggacgccgggatcaccaccgagagccagctcctcgtcgccaccgtcgccgtcgggttcttcaagacggcgttcatcgcgcttgccatcgtgctcatcgaccgcgtcgggaggaagccgctgctgtacgtcagcacggtcggcatgacggcctgcctcgtcgtgctcgcggcgacgctcgccgcgctcgcgcacgggtcggcgtccaggagcgctggcatcgccgtcgccatcctgaccgtgtgcggcgacgtcgcgttcttctccgtcgggatagggcccatctgctgggtgatgagctcggagatcttcccgctccggctgcggtctcaggcggcggcgctcggcgcggtgatgaacagggtgaccagcggcgccgtggccatgtccttcctgtccgtctgccgcgccatctcggttgccggcgccttctccgtcttcgccgtcatatccgccctgtccgtcgtgttcgtctaccggtacgtgccggagacgagcggcaagacgctggaagagatcgagctgctcttcggcggcggcggcggcgacggcgaggcggcgcggggagaggtggagctcggtgacggcgagcacctggtgcacaagggatga

SEQ ID NO: 434 - protein, 538 aa, Oryza sativa
MGLPGAEPPAASGGGLPGFFGGKSKYVRMDDVLPQEQEEDGVGGGGGGVRVRRSHSSRRYVFACSVFASLNSVLLGYDVGVMSGCILFIQRDLHINEVQQEVLVGCLSFISLLGSLAGGRTSDAVGRKWTIGLAAIVFQAGAAVMTLAPSFEVLMVGRLLAGVGIGFGVMIAPVYIAEISPAASRGSFTSFPEIFINLGILLGYISNYAFSGLPDHVSWRVMLAVGILPSVSIAFALLVIPESPRWLVMKNRADEAREVLLKVTDSEDEAKERLAEIEAAAAVASAGKYGDKTVWQELTRPSPVIRRMLITGLGIQCFQQITGIDALVYYSPTIFRDAGITTESQLLVATVAVGFFKTAFIALAIVLIDRVGRKPLLYVSTVGMTACLVVLAATLAALAHGSASRSAGIAVAILTVCGDVAFFSVGIGPICWVMSSEIFPLRLRSQAAALGAVMNRVTSGAVAMSFLSVCRAISVAGAFSVFAVISALSVVFVYRYVPETSGKTLEEIELLFGGGGGDGEAARGEVELGDGEHLVHKG

SEQ ID NO: 435 - DNA, 2574 bp, Oryza sativa
  CDS (569)..(2089)
gcgaagcgtatcggcttcatcgccaatcgatgatgcgacgatgctgatctgatcatctgaacccaacaaaatttctccttcaaaacctgcaagctcaccttcttctcccccagctctctcctccgatcatttgcccaaccaccacccagcccgccagccgtgcgagcgcagctttcctatttaagccgcgcctcgctggctcgctgccgctgcccctgcctcttccccgaatgctggtctctcgtcgccccgtcccctggaatctctccctttctaccttggtccgggaccgcggctcctgaaatctctctctgtccctagaaatttctgcgcgcgtcttccgttcttctccccggtttggttggttcccgagcctgtgacctcgggggcggccgaaaggttggattttgtagagcaggctttacttgcatctgggcaaagattggattttttttgtggagcgattttggggtcgttgttttttggtgcttgtttgctgaagtttggattttgggaggagtttggggggggggggggggttcggtcagatttggtgggagcggagggcatgacgatcgatttgtccatgcccgggagctccgggctcctggacgacgtaggggggaagaagcacatgaatttcttcagcaaccgctacgtgctcgcgctcacgggcgccgcaggaatcggcgggttcctctttggctacgacacaggtgtcatatctggagcccttttgtatattcgggatgactttccagcagtcagagacaattatttcttacaggagacaatcgttagcatggcattggtaggagccatcattggagcagctggcggcggctggatcaatgatacatacggccgtaggaagtctactcttgtggctgacatgctgtttgcacttggctcacttgttatgtgtgctgctggtggtccttacattctgattcttggaaggcttcttgttggcttgggtgtgggtatagcatcagtcacagcgccagtttacattgctgaagctgctccttcggaaattaggggaggtttggtgtcaactaatgtactcatgattactggtggtcaattcttctcctacctcatcaatcttggctttactgaggttcctggaacatggcgctggatgctcggagttgctgctgtgcctgcaattctacagtttgttctgatgctttttttgccagaatctccccgttggcttttctggaaggatgagaaagcaaaagctatttctgtcctagagaagatttatgactctgaccgtctagaggaagaggtagagcttcttgcttcttcttcaatgcatgaatttcagtctgatggtactgggagctatttggacattttcaagtcaaaggaactaaggctagcattttttgctggagctggtcttcaggcgttccagcaatttactggcatcaacactgtcatgtactacagcccaacaattgtccagatggctgggtttacctccaacaagttggcattgctcctttccctcatagtcgctggtatgaatgccgctgggaccattgttggaatctacctgattgaccgctgtggccggcgtcgcctggcccttacaagcttggctggtgtggtggtctccctcgccatcctagcaatggccttcatactgcagtcatcatcagatatctgttcgaatgcactcaatggtgcctgccaaggtgcactgggatggttcgcggtggcgggactcgctctatacatcgccttcttctccccaggtatggggccagttccatgggcagtgaactccgagatctaccccgaggcataccgtggaatgtgtggtggcatgtcagccactgtcaactgggtatctaacctgattgtggcacaaacattcctctcgatcgtcgggttggttgggaccggcctgaccttcctgatcatcgccggaatagcggtgctggccttcatcttcgtggctctctacgtgccggagactaaaggcctcagctttgagcaggttgagctcctgtggaaggagagagcatggggaaaccagggcaatcgccagagccttttgggcgctgcaccgtagtgagccagctctcatcctgcttgcccttgctggcaagggtcggtggctggctccctttttaagatggccgtgccaccctcagtttctatcggctctctctagctgggaagttttaggaagatctggatgcagaccaaattttattacgtggtagcgactagatcattgttctgtcacctggcatgtattgtcaatttctcatggtggaaactgggataatttcagcattgggtgggtgaagaatcaggttgtgttggtgtcgaatcttgtatacatgggaaggactgtacgagctatactggttgtgcattgccgtcacaagtgtatagttccggtgctagatgtgccggggagacggttaaaaacctgttatggacagaaacaggaatgaaaattatcgctttaatattcttgctcgttattcctccaccaggtgtatctgacttggcaaaccttgagagttatatgcagatgatgtattttgt

SEQ ID NO: 436 - protein, 506 aa, Oryza sativa
MTIDLSMPGSSGLLDDVGGKKHMNFFSNRYVLALTGAAGIGGFLFGYDTGVISGALLYIRDDFPAVRDNYFLQETIVSMALVGAIIGAAGGGWINDTYGRRKSTLVADMLFALGSLVMCAAGGPYILILGRLLVGLGVGIASVTAPVYIAEAAPSEIRGGLVSTNVLMITGGQFFSYLINLGFTEVPGTWRWMLGVAAVPAILQFVLMLFLPESPRWLFWKDEKAKAISVLEKIYDSDRLEEEVELLASSSMHEFQSDGTGSYLDIFKSKELRLAFFAGAGLQAFQQFTGINTVMYYSPTIVQMAGFTSNKLALLLSLIVAGMNAAGTIVGIYLIDRCGRRRLALTSLAGVVVSLAILAMAFILQSSSDICSNALNGACQGALGWFAVAGLALYIAFFSPGMGPVPWAVNSEIYPEAYRGMCGGMSATVNWVSNLIVAQTFLSIVGLVGTGLTFLIIAGIAVLAFIFVALYVPETKGLSFEQVELLWKERAWGNQGNRQSLLGAAP

SEQ ID NO: 437 - DNA, 2710 bp, Kluyveromyces lactis
  CDS (428)..(2014)
cgtttaggaaactctagcatctgtacgaggtttctctgaaatgaaacttttttttattgtgtcagttgtaatgtatgaaatgtgacgcaagtcggcatacaaaaaaaaaaattcatgataccaaaaggaaataatcctcgataaagtgaggttgaatgtgggaattcgagttagaaactctagatgtgaaatctctattggaactcagtatttatgacttttggaaacttttcaatgtacgaaaattttgtataaatacaggacaaagtacactgtcttgaacacttgaaacttgaataacgtattctcgtcttcaagaatgatcaaaggtctcatttagaaacgcctaataagtttaaacttacaaaatcacccagtgtcgataacaaaacttcaaggatctagctgtcatacatcaacaattgaaatgtccttagatacagaatcatttgaaactgctgaaaaagcaattgaggtagtcacaaaggaaatggtatctttgacaaattactcagccattggatcattaaccagtcagttatctcagaatgacactaagtcaggtggaattgaacagaaaaagttaccgttgaaaccaatattattgtgtctggctacttcttttgcagggtttatctttggctgggatgttggcacaattggtgggattacaaacatggtatcatttcaaaacttttttggtaccaactttgattcttcgagtaatacacactactttccaaaacttcttattggattaatcgtttccattttcaatatcagttgcgcacttggtggattatttctagtgaagattgctgatattaatggaagaaaaccaggtatttatgctgcaatcactatctattcgttgggaacattgattggctggacatgtggctcctcttggtggtatttcttcttcgcaaggttcatttcaggacttggtgttggtgctactgcggtgatgataccaatgtttatagccgaatctgctcccatcaacattcgtggtgccatggttgtgctctaccagttaatgatcactcttggaattttgctcggaaatgtcatcaactattgttgcagatccactttacacgaaacagataatgccacatggaagatccctgtaggattaggaaacgtctgggccgctatcgtcgcgctaggtgttcattttatgcctgaatcaccagtttttcttaccaagaggttaggaagcgctctcaaagctaaggcagcttttgcccatatgaacaatttggacgtagatgatccaattgtggatagtcatattaggaagatgatggaatcagctgacgcggaggtatctactcacaatgatatgaagaacagcaggtttgaattcatactcggtcaaccaagattaggttttagactatttattggtattatggtgatggcgtttcaacagctatccggtgcaaattacttcttctattatggtacaacacttttcaactctgtgggaattgaagacccatacttaacgtcgattttattgtcttctgtcaacttcatatctacctttttcggtatttatttagttgaaaagttaggcagaaaagcatgcttaattcttggttccgcgggtatgtttacctgtatgtccgtgtatgcgtcagtcggatcgttcgcacttaataagtcgcctcaaaactctggtgcgattatggttaccttcacgtgtgtttacatcatgttctttgcatgcacatcgggacctgtgtcctttgtcgtcatttcggagttgtttccaagcaggacaaaagcgatatccatggcagtgtgtacctcaatcaattggctttgcaacttcttcatttctttatgcacaccatatgtcactgataagataggcttcaagtttgggttcgtttttgctggttgtctatttgtctcattctggttcttcactttcttattgaaggaaactaagaacaaaactcctgaacaggttgacgcattgtattctattgacaagcaataggcaatggaccatacaggtatacttctacaaacaaagaaatttacaatgagctcaactgttcacataatctactgaagcctcccgatttctctgttcgagtgtgcgcttgaatcgctctccttcatataatttcactgtgtaaaacctattaactttctcattacgtatcattttacaagtgtctcaatggcattaaatttgtaattatttcagaagaattttaataacaaggcatttctgtctcccagccctgtgatatcttaatacttctatttactcttgtgttgttttatcgggctctcacttatcaatcaccgaagatgattcctgattcctcatatatttactcaacaagaaaaaaaggaagagatggcaatatgtaattgaaaatatgaaagcactcacatactatgattcaaaaatccagcaattggttgtaagccaaataaaccggtgatcgagagcactgagtattgttgctcaacgatgtttaaaagaggttcaaacagagctacttcgtcttctcaagggcagcaaccagaaaatcctccctctctgaaatatcagtcgtcaagttcacgatactcttttcatcgacagtacaacacaggttttggaacttcaccttttaggatatcacctaagtataaaccagatagccgcactcccttcagttttgatggtacgggaaatgtt

SEQ ID NO: 438 - protein, 528 aa, Kluyveromyces lactis
MSLDTESFETAEKAIEVVTKEMVSLTNYSAIGSLTSQLSQNDTKSGGIEQKKLPLKPILLCLATSFAGFIFGWDVGTIGGITNMVSFQNFFGTNFDSSSNTHYFPKLLIGLIVSIFNISCALGGLFLVKIADINGRKPGIYAAITIYSLGTLIGWTCGSSWWYFFFARFISGLGVGATAVMIPMFIAESAPINIRGAMVVLYQLMITLGILLGNVINYCCRSTLHETDNATWKIPVGLGNVWAAIVALGVHFMPESPVFLTKRLGSALKAKAAFAHMNNLDVDDPIVDSHIRKMMESADAEVSTHNDMKNSRFEFILGQPRLGFRLFIGIMVMAFQQLSGANYFFYYGTTLFNSVGIEDPYLTSILLSSVNFISTFFGIYLVEKLGRKACLILGSAGMFTCMSVYASVGSFALNKSPQNSGAIMVTFTCVYIMFFACTSGPVSFVVISELFPSRTKAISMAVCTSINWLCNFFISLCTPYVTDKIGFKFGFVFAGCLFVSFWFFTFLLKETKNKTPEQVDALYSIDKQ

SEQ ID NO: 439 - DNA, 1848 bp, Saccharomyces pastorianus
  CDS (1)..(1848)
atgaagggattatcctcattaataaacagaaaaaaagacaggaacgactcacacttagatgagatcgagaatggcgtgaacgctaccgaattcaactcgatagagatggaggagcaaggtaagaaaagtgattttgatctttcccatcatgagtacggtccaggttcactaacaccaaacgataataatgaagaagtccccgaccttctcgatgaagctatgcaggacgccaaagaggcagatgaaagtgagaggggaatgccactcatgacagctttgaagacatatccaaaagctgctgcttggtcactattagtttccacaacattgattcaagagggttatgacacagccattctaggatctttctatgccctgcctgtttttcaaaaaaaatatggttctttgaatagcaatacaggagattatgaaatttcagcttcctggcaaattggcttgtccttatgcgttacggctggtgaaattgtaggtttgcaaatgactgggccttttgtagattatatgggtaatcgctatacattgattttggcattgattcttcttgctgcattcacctttattctgtatttttgcaagggtttgggtatgattgctgtgggacaagtattgtgtggtatgccatggggttgtttccaatgtttgaccgtttcttatgcttctgaaatttgtcctatggccctaagatactatttgacgacttattctaatttatgttggacgttcggtcaacttttcgctgctggtattatgaaaaactcccaaaataagtaccctaactcagaactaggatataagctaccttttgctttgcagtggatctggcctgctcctcttgcaataggtattttttttgcaccagagtctccatggtggctggttaaaaaaggaaggattgatcaagcaaggagatcacttgaaagaacattgagtggtaaaggacccgagaaggaattactggtaagtatggagctagataatatcaaagtaaccattgaaaaggaaaaaaagctgtcagactcagaaggttcctattgggattgtctgaaggacagtgttaataggagaagaacgagaatagcttgtttatgttgggtcggtcaaaccacctgtggtacatcattaattggtaattcaacttacttttatgaaaaagctggagttggtactgatacggctttcactttcagtattatccaatattgtcttggtattgccgcaacatttctttcttggtgggcttcaaaatattttggtaggtttgacctttacgcatttggattggctatacaaacagtttcattgtttatcataggaggtttgggatgctccgactcgcatggcgctgaaatgggaagtggttctcttttaatggttctttccttcttctacaatttgggtattgctcccgttgtgttttgcttagtgtccgaaataccatcctcaaggctaagaactaaatcgattattctggctcgtaacgcatataatatggcatctattgtaactactgttttgatcatgtaccaattgaactcagaaaaatggaactggggtgccaagtcgggctttttctggggagggttatgttttgccactctagtttgggccgtaattgacctaccagaaactgctggcaggacttttattgagataaatgaattgtttagacttggtgttccagcaagaaagttcaagtcgactaaagtcgacccttttgcagctgccaaagcagcagctgcagaaattaatgttaaagatccgaaggaagatttggaaacttctgtggtagatgaagggcgaagcaccccatctgttgtgaacaaatga

SEQ ID NO: 440 - protein, 615 aa, Saccharomyces pastorianus
MKGLSSLINRKKDRNDSHLDEIENGVNATEFNSIEMEEQGKKSDFDLSHHEYGPGSLTPNDNNEEVPDLLDEAMQDAKEADESERGMPLMTALKTYPKAAAWSLLVSTTLIQEGYDTAILGSFYALPVFQKKYGSLNSNTGDYEISASWQIGLSLCVTAGEIVGLQMTGPFVDYMGNRYTLILALILLAAFTFILYFCKGLGMIAVGQVLCGMPWGCFQCLTVSYASEICPMALRYYLTTYSNLCWTFGQLFAAGIMKNSQNKYPNSELGYKLPFALQWIWPAPLAIGIFFAPESPWWLVKKGRIDQARRSLERTLSGKGPEKELLVSMELDNIKVTIEKEKKLSDSEGSYWDCLKDSVNRRRTRIACLCWVGQTTCGTSLIGNSTYFYEKAGVGTDTAFTFSIIQYCLGIAATFLSWWASKYFGRFDLYAFGLAIQTVSLFIIGGLGCSDSHGAEMGSGSLLMVLSFFYNLGIAPVVFCLVSEIPSSRLRTKSIILARNAYNMASIVTTVLIMYQLNSEKWNWGAKSGFFWGGLCFATLVWAVIDLPETAGRTFIEINELFRLGVPARKFKSTKVDPFAAAKAAAAEINVKDPKEDLETSVVDEGRSTPSVVNK

SEQ ID NO: 441 - DNA, 1927 bp, Prunus cerasus
  CDS (56)..(1585)
aatttgcttctctctaaatcacactgttctgcaatcaaacaccacagagctcaagatgactgaccggagagctcaagacaacgccgtttccggccagcccctgctcaagaagaagcccaaaagaaacctgtacgccatcggttgcgccattttggcttccatgacttcaatcttgctgggctacgatattggcgtgatgagtggggcttcaatctacatacagaaggacctgaaaatctcggacgtggaagttgagatcctcatagggattctgaacctctactcgctcatcggctccgccgccgccggccgaacttctgactggattggccgccggtacactatcgtcttcgccggagccatattcttcaccggagctctcctcatgggcttggccacgaactacgccttcctcatggtcggtcggttcgtagccggaatcggcgtcggctacgccctcatgatcgctccggtctacaacgccgaggtctctccggcgtcttctcgcggcgctctcacgtctttcccggaggtctttgtcaatattggcatattattggggtacgttgccaactatgccttctccgggcttccgattgatttgggctggcggctcatgctcggagttggcgtatttccctccgttattctcgccgtcggtgtcttatcaatgcctgagtcgccccgctggcttgtcatgcagggtcggctcggcgaggccaagcaagtcctcgacaaaacctcggactccttggaagaggctcagcttcggctagctgacatcaaagaagccgcgggcatccctgagcattgcgttgaagacgttgttcaggttcccaagcacagccacggcgaggaagtgtggaaggagttgctcctccatccaacgccccctgttcgtcacattttaatagcagccattggtttccacttcttccaacagttgtcaggtatcgacgccctcgttttgtacagcccaaggatctttgaaaaggctgggatcaccgactccagcacgttgctgctcgcaacagtggccgttggattttccaagaccattttcaccctggttgccataggtttcctcgatcgagtcggacgacgcccgttgcttctaacgagcgtggccgggatgatagcctcgcttctctgtctcggtacgagcctcacaatcgtcgatcatgaaaccgagaagatgatgtgggcgtctgttttgtgcttgaccatggtattagcctacgtcgggttcttctcgatcgggatggggcccattgcgtgggtctacagctctgagatcttcccgttgaagctacgtgctcaaggttgcagcatgggaacagccgtgaataggattatgagtggagtcctctcaatgagttttatctcgctgtataaggcgataacgatgggggggaccttctttctttatgcaggaattgctacggttggttgggtgttcttttatacaatgctcccggaaacacagggtagaacccttgaagacatggaggtcttgtttggcaagttctggaggtggagagaaggctatgcactgctcagaaacaaaagggccgtcgtatgctagtgagtatacttgggtgatgtggtatatgaaagcacttgaactctagagtagggtgtttgattgaaaaattgttgtatgcgtcggttatatatttgtcgctacaaatgctcctattagagaagacagtagcgctcggcctggtcctatttttggaggtccgatggtcggagaagaagccaagtcaatcatggagcgtgttactactacccatgaaatttcttctatgaagattttagtacaagttaagatgaacgaaacaatagttaagatgaaatttgttatatatgtattgtgccaaatttgttttccatttgttgcttttaaaaaaaaaaaaaaaaaaaa

SEQ ID NO: 442 - protein, 509 aa, Prunus cerasus
MTDRRAQDNAVSGQPLLKKKPKRNLYAIGCAILASMTSILLGYDIGVMSGASIYIQKDLKISDVEVEILIGILNLYSLIGSAAAGRTSDWIGRRYTIVFAGAIFFTGALLMGLATNYAFLMVGRFVAGIGVGYALMIAPVYNAEVSPASSRGALTSFPEVFVNIGILLGYVANYAFSGLPIDLGWRLMLGVGVFPSVILAVGVLSMPESPRWLVMQGRLGEAKQVLDKTSDSLEEAQLRLADIKEAAGIPEHCVEDVVQVPKHSHGEEVWKELLLHPTPPVRHILIAAIGFHFFQQLSGIDALVLYSPRIFEKAGITDSSTLLLATVAVGFSKTIFTLVAIGFLDRVGRRPLLLTSVAGMIASLLCLGTSLTIVDHETEKMMWASVLCLTMVLAYVGFFSIGMGPIAWVYSSEIFPLKLRAQGCSMGTAVNRIMSGVLSMSFISLYKAITMGGTFFLYAGIATVGWVFFYTMLPETQGRTLEDMEVLFGKFWRWREGYALLRNKRAVVC

SEQ ID NO: 443 - DNA, 2032 bp, Prunus cerasus
  CDS (74)..(1690)
gcacgaggcacttctgcaatttgaggccatttttctaggcaactgtccagtctctgtctctgtctctaagaagatggctgaccggagagctgaatataatgccgtcgtctccggccaaccccagaaaaacatagcagactttgatcccccggggaagccaaagagaaacaagtacgcctttgcttgtgccatcttggcttccatgacttccatcttgcttggttacgatattggtgtgatgagtggagctgtaatctacataaaaaaagacctcaaagtcagcgacgtagaaattgaggttcttgtcggtattctgaacctttactccctcatcggctcggccgcagctggcagaacttccgactggatcggccgtcggtacaccatagtcctcgctggagccatcttcttcgccggagctctcctcatgggatttgcccccaactatgcctttctcatgttcggccggtttgtcgccggaattggagtcggctacgccctcatgatcgctccggtctacaccgccgaggtctctccggcgtcgtctcgtgggttcctcacatctttcccagaggtgtttatcaatgctgggatattgttcggctacgtgtccaattatggcttctcaaagctcccaactcacttgggatggcggctcatgctcggtgtgggagccatcccctctattttcctagccatcggcgtcttagccatgcccgagtcgcctcgttggctcgtcatgcagggtcggctcggcgacgccaggaaagtcctcgacaaaacctcagactccctagaagagtccaagcttcggctaggcgaaatcaaagaagccgccggcatccccgaacactgcaacgacgacatcgttgaggtcaagaagcgcagccaaggccaagaagtgtggaaacagttgctccttcgtccaacaccggccgtccgtcatattttaatgtgtgccgttggtttacacttctttcagcaagcgtcaggtatagacgccgtcgttttgtacagcccaaggatctttgagaaggctgggatcaccaaccccgaccatgtcctactctgcaccgtcgccgttggattcgtcaagaccgttttcatcttggtcgccacgtttatgctcgatcggatcggaagacgtccgttgcttctaactagtgtggccggcatggtattcacgcttgcatgtctcggtttgggccttacgattatcgatcacagcggggagaagatcatgtgggctattgctttgtccttgaccatggtattagcatacgtcgcgttcttctcgatcgggatgggccccatcacatgggtctacagctctgagatcttcccgttgcagctacgtgctcagggttgcagtataggagtggccgtgaacagggtggtgagtggggtcctctcgatgacttttatttctctgtataaggccatcacaattggcggggccttctttctttttgcggcaattgcagcggttggttggacgttctttttcacaatgctcccagaaacacagggtagaacccttgaggacatggaagtcttgtttggaaaattctacaggtggagaaaagccaatgcactcctcaaacagaagaagcaagttgatcatggtgatggcaacaacaatcccaacaaccctcaaatccaattgggaacaaaagggcaagctaattagattagttaatccacttgatggtagtatattgtagtagatatagactcttaaaagttattgtgtgcttcagttatatgtaattcacaagtacaagtatttcttctctgaatcggctataaaagatgaaggggttttcgacgaaagagaggaaaaaagagtttgtaagcaatcaagaaaaacaaagttcagatcaaattaattagatatgtattgtacaagtttgtgcttcaaaatgtgtttttccatttggaacttttatttgtacttttccaaagcaatgagaatagggccacaatcgacccatgatagataaaaaaaaagaaaaaaactcgaaggggggcc

SEQ ID NO: 444 - protein, 538 aa, Prunus cerasus
MADRRAEYNAVVSGQPQKNIADFDPPGKPKRNKYAFACAILASMTSILLGYDIGVMSGAVIYIKKDLKVSDVEIEVLVGILNLYSLIGSAAAGRTSDWIGRRYTIVLAGAIFFAGALLMGFAPNYAFLMFGRFVAGIGVGYALMIAPVYTAEVSPASSRGFLTSFPEVFINAGILFGYVSNYGFSKLPTHLGWRLMLGVGAIPSIFLAIGVLAMPESPRWLVMQGRLGDARKVLDKTSDSLEESKLRLGEIKEAAGIPEHCNDDIVEVKKRSQGQEVWKQLLLRPTPAVRHILMCAVGLHFFQQASGIDAVVLYSPRIFEKAGITNPDHVLLCTVAVGFVKTVFILVATFMLDRIGRRPLLLTSVAGMVFTLACLGLGLTIIDHSGEKIMWAIALSLTMVLAYVAFFSIGMGPITWVYSSEIFPLQLRAQGCSIGVAVNRVVSGVLSMTFISLYKAITIGGAFFLFAAIAAVGWTFFFTMLPETQGRTLEDMEVLFGKFYRWRKANALLKQKKQVDHGDGNNNPNNPQIQLGTKGQAN

SEQ ID NO: 445 - DNA, 2012 bp, Malus domestica
  CDS (104)..(1579)
gcacgaggaagataatgccctccccgcacctccgatcaaagttgatccgcggaagaagcccaagaggaacaagtatgcgctcgcttgtgctattctggcctccatgacttcaatcctgatgggttatgatattggagtgatgagcggagcttcaatctacatcgaaaaggacctcaaggtcacggacacgcaaatcgagatcatgatcggtgttattgaaatctactccctcattgggtccgccatggccggaaaaacttccgactgggtcggccgccgctacaccatagtcatctccggagcgattttcttcatcggagcgattctcatggggttctccaccaactacaccttcctcatgtgcggccgctttgtcgccggcatcggagtcggctacgccctcacgattgctcccgtctacagcgccgaggtctctccgacgtcgtctcgcggcttcctcacgtctttcccagaggtgtttgtgaatattggcatattattggggtatttatccaactatgccttctccttttgccctcttgacttggggtggaggctcatgctcggtgttggcgcaattccctcagttggtcttgccgtcggtgtcttggcaatgcctgagtcgcctcggtggctcgtcatgcagggtcgactcggcgaagccaagcgagtcctggacagaacctcagactccaaagaagagtccatgctcagactagccgacatcaaagaagctgctggaatccccgaggagtgcaatgacgatatcgttcaggtctctggtcacagccacggtgaaggcgtgtggaaggagttgcttgttcatccgacaccaaccgttcgtcatattttaattgcagccatcggtttccacttctttcagcaagcctcaggtatagacgcccttgttttgtacagtccaagagtctttgcaaaggctgggatcaccagcacaaaccaattgctactctgcactgtgggagttggactttccaaaactgtcttcaccttagtcgcgacttttttccttgatcgggttggacggcgtccactactgttaacgagtatggctggtatggtaggtgccctggtgtgtcttggtacaagccttaccattgttgatcaacacgaaggggttagaatgacgtgggcagttattttgtgcttgtgctgcgtattagcctatgtcgggttcttctcaagtgggattgggcccattgcctgggtgtacagctctgagatcttcccgttgaggctgcgggctcaagggtgtggtatgggagtggccgtgaataggttgatgagtggcatcctctcaatgaccttcatttcgttgtataaggccatcacaatgggtggtaccttctttctttatgcggccatcggcactgttggttggatcttcttttttacgatgctcccggaaacacaaggcagaacccttgaagatatggaggtcttgtttggtaagttccacaagtggagaaaagccaataaactgctcgaaaagaaaaagcgagttgctcatggtgatattggcacgagtgatccggacaacagggcgcacctcttagcttagtgagtgaatttaaacaagtactagaactacacaacatctcttgaattaaaacaaatttattgtacgcacccggtatattaagggtgattccgcccactggatcctaattttggaggttcagtggtcgtttactatcctaggaactgcctatccgacgatcgaaaattgctcgtcttaatttggtgacaaaggattgatgattttcgagcccggaaacgaggacggagcttctatccaatgaagaacaccaacctaagatgaagttaggtatgtattgtacaagtttgttggtcggactgtcgttttttcagtatttgccgtggctttttatttgttgtggatacattggcacccaactaccggagaatattgttttggtgtcgattgtaataaaacatttcctcttgaaaaaaaaaaaaaaaaaaaaaaaaaa

SEQ ID NO: 446 - protein, 491 aa, Malus domestica
MTSILMGYDIGVMSGASIYIEKDLKVTDTQIEIMIGVIEIYSLIGSAMAGKTSDWVGRRYTIVISGAIFFIGAILMGFSTNYTFLMCGRFVAGIGVGYALTIAPVYSAEVSPTSSRGFLTSFPEVFVNIGILLGYLSNYAFSFCPLDLGWRLMLGVGAIPSVGLAVGVLAMPESPRWLVMQGRLGEAKRVLDRTSDSKEESMLRLADIKEAAGIPEECNDDIVQVSGHSHGEGVWKELLVHPTPTVRHILIAAIGFHFFQQASGIDALVLYSPRVFAKAGITSTNQLLLCTVGVGLSKTVFTLVATFFLDRVGRRPLLLTSMAGMVGALVCLGTSLTIVDQHEGVRMTWAVILCLCCVLAYVGFFSSGIGPIAWVYSSEIFPLRLRAQGCGMGVAVNRLMSGILSMTFISLYKAITMGGTFFLYAAIGTVGWIFFFTMLPETQGRTLEDMEVLFGKFHKWRKANKLLEKKKRVAHGDIGTSDPDNRAHLLA

SEQ ID NO: 447 - DNA, 1563 bp, Neurospora crassa
  CDS (1)..(1563)
atggtcggcggcggcccccaatctgacaatgtcatccatcggatggccatggatgatcccattccatggtggaagaagccccatctgcggaacatgtacctgcttcttttcccctgtgtcatcggtatcgagatgacgtcggggttcgattcacaaatcatcaactccgcacagttgttgcctgcgtggaaaaaatacttcggccacccaaccggcggctacagcggcattctcgcttccgctcttcctctcggttccgtcctcggtctgcccttcatcccgctgattaacgacaactttggccgtcgatggtgcatcatgtttggttcctgcatcatgatcatcggcacattcattcagggtttttcgaagaacgcccccatgtacatcattgcccgcgccatcattggtttcggtctcccctacgccattgtcgccggctcatgcttgattggcgaactcgcataccccaaggaacgtcccattctgacatccctcttcaacgcctgctacttcatcggcgccatcgtggccgctggctgcacgtatggtacacaacgaattacaaacgattggtcatggcgaattccctcccttcttcaaatggctccttccctcctccaagtcatctttgtcttcttccttccagaatctccgagatacctgatgagtaaacatcgacttgaggaagcaaagaatgtgctcatccgctaccatgccgaaggaaacgcggacagtgacttcgtcaaggcggaaattgccgagatcaaagtcactctcgagattgagttggagcattcgaagcagtcgtgggcggatatgatccggaccgccggtatgcgtcgccgcgtgctcatcggttctttgctcggccttttcactcaactctcaggcaatgtcgtcatttcgtactttctcggtgacgttctcaagttgatcggctacacggatcccagctttcagaccaagtataacttgggtaaccagtgctggagtttggtctgcggtgtcagcgccgcgatggtggttatgcggttccggcgcaggaccatgtacctgacgggcatcttttcgattttggcagtctacgttggctggacggtgtgcacggcggtgtttattgcgtacaagaatcccgtggccgccaagtttagtttgttctggatctatgcttatagtccggcttacaacttgtgtttcaacgctcttacctatacctacctcgtcgaaatcttcccctacgcccaacgcgcccgcggcatcgccatcttccagttctggggcaaggcggcgcagttcttcggcaccaacgtcaacccgatcggcacccaggccattggctggaagtacctgcttgtgtactgctgctggatctttgccgaggcggcgctcatctggttcttgtggccggagacgtcgaatcgtagtttggaggagttggctttcttgtttgagaataaggaagacctggctcagttgcagcagaagagggtagagactgaaaagggggttggagaactggataatgagaagcattctgttgttcacgagaggcaggtttga

SEQ ID NO: 448 - protein, 520 aa, Neurospora crassa
MVGGGPQSDNVIHRMAMDDPIPWWKKPHLRNMYLLLFPCVIGIEMTSGFDSQIINSAQLLPAWKKYFGHPTGGYSGILASALPLGSVLGLPFIPLINDNFGRRWCIMFGSCIMIIGTFIQGFSKNAPMYIIARAIIGFGLPYAIVAGSCLIGELAYPKERPILTSLFNACYFIGAIVAAGCTYGTQRITNDWSWRIPSLLQMAPSLLQVIFVFFLPESPRYLMSKHRLEEAKNVLIRYHAEGNADSDFVKAEIAEIKVTLEIELEHSKQSWADMIRTAGMRRRVLIGSLLGLFTQLSGNVVISYFLGDVLKLIGYTDPSFQTKYNLGNQCWSLVCGVSAAMVVMRFRRRTMYLTGIFSILAVYVGWTVCTAVFIAYKNPVAAKFSLFWIYAYSPAYNLCFNALTYTYLVEIFPYAQRARGIAIFQFWGKAAQFFGTNVNPIGTQAIGWKYLLVYCCWIFAEAALIWFLWPETSNRSLEELAFLFENKEDLAQLQQKRVETEKGVGELDNEKHSVVHERQV

SEQ ID NO: 449 - DNA, 1614 bp, Neurospora crassa
  CDS (1)..(1614)
atgacagacaacccagaagagcccttgatcgccaacactcaatcgacggagagggaccaagatgatggcagccatgatgtcgaacatgcgcatgattcccggggagggaaacagcacatatcaccgcccggcctgttcatctggctactcaccttttccgccggaataagcggtctactcttcggctacgacacaggcgtaataagcgccacccttgtctctatcggtacctccctctcgcaccggcccctgacctcgctcgacaaatccgtcatcacctcatgcacctccctcttcgccctgctcgcgctacccttcgcctccgcgctcgccgacgaccggggccgcaagcgcgttgtcctcttcgccgacaccctcttcatcatcggcgccctctgccaggccgccagccggaccgtcgaggtcatggtaattgggcggtcggttgtcggcatagccatcggcgccgccagcttcgtgacgccgctgtacattgccgagctggcgcctgcgacgcaccgcggccggttggtgacgatgaacattgtgtttatcacgcttgggcaggtggttgcgtacgtggtaggctggatctttgggacgtatggtagtccggagacgacggggtggagatggatggtcgggttgggcgcggtgccggcggtttgtcaggtggtcatcttgttgtggatgccggagagcccgaggtggttggtgaaggacggaaggtcgcaagaggcaagagcggtgattgctaagattgccgcgggggatgatgcgcaggatccgtcgacgaggagggaagtggatgctgtgttgaagagcatcgagattgaggtgagagaggaggctacggctatgagactgggtggcgccggggccgggtatgcaaatgggaatgcagtgaatgcgtggatggaggctatgcgggaactgatcagggtgaggaggaacagacgggcattggcaattgcttgtctcctccagggtcttcagcagctgtgcggatttaactcgctcatgtacttctcggccacgatattcacgatggtggggttttcagagccgactttgacctcgctagtcgttgcagtcaccaactttgccttcaccttagttgccctggtgttgatcgaccgggtgggaaggagacgcattctactctggtctcttccctttatgattgcaggtctggtgcttgccggctatggcttttcgttcatcgagctcccgaattcagagaccagctcgccctcgacaacgggaggtcagggcggggccgtcattattttggcgagcatcatgatttatgtggctggctatgccatcggactgggcaatgtgccctggatgcagagcgagctcttctcactgagtgttcggtcagtgggcagtggtgttgcaacagcgaccaactggagcgccaactttgtgattggactgacgttccttccgctgatggaggccttgtcgccgtcttggacgtttgtcctgtacgcagtgatctgcgcggttgggtatggcctgatttggacggtataccctgaaaccgcagggctgagcttggaagatgcggcgacccttctagaagcggatgactggggggtgcggtaa

(The sequence listing continues in the following parts.)

1. A process for the production of a fine chemical, which comprises
(a) increasing or generating the activity of a protein encoded by a nucleic acid sequence as shown in table I, column 5, in an organelle of a non-human organism, or
(b) increasing or generating the activity of a protein encoded by a nucleic acid sequence as shown in table I, column 5, which are joined to a nucleic acid sequence encoding a transit peptide in a non-human organism, or in one or more parts thereof; or
(c) or increasing or generating the activity of a protein encoded by a nucleic acid sequence as shown in table I, column 5, which are joined to a nucleic acid sequence encoding chloroplast localization sequence, in a non-human organism, or in one or more parts thereof, and
(d) growing the organism under conditions which permit the production of a fine chemical in said organism.

2. The process of claim 1, wherein the activity of a protein as shown in table II, column 5 is increased or generated in the plastid of a microorganism or plant.

3. The process of claim 1, wherein the transit peptide is derived from a nucleic acid sequence encoding a protein finally resided in the plastid stemming from an organism selected from the group consisting of the genera:
Acetabularia, Arabidopsis, Brassica, Capsicum, Chlamydomonas, Cururbita, Dunaliella, Euglena, Flaveria, Glycine, Helianthus, Hordeum, Lemna, Lolium, Lycopersion, Malus, Mesembryanthemum, Nicotiana, Oenotherea, Oryza, Petunia, Phaseolus, Physcomitrella, Pinus, Pisum, Raphanus, Silene, Sinapis, Solanum, Spinacea, Synechococcus, Triticum and Zea.

4. The process of claim 1, wherein the transit peptide is derived from the nucleic acid sequence encoding a protein selected from the group consisting of
ribulose bisphosphate carboxylase/oxygenase, 5-enolpyruvyl-shikimate-3-phosphate synthase, acetolactate synthase, chloroplast ribosomal protein CS17, Cs protein, ferredoxin, plastocyanin, ribulose bisphosphate carboxylase activase, tryptophan synthase, acyl carrier protein, plastid chaperonin-60, cytochrome c₅₅₂, 22-kDA heat shock protein, 33-kDa Oxygen-evolving enhancer protein 1, ATP synthase γ subunit, ATP synthase δ subunit, chlorophyll-a/b-binding proteinII-1, Oxygen-evolving enhancer protein 2, Oxygen-evolving enhancer protein 3, photosystem I: P21, photosystem I: P28, photosystem I: P30, photosystem I: P35, photosystem I: P37, glycerol-3-phosphate acyltransferases, chlorophyll a/b binding protein, CAB2 protein, hydroxymethyl-bilane synthase, pyruvate-orthophosphate dikinase, CAB3 protein, plastid ferritin, ferritin, early light-inducible protein, glutamate-1-semialdehyde aminotransferase, protochlorophyllide reductase, starch-granule-bound amylase synthase, light-harvesting chlorophyll a/b-binding protein of photosystem II, major pollen allergen Lol p 5a, plastid CIpB ATP-dependent protease, superoxide dismutase, ferredoxin NADP oxidoreductase, 28-kDa ribonucleoprotein, 31-Ma ribonucleoprotein, 33-Ma ribonucleoprotein, acetolactate synthase, ATP synthase CF₀ subunit 1, ATP synthase CF₀ subunit 2, ATP synthase CF₀ subunit 3, ATP synthase CF₀ subunit 4, cytochrome f, ADP-glucose pyrophosphorylase, glutamine synthase, glutamine synthase 2, carbonic anhydrase, GapA protein, heat-shock-protein hsp21, phosphate translocator, plastid ClpA ATP-dependent protease, plastid ribosomal protein CL24, plastid ribosomal protein CL9, plastid ribosomal protein PsCL18, plastid ribosomal protein PsCL25, DAHP synthase, starch phosphorylase, root acyl carrier protein II, betaine-aldehyde dehydrogenase, GapB protein, glutamine synthetase 2, phosphoribulokinase, nitrite reductase, ribosomal protein L12, ribosomal protein L13, ribosomal protein L21, ribosomal protein L35, ribosomal protein L40, triose phosphate-3-phosphoglycerate-phosphate translocator, ferredoxin-dependent glutamate synthase, glyceraldehyde-3-phosphate dehydrogenase, NADP-dependent malic enzyme and NADP-malate dehydrogenase.

5. The process of claim 1, wherein the
increasing or generating the activity of a protein in an organelle of a non-human organism is in an organelle of a microorganism or plant, or
in the plastid of a microorganism or plant, or in one or more parts thereof.

6. The process of claim 5,
wherein the increasing or generating the activity of a protein in an organelle of a microorganism or plant is through the transformation of the organelle,
wherein the increasing or generating the activity of a protein in the plastid of a microorganism or plant, or in one or more parts thereof is through the transformation of the plastid; and
wherein the growing of the organism is under conditions which permit the production of the fine chemical in said organism or in the culture medium surrounding the organism.

7. The process of claim 1, comprising increasing or generating in a non-human organism or a part thereof the expression of at least one nucleic acid molecule comprising a nucleic acid molecule selected from the group consisting of:
a) a nucleic acid molecule encoding a polypeptide shown in table II, columns 5 and 7 or a fragment thereof, which confers an increase in the amount of a fine chemical in an organism or a part thereof;
b) a nucleic acid molecule comprising a nucleic acid molecule shown in table I, columns 5 and 7;
c) a nucleic acid molecule whose sequence can be deduced from a polypeptide sequence encoded by a nucleic acid molecule of (a) or (b) as a result of the degeneracy of the genetic code and conferring an increase in the amount of a fine chemical in an organism or a part thereof;
d) a nucleic acid molecule which encodes a polypeptide which has at least 50% identity with the amino acid sequence of a polypeptide encoded by the nucleic acid molecule of (a) to (c) and conferring an increase in the amount of a fine chemical in an organism or a part thereof;
e) a nucleic acid molecule which hybridizes with a nucleic acid molecule of (a) to (c) under stringent hybridization conditions and conferring an increase in the amount of a fine chemical in an organism or a part thereof;
f) a nucleic acid molecule which encompasses a nucleic acid molecule which is obtained by amplifying nucleic acid molecules from a cDNA library or a genomic library using the primers as shown in table III, column 7 and conferring an increase in the amount of a fine chemical in an organism or a part thereof;
g) a nucleic acid molecule encoding a polypeptide which is isolated with the aid of monoclonal antibodies against a polypeptide encoded by one of the nucleic acid molecules of (a) to (f) and conferring an increase in the amount of a fine chemical in an organism or a part thereof;
h) a nucleic acid molecule encoding a polypeptide comprising the consensus sequence shown in table IV, column 7 and conferring an increase in the amount of a fine chemical in an organism or a part thereof; and
i) a nucleic acid molecule which is obtainable by screening a suitable nucleic acid library under stringent hybridization conditions with a probe comprising one of the sequences of the nucleic acid molecule of (a) to (h) or with a fragment thereof having at least 15 nt, preferably 20 nt, 30 nt, 50 nt, 100 nt, 200 nt or 500 nt of the nucleic acid molecule characterized in (a) to (h) and conferring an increase in the amount of a fine chemical in an organism or a part thereof.
or comprising a sequence which is complementary thereto.

8. The process of claim 1, comprising recovering of the free or bound fine chemical.

9. The process of claim 7, comprising the following steps:
(a) selecting an organism or a part thereof expressing a polypeptide encoded by the nucleic acid molecule
(b) mutagenizing the selected organism or the part thereof;
(c) comparing the activity or the expression level of said polypeptide in the mutagenized organism or the part thereof with the activity or the expression of said polypeptide of the selected organism or the part thereof;
(d) selecting the mutated organism or part thereof, which comprises an increased activity or expression level of said polypeptide compared to the selected organism or the part thereof;
(e) optionally, growing and cultivating the organism or the part thereof; and
(f) recovering, and optionally isolating, the free or bound fine chemical produced by the selected mutated organism or part thereof.

10. (canceled)

11. An isolated nucleic acid molecule comprising a nucleic acid molecule selected from the group consisting of:
a) a nucleic acid molecule encoding of a polypeptide as shown in table II, columns 5 and 7 or a fragment thereof, which confers an increase in the amount of a fine chemical in an organism or a part thereof;
b) a nucleic acid molecule comprising a nucleic acid molecule shown in table I, columns 5 and 7;
c) a nucleic acid molecule whose sequence can be deduced from a polypeptide sequence encoded by a nucleic acid molecule of (a) or (b) as a result of the degeneracy of the genetic code and conferring an increase in the amount of a fine chemical in an organism or a part thereof;
d) a nucleic acid molecule which encodes a polypeptide which has at least 50% identity with the amino acid sequence of a polypeptide encoded by the nucleic acid molecule of (a) to (c) and conferring an increase in the amount of a fine chemical in an organism or a part thereof;
e) a nucleic acid molecule which hybridizes with a nucleic acid molecule of (a) to (c) under stringent hybridisation conditions and conferring an increase in the amount of a fine chemical in an organism or a part thereof;
a nucleic acid molecule which encompasses a nucleic acid molecule which is obtained by amplifying nucleic acid molecules from a cDNA library or a genomic library using the primers as shown in table III, column 7 and conferring an increase in the amount of a fine chemical in an organism or a part thereof;
g) a nucleic acid molecule encoding a polypeptide which is isolated with the aid of monoclonal antibodies against a polypeptide encoded by one of the nucleic acid molecules of (a) to (f) and conferring an increase in the amount of a fine chemical in an organism or a part thereof;
h) a nucleic acid molecule encoding a polypeptide comprising the consensus sequence shown in table IV, column 7 and conferring an increase in the amount of a fine chemical in an organism or a part thereof; and
i) a nucleic acid molecule which is obtainable by screening a suitable nucleic acid library under stringent hybridization conditions with a probe comprising one of the sequences of the nucleic acid molecule of (a) to (h) or with a fragment thereof having at least 15 nt, preferably 20 nt, 30 nt, 50 nt, 100 nt, 200 nt or 500 nt of the nucleic acid molecule characterized in (a) to (h) and conferring an increase in the amount of a fine chemical in an organism or a part thereof,
whereby the nucleic acid molecule distinguishes over the sequence as shown in table I A or I B, columns 5 and 7 by one or more nucleotides; or
whereby the nucleic acid molecule is joined to a nucleic acid sequence encoding a transit peptide or to a chloroplast localization signal.

12. (canceled)

13. The isolated nucleic acid molecule of claim 11, wherein the transit peptide is derived from a nucleic acid sequence encoding a protein finally resided in the plastid stemming from an organism selected from the group consisting of the Genera Acetabularia, Arabidopsis, Brassica, Chlamydomonas, Cururbita, Dunaliella, Euglena, Flaveria, Glycine, Helianthus, Hordeum, Lemna, Lolium, Lycopersion, Malus, Mesembryanthemum, Nicotiana, Oenotherea, Oryza, Petúnia, Phaseolus, Physcomitrella, Pinus, Pisum Raphanus, Silene, Sinapis, Solanum, Spinacea, Triticum and Zea.

14. The isolated nucleic acid molecule of claim 11, wherein the chloroplast localization signal originates from a viroid.

15. The isolated nucleic acid molecule of claim 11, wherein the transit peptide is derived from the nucleic acid sequence encoding a protein selected from the group consisting of
ribulose bisphosphate carboxylase/oxygenase, 5-enolpyruvyl-shikimate-3-phosphate synthase, acetolactate synthase, chloroplast ribosomal protein CS 17, Cs protein, ferredoxin, plastocyanin, ribulose bisphosphate carboxylase activase, tryptophan synthase, acyl carrier protein, plastid chaperonin-60, cytochrome c₅₅₂, 22-kDA heat shock protein, 33-kDa Oxygen-evolving enhancer protein 1, ATP synthase γ subunit, ATP synthase δ subunit, chlorophyll-a/b-binding proteinII-1, Oxygen-evolving enhancer protein 2, Oxygen-evolving enhancer protein 3, photosystem I: P21, photosystem I: P28, photosystem I: P30, photosystem I: P35, photosystem I: P37, glycerol-3-phosphate acyltransferases, chlorophyll a/b binding protein, CAB2 protein, hydroxymethyl-bilane synthase, pyruvate-orthophosphate dikinase, CAB3 protein, plastid ferritin, ferritin, early light-inducible protein, glutamate-1-semialdehyde aminotransferase, protochlorophyllide reductase, starch-granule-bound amylase synthase, light-harvesting chlorophyll a/b-binding protein of photosystem II, major pollen allergen Lol p 5a, plastid ClpB ATP-dependent protease, superoxide dismutase, ferredoxin NADP oxidoreductase, 28-kDa ribonucleoprotein, 31-kDa ribonucleoprotein, 33-kDa ribonucleoprotein, acetolactate synthase, ATP synthase CF₀ subunit 1, ATP synthase CF₀ subunit 2, ATP synthase CF₀ subunit 3, ATP synthase CF₀ subunit 4, cytochrome f, ADP-glucose pyrophosphorylase, glutamine synthase, glutamine synthase 2, carbonic anhydrase, GapA protein, heat-shock-protein hsp21, phosphate translocator, plastid ClpA ATP-dependent protease, plastid ribosomal protein CL24, plastid ribosomal protein CL9, plastid ribosomal protein PsCL18, plastid ribosomal protein PsCL25, DAHP synthase, starch phosphorylase, root acyl carrier protein II, betaine-aldehyde dehydrogenase, GapB protein, glutamine synthetase 2, phosphoribulokinase, nitrite reductase, ribosomal protein L12, ribosomal protein L13, ribosomal protein L21, ribosomal protein L35, ribosomal protein LAO, triose phosphate-3-phosphoglycerate-phosphate translocator, ferredoxin-dependent glutamate synthase, glyceraldehyde-3-phosphate dehydrogenase, NADP-dependent malic enzyme and NADP-malate dehydrogenase.

16. A nucleic acid construct which confers the expression of the nucleic acid molecule of claim 11, comprising one or more regulatory elements.

17. A vector comprising the nucleic acid molecule of claim 11 or a nucleic acid construct of which confers the expression of the nucleic acid molecule of claim 11 comprising one or more regulatory elements.

18. The vector as claimed in claim 17, wherein the nucleic acid molecule is in operable linkage with regulatory sequences for the expression in a prokaryotic or eukaryotic, or in a prokaryotic and eukaryotic, host.

19. A host cell, which has been transformed stably or transiently with the nucleic acid molecule of claim 11, with a vector comprising the nucleic acid molecule, or with a nucleic acid construct which confers the expression of the nucleic acid molecule of claim 11 comprising one or more regulatory elements.

20. The host cell of claim 19, which is a plant cell or a microorganism.

21. (canceled)

22. A polypeptide encoded by the nucleic acid molecule as claimed in claim 11 whereby the polypeptide distinguishes over the sequence as shown in table II A or II B, columns 5 and 7 by one or more amino acids.

23. An antibody, which binds specifically to the polypeptide as claimed in claim claim 22.

24. A plant tissue, propagation material, harvested material, plant, or plant resistant to a herbicide comprising the host cell as claimed in claim 19.

25. A process for the identification of a compound conferring increased fine chemical production in a plant or microorganism, comprising the steps:
(a) culturing a plant cell or tissue or microorganism or maintaining a plant expressing a polypeptide encoded by the nucleic acid molecule of claim 11 conferring an increase in the amount of a fine chemical in the plant cell, tissue, microorganism, or plant, or a part thereof and a readout system capable of interacting with the polypeptide under suitable conditions which permit the interaction of the polypeptide with the readout system in the presence of a compound or a sample comprising a plurality of compounds and capable of providing a detectable signal in response to the binding of a compound to said polypeptide under conditions which permit the expression of said readout system and of the polypeptide encoded by the nucleic acid molecule of claim 11 conferring an increase in the amount of the fine chemical in the plant cell, tissue, microorganism, or plant, or a part thereof;
(b) identifying if the compound is an effective agonist by detecting the presence or absence or increase of a signal produced by said readout system.

26. The process of claim 25, further comprising formulating the compound identified in a form acceptable for an application in agriculture.

27. A composition comprising the nucleic acid molecule of claim 11, a polypeptide encoded by the nucleic acid molecule, a nucleic acid construct which confers the expression of the nucleic acid molecule of claim 11 comprising one or more regulatory elements, a vector comprising the nucleic acid molecule, an antibody which binds specifically to the polypeptide, and optionally an agricultural acceptable carrier.

28. (canceled)

29. A cosmetic, pharmaceutical, food or feed composition comprising the nucleic acid molecule of claim 11, a polypeptide, a nucleic acid construct which confers the expression of the nucleic acid molecule of claim 11 comprising one or more regulatory elements, a vector comprising the nucleic acid molecule, an antibody which binds specifically to the polypeptide, or a host cell, plant, plant tissue, or harvested material comprising the nucleic acid molecule.

30. (canceled)
